United States Patent Application Publication US 2005/0153317 A1 - sequence listing, part 17

SEQ ID NO: 74405 - DNA, 599 bp, Chicken  19866894356857_3
  misc_feature (1)..(75): n is any nucleotide
nnnnnnnnnnnnnnnnnnnnnnnnnnnnnnnnnnnnnnnnnnnnnnnnnnnnnnnnnnnnnnnnnnnnnnnnnnntaatgacaatgtgaagagatccggcctctaatttagacctataatacttgtagaaatgacagcaaatgacagtagatctgattaaatagattggcagctgaagcccaaggatactctaactaatagtctgcttcagcttaacaggaacaaggtgctcagtggtgctatctcactttacaaccrgcatgtaatttytgtttcatatcaaagcagatgaagttatcrtaaggaggttaaaagatacaaagttcagggtatttaaagctgtgcaagctaaggtactttttgcccactcttgacagctatttattctcagaagtcatcttttgggtccctgggaccattgtggagcccaggtaacctgagagctgacggtttccaagttgagtgatgggattgaaaatgccagcaaagtcctgatcctggggtcatctcagtttcttcagcatttggrtttaattttcttttgtttgtttgctgtagcgtggttcaatagcagggataacgacacctacgtgtagcaa

SEQ ID NO: 74406 - DNA, 600 bp, Chicken  19866894356857_4
ctcagtggtgctatctcactttacaaccrgcatgtaatttytgtttcatatcaaagcagatgaagttatcrtaaggaggttaaaagatacaaagttcagggtatttaaagctgtgcaagctaaggtactttttgcccactcttgacagctatttattctcagaagtcatcttttgggtccctgggaccattgtggagcccaggtaacctgagagctgacggtttccaagttgagtgatgggattgaaaatgccagcaaagtcctgatcctggggtcatctcagtttcttcagcatttggrtttaattttcttttgtttgtttgctgtagcgtggttcaatagcagggataacgacacctacgtgtagcaaccatcagtgttgtctcttctgtagagacagaagtaaatacagtctaattctgctgttatgacatggcaatagtacaatttgggtttacattagtagcagattgctttttcagcagagacaaatggttgtatctttcctaagtattgtctatgytttcactcagtttgtgaatttctggatgtctttaatctcatctgctttttgcattatgctctggaagctttttggtg

SEQ ID NO: 74407 - DNA, 600 bp, Chicken  19866894356857_5
tccaagttgagtgatgggattgaaaatgccagcaaagtcctgatcctggggtcatctcagtttcttcagcatttggrtttaattttcttttgtttgtttgctgtagcgtggttcaatagcagggataacgacacctacgtgtagcaaccatcagtgttgtctcttctgtagagacagaagtaaatacagtctaattctgctgttatgacatggcaatagtacaatttgggtttacattagtagcagattgctttttcagcagagacaaatggttgtatctttcctaagtattgtctatgytttcactcagtttgtgaatttctggatgtctttaatctcatctgctttttgcattatgctctggaagctttttggtgttgttcagtgccttaattatatttgtatcagaaagctttgtagagatgagcactccttaaaagaacacgtgggagtggggagtgagcagatcttggctcagtgccccagatgtgccacaaagggaggctttccatccactcccaattttcacttaaaaaaaaaaaaaaaaaaaaatcacaaattacctgtttgcatctgtaggagccttttgccactgaacac

SEQ ID NO: 74408 - DNA, 599 bp, Chicken  19866894356864_1
  misc_feature (1)..(159): n is any nucleotide
nnnnnnnnnnnnnnnnnnnnnnnnnnnnnnnnnnnnnnnnnnnnnnnnnnnnnnnnnnnnnnnnnnnnnnnnnnnnnnnnnnnnnnnnnnnnnnnnnnnnnnnnnnnnnnnnnnnnnnnnnnnnnnnnnnnnnnnnnnnnnnnnnnnnnnnnnnnnnnnacattctgatcactgtgatcttgcaaaactgcattacaaacctggacttgcaaaacatgaaacaaaaatattcagcagagaatcattcacagaatatttagacacaaattataacgtacatttgcccatgagtgacactcwctttctttccacctaattccagcgtaaatatttctttaactgaatgtacaggaaactatcacagcccgaaagtaggaggaaccacacactcagaaaaggagtcaacaagcaatgaatccgcaaccctgcacctctgccattacagcccaagtttggacttaatattgtactaccagaactgcacaagaaaagaagaaaaaacactcaaactgctaaatacaacctttaagctttgataaaagagatgaaactcaattaggtgacacttcaacagtgcacaactttttttcctgcaggaa

SEQ ID NO: 74409 - DNA, 600 bp, Chicken  19866894356864_2
tttccacctaattccagcgtaaatatttctttaactgaatgtacaggaaactatcacagcccgaaagtaggaggaaccacacactcagaaaaggagtcaacaagcaatgaatccgcaaccctgcacctctgccattacagcccaagtttggacttaatattgtactaccagaactgcacaagaaaagaagaaaaaacactcaaactgctaaatacaacctttaagctttgataaaagagatgaaactcaattaggtgacacttcaacagtgcacaactttttttcctgcaggaagctgcrtatgcacttgagtttctaactaacaatatcactacaagctatggagagctgaaagtgatctaaataactgcaagtatcatctggcctatawttaaaaaaataaaaccaaatattgtctttagttctggtatttcgtaacaaacatcagttgttactaaccatcagtttcaaaactaccttaatccatacattaattcttaatacctcaagagtcattgtgctctttgttttcaaaagaatttaaactaaagcagaagttgctatggtatcccagtaggataagataaaggctaagtaaga

SEQ ID NO: 74410 - DNA, 600 bp, Chicken  19866894356864_3
aggagtcaacaagcaatgaatccgcaaccctgcacctctgccattacagcccaagtttggacttaatattgtactaccagaactgcacaagaaaagaagaaaaaacactcaaactgctaaatacaacctttaagctttgataaaagagatgaaactcaattaggtgacacttcaacagtgcacaactttttttcctgcaggaagctgcrtatgcacttgagtttctaactaacaatatcactacaagctatggagagctgaaagtgatctaaataactgcaagtatcatctggcctatawttaaaaaaataaaaccaaatattgtctttagttctggtatttcgtaacaaacatcagttgttactaaccatcagtttcaaaactaccttaatccatacattaattcttaatacctcaagagtcattgtgctctttgttttcaaaagaatttaaactaaagcagaagttgctatggtatcccagtaggataagataaaggctaagtaagagcagaatttacacagataccatattcacccagtgctatgattgccagtttaagccaaatacttcagttttgtacataatacagatcctttt

SEQ ID NO: 74411 - DNA, 600 bp, Chicken  19866894356865_1
ttgtttgtttttaattccaccgctaacatttgtatccatttttccttgcgtgatggcattctaaagaaaaactttaagaaaattaaaaggacaaaaacaaaaagaaaaaaaaaatcaatgaaagaacacaatgttaagaagcagtaatgtttaagaaagaatcaaaggagaggagagccgctaaaaagactgaaaaagataaagggcaaaggatttaaaaattaaacagaaggaaaaaagattaaagaaagaatggcaaaaggcaatgcaaaaggatttaagaagacagtagaaagaaawgatgttcagttgtaagaaaggaatagcaactactagggaaaaaacacctgaacataatgaatcaataaatggtaataaaaagttagaaattaattaaagagcagacagaaagttaggaaacttcatttttccatgttaaatataggaaataaatatgcgagacacagtgaaattttataagcctactatttactatttcaatcattttcctgctctaaccattttgataagaaaacaaaatacaaagcaataccagtactagaatgcgaattgttatgcagctatttatacctactatgt

SEQ ID NO: 74412 - DNA, 600 bp, Chicken  19866894356868_1
tagagagagaaatctatcagtatatgtgaatgtaatttcagttgcttcattaacatcctgtgcattttaaccaggattttaatcactttggggtaggaactgagaacaaataaaaagtaatcatcagtaccatgaagccaaccctgaagactcacacacaagagaaggaaaggtgaattaataaaacttaagcagtaacacaaaattgagtctatataggaacagtatcctataaaaagacagaaaaggagaagcttgtagagcacatattcctgtaacagatcacgggaaacctacacrttaacacatccctgctgtcaagttttctaacagctaggaaaaccaacagcaaagtgtctcttatctccttttacaacccggtttcctaagagaaatgcaatttagaagtggtaggagttactccacttacccagctactacaagtctgtgttcaggcacatcgcccctggggtccgttccttttgaatgctagacttctctgctacattttaaaggtagaggctagtgacaatgacattacttttaataattcctacaactcttacatttttttgtttaatatattaaatttcactctca

SEQ ID NO: 74413 - DNA, 600 bp, Chicken  19866894356874_1
gttgctccttccatgtgcagaattgagcactttttcttcttaaacttcaggcaattagtgattgctcatctctttaatttgtctagagctctctgcaaggcctttgcagccttgataggatcatcaattcctcaaaatttagtataatcaaaataaagcaggaaccctacaatcagttgcacaggtagccatccagatgggtcttaattatttccatagaaggagactccataacctctctgggcagcctgttccagtggtccatcacccttaccatacctaaggtctttcgcatgttartatggaacgtcctatacacaagttttaggccattaatccttgtctcattactacataccaccgagaaaagcctggccttatccatttgcctctcacctccccttggatacttataaacatttaccagattccccctcagtcttcttttccccaggctgaccagactcaagttactcagctttgtctcatatctgaggtgctctaagccctttattaactttgtggccctctgctggacaccttcaaggagatccctgtgaaatggcactgaagcgcaaccagctcttgtgggtctcctta

SEQ ID NO: 74414 - DNA, 600 bp, Chicken  19866894356875_1
cctgattcccttccatttcctctaattaaagaacaggcattcttccatgaaatgacttatgttacgcatttcattttcattaccaaatgctcctttctactcacatgctcaacattactgatagctgtagccacccaatatgatccaggtttcatgcaatttattacatattgaattgtttatttcacttctaaattgctcagcttacttctgtcctgtttagacaatcctttagaaggacttcaagcactggacagtgtgattgctaaactgagattaaatatgcagctctctgagctwttaaagtggcactttctaactcaaatagaaatagatcaaataactgtctgcattattgtttttcttctcacagctaatccctgtgatctcagtgttgctttctattacactgattacaaaacacagtttaaagttaaacaggattaaaaaaaaacccgtagtgctgtgactcccaacctaattcctgacaaacctgtgatgcacccagatgtgctttccctcaggatgaaatgatacatggctctctttgtattaccactgcacagacatgtttactccaccaaatttgctcacatgggc

SEQ ID NO: 74415 - DNA, 413 bp, Chicken  19866894356895_1
taagccccacgcagggcttataaagatgctacccttcccctctgagcatgaccacggctacagcaaacacaggaaccaagagagagatgagaactccatctcagccttttatgggctgttctcttagaagattacctcatattgacagaaaaagtccacgttcgcacagaatccatcacagcccttggtctgttgttccagcaggtaattatggctggaagttgaaatatgaacctccttggtttgaatttctctcagttgagctccttacccctggactcgctcttgttttatcccagrgaagcagagaaggaaaattagctttattgactcacagcaagttgctcttcatttattccaggtatacaagaagagaatcagccccactgggagttactgttgatttactatag

SEQ ID NO: 74416 - DNA, 599 bp, Chicken  19866894356900_1
  misc_feature (1)..(41): n is any nucleotide
nnnnnnnnnnnnnnnnnnnnnnnnnnnnnnnnnnnnnnnnnaggtctttgctgtgcttgggatgggagtcccagagcccagatctgctgagacctatttggggtgagggcatggggaccccataaacctcctgtacggagccatggttcttccctggaaattagactcaaaaagcccttgaaggctgaggatgggcaccccatgaattcagcagctccttcaaatcagaagagaatagacaatgtagcaatgtgagcttttgatttaaaagaacttgcttttggtggggtttttttgttkgtttgtttgtttgttttttgttttggtgtggggggtggtggtgatggttttctttttgcgtctgattttatgaagtacagcagagaccttctctaataatactgatcttcaggaaatgtgaggatgcgtgcgctgcttccagccacccagggtgctgcaggtgtggggagtgctgagggtgcttcagagaggaagaaggagggagagaaaagcttctggggtgaagtgattgtccttcagctcatcaaaactccttgctcagggctagaacaaatcagccaagacctatctctttcacc

SEQ ID NO: 74417 - DNA, 600 bp, Chicken  19866894356906_1
tactgagtgctttggagcttggggagacactatgaagcccacacagggagccatgcacctcatccacctcatccagtgcacaaacgactgcttccaagcacactcctccaagagaaggggccacagccccacaccagcatagactacctgccattgggctcagcatagctcagtgatgtcaggcattggtgagaggccacaaggtggtgaagccacagtattacactgacttacttgagttgtgagaataaaacccagctagcatgctcctgctggcaatgcaaacattgtttgccattyctatgggtgctatcactcttagactctttagatctcaggtctttaatctacattttggttgagttctttttgcatgttctctgtgttgtggctgccaggcaggagagagcagtgttttctcacttaccctccatggtgcctctgacctcactgttgaaatgttttaaaatgtgtctgctgaataccaagcaaacatgccagctgctgtggaatttctattgcacctcttgtctatggaaacatgtactgcttcagcwctagaagtgccgtgaagttggtagtgtgccctggtggcaatga

SEQ ID NO: 74418 - DNA, 600 bp, Chicken  19866894356906_2
gctagcatgctcctgctggcaatgcaaacattgtttgccattyctatgggtgctatcactcttagactctttagatctcaggtctttaatctacattttggttgagttctttttgcatgttctctgtgttgtggctgccaggcaggagagagcagtgttttctcacttaccctccatggtgcctctgacctcactgttgaaatgttttaaaatgtgtctgctgaataccaagcaaacatgccagctgctgtggaatttctattgcacctcttgtctatggaaacatgtactgcttcagcwctagaagtgccgtgaagttggtagtgtgccctggtggcaatgaaggccaaccacatattgggctgcatcactaagaacacagctactgttttcagggacattattcttacatagttttgtggcacttataagggcatatctggatacagtgagtagtgtgtaccccagtaaaaactggagaaagaacagcagagaccagaaaagcacttaggggctgaagcctgccatgaggaatggttacagaaatgaagcttctttagatgggagatgagaaagctgaggggggaaactacaccctct

SEQ ID NO: 74419 - DNA, 600 bp, Chicken  19866894356915_1
tggtggtcagcacgctccccacagtttacaaaattggcaatcattttcttctaattgatgcttatctgtgatgtcttcactctgttccttttggtttcattgtacatattaggtggatttatttctctccctttctgatatgcgctgtacacaataaagcaacagtgattctcccacatcacggccttggaccggtgatgaaagacagacatgagctgaaaagcaaatattaaaggaaaatattaaaggaaattattaatagttaatagtggtttagctgatgtttgtcagggcaggagmcacaaatctacttcatataagaaaatttattcctaagatagattgtctataactrttaacagccaaatctttctgcaagactattgatatggtaaagccacagaaattaaaatccaaacaagtttcccctcaacatacatagactcctgagttctaccaaactgagtgatcacctctttgaggtgcttagaggatcacttataaagcataattttctgcacataacttacatggaagaccttctcaatcttactggagatttcttcatatcagtagttctgctggaactatgcggagctg

SEQ ID NO: 74420 - DNA, 600 bp, Chicken  19866894356915_2
tgatgcttatctgtgatgtcttcactctgttccttttggtttcattgtacatattaggtggatttatttctctccctttctgatatgcgctgtacacaataaagcaacagtgattctcccacatcacggccttggaccggtgatgaaagacagacatgagctgaaaagcaaatattaaaggaaaatattaaaggaaattattaatagttaatagtggtttagctgatgtttgtcagggcaggagmcacaaatctacttcatataagaaaatttattcctaagatagattgtctataactrttaacagccaaatctttctgcaagactattgatatggtaaagccacagaaattaaaatccaaacaagtttcccctcaacatacatagactcctgagttctaccaaactgagtgatcacctctttgaggtgcttagaggatcacttataaagcataattttctgcacataacttacatggaagaccttctcaatcttactggagatttcttcatatcagtagttctgctggaactatgcggagctgcctggtagaatcaaatacaaatctgttctgtgagaaacagctccacaggttggtt

SEQ ID NO: 74421 - DNA, 600 bp, Chicken  19866894356916_1
ggcagccaggaatcacagaacgataaggaattcccacagccgggctgtgctgctcgcttctccttccctggactgactccagctctcactcttggcaacagctcttggccactggagagaagaaaattttctcctccctccacccatctgactcactgctcccaaaacacttccttcaaagtcccagtctgggatccccgctgtgtgaccccacgcccgggtacagaaccaccgggatccccattttacaacagattacttcaggtctggcagcaaaatgctcacattggcaaagtcccragaaacaaaccacagcaaagtcaaagagaagctcgaccagcaattactgccttcctgaagtgagggaagcccagcgtgcctctcagctcttgggaaggctctctgtactaagatgattctgctgccagcrccaagatgcgccgtgggattcagtgcactgagagacgttgggtatatctggctgtcatttaggatttctccacaaagcaatgcagagatacaccagccggctcccagcagcaacaggaaggcctcttccagtaaaatcccatgggacgcagctttacctcagtgatgtac

SEQ ID NO: 74422 - DNA, 600 bp, Chicken  19866894356916_2
ctcctccctccacccatctgactcactgctcccaaaacacttccttcaaagtcccagtctgggatccccgctgtgtgaccccacgcccgggtacagaaccaccgggatccccattttacaacagattacttcaggtctggcagcaaaatgctcacattggcaaagtcccragaaacaaaccacagcaaagtcaaagagaagctcgaccagcaattactgccttcctgaagtgagggaagcccagcgtgcctctcagctcttgggaaggctctctgtactaagatgattctgctgccagcrccaagatgcgccgtgggattcagtgcactgagagacgttgggtatatctggctgtcatttaggatttctccacaaagcaatgcagagatacaccagccggctcccagcagcaacaggaaggcctcttccagtaaaatcccatgggacgcagctttacctcagtgatgtacacaaagattcccccttcctcccgttattatttcccagtatttcaaacagcaagagccccgttctgaacaaagaaccgttctgctttcgttatctgaacagctttggcagagacacagtaatgcatttcac

SEQ ID NO: 74423 - DNA, 600 bp, Chicken  19866894356921_1
gctggaacagaacccaggtgccccagaaggaagcgcagtgccctgctgcactcctgacctgagcacaccgccctgccttccagatggctccttttacactgtgttactcactggtactgacttcatagttctaaactactgttctacatagtactgttagtaaatctgtggagcctcccaaatgatagcagaaatcgaaactgctacatcacatgtgggagacagcatggccatggatgtgaaggggatacagggggtttcagagatgcatctgaaaggcatctctcagccctggctggmgcacaggtaatgtctacgtactggaaaagacatgaacacgggctgggacctgctgtgctggcagctgaaaggagaagcagacagtaaagcgcagtcacaagttaaccagtgtgaaagaatgtgagcggtacacctcagacctgctcaccctttcccacttatgagtgacaggcagccactggtctcaatgatatcacaaagtgcattcccaaacctgcccatgtctgccaggcgtgtgccccggcgtccaggacgtccagctgggtttgggaggaggcggcacccagcgggtgtctgagt

SEQ ID NO: 74424 - DNA, 600 bp, Chicken  19866894356925_1
tgctcttcgtgagctgacatgtcctgggtgggtcaccagccagcagcgatgctccaggccactttgtgcatctactgcttggtttccaaggcaggatttggctgttggtttagttgggacttgcatttgggaacactttagaaatgaggggggaaaaacccagttgtattttgtatttcacagagtaaaaatgcatatagtcatactatattagggaaaaaatattttctctcagcgttcttatttggttacattcttgtaagttttatttttggagatgaggaatggctctgcggtcasagagacgtgagaaggaggtgatatgtgcctgtgaggtcactgtctcatctgaaacacatttcctctgctcatgggattccgtttgcagcaacgattgtgagcacctgcactcgtgtccatgcagccactgcacgcctgtctgattcagctggctgccattccaataattaacttattgattttgatagtagattttaaaatggaggttagcatccttccaccaggagatgtgaggacattgctttgggttttgcatgcaacccaaggcaatccagcttgtggattccaagatgtgcgtga

SEQ ID NO: 74425 - DNA, 600 bp, Chicken  19866894356926_1
ctgaactaggaagacctaaagatttagcaaagcattcaggctacaatccagtgtttttttgtcacttacttgtctaaataacacataaaaggctcctacacttcaggccaggctctccatgaaatgtgtagaacaggagaggtgcgaatggaaaccttggtggcattaggtgctgtttttccaaacattccccatcagtaagcaggcagcctctcagcacagcacggtcccactgagctctttaagttgtatttctaggatttctctaaaccaggggcctcaagcttttaaacacaaagrgagctggggaatggtttccttagcaagagatttgagcaaatcagtgctttttgtctcactttttttttttttccccctcctatggacatctgctggggtttgtattttttaagtcatgggggtgaagggggctgagggggaagggagaggtctgcagacaaggcaagcacaacttactctggaaagattcccggatgctataaatgggagccccctcacagtgcagctcatctgaagcaaaatgaaaatatcaggcatccaagaaacatatgtgcagatggcttagagcccagcctcctt

SEQ ID NO: 74426 - DNA, 600 bp, Chicken  19866894356932_1
aaaatcactaaatcacagtttaattcatccctttttctttattttctagccactgaaaaagtttgatatatcaggctcatcctcactgggagtgctcaaggaaaatgggacaggcacaaagggtgaggggttgctgtaggcagacagactaggttacagctgccaccttaagggtcagtacttgttggcccaaaataagatggatgcaacctgacaactttgttcaaggccacaagtagcctgctgcaaacccttcctatggaggtgtcccatggaggtattgtaatacagtttacaaaycctgtatgtgacctgctatacttctcaggtttcctcacactcttgctcctggtcacgtgcctatagctttaacttcagttttgaagtgctcaagagctgtaacaggcatttctgtgacatatacatgtgactggaagcctgggccccaaagttgcttatttataggctgcttgacaagtccagctcctatttctgaagcaggcacttacatttgtaaccattgtgacccatatacatctcattctgcttaggtcttctgatctcttgtgctgtctctacatagaacatataaggtagaac

SEQ ID NO: 74427 - DNA, 600 bp, Chicken  19866894356937_1
gaggcagcagagccagagccgagcctggggcggccgcagccagcggagcgggagatgtggcaggacatggaggacagcagcgagttctacgctgggggtaaacaggtccaagtggggcccgggctcttctacacctcgccgctcttccctttgctggcctctgaggtggcctcggcccagaagcagctcagcagtatggtgcagctggccaagtgccactgccgcagggacaacctctggaagcgtctcttccttctggagcccctggcttctgacaagctgaagctgggcaagctgtcrctggtggagctggaggagctgctcgatgctgtgcacgggaaatccattgccggatgtggacccgcagctggtgagcagcagggctgtggttgtggtgtcctgctctggggagggactggggcctgcaggacgcatttcctgttgggtaggaaggcagaggcaagtgtatgtcctctagctggcaagaggaggaggaagctgcacagatccatctatggagggttactaggccctggatcagtgtgcctcgctgggctttgagagatgcatctttttttggatctgagtgctgctgtcaca

SEQ ID NO: 74428 - DNA, 599 bp, Chicken  19866894356941_1
  misc_feature (1)..(66): n is any nucleotide
nnnnnnnnnnnnnnnnnnnnnnnnnnnnnnnnnnnnnnnnnnnnnnnnnnnnnnnnnnnnnnnnnntcatgtgccctgggagatgcctgtgccagggtgacttgggagatcttatggcccagtgacggacttctggaggctgttggttttggtgcccatttaggtttttatcctcccactgaggtttttgcaccttttcagcagaaacctgctggccctgcctccttgtccacttcagtgcctaatgaacctgatcatttgctcccagagagtgaaatccacccaaaaacagcctgcgaraacctgagactggagcagagcctgctacaggcagcactgyactgctactctgtttcctggtctttgggaaagctatggcttgtgcctcatcctatactctaaccctaaccctgaccccgacccctaaggtcttcccctttagcttctgccagaagacaccctgayrcccatgtacctccagcacaacagctgcctctcttgaggtctcccctcctgcagccccacaccccacagtgactttgcttggtgcttttgcagggtgctgctggagcaagcagatctcaccctcgctcacagtg

SEQ ID NO: 74429 - DNA, 599 bp, Chicken  19866894356941_2
  misc_feature (1)..(26): n is any nucleotide
nnnnnnnnnnnnnnnnnnnnnnnnnntcatgtgccctgggagatgcctgtgccagggtgacttgggagatcttatggcccagtgacggacttctggaggctgttggttttggtgcccatttaggtttttatcctcccactgaggtttttgcaccttttcagcagaaacctgctggccctgcctccttgtccacttcagtgcctaatgaacctgatcatttgctcccagagagtgaaatccacccaaaaacagcctgcgaraacctgagactggagcagagcctgctacaggcagcactgyactgctactctgtttcctggtctttgggaaagctatggcttgtgcctcatcctatactctaaccctaaccctgaccccgacccctaaggtcttcccctttagcttctgccagaagacaccctgayrcccatgtacctccagcacaacagctgcctctcttgaggtctcccctcctgcagccccacaccccacagtgactttgcttggtgcttttgcagggtgctgctggagcaagcagatctcaccctcgctcacagtggctctgctccccgggctttgcagagaccaagaaggtggag

SEQ ID NO: 74430 - DNA, 600 bp, Chicken  19866894356941_3
ttttatcctcccactgaggtttttgcaccttttcagcagaaacctgctggccctgcctccttgtccacttcagtgcctaatgaacctgatcatttgctcccagagagtgaaatccacccaaaaacagcctgcgaraacctgagactggagcagagcctgctacaggcagcactgyactgctactctgtttcctggtctttgggaaagctatggcttgtgcctcatcctatactctaaccctaaccctgaccccgacccctaaggtcttcccctttagcttctgccagaagacaccctgayrcccatgtacctccagcacaacagctgcctctcttgaggtctcccctcctgcagccccacaccccacagtgactttgcttggtgcttttgcagggtgctgctggagcaagcagatctcaccctcgctcacagtggctctgctccccgggctttgcagagaccaagaaggtggagcggatggaggaggaggttgaggagctgaaggcaaaactgcgtgagatgcagcagcagctggcagcagggagggaggcagagaagctgtgcagggagcaggtatggcaggaaggagggaagagatgt

SEQ ID NO: 74431 - DNA, 600 bp, Chicken  19866894356941_4
tttatcctcccactgaggtttttgcaccttttcagcagaaacctgctggccctgcctccttgtccacttcagtgcctaatgaacctgatcatttgctcccagagagtgaaatccacccaaaaacagcctgcgaraacctgagactggagcagagcctgctacaggcagcactgyactgctactctgtttcctggtctttgggaaagctatggcttgtgcctcatcctatactctaaccctaaccctgaccccgacccctaaggtcttcccctttagcttctgccagaagacaccctgayrcccatgtacctccagcacaacagctgcctctcttgaggtctcccctcctgcagccccacaccccacagtgactttgcttggtgcttttgcagggtgctgctggagcaagcagatctcaccctcgctcacagtggctctgctccccgggctttgcagagaccaagaaggtggagcggatggaggaggaggttgaggagctgaaggcaaaactgcgtgagatgcagcagcagctggcagcagggagggaggcagagaagctgtgcagggagcaggtatggcaggaaggagggaagagatgtg

SEQ ID NO: 74432 - DNA, 600 bp, Chicken  19866894356944_1
caaagcatccgagcgggcagcccggcctcacccgcacccgtgggctatgggatgtgatgtgtggggctcgtggtgcagcggggaaagggcgcgttgcatcacggcgtgaatcggggctttgttaccgacgttgcacaaggcgagaggcagagagcgaagcagcagcaaaggagtaaggagctgaaaaatattacaaaatcttaatccgccccatgagaccctctagggtgctttcaaatacagagagaaattgcctaattagctttttttttttttcctttttttttttttttttttttyctcctaatggataattgccttcatgagcttccacaggcagcttagcaaccttttaccatcsgcgcacacgctgcatggtgcagccaaacgcttctgaaaggggttttatacctttcccgaagagctgctgacagtaaacctcaagcaatacaggctggggctgtaatgggcacttgggtgtcgttagtaaaaacactattcagagctcgccggtcaatacgtgttcacataaaagggcaatgttctaatattcataatcccatggcccacagggcagggctttaatgaaagtctgcacag

SEQ ID NO: 74433 - DNA, 600 bp, Chicken  19866894356944_2
tggggctcgtggtgcagcggggaaagggcgcgttgcatcacggcgtgaatcggggctttgttaccgacgttgcacaaggcgagaggcagagagcgaagcagcagcaaaggagtaaggagctgaaaaatattacaaaatcttaatccgccccatgagaccctctagggtgctttcaaatacagagagaaattgcctaattagctttttttttttttcctttttttttttttttttttttyctcctaatggataattgccttcatgagcttccacaggcagcttagcaaccttttaccatcsgcgcacacgctgcatggtgcagccaaacgcttctgaaaggggttttatacctttcccgaagagctgctgacagtaaacctcaagcaatacaggctggggctgtaatgggcacttgggtgtcgttagtaaaaacactattcagagctcgccggtcaatacgtgttcacataaaagggcaatgttctaatattcataatcccatggcccacagggcagggctttaatgaaagtctgcacagttctgggctgctcaacatcaaaggggcccgtaaagctccccctgcacgctgacagcagcag

SEQ ID NO: 74434 - DNA, 599 bp, Chicken  19866894356949_1
  misc_feature (1)..(29): n is any nucleotide
nnnnnnnnnnnnnnnnnnnnnnnnnnnnntcttgaaataattgataagatgggaaagatacaacttacctctcacgtagtatttatctgccccaggagaacctgctttttgcaatgctgagtacctagaagagactcactgttctcaactcctctcactggcttccacacctgtgcccactaattttccaattcatctgtaattcgtgcttcttgaaacaagctgtgtgtaagttatgcccaccacaagagacatgtttagtcatctgaatgcttgaagctattgggaaaggttgggatrcttttgatgagactttcttttcaagccttgggctgaccacagacagtatcagacacagctatrtattttgctgtctrttcacaggatgtaatgcttgagaagtaaggtcagctgagartaattctctataaaggaatttggtttcagaaaacattctgacagggctgggatgagtgagtaccctactgggacaaccctcagccagacacatccctcgtagagaggtgaggatagaagtctcttagcatttgtcttaagagaaattccaaatcttgaggacttaattaaatcttctcttg

SEQ ID NO: 74435 - DNA, 600 bp, Chicken  19866894356949_2
cttacctctcacgtagtatttatctgccccaggagaacctgctttttgcaatgctgagtacctagaagagactcactgttctcaactcctctcactggcttccacacctgtgcccactaattttccaattcatctgtaattcgtgcttcttgaaacaagctgtgtgtaagttatgcccaccacaagagacatgtttagtcatctgaatgcttgaagctattgggaaaggttgggatrcttttgatgagactttcttttcaagccttgggctgaccacagacagtatcagacacagctatrtattttgctgtctrttcacaggatgtaatgcttgagaagtaaggtcagctgagartaattctctataaaggaatttggtttcagaaaacattctgacagggctgggatgagtgagtaccctactgggacaaccctcagccagacacatccctcgtagagaggtgaggatagaagtctcttagcatttgtcttaagagaaattccaaatcttgaggacttaattaaatcttctcttgtaaggactttcaaaccaaaggaggtctggagctgatgccctaaagctctaagcgtgggtcacag

SEQ ID NO: 74436 - DNA, 600 bp, Chicken  19866894356949_3
agtatttatctgccccaggagaacctgctttttgcaatgctgagtacctagaagagactcactgttctcaactcctctcactggcttccacacctgtgcccactaattttccaattcatctgtaattcgtgcttcttgaaacaagctgtgtgtaagttatgcccaccacaagagacatgtttagtcatctgaatgcttgaagctattgggaaaggttgggatrcttttgatgagactttcttttcaagccttgggctgaccacagacagtatcagacacagctatrtattttgctgtctrttcacaggatgtaatgcttgagaagtaaggtcagctgagartaattctctataaaggaatttggtttcagaaaacattctgacagggctgggatgagtgagtaccctactgggacaaccctcagccagacacatccctcgtagagaggtgaggatagaagtctcttagcatttgtcttaagagaaattccaaatcttgaggacttaattaaatcttctcttgtaaggactttcaaaccaaaggaggtctggagctgatgccctaaagctctaagcgtgggtcacaggttattggggccac

SEQ ID NO: 74437 - DNA, 600 bp, Chicken  19866894356949_4
gagtacctagaagagactcactgttctcaactcctctcactggcttccacacctgtgcccactaattttccaattcatctgtaattcgtgcttcttgaaacaagctgtgtgtaagttatgcccaccacaagagacatgtttagtcatctgaatgcttgaagctattgggaaaggttgggatrcttttgatgagactttcttttcaagccttgggctgaccacagacagtatcagacacagctatrtattttgctgtctrttcacaggatgtaatgcttgagaagtaaggtcagctgagartaattctctataaaggaatttggtttcagaaaacattctgacagggctgggatgagtgagtaccctactgggacaaccctcagccagacacatccctcgtagagaggtgaggatagaagtctcttagcatttgtcttaagagaaattccaaatcttgaggacttaattaaatcttctcttgtaaggactttcaaaccaaaggaggtctggagctgatgccctaaagctctaagcgtgggtcacaggttattggggccacacgcactttgggataggaccagattccgtgccggatctttc

SEQ ID NO: 74438 - DNA, 600 bp, Chicken  19866894356950_1
acacagaagtgagattgttccaggtcctggtttttaatctcaactttctaccttgcgtttaatactctagtttgttaggcgaggttcagactgcttagtcttcagggtcagtcagaaaggggctaatgaataaatgcctcttggcattgtcatttttttatgttcatacgtgtattctctaggaaacaaacagtggccaaatgaaatttatttaatattcatttaatcatgaccaacaattcattgaatttcttacggcgaatgctatctcaaagcagcaacaacattttaagctcaagsagggaaggtttaggctggatgccaggggaaagttctttacagagagagtgctgaggtgctggaaacggccgcccagcgaggctgtggatgccccatccctgtaggtgttcaagaccaggctggatggggccctggacaacctgttccagatcaacaagatctggaggttggtggccctgcctgtggcagtgggattggaacctggtgattcctggggtcccttccaactcaagcggttctatgattgtatgaaaattcacaatctgccaggaaaaaacaaaacaacaacaacaacaacaa

SEQ ID NO: 74439 - DNA, 600 bp, Chicken  19866894356952_1
atcttcctgcattcatccggcattcagcacttttgaagattgaattccccagctgtttctgacagagtgctgtgaaaataggacagagaaattcagctgaactttttaaaaagaagcttaccctggtaagcaggaagaatgacagcataacctaaaggtattcacactcaagtagaccgagtttctcaacttattttgcacaggacacaaaacaaccatcattgaagaccagggtcagatttgacctactgaactaggcttgaaataaagcaacaacatgcagaagttctggtctcctcrgtaaagtcatcktgtatgtgctttggtttattctgtctagcagtgtcccactgagaaaggcttaagcaggtgcaaaaaataaaggttttcctttttttttttttctggtagagagttaattcctctgaagtctcctccgcgcaggcaaccttctcctgtgcattgggagcctccgcagctgagtatttccacgcctctggctctgcagaacgttaattcggatgggaaggagagctttgttgatgacattgagcctttcattcagttcttctagccttttccgtattgcctggacttccc

SEQ ID NO: 74440 - DNA, 600 bp, Chicken  19866894356952_2
tcatccggcattcagcacttttgaagattgaattccccagctgtttctgacagagtgctgtgaaaataggacagagaaattcagctgaactttttaaaaagaagcttaccctggtaagcaggaagaatgacagcataacctaaaggtattcacactcaagtagaccgagtttctcaacttattttgcacaggacacaaaacaaccatcattgaagaccagggtcagatttgacctactgaactaggcttgaaataaagcaacaacatgcagaagttctggtctcctcrgtaaagtcatcktgtatgtgctttggtttattctgtctagcagtgtcccactgagaaaggcttaagcaggtgcaaaaaataaaggttttcctttttttttttttctggtagagagttaattcctctgaagtctcctccgcgcaggcaaccttctcctgtgcattgggagcctccgcagctgagtatttccacgcctctggctctgcagaacgttaattcggatgggaaggagagctttgttgatgacattgagcctttcattcagttcttctagccttttccgtattgcctggacttccctcacaagattct

SEQ ID NO: 74441 - DNA, 600 bp, Chicken  19866894356961_1
tgcacattgtcacttctttcctcagcatcaatacaaagggctcttcagaaaaattcattataagcaacaaaaacacaaatgggcacactggtctgtagaacttttctttcattacagaagaagaggcacattttgaagtcatacttcattgatagaagtagcacagaagactaaagtaatacgaatttgcaggggcaaaacttttatatataaaaggtcttgattctaaatcagactgataaaaaaatcccacaaaaacattttattaggcaacttcaaagaagggaaaagagccacatytatatatacactgcatgctgcatgtttactgagcaaactaggaaacctgaaataccttaaaacaaccaaactgatcatattctaaatgtattagttaaaactacaaggtcaagaaatcagtaaaacattcaggattcccatccctaaatgctcctgaataaatatttgtaactccagtttctgaaatgaaatatacctttctttaagcttgctctgagattccttcagctttgttttcaaatgccgtactgtgacttccttctgctgcagaggagtcaaatactgctctggattttgtgg

SEQ ID NO: 74442 - DNA, 600 bp, Chicken  19866894356961_2
agtaaaacattcaggattcccatccctaaatgctcctgaataaatatttgtaactccagtttctgaaatgaaatatacctttctttaagcttgctctgagattccttcagctttgttttcaaatgccgtactgtgacttccttctgctgcagaggagtcaaatactgctctggattttgtggcttagcactgtggtgatcaacacaagtcaaatatctccccgatcgcctggaaagaaaaaaagaaaagccatcacataacatcacccctatggttcttctctcttagcaaaaaaaaaamaacaaamcaaaaaacaacactgagtgatacaaagctgagtttacacttgattcatgtggggcttctcagtgtcagcacaagtgactcactccgccaagtcaagtacttgaggaaactgctgatatgtggctatcacaaagcatttactatttattgtaattggttgcagtgcaatgatatcaagagttatttaactttgaaatacccatgcatcacctcatctaaaatgcgtggggtgcctgaagagcaggcagccacaccacttgcaatggcacttagctaaagacatggccaagtaag

SEQ ID NO: 74443 - DNA, 600 bp, Chicken  19866894356961_3
cattcaggattcccatccctaaatgctcctgaataaatatttgtaactccagtttctgaaatgaaatatacctttctttaagcttgctctgagattccttcagctttgttttcaaatgccgtactgtgacttccttctgctgcagaggagtcaaatactgctctggattttgtggcttagcactgtggtgatcaacacaagtcaaatatctccccgatcgcctggaaagaaaaaaagaaaagccatcacataacatcacccctatggttcttctctcttagcaaaaaaaaaamaacaaamcaaaaaacaacactgagtgatacaaagctgagtttacacttgattcatgtggggcttctcagtgtcagcacaagtgactcactccgccaagtcaagtacttgaggaaactgctgatatgtggctatcacaaagcatttactatttattgtaattggttgcagtgcaatgatatcaagagttatttaactttgaaatacccatgcatcacctcatctaaaatgcgtggggtgcctgaagagcaggcagccacaccacttgcaatggcacttagctaaagacatggccaagtaagccagtgg

SEQ ID NO: 74444 - DNA, 600 bp, Chicken  19866894356962_1
aatattagtataataatggatgtcccagaaagaaagctggcaaaaccattaaagagagggaacataatagcagacaaactaaacagttcttctgctactatccaagctcattatatctttaaacaaatttgcttgttgtagtttcaaaatattcttcttgttcattttcctctatttaaaaagcttttaaaagaaacatcttcttaaaaatcaaaagtctgggtttctttgcatttgtctgatcatgtaatgttagggtgtgagttaatactcttcagttctttcttttgcaaattgctkccagttgataaaatactgttaaagacaggcttagtaatcagtctccatatgtccatccattactggtagtagtcaaggatggtggatatttctatgctatttccatacagcaacgcaaaggatggtggtacctaccatgacttcagcatgtcactgcaactcacctactgcggagaatgtctctgtgatgtgatgggtctgtgaagattaaggaactagggccttaccacaagcgtttgcttattgccaaccttggtaacacgtgggattacttatggctgggtcctttgccacagcact

SEQ ID NO: 74445 - DNA, 600 bp, Chicken  19866894356969_1
ccttcctggcctcagctccaacttctgcttggtatcagctcctagaaggtcttgtatgtcctcaccgtaaatctccaggcagaaagctctcaccaagaacctgatgctttcagcatgctgtataaaacaggaatgaattcaggaggaggttcacagcatgaagacaagcaggcagcccgcagagtgccagctggacacccacctccctgctgcacctcctcacacctcccatggcatttcatgcccgggtatgactactgaacacatttgcttccaggccttaaatgtctcagacatgcrggactgtatttctgtagagttctatgacagagccagtactgaggtgactgaaatgctgcactyggagtctaaatctccaagtacagatatcacagtactttgcaacacctgacaccacagctccactggaaccaaacctaccctgatggtcacacagcacagttttaccaggagagcagctgagatgggaggataagttactcccagaagtgaaaaacagataaatggcagcaattcactgagaatccaaagtccaaagcagtctatccccatcctcactcccaagtgcaactggcacac

SEQ ID NO: 74446 - DNA, 600 bp, Chicken  19866894356969_2
accgtaaatctccaggcagaaagctctcaccaagaacctgatgctttcagcatgctgtataaaacaggaatgaattcaggaggaggttcacagcatgaagacaagcaggcagcccgcagagtgccagctggacacccacctccctgctgcacctcctcacacctcccatggcatttcatgcccgggtatgactactgaacacatttgcttccaggccttaaatgtctcagacatgcrggactgtatttctgtagagttctatgacagagccagtactgaggtgactgaaatgctgcactyggagtctaaatctccaagtacagatatcacagtactttgcaacacctgacaccacagctccactggaaccaaacctaccctgatggtcacacagcacagttttaccaggagagcagctgagatgggaggataagttactcccagaagtgaaaaacagataaatggcagcaattcactgagaatccaaagtccaaagcagtctatccccatcctcactcccaagtgcaactggcacaccttccttggggtacactcccctcctgctccctgcctgctgctcccctgatgcttttagggtta

SEQ ID NO: 74447 - DNA, 600 bp, Chicken  19866894356972_1
ggggaaaaatactttatccttgatttgatcaaagcagaacagttagtttcataagcagagatgaattcaaccagtaatgatccacggtaagtttttttttttaaatagtggatgcaaaatgtaatttcagaagggagtaagattatcatcagaaatccattcttgaatggattctttaggatatggaacatattgcaaggttctgaaaaaaccacctgttctgtcgtactagtacttcatccctactactgtgaaatcttctgccacgcttccctaggacagcaggcaggtggaagctcrtawggtcacagcatctttagttttctgacttctctgtttaacttgmttttttttgcttcttctccttgtcttcaagaacttaattttgttattgtttcaaaagattcaggaagtgatgaagattttcttatggaagatgatgatgacagtgactatggcagttcaaaaaagaaaaataaaaaggcctccaagaagtccaagccagagaggaaagaaaagaagatgccaaagcccaggctaaaggctacaggtgagcctatgtagaactatgcagtttaawttagagactagaactaattt

SEQ ID NO: 74448 - DNA, 600 bp, Chicken  19866894356972_2
gaaaaatactttatccttgatttgatcaaagcagaacagttagtttcataagcagagatgaattcaaccagtaatgatccacggtaagtttttttttttaaatagtggatgcaaaatgtaatttcagaagggagtaagattatcatcagaaatccattcttgaatggattctttaggatatggaacatattgcaaggttctgaaaaaaccacctgttctgtcgtactagtacttcatccctactactgtgaaatcttctgccacgcttccctaggacagcaggcaggtggaagctcrtawggtcacagcatctttagttttctgacttctctgtttaacttgmttttttttgcttcttctccttgtcttcaagaacttaattttgttattgtttcaaaagattcaggaagtgatgaagattttcttatggaagatgatgatgacagtgactatggcagttcaaaaaagaaaaataaaaaggcctccaagaagtccaagccagagaggaaagaaaagaagatgccaaagcccaggctaaaggctacaggtgagcctatgtagaactatgcagtttaawttagagactagaactaatttttc

SEQ ID NO: 74449 - DNA, 600 bp, Chicken  19866894356972_3
tttcataagcagagatgaattcaaccagtaatgatccacggtaagtttttttttttaaatagtggatgcaaaatgtaatttcagaagggagtaagattatcatcagaaatccattcttgaatggattctttaggatatggaacatattgcaaggttctgaaaaaaccacctgttctgtcgtactagtacttcatccctactactgtgaaatcttctgccacgcttccctaggacagcaggcaggtggaagctcrtawggtcacagcatctttagttttctgacttctctgtttaacttgmttttttttgcttcttctccttgtcttcaagaacttaattttgttattgtttcaaaagattcaggaagtgatgaagattttcttatggaagatgatgatgacagtgactatggcagttcaaaaaagaaaaataaaaaggcctccaagaagtccaagccagagaggaaagaaaagaagatgccaaagcccaggctaaaggctacaggtgagcctatgtagaactatgcagtttaawttagagactagaactaatttttctgctattgaagagtgaacagaagtttyggggccagtaggcatt

SEQ ID NO: 74450 - DNA, 600 bp, Chicken  19866894356972_4
agcaggcaggtggaagctcrtawggtcacagcatctttagttttctgacttctctgtttaacttgmttttttttgcttcttctccttgtcttcaagaacttaattttgttattgtttcaaaagattcaggaagtgatgaagattttcttatggaagatgatgatgacagtgactatggcagttcaaaaaagaaaaataaaaaggcctccaagaagtccaagccagagaggaaagaaaagaagatgccaaagcccaggctaaaggctacaggtgagcctatgtagaactatgcagtttaawttagagactagaactaatttttctgctattgaagagtgaacagaagtttyggggccagtaggcattacagtataatgttgacaggctatatcttctaagtagtaacttaccatgatttaaagtaacacagtgaaatgataatgtgtctttaataactacttaataaagagattgaattcgtatttatgtatcattgacaaaacccgtgttgattgtgagcatctgctggtatgttgcagtctgacattctgtatctcatgaccaattaatktaatttgtggctttgtttgggactcttgg

SEQ ID NO: 74451 - DNA, 600 bp, Chicken  19866894356972_5
tctctgtttaacttgmttttttttgcttcttctccttgtcttcaagaacttaattttgttattgtttcaaaagattcaggaagtgatgaagattttcttatggaagatgatgatgacagtgactatggcagttcaaaaaagaaaaataaaaaggcctccaagaagtccaagccagagaggaaagaaaagaagatgccaaagcccaggctaaaggctacaggtgagcctatgtagaactatgcagtttaawttagagactagaactaatttttctgctattgaagagtgaacagaagtttyggggccagtaggcattacagtataatgttgacaggctatatcttctaagtagtaacttaccatgatttaaagtaacacagtgaaatgataatgtgtctttaataactacttaataaagagattgaattcgtatttatgtatcattgacaaaacccgtgttgattgtgagcatctgctggtatgttgcagtctgacattctgtatctcatgaccaattaatktaatttgtggctttgtttgggactcttggtcattaagatgttttcagggtagaggagctagcagtcctcattcagttca

SEQ ID NO: 74452 - DNA, 600 bp, Chicken  19866894356972_6
tgagcctatgtagaactatgcagtttaawttagagactagaactaatttttctgctattgaagagtgaacagaagtttyggggccagtaggcattacagtataatgttgacaggctatatcttctaagtagtaacttaccatgatttaaagtaacacagtgaaatgataatgtgtctttaataactacttaataaagagattgaattcgtatttatgtatcattgacaaaacccgtgttgattgtgagcatctgctggtatgttgcagtctgacattctgtatctcatgaccaattaatktaatttgtggctttgtttgggactcttggtcattaagatgttttcagggtagaggagctagcagtcctcattcagttcaacttcagtattatagaacgaatataacaccatgtgtggtacagtcaaagcaaaaggaaacctgctgctgcagcgtcttgtaaattctgtctgtataaaggcatgtcactttcttgttttggtagctaataataacttgtataagctttttctttttccagtgactcccagtccagtgaaaggcaaagggaaagcaggtcgccccacagcttccaagacaac

SEQ ID NO: 74453 - DNA, 599 bp, Chicken  19866894356977_1
  misc_feature (1)..(73): n is any nucleotide
nnnnnnnnnnnnnnnnnnnnnnnnnnnnnnnnnnnnnnnnnnnnnnnnnnnnnnnnnnnnnnnnnnnnnnnnnacgaactggtaaatactacgggtaaaagagagctctttctgggtcagaaaagaaaaacacagccatcagcagatacttgagattagacacatctcacctgagacacaccccaatatttgtactctattactgtgatgtgaagactgtgagaacaggaaatcccattcacacatggtggctgtcagtacattatcccatctagctgagttgatgcatgatgattgctrtcttctttcctctacactcatagttcagtaagtacctacacggggcttatttccctcaaggtatacaggccaggtaatgatttcacctcactgtgtagtaatgttttttctcaaaggctgaagagttgccttttttgtgtttctgcttgttgcctaccaagctatcaagccaacaaaccactgtcctctgatgcctgtaaataccaggcttaccaggcttatagacacccttggtctccaagtaataaactaaaatgaactgaattaaaaacttttcagttggggcaatttctaatcag

SEQ ID NO: 74454 - DNA, 600 bp, Chicken  19866894356978_1
tctttggggagatatggcttagtaattgagtgggtagttgaatgatcatgccctggtagctacaggcttttgaaaaggaggaaaagtgaggggagagctgtacagttttcctttaggaagaatgtaacatggattgaatgtatacagcttctgtgaaggctgttggcttaatttagagctcttggttgttttgtgacatccagcgtgaaaataagtgatactgtgattgaaaacattgagtaatgtttgcattctttgctctgtttaaaaaaccaaccaaacaaaaaaacagggaaggtwtactgtttgggtaacttcatctattttaagccagtaagcttactgctacgttattcctgtctctggtcactcattcctgatgcttttattcatgagctttagtgacagaacagctctgacaaaattaactttggggaatgagaggtgcaaacttagagttgaggaaaaatgcatcagtgctagaagaaatgtagtgagcagatggaattgtcctggtggagacctcagcagggaggccaggctgacctatttagccatagcctgcaggagctgatctatgtggattgagaaatgacagca

SEQ ID NO: 74455 - DNA, 600 bp, Chicken  19866894356986_1
tcaactcagagtcttactttcttcatcctccacagatctcacagctatttccattcagagttcatccaaaccattccttgcactgggtacagatttcagcagcagtgttttctaagcacatatttagcgaactgcatgagagggcagctccccatgtagcatgtgcctaccaggcagtcccatggcagcaccaatatcaccatagggaaggaattcagcagagaagagtacctctcaaatatacctttggaattcagcagctccatcctagttcttgcacagcctacctcttgttttggytgwgctttgttgcagctgcacaagacattcagaaagcaacagattcaggacttacatataacttactcctgccaaccacttttctttctgaaaatggagcagaaagacaaaaatgggcctggaacaaaaggctgctagctgctgtggtccctaatacgtgctacttgacagtttttttgttcttgctggctactgcagagatgattaacttacagagagctgaggtgacatttaccttagaaaggcccagcaggtgatgaggagcaaaaatgttgaggtatgttcttgtaattgctgaga

SEQ ID NO: 74456 - DNA, 600 bp, Chicken  19866894356986_2
actcagagtcttactttcttcatcctccacagatctcacagctatttccattcagagttcatccaaaccattccttgcactgggtacagatttcagcagcagtgttttctaagcacatatttagcgaactgcatgagagggcagctccccatgtagcatgtgcctaccaggcagtcccatggcagcaccaatatcaccatagggaaggaattcagcagagaagagtacctctcaaatatacctttggaattcagcagctccatcctagttcttgcacagcctacctcttgttttggytgwgctttgttgcagctgcacaagacattcagaaagcaacagattcaggacttacatataacttactcctgccaaccacttttctttctgaaaatggagcagaaagacaaaaatgggcctggaacaaaaggctgctagctgctgtggtccctaatacgtgctacttgacagtttttttgttcttgctggctactgcagagatgattaacttacagagagctgaggtgacatttaccttagaaaggcccagcaggtgatgaggagcaaaaatgttgaggtatgttcttgtaattgctgagatga

SEQ ID NO: 74457 - DNA, 578 bp, Chicken  19866894356986_3
acaagacattcagaaagcaacagattcaggacttacatataacttactcctgccaaccacttttctttctgaaaatggagcagaaagacaaaaatgggcctggaacaaaaggctgctagctgctgtggtccctaatacgtgctacttgacagtttttttgttcttgctggctactgcagagatgattaacttacagagagctgaggtgacatttaccttagaaaggcccagcaggtgatgaggagcaaaaatgttgaggtatgttcttgtaattgctgagatgagcctgcctgtccagcraggaagcttcttgttagccatatcgttgccctttttcccatcacaagatccccttacctgctccccctgcagctgctgcactgctgagctgaaggcagctgtgcgctggatgtggacatcctgtgcctctcgcttgtgttctggctcttgctgtacctgtaaaccacagcttgctctgtttttcccatcggtccctatgagggagcaatcccaatgagaactagtttctgagctgcctgtctttatctgctttactatgaagcaggaaccagaaggaa

SEQ ID NO: 74458 - DNA, 599 bp, Chicken  19866894356990_1
  misc_feature (1)..(6): n is any nucleotide
nnnnnnattacttataaatagatctctgagatgggattgaaattataagagagtttgcatttaaaaccaatgtgccagtagcaagagctaaaccccaggagagtctgaaatggtacaaaagattgtctttgactgtgagctggagatctgcccgtggcaatcctcaacaagaggaatgcactccctgagtttctttattagcagggatgaaatgctggacaaatagtctcatcttagagactgaaaatgtagctctggctgttactataattggagcaaaatgttatgattgcattaagwctgatatactaactgaaagacagtatcatgatgtttttttgttcaggttcattcagcaagcataagttggcctcacatcataaaaatcagtgggcatcttgcccatgtagaaattgcgtttacttaacacgctgtcagtaaagtaacacaaaatcccatactaatagcaagtggagtgggagagtttgagataaaactgttttaattaaattagaccaggtgttctttggtttggatttatttattttttatttctgtagccttacggatagaacatttttaaactgctgctctgcaga

SEQ ID NO: 74459 - DNA, 600 bp, Chicken  19866894356990_2
tactaatagcaagtggagtgggagagtttgagataaaactgttttaattaaattagaccaggtgttctttggtttggatttatttattttttatttctgtagccttacggatagaacatttttaaactgctgctctgcagacagtgaatcatgattattaatgtaatggagatttctgacattttcctccatagtatccatttaatcagaactggatcaaggtaagagaaatgaagcaactaaaggagcttgttctggctacaaagagcagatttaaaatggctttaatttaaattaaayttgtgggggactaaggacaagaaaaaaatttgaaggatagatatggatggrgaaataaaaatagtggaaaaggttatttagtagaagacaccaaaactacttattctggaatgaaacaggtttagagacaataaaaatgtcaaatgtgaaaattgtaaatgtgcaatatttgtaatcgagcattggtaggacataatactaaatagaaggagaaagaaagggattggcaaagatgaataaattgcataagcaaggttctagctgaccccaaagacattagatcagacctaacacttcaaa

SEQ ID NO: 74460 - DNA, 600 bp, Chicken  19866894356990_3
attagaccaggtgttctttggtttggatttatttattttttatttctgtagccttacggatagaacatttttaaactgctgctctgcagacagtgaatcatgattattaatgtaatggagatttctgacattttcctccatagtatccatttaatcagaactggatcaaggtaagagaaatgaagcaactaaaggagcttgttctggctacaaagagcagatttaaaatggctttaatttaaattaaayttgtgggggactaaggacaagaaaaaaatttgaaggatagatatggatggrgaaataaaaatagtggaaaaggttatttagtagaagacaccaaaactacttattctggaatgaaacaggtttagagacaataaaaatgtcaaatgtgaaaattgtaaatgtgcaatatttgtaatcgagcattggtaggacataatactaaatagaaggagaaagaaagggattggcaaagatgaataaattgcataagcaaggttctagctgaccccaaagacattagatcagacctaacacttcaaattcatcactgagttgcacacatgccaccttccttactagaagatgaaaaca

SEQ ID NO: 74461 - DNA, 600 bp, Chicken  19866894356994_1
caacagtattgtgagctgcaaagagggatgaaaaacaggtagagggaggtgatagtccctctctgttttgctctcatgggactccatctggagtactgaatcccagtctgggttccccagcacaagataattgtggagattttgaactcggttcagaggaggaccacaaaaacaatcagaggttaaagcacctgtcctacaactaaaggttgagagaggtgggcttgctcagcctagagaagggaaggctctggagtgacctcactgtggtcttccagtacttgaaaggagcttatgaamaggagggagaccaaatttttacacagtctgatagtgatcagataggggggaatggcagaaatttagattagatattagaaatatatttatttttttactcagaaatgtgagaaacacactcatgatcaaaactttctaatcaggcaaagatctctgtgaagagcagtttattcattattgcaataatgggcacacaccccctactgacaagggasaaattgcacagctagtcagtaaaatccatcctgttatcatacccttggtccaacgtaggtaaagcctctcctggctctcactggt

SEQ ID NO: 74462 - DNA, 600 bp, Chicken  19866894356994_2
gaggtgggcttgctcagcctagagaagggaaggctctggagtgacctcactgtggtcttccagtacttgaaaggagcttatgaamaggagggagaccaaatttttacacagtctgatagtgatcagataggggggaatggcagaaatttagattagatattagaaatatatttatttttttactcagaaatgtgagaaacacactcatgatcaaaactttctaatcaggcaaagatctctgtgaagagcagtttattcattattgcaataatgggcacacaccccctactgacaagggasaaattgcacagctagtcagtaaaatccatcctgttatcatacccttggtccaacgtaggtaaagcctctcctggctctcactggttgagcatctcaggctcacaatcttccgacactattgctatgttacacttccatagctacggttacacttccatagctatggttacatttccatacaatgcctgttaccaacccattgtctttggggtacgttctggactttttacagtgataggaggacaatatttttggcttgttctgcctttcctttatgctagtgcctgtgccaattctacc

SEQ ID NO: 74463 - DNA, 600 bp, Chicken  19866894356998_1
gcatgcagaattcttactgagtactgaagaaatcagtgaaactttttccatttgtatcactgggcatttgatttgatgtcttctctgtacatagaaaccctgaaaagtgtaccagtttctgtaaaatggtgcagcgctccttttctatacttgagagctcagagagggattataacccacaaacacaccatccatcatccccatgttcctggggagctgtgctactccaccacctactcagagtcacagtaataagaaacagctatgaaatctaaaacctgaacttcacccagtaagaaytgacagattctaatgaaatcaatgccaatatcttgcctatgatttattattttgatgcagactatttaagtttaaactgggtacttcagatgagatggtgagtttcaggggtactgccccatataaaaatgtttgtgtgaattagaagtaaaaaattatgcaaagttgtgtatgttcccacatgttgtcctttccaactgtacatagtcagataaattctttgagagctgaaaattcattactagctgagaaaaactgccagtctgaagatgggtctatttaattcaaaatccattatcc

SEQ ID NO: 74464 - DNA, 600 bp, Chicken  19866894357002_1
tttttggttgtttgttagccttacattttggtataaattgcagcaaacaaaccacagtaacgactctctcacttgttagtcatgtccacgctgcaccctttgcaggcaaaaggaataaacacgtcacttccccattttgtttaataaggtttttctgtcagcttattcaacaccagacatccctctggccagtacagctgcaatctgcacgggctggcatgcgagggctttgtcataagagctctgctgtgtaggtcttgcttccaggaaaatgatgtattgggccttttttttcccccyttgtaattaaatcagcccatgatgatgattgcattattggcttgagtaaagaaaatacatcttccagcaggttagtaaggtagcaggagttatttctgttgtcctaggtatgaaccagaaaaaaattccctcgttagtcttgggaagtggtacgctggcaaattaagtcagagcgagacttggcgtaaccatttgcttgctaacatccaaatagctatgatagagctggtagaagaatggtaactcatgaccgtctttacaggagggacgacttagattaaactacctaaaaatagctac

SEQ ID NO: 74465 - DNA, 600 bp, Chicken  19866894357003_1
ttattaggaatcatatcatctaaacaagaaagccaatgggtctcttgattcctcggcagggataaaacaacagctgttataagttttaaagaggtttattcatttgagcattgtttcttcaagcaagccccatcatatcatgttaattgctgtggcacaggaatggtccttcttttgtggcatcctcctgtctcaggtatccccttacagactgccatgctctgctaactaccaccctctggtggatgctgaactctctgatgggaatagtccataatctgcgtagtcttctttctgatrttatttattatttttaattttaatattacaatataaaaatatttgaaaaaataagaaaaaattccaaactttaatttttgcaaaaggaaaaaagtagaaggaataccagaatttgtttaatctgttgggccataatggccagaggacataaattaacttttcttgatcttcttgaataggttttctttaatcatctattacttatatgagaggcatctcttaagtactttcttatataattaataccttcaaatccagaataaaatttactcaaagtccttattatgaaaaatctatttt

SEQ ID NO: 74466 - DNA, 600 bp, Chicken  19866894357004_1
gcagcattgtgggatctcaaattgaagctccatacaagtcccattatagacatctattccatctcttatattttgccttattaatttgatgatgagtctcagtcacatagtgatacaaatcctacaacagaaactgagataatatatctatgttgtacagtgttgtacagctttggagtctcattagcttagaccttgaaaacagtatatcataccagtattaccatgcagcctcagtgatctgtcctgtttctcaacacacccagtcatcacagaatctgtgcaagagttgacacagtmactttgcttcacaggcaaagagactgtacagttctcctacacaatgtagagatccccccagattctcaataacgtgggattaaccaaactaaatgccttcttggacagacatggtggctgcatattgaagactgcaacctcggacacaaattttgatgcagtaggatcactgcaaaaaaaaaaaaagaagaagaaaaaagaaattatgagggaagaatactcactatgagggaagaatgctcactaaaaaaatcctgtcaaatatgggtgaataccatctattaggctgatctgttctat

SEQ ID NO: 74467 - DNA, 600 bp, Chicken  19866894357015_1
cctccacggggcagtgcaacaacacacgtgtgcgacaagcccacgtgcctctcaaacaatgtgcagggagagggatgtgctaggaaccaaagccaagccccccagcctagccaggtggggcacagggctgggctgcacagcacagagcacaaaggctgggcactgagggcagcagagcatgcagcagctggcttcaaccccctgccagtccacgaagccccatcccgctgctggcaagaacaggctgttcccagcactgtgctcaccgtggcttcctcattcaaagatgctgtttcatcygctggggcctggggcgccgggtcggggtgccctgaggtttctgcagkaggcgccaggtcctcggtgtcctctggtgccagaagggagagatgcaatttggggttgagctgagrgagcacagagcatcacccaaacccacaatgggaataaggggagctcagctcaaagctgaggggagtgggctgcatccaggtcctcatccccgttcccctggggagggggcttgacccaggagtattccacattcccccgcatcccagccaggagctcctcacctgggtgatgccgtttccgagcctg

SEQ ID NO: 74468 - DNA, 600 bp, Chicken  19866894357015_2
cctctcaaacaatgtgcagggagagggatgtgctaggaaccaaagccaagccccccagcctagccaggtggggcacagggctgggctgcacagcacagagcacaaaggctgggcactgagggcagcagagcatgcagcagctggcttcaaccccctgccagtccacgaagccccatcccgctgctggcaagaacaggctgttcccagcactgtgctcaccgtggcttcctcattcaaagatgctgtttcatcygctggggcctggggcgccgggtcggggtgccctgaggtttctgcagkaggcgccaggtcctcggtgtcctctggtgccagaagggagagatgcaatttggggttgagctgagrgagcacagagcatcacccaaacccacaatgggaataaggggagctcagctcaaagctgaggggagtgggctgcatccaggtcctcatccccgttcccctggggagggggcttgacccaggagtattccacattcccccgcatcccagccaggagctcctcacctgggtgatgccgtttccgagcctgcttggcctcctgcagcgtcactgccatgtagagctgcggcagagcag

SEQ ID NO: 74469 - DNA, 600 bp, Chicken  19866894357015_3
ggtggggcacagggctgggctgcacagcacagagcacaaaggctgggcactgagggcagcagagcatgcagcagctggcttcaaccccctgccagtccacgaagccccatcccgctgctggcaagaacaggctgttcccagcactgtgctcaccgtggcttcctcattcaaagatgctgtttcatcygctggggcctggggcgccgggtcggggtgccctgaggtttctgcagkaggcgccaggtcctcggtgtcctctggtgccagaagggagagatgcaatttggggttgagctgagrgagcacagagcatcacccaaacccacaatgggaataaggggagctcagctcaaagctgaggggagtgggctgcatccaggtcctcatccccgttcccctggggagggggcttgacccaggagtattccacattcccccgcatcccagccaggagctcctcacctgggtgatgccgtttccgagcctgcttggcctcctgcagcgtcactgccatgtagagctgcggcagagcagaggtgaatgcgtgcccgtcttctgcactgcagatttggggcaggctctgtgaagagaccagagaca

SEQ ID NO: 74470 - DNA, 600 bp, Chicken  19866894357018_1
tttttggagtgacacaattatatgtacacatgattaaaaataagacataaggtttaagtctatgaaatcattcatgactataatattgattaacttttgtaggaaaagttatagtgctcagtatttccttttcatttgtttcctctcctttttttttctgtcattctccctgtgaactatgaaaataacataagaatgttacatttcagtgaaataactttgaagatattgcaaaataggattactatagctaattaaattacataattccagaaaagtcagttcttttttttagtttarcatcagactatgaatactcaaattcaaaatcctaagtgtatcaagtattgcaggacttcataaagatgattaagttctaaaggtcaaaggtacagctaactactttgcaaattcatgttataatttaataactgcaaggtggtcagtgcactgtttaagtgttctgctggaggctacaaaatgtgcagcttattgacaatttaccaattatctccttagttcagaaccaggcaattatactgtgaacagctttagattacttaattgggatataatagacaaagaaaagaacataaatct

SEQ ID NO: 74471 - DNA, 600 bp, Chicken  19866894357018_2
aaaatggggctttttcttcacttttaaaggtctgtagcttgtgctggtagctctgtagtggtggctggaatgagaacaaagattacaagaaataaagtggaaaatatgaaatgtttctcactgtgaacatatataggaacagctctattggtgtcacctctgcagcacaagaagaaaataaaaccagagtatgttacaccttgttccactgtaataaaattaaaaattgttctcatgaaattccagtgtagtttaacctaatttgttgcaatgcattttcagtttttaaagggttttccwtttataaaaagacagaaaaaagaatggctaaaaaacaagattagagatgctgactacatgactcccaactgaaacagagaaatgaaactgaacagaacagaaactgaaatgcagagaacagaaagggcagtgcataaatatcttcagaccagctatctgaaatgtttcagaatgtttctgttaatacatcaattgaaggtattaatgtcctattttgtttatctattaaatctcatgagtttcaagtgaaatgaaatatgtttttcgtataattaaatggttttcatgactgagtaaaca

SEQ ID NO: 74472 - DNA, 600 bp, Chicken  19866894357029_1
ttttattggggtatgctatatttttactgacatgtttcactcccctgcaatttgtaagttataatactattagatgggatatctactgcaagcttcttcttatcctgtgcattatgaaatctgatatgcagaattactagtggcaagagataaaaacagcaaacagatcaaacagtctccaactaagaaatgaccttagcagcatactggcaaccagcattaaggactcagagacctgcatggattagttctggagccctttgtatctcagatttctgaactgtatgttgatctctaaaycatcctgaatatttcacacttctgacagcaaagatgaattggtggccttaatttccttagaaaagtagtggttgattaaaaggggtraagtatggttctttcagccatataacaatgttgtggtaayattcagattttgctgttggtggtaggaggcaatggagcagttgacttaatattcacttaaatatttccaacacagacaggcttactgttgctggattattgtgttaagtgaaatatttgttttggaaagtgaaggctttgcatctagaagtgttctttaaatgctttttattt

SEQ ID NO: 74473 - DNA, 600 bp, Chicken  19866894357029_2
gcaagcttcttcttatcctgtgcattatgaaatctgatatgcagaattactagtggcaagagataaaaacagcaaacagatcaaacagtctccaactaagaaatgaccttagcagcatactggcaaccagcattaaggactcagagacctgcatggattagttctggagccctttgtatctcagatttctgaactgtatgttgatctctaaaycatcctgaatatttcacacttctgacagcaaagatgaattggtggccttaatttccttagaaaagtagtggttgattaaaaggggtraagtatggttctttcagccatataacaatgttgtggtaayattcagattttgctgttggtggtaggaggcaatggagcagttgacttaatattcacttaaatatttccaacacagacaggcttactgttgctggattattgtgttaagtgaaatatttgttttggaaagtgaaggctttgcatctagaagtgttctttaaatgctttttatttcctgttttgttaccccttcttgttttatcacaacgttgtactgctctaaaaacagtgtttactagtcattcttgttggtaacgccag

SEQ ID NO: 74474 - DNA, 600 bp, Chicken  19866894357029_3
gcagaattactagtggcaagagataaaaacagcaaacagatcaaacagtctccaactaagaaatgaccttagcagcatactggcaaccagcattaaggactcagagacctgcatggattagttctggagccctttgtatctcagatttctgaactgtatgttgatctctaaaycatcctgaatatttcacacttctgacagcaaagatgaattggtggccttaatttccttagaaaagtagtggttgattaaaaggggtraagtatggttctttcagccatataacaatgttgtggtaayattcagattttgctgttggtggtaggaggcaatggagcagttgacttaatattcacttaaatatttccaacacagacaggcttactgttgctggattattgtgttaagtgaaatatttgttttggaaagtgaaggctttgcatctagaagtgttctttaaatgctttttatttcctgttttgttaccccttcttgttttatcacaacgttgtactgctctaaaaacagtgtttactagtcattcttgttggtaacgccagcaagaaaaatagaacagaaagattgagttggccmaggtat

SEQ ID NO: 74475 - DNA, 600 bp, Chicken  19866894357029_4
ggtaayattcagattttgctgttggtggtaggaggcaatggagcagttgacttaatattcacttaaatatttccaacacagacaggcttactgttgctggattattgtgttaagtgaaatatttgttttggaaagtgaaggctttgcatctagaagtgttctttaaatgctttttatttcctgttttgttaccccttcttgttttatcacaacgttgtactgctctaaaaacagtgtttactagtcattcttgttggtaacgccagcaagaaaaatagaacagaaagattgagttggccmaggtatagtgctgctgtgggtacatgccaaaaattatcttctccacttttagttgcagctctattcagaagccagtgtggctcttttgcaactgaataaccccaagggtttccatgaactgagcaaacaagcgaagaagaacatgactatagatggaaaagaattaacgcttaatcctgcttacctattgtgggacctgagctccgtcagtcaggtaggtaaaccctgttacggaatgtaaaggttgcagtgtgcaaaggcttacatgttaactaactaatgacaaggggcatgggattt

SEQ ID NO: 74476 - DNA, 600 bp, Chicken  19866894357030_1
ttcagcaaactgatgaggtttaaagtatgatgaggttagctttgcaacattttctttaacaaattttaagtctaatgaattagccaaatcctgatgcctgtggaaaattccctagtgatatctcaacgacctagaatgttccttagtactttctctagtggttacttaaatgtttgtagtgagattctgacacagagtagtaccctaatctgtccccagttgtgtgggcaattttagtacactgcattatggcaggaatggctgctgcatcattcagttgtatctacacacgccttcttygcttgctctcttgcttttggtttttctccagaacacgttgattctattctccctttctcagagtttgtggagccatcaactgtgaacaggaatgggtgtttagacataaatatgtctaaaaacagttaaaaccactctttgatgtttctttgtttgtttacgaatgtggtatacatattgttttaatgaggaaatagccataattttgctgttagggtgaggaataatcattctctctatggtaaaaccaacgttagccttatttgttgcttaacactgagaaacagatagactttgtca

SEQ ID NO: 74477 - DNA, 600 bp, Chicken  19866894357033_1
gtgggagatctctggccagcctgctgtggcttagacatcttttagacaaaccctagctcagaggatataacacagaagactgctgggaatcctgctctgaatcttgcccccgtcaaagtgctgaattgcagaaccagcatcacgtaggccccactggagaatggagcccaacagggagaagtaagcagttcagcccatcctacagtcctttgggccaaactggctctggcataaattagagtttagtggctactctcatttccactggcttttaatagtctcctgggtgctattatgctkgggagactctggacacaatatgctgcagcattgctctggaggagattccttggggcgggctgagctcctgctgccttgatctgagactcttgcttcaaacaagaaatgagctgcagagcacaggctggtccaaagtcttgagtcatgtttaatacgtactggtccctcagaagcatctccagcaagagggcaggcagcaaagcagaggagtcccttctgcttttacctcaccccagctagccaggatggaacgtgcatagcttctgcacaccgactagagatgtggtcacaacctcagga

SEQ ID NO: 74478 - DNA, 600 bp, Chicken  19866894357035_1
gatttcatacaaattgaaccaatttcaataacagaattttacatttgggagaatattctatagctatgggctaagaacacagtccttggaaatgagtcctaatccttgaagtaagccaccagctagaaaacaaatcaagtcttccacatgctggtgtgctctaaacagtgatcacaaatgtatgtttacaagattcagctttaatatctgttgctcagaagctgaaccttaaatgtaaagtgaactttcacattggataaaagaatcaagaaaatccaaacccaaagaagggtcctgaarattgtgtccatgtccagacacaagtaaagaagagttttgagaatttcagttctcaactgaacttttagtgacaacagatatttaaataactgcagttatatagacatagaaaaaaaaaaaccagaacattttttatcagatgtgacatttttatgaaataatgtatgatacattctcatgaagcaatacagcctttgggtttggaggagggtattttttgttttcagagcaggtaagataattttcaagttaagaactacaccttcttcaaatgatgagcatacagtttccgaggggtgc

SEQ ID NO: 74479 - DNA, 599 bp, Chicken  19866894357048_1
  misc_feature (1)..(19): n is any nucleotide
nnnnnnnnnnnnnnnnnnngaagctcttagtactgaattaccagacactactgggaagacagataattatttttccttctagtattacttctatttccttctagtatcactcagcttggatgttaggaaaaatttcttctccagaagagtggtcaggtgctggaacaggctgcccagggaggtggttgagtcaccattcctggagatattcaagaaacatttagatgttgtactgaaggacacggttgagtggggaaatattagtggtaggtgggcggttggactggatgatcttgaagrtcttttccaaccttggtgattctatgattttatgattctatacttacttctagttgaaaacagcaattcctcgttaggattacatcatccactgctactagcaggaaaagtagaagggaagatccacaggatatgagcaataggaaaaacagtctggatgtaagagcacacaaactctctgtgcacattatagaaatggggatagcccttttctatgaaaaagaaaaacagtgctataccatatagttaacctgacaacacgtaattagagtatagaatgattgccagtcatttagctc

SEQ ID NO: 74480 - DNA, 600 bp, Chicken  19866894357049_1
agatactttctgcctggacattcattgaggattttgacaccacctttcatgagatccttatagaaaagctcttgatgagtgggtctggatgagcagactgggaagtggataagaaagaggctgagcgggtggacccagagagtagtggtcagtgatgcgaaatcttgctggaagagagtaactcgtggtgtaccacaggggtcagcactggctttggtcccatttaaccactgcattaatgatctggatcatagagcacagtgcaccctctgtaagtttgcagatgacgcaaaactctgmggagtgactgatagaccagggaattgtgctgccatccagtgggacctggtcatgctggagaaatgggcaggtaggaaccttgtagagttcagcgaggagaaatgctgtgttgcacwgctttgcaggataggagctgggggtcctggtgggcatcaagttgaacgtgagtcttcagtgtgctcttgtgacaaagaagacttgtggctgcatcaggaaaagtattgacttcagctcctttctcatgcattagtactgaagacattaagtgcagcaaattatttttctttgccagcccaacct

SEQ ID NO: 74481 - DNA, 600 bp, Chicken  19866894357049_2
gaggctgagcgggtggacccagagagtagtggtcagtgatgcgaaatcttgctggaagagagtaactcgtggtgtaccacaggggtcagcactggctttggtcccatttaaccactgcattaatgatctggatcatagagcacagtgcaccctctgtaagtttgcagatgacgcaaaactctgmggagtgactgatagaccagggaattgtgctgccatccagtgggacctggtcatgctggagaaatgggcaggtaggaaccttgtagagttcagcgaggagaaatgctgtgttgcacwgctttgcaggataggagctgggggtcctggtgggcatcaagttgaacgtgagtcttcagtgtgctcttgtgacaaagaagacttgtggctgcatcaggaaaagtattgacttcagctcctttctcatgcattagtactgaagacattaagtgcagcaaattatttttctttgccagcccaacctgactttattatacgcagaacaaaattatgctgcctgagcttgttttggaagagataccttgaagtcttctgtgtatattgaacgctcccagattttgaaatgcaatgaagcagctg

SEQ ID NO: 74482 - DNA, 599 bp, Chicken  19866894357053_1
  misc_feature (1)..(150): n is any nucleotide
nnnnnnnnnnnnnnnnnnnnnnnnnnnnnnnnnnnnnnnnnnnnnnnnnnnnnnnnnnnnnnnnnnnnnnnnnnnnnnnnnnnnnnnnnnnnnnnnnnnnnnnnnnnnnnnnnnnnnnnnnnnnnnnnnnnnnnnnnnnnnnnnnnnnnnccccacaccatggtgctgagctgtggcatggttaatgccccaaggtgctatgctggtgaccccatgggcacatgcaatctccccccatgctgcaaggaccctgccagactgtgagaccccaccatcagccccatgctcctagcaggggarccatggtgagcagcaccatggggctggtagatctggggccactgtgttatctctcaagccatagatacgtccagttggccaagctggaygttggccaagttggttgctgtctgagaatggaggatcctccacaagtgcctcgttttatcccagagactttaggaaagaccggggagacaacgggcacacagagggcttgctcctctccaggcaggagctgcgtctcagggatgtccctttggtgaggggcaatctcagaaccaatgggaaggatgtaaatagcgggacgcgaacgtcca

SEQ ID NO: 74483 - DNA, 599 bp, Chicken  19866894357053_2
  misc_feature (1)..(61): n is any nucleotide
nnnnnnnnnnnnnnnnnnnnnnnnnnnnnnnnnnnnnnnnnnnnnnnnnnnnnnnnnnnnnccccacaccatggtgctgagctgtggcatggttaatgccccaaggtgctatgctggtgaccccatgggcacatgcaatctccccccatgctgcaaggaccctgccagactgtgagaccccaccatcagccccatgctcctagcaggggarccatggtgagcagcaccatggggctggtagatctggggccactgtgttatctctcaagccatagatacgtccagttggccaagctggaygttggccaagttggttgctgtctgagaatggaggatcctccacaagtgcctcgttttatcccagagactttaggaaagaccggggagacaacgggcacacagagggcttgctcctctccaggcaggagctgcgtctcagggatgtccctttggtgaggggcaatctcagaaccaatgggaaggatgtaaatagcgggacgcgaacgtccaactgctctttcaagtcctaataaaggtgatgggtgaattcccaccttgcacacctgcaggcatccgagctgtgttgtaccgtgcccagt

SEQ ID NO: 74484 - DNA, 513 bp, Chicken  19866894357057_1
acccttacttgcaacaggtctgagaaaagggaatgaggagaaactggaattcaggtagattttcaaatgacattaaagttgtgttttgtttcagtttgaaagtgcatgttgtatgttagctttggatgaatacaaattctaagacaggaacattccattcatgcttttagaattttaggtacaaatttcaaatggatctttggaaacgactttcccaaacctgtctgttggctcctggcactgagagtctcactccattcaaacctgttctttcttttccctgtgctccatcttgctgcrtgtttccttgtgttctgtgatgtatcagttataaaactgtacatttttaccttggtatcctgcctgaaggtggttcatagcatgtaacaaggctgactctgtgcaaaagggacaacccatttcttgtgggcaggacacaagcatttttaatgcctatcaattactctcacttaagaaagatgataatagcggctaaactcaatggagctggcg

SEQ ID NO: 74485 - DNA, 600 bp, Chicken  19866894357058_1
tttccagattgctaacaggtgtgcattaattcaaagattttatttttttggtgtatgatctacaggtaataaaccctaaatcacctaaaaggacatgcaatttgcccaactgcagtgtcaactgtgtggccttgggaaactccagtttctctgcctgcttccctgaactgaaagttaggcgaaattagttttgaaagttgcatgtgtgcaccaatcctatggaatgaagctctgtctcagtagtgagaaacagaaaagacctggattctatgcaagcactggtcagcaaaaactaaaacrttggtgtattatcaatttcatcacaaatcaccacatcaccctataagctactatgtccaagccaaaaccagtacagtagtgcagttgatgtgcaccattcagattgctttgaaaatgaaatcagcttcttgaaaggccattttttggtgcctctcatttastctttgagtttttcacaaatattaagatttaacatccttcagaatctggagaatgacagtatcaacttcttccaaacctcactggtagatcatacggtatctttgagataatctctgtccatgactgtaggaacagctg

SEQ ID NO: 74486 - DNA, 600 bp, Chicken  19866894357058_2
cctgaactgaaagttaggcgaaattagttttgaaagttgcatgtgtgcaccaatcctatggaatgaagctctgtctcagtagtgagaaacagaaaagacctggattctatgcaagcactggtcagcaaaaactaaaacrttggtgtattatcaatttcatcacaaatcaccacatcaccctataagctactatgtccaagccaaaaccagtacagtagtgcagttgatgtgcaccattcagattgctttgaaaatgaaatcagcttcttgaaaggccattttttggtgcctctcatttastctttgagtttttcacaaatattaagatttaacatccttcagaatctggagaatgacagtatcaacttcttccaaacctcactggtagatcatacggtatctttgagataatctctgtccatgactgtaggaacagctgtcctttgccaagccaaaggttcatataacctcacaatcaacttttatgactcgccagatatcaaggtattcacatcaggacacttctatatagtttctacaaatttgccaagttcggttttctcctgcttggtgtagatcttcatgtctgttataagattt

SEQ ID NO: 74487 - DNA, 600 bp, Chicken  19866894357068_1
ttcagcacaatagcagaaattcactggtggcttttgcaaagaagtgatgcttgaagctcctttctctataacgcagagagacatctgggaaaatggaagtttttcccctggctttgctaacatcagggcactgcccttcagacagtcactctgcacctccagtgaaccctgaagagagcatttgtgcaagcaagttaccagtttcccccacctcacacattgctcacacagaactgacctgaggtaagtgccctgcagggctgcatgtcagctcagcaacaaatgcgtctaacaactgaygttattttaggcaatctgcatctcatccaagtacttttggcccwtgtaatatgcactgatactattcagcacaaagccatttctatactcatcaccccactcccttytgacctatatgttcaactgtctcatggagtagcagggcattcggtcacctgtcctacctctgacataatgcacagtggcaccacagaatggctcacagaagacaatcccttacacagctggcagtcgcagagtttgcacagcctgctcttagacttcttccttgctctgttaaaccggagttcaagacccctc

SEQ ID NO: 74488 - DNA, 600 bp, Chicken  19866894357068_2
tgatgcttgaagctcctttctctataacgcagagagacatctgggaaaatggaagtttttcccctggctttgctaacatcagggcactgcccttcagacagtcactctgcacctccagtgaaccctgaagagagcatttgtgcaagcaagttaccagtttcccccacctcacacattgctcacacagaactgacctgaggtaagtgccctgcagggctgcatgtcagctcagcaacaaatgcgtctaacaactgaygttattttaggcaatctgcatctcatccaagtacttttggcccwtgtaatatgcactgatactattcagcacaaagccatttctatactcatcaccccactcccttytgacctatatgttcaactgtctcatggagtagcagggcattcggtcacctgtcctacctctgacataatgcacagtggcaccacagaatggctcacagaagacaatcccttacacagctggcagtcgcagagtttgcacagcctgctcttagacttcttccttgctctgttaaaccggagttcaagacccctcctgctttggacagctgagtggccaaggaaagcagagatgcctct

SEQ ID NO: 74489 - DNA, 600 bp, Chicken  19866894357068_3
ctggctttgctaacatcagggcactgcccttcagacagtcactctgcacctccagtgaaccctgaagagagcatttgtgcaagcaagttaccagtttcccccacctcacacattgctcacacagaactgacctgaggtaagtgccctgcagggctgcatgtcagctcagcaacaaatgcgtctaacaactgaygttattttaggcaatctgcatctcatccaagtacttttggcccwtgtaatatgcactgatactattcagcacaaagccatttctatactcatcaccccactcccttytgacctatatgttcaactgtctcatggagtagcagggcattcggtcacctgtcctacctctgacataatgcacagtggcaccacagaatggctcacagaagacaatcccttacacagctggcagtcgcagagtttgcacagcctgctcttagacttcttccttgctctgttaaaccggagttcaagacccctcctgctttggacagctgagtggccaaggaaagcagagatgcctctgtcaggacagaaggttgttaactgcactgtaagaggcacaaaccaatggaaaaattcatccag

SEQ ID NO: 74490 - DNA, 600 bp, Chicken  19866894357073_1
aggtcagtacaggagcaaaagcacagaggacagcagcagaggtacagcaacagtgagtccaggagaaagaagcaggtctcaggtagcaggtccaggagagtccatcagcaggcaggtgtcatgtcatgaggtatctgatgtcagacaccatcctcttggctgtaagcccctttctgtatgctatttttctgccaaaatggcattcctgggcactttggtaagtcacatacagcaccccttgagcatgcaggtatggctatcttcctcaagatgagccaacccaaaggctgcttattggcwgytaagctgctactcatctttctctccccacctgtggcctgcaaatcttcagacaaaagatttctccaactttgaccaggacttgcctggacttgtccatctgtgttcctcatcaatctttgagacaaagatgcaaaaagtataatctcttacagtcccctcactccatcagatacggaaccgagctaacccagcccataaacctttgacacctgttgtggtgccacaatgctggagggcactctccttgctgagtgtccttgccccagcatggacacacacccatcactcatcaataac

SEQ ID NO: 74491 - DNA, 600 bp, Chicken  19866894357073_2
gtcagtacaggagcaaaagcacagaggacagcagcagaggtacagcaacagtgagtccaggagaaagaagcaggtctcaggtagcaggtccaggagagtccatcagcaggcaggtgtcatgtcatgaggtatctgatgtcagacaccatcctcttggctgtaagcccctttctgtatgctatttttctgccaaaatggcattcctgggcactttggtaagtcacatacagcaccccttgagcatgcaggtatggctatcttcctcaagatgagccaacccaaaggctgcttattggcwgytaagctgctactcatctttctctccccacctgtggcctgcaaatcttcagacaaaagatttctccaactttgaccaggacttgcctggacttgtccatctgtgttcctcatcaatctttgagacaaagatgcaaaaagtataatctcttacagtcccctcactccatcagatacggaaccgagctaacccagcccataaacctttgacacctgttgtggtgccacaatgctggagggcactctccttgctgagtgtccttgccccagcatggacacacacccatcactcatcaataacca

SEQ ID NO: 74492 - DNA, 600 bp, Chicken  19866894357074_1
ctgcaaaactctgctgatagaaatctctttgtaaatctcatcaaaaagtattcagcacttggtttctgaaagaaagattttgccgctgtcaagttcatcaaataatgggagaaatcaaactatccaacaagcagacccattcacacgcattatgtcagcagattcttctaattaagtttgaagttcaactttttttagtgccgttggataggtttggttgatctttgccatttgggtttaaatatggatgtgtctatgatgaagagagctctttttctgccagcaacacattaacaacayagcagtcagtaatgcagcctccacaaactcccattgaggtatcagtaagccacacttgtacgcccattaagcttctttaaagttttgttrtgaaaaacacaccrtttaaagccatatctattagttgtgagcaaagctaatgatgggaaaatcattaaaacttgtaaatattaatatttaatgggatattattattattaaaatatttaaaggctagataaaagttcaagcactgtacatggtgattttgagattctgtccatgtgtggctcatcaagttggttgataacaaatgctgtc

SEQ ID NO: 74493 - DNA, 600 bp, Chicken  19866894357074_2
aagttcatcaaataatgggagaaatcaaactatccaacaagcagacccattcacacgcattatgtcagcagattcttctaattaagtttgaagttcaactttttttagtgccgttggataggtttggttgatctttgccatttgggtttaaatatggatgtgtctatgatgaagagagctctttttctgccagcaacacattaacaacayagcagtcagtaatgcagcctccacaaactcccattgaggtatcagtaagccacacttgtacgcccattaagcttctttaaagttttgttrtgaaaaacacaccrtttaaagccatatctattagttgtgagcaaagctaatgatgggaaaatcattaaaacttgtaaatattaatatttaatgggatattattattattaaaatatttaaaggctagataaaagttcaagcactgtacatggtgattttgagattctgtccatgtgtggctcatcaagttggttgataacaaatgctgtcatcttttaatgctggaggctttgctgctcgttctggcaaaacaaaatgtcactctcacttcatcctaaggaaggtttaattttgagataa

SEQ ID NO: 74494 - DNA, 600 bp, Chicken  19866894357074_3
atgggagaaatcaaactatccaacaagcagacccattcacacgcattatgtcagcagattcttctaattaagtttgaagttcaactttttttagtgccgttggataggtttggttgatctttgccatttgggtttaaatatggatgtgtctatgatgaagagagctctttttctgccagcaacacattaacaacayagcagtcagtaatgcagcctccacaaactcccattgaggtatcagtaagccacacttgtacgcccattaagcttctttaaagttttgttrtgaaaaacacaccrtttaaagccatatctattagttgtgagcaaagctaatgatgggaaaatcattaaaacttgtaaatattaatatttaatgggatattattattattaaaatatttaaaggctagataaaagttcaagcactgtacatggtgattttgagattctgtccatgtgtggctcatcaagttggttgataacaaatgctgtcatcttttaatgctggaggctttgctgctcgttctggcaaaacaaaatgtcactctcacttcatcctaaggaaggtttaattttgagataaaccttgactgcagc

SEQ ID NO: 74495 - DNA, 599 bp, Chicken  19866894357077_1
  misc_feature (1)..(91): n is any nucleotide
nnnnnnnnnnnnnnnnnnnnnnnnnnnnnnnnnnnnnnnnnnnnnnnnnnnnnnnnnnnnnnnnnnnnnnnnnnnnnnnnnnnnnnnnnnngggggagagaggcagggtggggaggaggatgctcagtgctcagccggtccctgggacccttgggaaggcctcagtgctggggggtctctgtggtgatgggttcagccaaagtgggtgccccatagtggagcctcagcatctccagagggggacatctccagcttgggtccaggtctccttgggatgaccatgggaagagcatgggaagraacgctccaggtacatcctcctggatggtgaaatgtgtcttcccacctgtaaaagctcctcctgcagacacatcctcctctatgcaccaccagagctggggcagaatctctttgtttcatgaaaaaaaccacacgaaaaaaccaaccactgccccggagccgaatctcagccttttcctgcacacaccaaattccccaccacaaattagagcagccccagctgcacacccatcccacttcaatccgccctcacaccaaacccagagctgtggggtgggggacagtgtgggggtccggga

SEQ ID NO: 74496 - DNA, 600 bp, Chicken  19866894357081_1
acacctttttcttcctgccatggatggctgagaactgccagccatgatgttaaccacgccaaggaaacccactctcagtaaattaaccattttggatttggcaaacataatttactgattaaacttaaagttagtgtttcttttggcaagatgaaccacttccttacatttgtggggggttccgtgtttgtgcctttttattattcagggttcacaaaaggtgtcacaactaaaattgttgttaacttccttgaactactctgtcagttcgtcttaactgtgcctatgggcgacagtctrtagggcaaggcactccacgtattcctcctgtcagtgtcttgattttttgctgaaattgccagtattggaggtgctggatttcgtggtgtgagtgctcacgggctgctctctggatggaggccaaaggagcagtctcatgtttgccagcaagcggccgtcagaggggaacaatttccagttgctctcagcctggatgggttttaaacagacaatctaaatgtggagagctcattagcttgattaattcycgaccatccagcttctggtcagtaatgtagctttctgaaatgtgttttctca

SEQ ID NO: 74497 - DNA, 600 bp, Chicken  19866894357081_2
ccttgaactactctgtcagttcgtcttaactgtgcctatgggcgacagtctrtagggcaaggcactccacgtattcctcctgtcagtgtcttgattttttgctgaaattgccagtattggaggtgctggatttcgtggtgtgagtgctcacgggctgctctctggatggaggccaaaggagcagtctcatgtttgccagcaagcggccgtcagaggggaacaatttccagttgctctcagcctggatgggttttaaacagacaatctaaatgtggagagctcattagcttgattaattcycgaccatccagcttctggtcagtaatgtagctttctgaaatgtgttttctcattttcaaatgaacttctgtaaagattctagaaatagtcaaatgcagtgacgcaagagggctattacgtgccaatcatttatcctcatacagaggtgggcccctggcatattgcgtgctgtcaaagamtgaaacaggttggtttggcagacctgaagagcttgagttcattcactggttagcgcatctgaacactgctgatgtggaactgcacagccagcagtgtgaagatacgtctgttcagcctgag

SEQ ID NO: 74498 - DNA, 457 bp, Chicken  19866894357081_3
agcagtctcatgtttgccagcaagcggccgtcagaggggaacaatttccagttgctctcagcctggatgggttttaaacagacaatctaaatgtggagagctcattagcttgattaattcycgaccatccagcttctggtcagtaatgtagctttctgaaatgtgttttctcattttcaaatgaacttctgtaaagattctagaaatagtcaaatgcagtgacgcaagagggctattacgtgccaatcatttatcctcatacagaggtgggcccctggcatattgcgtgctgtcaaagamtgaaacaggttggtttggcagacctgaagagcttgagttcattcactggttagcgcatctgaacactgctgatgtggaactgcacagccagcagtgtgaagatacgtctgttcagcctgagcagagcaagcccttgatttcatgccttttttcaggc

SEQ ID NO: 74499 - DNA, 504 bp, Chicken  19866894357086_1
ttctcaacccgatcccaaccccaaaactaaccccaaccctcataccaactcctaaccttagccctaaaccagccctaactccaaccctaagaccaatcccccagctaaccctagccccagccctagacctaaccttaaccccatctctcatcctaaccccagccctaacctcagccctaaccccaaccctcatcccaatcccaaacataactgtaaacctaactccaaccctcaccataaacctaaccttaatcccaaccctcacctgaagccttacacccattcctaaccctaaactcraccccagccccatccctctccctttccctcatcctccctctcgccctgccycatactgctgctgccccataggtctgaggttgggctgccagccccacaggagctgtcaggttggtgttgagagttgatgacctctggggtcttctccaccccaagtgcctccacaattccatgggacctctttcacaatcctgcatcacaccc

SEQ ID NO: 74500 - DNA, 453 bp, Chicken  19866894357086_2
ctaaccttagccctaaaccagccctaactccaaccctaagaccaatcccccagctaaccctagccccagccctagacctaaccttaaccccatctctcatcctaaccccagccctaacctcagccctaaccccaaccctcatcccaatcccaaacataactgtaaacctaactccaaccctcaccataaacctaaccttaatcccaaccctcacctgaagccttacacccattcctaaccctaaactcraccccagccccatccctctccctttccctcatcctccctctcgccctgccycatactgctgctgccccataggtctgaggttgggctgccagccccacaggagctgtcaggttggtgttgagagttgatgacctctggggtcttctccaccccaagtgcctccacaattccatgggacctctttcacaatcctgcatcacaccc

SEQ ID NO: 74501 - DNA, 600 bp, Chicken  19866894357089_1
gtcttgcaattacttaacaacttttaagagagaataggagtgaagagagaactggagaaagaacaagagtggcagagagatgggcggaaaagaaatcactgatctgattcaaggagttccagtgtcagctcacagtgctggagatggaatggtggagagtgaatgtgttcatccaggggtgacggtcttgaaccagcaaacagcagtaatgacctggatcccctctcaggcatccttttttatgcctgctgggtttgcaggtgtaacgtcccaaggtcgtgagcaactgagtttgcaatraacgtttgtcagaaataagtttgtagctaaaactttctggcagagaaggtaggccacaggatgtcgtaccttgctgataatggcctctgagtggttgtcatggcaacggccttgcacagcaagtgttggaggcgcaccaagcacaccccacgtaccccagcttttgttggttctttaaaggaattaaataaatatascaattaatgggaggcagttgacctaaacatgggcctaaggtatcatttaagyttgtcatctctaataatacacaggtcataatagcaaaatagaaaatttata

SEQ ID NO: 74502 - DNA, 600 bp, Chicken  19866894357089_2
aaacagcagtaatgacctggatcccctctcaggcatccttttttatgcctgctgggtttgcaggtgtaacgtcccaaggtcgtgagcaactgagtttgcaatraacgtttgtcagaaataagtttgtagctaaaactttctggcagagaaggtaggccacaggatgtcgtaccttgctgataatggcctctgagtggttgtcatggcaacggccttgcacagcaagtgttggaggcgcaccaagcacaccccacgtaccccagcttttgttggttctttaaaggaattaaataaatatascaattaatgggaggcagttgacctaaacatgggcctaaggtatcatttaagyttgtcatctctaataatacacaggtcataatagcaaaatagaaaatttatatcttctctttaagcacactgtatcctgccttactttttccgacatttataatgtctcttcctggtctcctatctgtaacagcatgaacagcatacagccagaaactcgtaacatagagacaactatgaaacacgtagtgggaggattccacagttctggtctttccaggaaagttaactagtgtgcgagtacaataa

SEQ ID NO: 74503 - DNA, 600 bp, Chicken  19866894357089_3
tgggtttgcaggtgtaacgtcccaaggtcgtgagcaactgagtttgcaatraacgtttgtcagaaataagtttgtagctaaaactttctggcagagaaggtaggccacaggatgtcgtaccttgctgataatggcctctgagtggttgtcatggcaacggccttgcacagcaagtgttggaggcgcaccaagcacaccccacgtaccccagcttttgttggttctttaaaggaattaaataaatatascaattaatgggaggcagttgacctaaacatgggcctaaggtatcatttaagyttgtcatctctaataatacacaggtcataatagcaaaatagaaaatttatatcttctctttaagcacactgtatcctgccttactttttccgacatttataatgtctcttcctggtctcctatctgtaacagcatgaacagcatacagccagaaactcgtaacatagagacaactatgaaacacgtagtgggaggattccacagttctggtctttccaggaaagttaactagtgtgcgagtacaataaggtgagacatccatacaggaaggttgcattgccttaatggcagaagcagtgc

SEQ ID NO: 74504 - DNA, 600 bp, Chicken  19866894357091_1
tgggcctaaggtatcatttaagtttgtcatctctaataatacacaggtcataatagcaaaatagaaaatttatatcttctctttaagcacactgtatcctaccatactttttccgacatttataatgtctcttcctggtctcctatctgtaacagcatgaacagcatacagccagaaactcgtaacacagagacaactatgaaacacgtagtgggaggattccacagttctggtctttccaggagagttaactagtgtgcgagtacaataaggtgagacatccatacaggaaggttgcaytgccttaatggcagaagcagtgcccattctcttcatcaccttaagtccacagcttttaaaaaataaatggtatattatctagattccttatcttaatatggggataatataagccaatcattagttgggcagtttttccaaaccagtcttagtaatgtgtcacatctttgaagatggagtaactttttaagtgattctacctttctgttcaagcacaaatgaatgaagagtaagcagtgtacgcttttgaaatttgaggagaaattgtcaacacatccttgtacaagtagacttctaata

SEQ ID NO: 74505 - DNA, 600 bp, Chicken  19866894357101_1
gcggggtacgttgtttccctgccagattcagtttgcataggctgcactgaagcttgagatcaggccagagcccacaggtatgagtttagaccctcttaatggggcttcagtcaaattgtagagatgatagcatctgtatttctcatactgtgacaaaatttggcttcgtgtccctgctataagaagactgagaggaataccaggctggctctaatgtaaatgcagctgaacccacaatgtatgttgactgaagttctgtgactaatagtgcagaaagcatgtgataggagtggaaaacaycagcaatgtaaagaataaacaggcttgatcacggagagatttggggctgcaagtgctagggcaaaccacactgatgtgccaaaaacatcattagaaatttattcacagaaaagggtgttttgcacctgtgttatctgaactcaaaccctgctggggctggtcagcagtcctcaggccacctgcatgggctggaggggctgggtgcctgagcaaggtgggctgcctgctgctaggcctcgcatgccttcaaagtccacctcatttctccgagggcatcttgaacataaatccagagagagg

SEQ ID NO: 74506 - DNA, 600 bp, Chicken  19866894357101_2
ccacctgcatgggctggaggggctgggtgcctgagcaaggtgggctgcctgctgctaggcctcgcatgccttcaaagtccacctcatttctccgagggcatcttgaacataaatccagagagaggtttaatgctgtcatccagacggcaagctgtttagctttcagatatgattgccatgaggaaaaggggagattaggccctgccagccagccctccaagtggctctgacacaaaaatgttgttatcggtgcttttaaccaggctaattgatcacttgttaacagtggccctgaccagmgaggtctgggaggggcaaacttgttaaaatgatggctgctgattgattttttaaatttggggtagataaagccaatttgcctgtgacacagagcttaacattgcattgttttgagaagtgctgtgggattattggtgacctccaggggttggagccagtggtttttccatgtcatctgacagggagagacctcattaacagagaccaggcaccttctacaaggatggtaaattaatgatgatacagaggaaagagtgctatctgcaaaatgcatgctgtcatttcctttggtctgtagtg

SEQ ID NO: 74507 - DNA, 600 bp, Chicken  19866894357121_1
gaaaacagtaaaactgggaggggattttattggtagacaaagggagataaaaataaccgtgtgaggcccagcggcagcggctcaccccaggtcagagggagctgtgcaacgggacggcgtcacgcgaccagcgcggtgagcacggctgcagtaggaaggctgcagagggagatagggacggctgcttcctgggctgagacgagatggcagagcgatgtgctttgattaggatacctcaccatatgaaattccatgagcaatgtgactgagctctttctgtgtcacagcatgtaaggacaygggacagggacaggactcctgaacttcacctctctctgtgatctgaggattttgagcaattgcatttacttctgctatgagacagaaaagagtccttggagccctttctcccatgaaacgatgaaagcgttctcctggagccacatgggcagagccatgcagggcctgtctgccgcctctggccctgtggaactcaaggaaagcagcagagctgtggctcaccaggccaagactcctgacctccctgcttccagcgctgcccacccccgtggtacccaccagcacctccctgccattcca

SEQ ID NO: 74508 - DNA, 599 bp, Chicken  19866894357128_1
  misc_feature (1)..(19): n is any nucleotide
nnnnnnnnnnnnnnnnnnnattaatttgattttgaaaagtcagttgctggttgaacataaaatgaaacctttgtttttccctgaggatggagatttcaggcaccacaggcacttctgcacactcgttcaaactttcactcatagtaaactacgacacttcagtcttctcttagtcatgcttacaagcattagtaaatccccaaacctagtacatggttaatgtgtacagacagaatgcctgacagtttctgcaggctggatagaagaaaacaatttcctagccacatcaatagacagaakgatatgggtgggattcccctcagctaaagtttgtagcatagatgtctctacctcagcagtacccaacttcctgttgtagttaagagagaagaataggcagtgtcattcatcagttttgctttaagcatcttgagaatgcagactggtattctaaaagtgactgttcctcttcagttggaacaagaggatgaatcatgtctaggttgcaaacagttaggtatccatccacttaaaaccaactcttgaggtatcaaactgaatgcctgttatggttgcagacatgatagctcttcatcaca

SEQ ID NO: 74509 - DNA, 600 bp, Chicken  19866894357130_1
atcttgttcccatcatttaaatacaccaagttatttttaatttcaagatcttcacataaatcgcataaatcacttccttaatttattctcatattttcctatgctctcccatataactgttttcctgtgcatgtggacacagagaagacttcacagtgaatcacaatacacataagcatcatgtaaaggtaaactctggtactgagtacatcagtttagcaataaatttagatttacacgaaacttgattgtctgtaaaagtaagaatgaaaaaaatattttcccttgaaaattgtcaaygtttcgcagattaaaataggtgattcatttctgaaagattattctccttatgttattagaaaggagtatttctactctatgcacaactgctggaatctctagaaaagtatttataagataatacatcatacaaacttacagctttccaactgcattatacatgtttgcacatccattggaaaatttttgagatccattgggcaggacagtattaaagtcaatctgaaagaacacaaaaatatattaaaaatataccacaaaaaataccatataattgcacagtggagtgcataaaagcag

SEQ ID NO: 74510 - DNA, 600 bp, Chicken  19866894357155_1
ggtcccagagccctgcgtgggcagtctgactgaacatccctcagatgtaggctttcagcaacaagctggccatcacacatggatattgcttgctagattttcacataaagtatcagtgcacagaggaacatttcataaaccctgcactgggagtttcatcccacgggaattttttaatttgatttcctcactgtggaaaaatgcctttaacctgttaaaagatgtaactgtgcagcgtaggcaccaggcttcaagcatgttgatttgcttgcatttttatggatacattttacaggaaaygcacttattttgaaatactccctaagattaaggaccatagacacaacacattcactaatacatccctaattcacagaggtgtctgctttaccagtcactatcagatacttaatcagcagatttgtacagcatgtagatattcagtaaaagtgcttaataaaaatcatttagttctaaattacaagagtgcacttaaccctaaagatattaaaactgattgtttgatgtactgcactgagtagtagaaatttaaaaataaaagcttcctttacttccatcaaagagatgaagtcttctatc

SEQ ID NO: 74511 - DNA, 600 bp, Chicken  19866894357156_1
cccactccatagccaaggtaacatccaaaagaacatcactgtgtaacaaaaaaacagctgcacacctcaatatcaatgtaactgcccaaagttcatttacagcatgcatacattctggtgacatctacaacacagtaatccttcacaaagcattaccttccagaaaaaaaataatcttcacagcatagtccagctgtgctaggctgagtgctttccgttggacaacaccccggtctttggctgtactgttgatggtgacacatcctggtatcctggttgcttttccatagcctagtgtgwctaatagggataatggcttcaaggtcttacctacaaaaccttaagactctttttaatttattttttaacgaacttaatagttgctagcagcagtttgccttgtaatgcatttcctcctttttgatcctttgcctgtagacatcttctgcatgtgcccacattaccatcactgtctcagtcaccaaaggatgcactcagtgtcagtatcttctttgtgctgtccctaattatactttctatctctgttattgacataagcagttaactctgatgtttaaaattgatagtttcctccaaagc

SEQ ID NO: 74512 - DNA, 599 bp, Chicken  19866894357157_1
  misc_feature (1)..(112): n is any nucleotide
nnnnnnnnnnnnnnnnnnnnnnnnnnnnnnnnnnnnnnnnnnnnnnnnnnnnnnnnnnnnnnnnnnnnnnnnnnnnnnnnnnnnnnnnnnnnnnnnnnnnnnnnnnnnnnnnatggatggttttccatcattcgcaaatgtcactgacagcagggcaaaaaataattctttgatatgatctttggattgtgtcagttaaaacccccaattcttggaaggtaaaattcaccctggctcaagggccactccatagaaaatattggccacatgttcttatgaaaaccctgaaaacacgagacrtttcagaagaacatggatcttatgctaagaaaacccttggaggaaatctctgaaggagtcggataaggggcacagggctggggatgtacagacctacagracagagatgtagggaaagtgttggggtcaccttgtaacccctgcttgggmctcactgtgcctcagctggacctgatcctcccagcatgtcttccccatctcatctccgctgtctrtggtcagaagttcattttctacatctttctaaaagagatgtgctgaatgcagcttaatggattatcagtgcccctgatcgattc

SEQ ID NO: 74513 - DNA, 599 bp, Chicken  19866894357157_2
  misc_feature (1)..(12): n is any nucleotide
nnnnnnnnnnnnatggatggttttccatcattcgcaaatgtcactgacagcagggcaaaaaataattctttgatatgatctttggattgtgtcagttaaaacccccaattcttggaaggtaaaattcaccctggctcaagggccactccatagaaaatattggccacatgttcttatgaaaaccctgaaaacacgagacrtttcagaagaacatggatcttatgctaagaaaacccttggaggaaatctctgaaggagtcggataaggggcacagggctggggatgtacagacctacagracagagatgtagggaaagtgttggggtcaccttgtaacccctgcttgggmctcactgtgcctcagctggacctgatcctcccagcatgtcttccccatctcatctccgctgtctrtggtcagaagttcattttctacatctttctaaaagagatgtgctgaatgcagcttaatggattatcagtgcccctgatcgattccaagccctgagaataaaaggcttttggttaatttctctgtaattttggcctcatctgccttctaaagcaatatatttttgcagtgacttagttgcaaaat

SEQ ID NO: 74514 - DNA, 600 bp, Chicken  19866894357157_3
cagggcaaaaaataattctttgatatgatctttggattgtgtcagttaaaacccccaattcttggaaggtaaaattcaccctggctcaagggccactccatagaaaatattggccacatgttcttatgaaaaccctgaaaacacgagacrtttcagaagaacatggatcttatgctaagaaaacccttggaggaaatctctgaaggagtcggataaggggcacagggctggggatgtacagacctacagracagagatgtagggaaagtgttggggtcaccttgtaacccctgcttgggmctcactgtgcctcagctggacctgatcctcccagcatgtcttccccatctcatctccgctgtctrtggtcagaagttcattttctacatctttctaaaagagatgtgctgaatgcagcttaatggattatcagtgcccctgatcgattccaagccctgagaataaaaggcttttggttaatttctctgtaattttggcctcatctgccttctaaagcaatatatttttgcagtgacttagttgcaaaatcaatgtggactatgcttataaaagaaaatagacaatcaacatcctgggtcc

SEQ ID NO: 74515 - DNA, 600 bp, Chicken  19866894357157_4
aaggtaaaattcaccctggctcaagggccactccatagaaaatattggccacatgttcttatgaaaaccctgaaaacacgagacrtttcagaagaacatggatcttatgctaagaaaacccttggaggaaatctctgaaggagtcggataaggggcacagggctggggatgtacagacctacagracagagatgtagggaaagtgttggggtcaccttgtaacccctgcttgggmctcactgtgcctcagctggacctgatcctcccagcatgtcttccccatctcatctccgctgtctrtggtcagaagttcattttctacatctttctaaaagagatgtgctgaatgcagcttaatggattatcagtgcccctgatcgattccaagccctgagaataaaaggcttttggttaatttctctgtaattttggcctcatctgccttctaaagcaatatatttttgcagtgacttagttgcaaaatcaatgtggactatgcttataaaagaaaatagacaatcaacatcctgggtcctatcccaggcactgctgattccattattatgtcagctaatcttaaaaaaaactgctttarcacca

SEQ ID NO: 74516 - DNA, 600 bp, Chicken  19866894357157_5
gtctrtggtcagaagttcattttctacatctttctaaaagagatgtgctgaatgcagcttaatggattatcagtgcccctgatcgattccaagccctgagaataaaaggcttttggttaatttctctgtaattttggcctcatctgccttctaaagcaatatatttttgcagtgacttagttgcaaaatcaatgtggactatgcttataaaagaaaatagacaatcaacatcctgggtcctatcccaggcactgctgattccattattatgtcagctaatcttaaaaaaaactgctttarcaccactcatggggaggtgaggcactgccatttaaaatgggttttgctgcacagactgctattattccaatggttgtgatttttgctattgttccttgcttctactttaatgttacagttgttatttttatggaacatataaatgaagagaattgggtcaatttacctacrgttgtcttccaactagaaccagaatatctgctgctctatttgtttccagtccagttgctagcttgagaatactgatcatcttactcagctgagacaaagagcagccaagtgattgaatcaagtgatact

SEQ ID NO: 74517 - DNA, 600 bp, Chicken  19866894357157_6
gtgacttagttgcaaaatcaatgtggactatgcttataaaagaaaatagacaatcaacatcctgggtcctatcccaggcactgctgattccattattatgtcagctaatcttaaaaaaaactgctttarcaccactcatggggaggtgaggcactgccatttaaaatgggttttgctgcacagactgctattattccaatggttgtgatttttgctattgttccttgcttctactttaatgttacagttgttatttttatggaacatataaatgaagagaattgggtcaatttacctacrgttgtcttccaactagaaccagaatatctgctgctctatttgtttccagtccagttgctagcttgagaatactgatcatcttactcagctgagacaaagagcagccaagtgattgaatcaagtgatacttcctcaatggagagtggcagatttgcatctaacagttagaagattgtaatcagtgttttcccataacagtatatctctaagctttaatgattaataatgtagccttcacacatttatttttgtagattttcagaagaaaaaaaaaaaaagtccagctaacaaaatccctcg

SEQ ID NO: 74518 - DNA, 600 bp, Chicken  19866894357157_7
gaatcaagtgatacttcctcaatggagagtggcagatttgcatctaacagttagaagattgtaatcagtgttttcccataacagtatatctctaagctttaatgattaataatgtagccttcacacatttatttttgtagattttcagaagaaaaaaaaaaaaagtccagctaacaaaatccctcgaagagaatatcctgttgtacactgaggtgccctggctgtcagtgcttagaagctgaccaaagcgggtaggtgacctccccctgagcagatgtaagactctgtgcccacctggtrtagcagaggcattgcgtgtgttctcaatgagtctcaaaggagtgggagcaattattttaaaataattagtctgtgtctgaacctaagagagacaaattttataagtgagcatagagagctcttggtatgcaagaactcatgtttatttgcctccaattttctctgagtaactacgtgaattgacacgggtggcagttgaaagcactgggctatagtgaagagtgctctcatcctgagcacccactgcagaagacttagttcctttatttactttgcacaaatcctggagaggaaatatga

SEQ ID NO: 74519 - DNA, 600 bp, Chicken  19866894357159_1
aagaactcatagagaacagccctgcagagaaggacctggaggttctggtggatgaaaagctgtgcataagacagcagtgtgctcttgcagccaagaaggccaactatatcccgggctgcaacaacaggggtggcagcaggccttccaacacttgaagggcacctaaaagcaggaaagggaccgaccttttgcatggtctgacggtgacaagaggggatggccttatggctttaaactaaaagaagtgagacttaagttggatgttaggaggaatttttttactccatgaacagtgaggcratggactgggctgcccagagaagctgtggatgccccatctctggaatgttcaaggctaggctgcatgaggccctgggcagcctgatctggtgggtggcagccctgcccatggcacggcggttgcaattagatgatcttcaaggtctcttccaacctaagctattctatgattagccaatttcttctacttaactgcattcccatttacagtactcccaaaaagtcctcctggaagcacttctgggaggcatccaatgaaagcagcaccagctgactggaggcaaacaagcagcaggggca

SEQ ID NO: 74520 - DNA, 600 bp, Chicken  19866894357167_1
aatgatgagcaaaagtttctgaggacagacagctgcacttagttggggaattgttgagcaatgtgggtaaacagggacatggtatatagtattggttgccatgttttatccttttactgcaggttgaaattgaaatggagcattttcctgagtttgaaaatgacgtggagttcactgagcggctcatctcggagcagtctgtgttttgtctgccagctacggtgagtctgacactgagagcccctgactctgagagccccaagcatctctgggctctaagcacagggagagaaacaatargagtttgcatccttgagctctggggacagtctgggaatctagtatgcaatgtccatggtctgtaatggtatgtatgtactgcctgtgaggtccaagtgcactgtagggatggcaactggcaagttccagctcactaacagtccttgatcaagctgccaggattgtcccagacttgctctttatttcagatgttggcagagttgtatccctgaactgtaggtacccccatacctccttgttgaagtcactctctcagaggccttgggactgctcccacctgtgctccttcacatgctccat

SEQ ID NO: 74521 - DNA, 599 bp, Chicken  19866894357174_1
  misc_feature (1)..(190): n is any nucleotide
nnnnnnnnnnnnnnnnnnnnnnnnnnnnnnnnnnnnnnnnnnnnnnnnnnnnnnnnnnnnnnnnnnnnnnnnnnnnnnnnnnnnnnnnnnnnnnnnnnnnnnnnnnnnnnnnnnnnnnnnnnnnnnnnnnnnnnnnnnnnnnnnnnnnnnnnnnnnnnnnnnnnnnnnnnnnnnnnnnnnnnnnnnnnnntggtgcagagaacccaattgccacacaatgtgctttttagatgaaattacttcagactaggcaaaatgtttgatagcacctgaagttcactttatttcttaggatttgtyttttgtttgagttgatttttgtgtgtaatgctgcagtccatctttcgtttcagtcatccaaaataaatacaaaaatccaaaatgaaatgagcactccagggtcatgttgtgatgtacactgaagcaaatgacttaaaaactgggaagtctggatgttttgcctcagaagcatgcatttgatccgatgaattacaagactaaagtagatgcactctgaattttcccttctcattgayttttatagattttctatttaggtgcattaattactgaccttcaattctcactcagttactaag

SEQ ID NO: 74522 - DNA, 600 bp, Chicken  19866894357174_2
ttacttcagactaggcaaaatgtttgatagcacctgaagttcactttatttcttaggatttgtyttttgtttgagttgatttttgtgtgtaatgctgcagtccatctttcgtttcagtcatccaaaataaatacaaaaatccaaaatgaaatgagcactccagggtcatgttgtgatgtacactgaagcaaatgacttaaaaactgggaagtctggatgttttgcctcagaagcatgcatttgatccgatgaattacaagactaaagtagatgcactctgaattttcccttctcattgayttttatagattttctatttaggtgcattaattactgaccttcaattctcactcagttactaagcagaaataatatgtgggaagaacctttttgcccagttcatactgtgtcaggacacatataraacttgaccatataatttttcttttagtcaaatgtaatgattttcacttcaattaggaaagacattttaaaacaactagtctgcagattactacyatgaaattggttccctacaaaatgctaaacggtgtattgatatatgaaawattttgcatctggctactctaaatattctag

SEQ ID NO: 74523 - DNA, 600 bp, Chicken  19866894357174_3
aaataaatacaaaaatccaaaatgaaatgagcactccagggtcatgttgtgatgtacactgaagcaaatgacttaaaaactgggaagtctggatgttttgcctcagaagcatgcatttgatccgatgaattacaagactaaagtagatgcactctgaattttcccttctcattgayttttatagattttctatttaggtgcattaattactgaccttcaattctcactcagttactaagcagaaataatatgtgggaagaacctttttgcccagttcatactgtgtcaggacacatataraacttgaccatataatttttcttttagtcaaatgtaatgattttcacttcaattaggaaagacattttaaaacaactagtctgcagattactacyatgaaattggttccctacaaaatgctaaacggtgtattgatatatgaaawattttgcatctggctactctaaatattctagctgtgtttgattaggaaaactgaagtttacactgttgtttgctgcagggttcttaatattaattgtattttatcattgatatttaattaatcwtawtgggaatctaagagggaaaagttgaaga

SEQ ID NO: 74524 - DNA, 600 bp, Chicken  19866894357174_4
ttttgcctcagaagcatgcatttgatccgatgaattacaagactaaagtagatgcactctgaattttcccttctcattgayttttatagattttctatttaggtgcattaattactgaccttcaattctcactcagttactaagcagaaataatatgtgggaagaacctttttgcccagttcatactgtgtcaggacacatataraacttgaccatataatttttcttttagtcaaatgtaatgattttcacttcaattaggaaagacattttaaaacaactagtctgcagattactacyatgaaattggttccctacaaaatgctaaacggtgtattgatatatgaaawattttgcatctggctactctaaatattctagctgtgtttgattaggaaaactgaagtttacactgttgtttgctgcagggttcttaatattaattgtattttatcattgatatttaattaatcwtawtgggaatctaagagggaaaagttgaagattgtttacccatgctaaccacccatttgctttgttatagaaaagcaatgcggttttcagaacttttagagtgtttatggacagaatgagaaaata

SEQ ID NO: 74525 - DNA, 600 bp, Chicken  19866894357174_5
gatgcactctgaattttcccttctcattgayttttatagattttctatttaggtgcattaattactgaccttcaattctcactcagttactaagcagaaataatatgtgggaagaacctttttgcccagttcatactgtgtcaggacacatataraacttgaccatataatttttcttttagtcaaatgtaatgattttcacttcaattaggaaagacattttaaaacaactagtctgcagattactacyatgaaattggttccctacaaaatgctaaacggtgtattgatatatgaaawattttgcatctggctactctaaatattctagctgtgtttgattaggaaaactgaagtttacactgttgtttgctgcagggttcttaatattaattgtattttatcattgatatttaattaatcwtawtgggaatctaagagggaaaagttgaagattgtttacccatgctaaccacccatttgctttgttatagaaaagcaatgcggttttcagaacttttagagtgtttatggacagaatgagaaaatacagaaatggcacaggtttgaacgagtatcacactacgtacactacaaaac

SEQ ID NO: 74526 - DNA, 600 bp, Chicken  19866894357174_6
cccagttcatactgtgtcaggacacatataraacttgaccatataatttttcttttagtcaaatgtaatgattttcacttcaattaggaaagacattttaaaacaactagtctgcagattactacyatgaaattggttccctacaaaatgctaaacggtgtattgatatatgaaawattttgcatctggctactctaaatattctagctgtgtttgattaggaaaactgaagtttacactgttgtttgctgcagggttcttaatattaattgtattttatcattgatatttaattaatcwtawtgggaatctaagagggaaaagttgaagattgtttacccatgctaaccacccatttgctttgttatagaaaagcaatgcggttttcagaacttttagagtgtttatggacagaatgagaaaatacagaaatggcacaggtttgaacgagtatcacactacgtacactacaaaacttggtgattctgcccctcggacccaatttgattccrttatggcttgattttttggcagtaatatgcttttgagtggatgccatatcttttgtattttctttttatatataacttcacatgcatg

SEQ ID NO: 74527 - DNA, 600 bp, Chicken  19866894357174_7
agttcatactgtgtcaggacacatataraacttgaccatataatttttcttttagtcaaatgtaatgattttcacttcaattaggaaagacattttaaaacaactagtctgcagattactacyatgaaattggttccctacaaaatgctaaacggtgtattgatatatgaaawattttgcatctggctactctaaatattctagctgtgtttgattaggaaaactgaagtttacactgttgtttgctgcagggttcttaatattaattgtattttatcattgatatttaattaatcwtawtgggaatctaagagggaaaagttgaagattgtttacccatgctaaccacccatttgctttgttatagaaaagcaatgcggttttcagaacttttagagtgtttatggacagaatgagaaaatacagaaatggcacaggtttgaacgagtatcacactacgtacactacaaaacttggtgattctgcccctcggacccaatttgattccrttatggcttgattttttggcagtaatatgcttttgagtggatgccatatcttttgtattttctttttatatataacttcacatgcatgggt

SEQ ID NO: 74528 - DNA, 433 bp, Chicken  19866894357174_8
tttgattaggaaaactgaagtttacactgttgtttgctgcagggttcttaatattaattgtattttatcattgatatttaattaatcwtawtgggaatctaagagggaaaagttgaagattgtttacccatgctaaccacccatttgctttgttatagaaaagcaatgcggttttcagaacttttagagtgtttatggacagaatgagaaaatacagaaatggcacaggtttgaacgagtatcacactacgtacactacaaaacttggtgattctgcccctcggacccaatttgattccrttatggcttgattttttggcagtaatatgcttttgagtggatgccatatcttttgtattttctttttatatataacttcacatgcatgggtcttccacattcttcttcagtaaatgttaactgagttaaacaa

SEQ ID NO: 74529 - DNA, 600 bp, Chicken  19866894357175_1
ttttgctaaaatcctgtcagctctgtgaaaaagcaaaagctctttctttctgctctccttctttgcattttatttatttatttaggctgcagttttactgatacctcaattgcacagactcttctgggtcccttaaaagtactagagctgctttttgtagaagacattttactcagcccttgtgtctttatttcaaggtaaaagaaggtagttgaaagatgaaagacaaagaagtagagaaataaactcaggtctccagcctgcccagagtctcccctgtgtagcttacggttctgtgaygggtgaagcrtctccagagaggaagaagaggagaatgaagatgtttaatttgctggacccatctttccccatggtgcagaacaggatgtggtgagtaaaacatccacccagcctagtccagtggtgctcatactgctactctgcccctgagccaacccctttatactctgctgcaaacagtccaggggctggaggagataaggactaaggtccaggcaccatccagaaatgggcgaggctgcaaggaggagctagagccttctgaatccgggcagaagtccagatgcagaaggaaagagg

SEQ ID NO: 74530 - DNA, 600 bp, Chicken  19866894357175_2
atcctgtcagctctgtgaaaaagcaaaagctctttctttctgctctccttctttgcattttatttatttatttaggctgcagttttactgatacctcaattgcacagactcttctgggtcccttaaaagtactagagctgctttttgtagaagacattttactcagcccttgtgtctttatttcaaggtaaaagaaggtagttgaaagatgaaagacaaagaagtagagaaataaactcaggtctccagcctgcccagagtctcccctgtgtagcttacggttctgtgaygggtgaagcrtctccagagaggaagaagaggagaatgaagatgtttaatttgctggacccatctttccccatggtgcagaacaggatgtggtgagtaaaacatccacccagcctagtccagtggtgctcatactgctactctgcccctgagccaacccctttatactctgctgcaaacagtccaggggctggaggagataaggactaaggtccaggcaccatccagaaatgggcgaggctgcaaggaggagctagagccttctgaatccgggcagaagtccagatgcagaaggaaagaggaaggggagga

SEQ ID NO: 74531 - DNA, 600 bp, Chicken  19866894357178_1
ctcacctcctgcttgactctttcttcctcctcctcatgctgctctgggacatgttcttcctcctggcacagcctctcctcctccctaacaaccacattctcctcctggatctcctcctggacctcttccaggccctcccggtccagctgaatctgctccagtttgacctctgcttccctcacaccactgtcctcttcttcgtatgactgttgtggagatctagaggtgggggagaaaggtcaaagaacaaaaacacgttgttatgagtctagagataccattgggtgccttcccaggtartggtatagcatcattaaggttgaaaaagaccaataaagtcatttagaccagtcccaacacatccccactgaccacatccctcagtgccacatctacatggttctcaaacacccccagagacggtgactccaccacctccctgggcagcctatgccaataactgacctttctttctaagaagagatttttcctagcacccaacttgaacctcttctggcacaacttaaggtcattccctctcatcttatcactgttaactgggagaagaggcagaacccaacatttcaacaacctcctttc

SEQ ID NO: 74532 - DNA, 600 bp, Chicken  19866894357188_1
actggtccccttctcactgaacatccttgaagggacagaaagtcaacagcaactgtccgtcgacagctactggccactctggtcactgcaggacaaacatagaaccccctgattgagatgtctttcattctgctggtaaatgcactaaacgaggagcctaatccacgccgcagtgaaagatgtttgcactcagctaattaaatgtgaagttattaagagggggagaggactgacaagtcatacggtgaaattgtaaagagaaacagcaaacgttgtttcagcaagtcaaaacaaatcctyggtttcctggagtcatgcagcacgcactgtgcagatccggagaagcaaagcgtgcaagtcataaaagatccccaggcgctctgttactggaaatgatgcaagctcccaccactcctgtgcagaaatgacaacaaaacagtgctccggctgcagctgtctgatcactgccggagctgcctgagccctcccagtggctgaagtatgacagcaaaaaggatttggtgcattgggtttctctaggcatttttcaggaacctagcaatgagtgatacagcaacctgaaggacctgcctgcatttc

SEQ ID NO: 74533 - DNA, 599 bp, Chicken  19866894357192_1
  misc_feature (1)..(157): n is any nucleotide
nnnnnnnnnnnnnnnnnnnnnnnnnnnnnnnnnnnnnnnnnnnnnnnnnnnnnnnnnnnnnnnnnnnnnnnnnnnnnnnnnnnnnnnnnnnnnnnnnnnnnnnnnnnnnnnnnnnnnnnnnnnnnnnnnnnnnnnnnnnnnnnnnnnnnnnnnnnnncggggccggcagggagtgcgctgccgcctcacggcgcttcggggagcgctgcctggaagggcgcccggggcggcggtagcggtgtgcgggggcagcgctcagctgtgccgcggttggcgcgtttgctcctactgcggtatttwaggccgtgcttacagcggcactcttctcttgggtagcgcagagctgttgtcggggtggccttcagaggggtyggtctgcgrgagttggggctgcgtctcaggcagcgttctgmggcagcagcstcgggatgaaacggcgtttggtgcccgggtctcggctccgcgctgacccttcttgggcgagaggcggcgggccgtgccgggagggcgcggcggtgcctcgtagtgcctccccgcacctcacctggggctgcgttctcaaccagcagctgccgctgtgctctgtgcacgcaacggtc

SEQ ID NO: 74534 - DNA, 599 bp, Chicken  19866894357192_2
  misc_feature (1)..(85): n is any nucleotide
nnnnnnnnnnnnnnnnnnnnnnnnnnnnnnnnnnnnnnnnnnnnnnnnnnnnnnnnnnnnnnnnnnnnnnnnnnnnnnnnnnnnncggggccggcagggagtgcgctgccgcctcacggcgcttcggggagcgctgcctggaagggcgcccggggcggcggtagcggtgtgcgggggcagcgctcagctgtgccgcggttggcgcgtttgctcctactgcggtatttwaggccgtgcttacagcggcactcttctcttgggtagcgcagagctgttgtcggggtggccttcagaggggtyggtctgcgrgagttggggctgcgtctcaggcagcgttctgmggcagcagcstcgggatgaaacggcgtttggtgcccgggtctcggctccgcgctgacccttcttgggcgagaggcggcgggccgtgccgggagggcgcggcggtgcctcgtagtgcctccccgcacctcacctggggctgcgttctcaaccagcagctgccgctgtgctctgtgcacgcaacggtctgttaacgccgtggccgcctgtcctcgcagggcgctgccgtcaggggcgcggrkggctctcggcctgcctgt

SEQ ID NO: 74535 - DNA, 599 bp, Chicken  19866894357192_3
  misc_feature (1)..(76): n is any nucleotide
nnnnnnnnnnnnnnnnnnnnnnnnnnnnnnnnnnnnnnnnnnnnnnnnnnnnnnnnnnnnnnnnnnnnnnnnnnnncggggccggcagggagtgcgctgccgcctcacggcgcttcggggagcgctgcctggaagggcgcccggggcggcggtagcggtgtgcgggggcagcgctcagctgtgccgcggttggcgcgtttgctcctactgcggtatttwaggccgtgcttacagcggcactcttctcttgggtagcgcagagctgttgtcggggtggccttcagaggggtyggtctgcgrgagttggggctgcgtctcaggcagcgttctgmggcagcagcstcgggatgaaacggcgtttggtgcccgggtctcggctccgcgctgacccttcttgggcgagaggcggcgggccgtgccgggagggcgcggcggtgcctcgtagtgcctccccgcacctcacctggggctgcgttctcaaccagcagctgccgctgtgctctgtgcacgcaacggtctgttaacgccgtggccgcctgtcctcgcagggcgctgccgtcaggggcgcggrkggctctcggcctgcctgtgctgtcccc

SEQ ID NO: 74536 - DNA, 599 bp, Chicken  19866894357192_4
  misc_feature (1)..(44): n is any nucleotide
nnnnnnnnnnnnnnnnnnnnnnnnnnnnnnnnnnnnnnnnnnnncggggccggcagggagtgcgctgccgcctcacggcgcttcggggagcgctgcctggaagggcgcccggggcggcggtagcggtgtgcgggggcagcgctcagctgtgccgcggttggcgcgtttgctcctactgcggtatttwaggccgtgcttacagcggcactcttctcttgggtagcgcagagctgttgtcggggtggccttcagaggggtyggtctgcgrgagttggggctgcgtctcaggcagcgttctgmggcagcagcstcgggatgaaacggcgtttggtgcccgggtctcggctccgcgctgacccttcttgggcgagaggcggcgggccgtgccgggagggcgcggcggtgcctcgtagtgcctccccgcacctcacctggggctgcgttctcaaccagcagctgccgctgtgctctgtgcacgcaacggtctgttaacgccgtggccgcctgtcctcgcagggcgctgccgtcaggggcgcggrkggctctcggcctgcctgtgctgtccccttctgtgcwcagcacagcgagcagttttttag

SEQ ID NO: 74537 - DNA, 599 bp, Chicken  19866894357192_5
  misc_feature (1)..(34): n is any nucleotide
nnnnnnnnnnnnnnnnnnnnnnnnnnnnnnnnnncggggccggcagggagtgcgctgccgcctcacggcgcttcggggagcgctgcctggaagggcgcccggggcggcggtagcggtgtgcgggggcagcgctcagctgtgccgcggttggcgcgtttgctcctactgcggtatttwaggccgtgcttacagcggcactcttctcttgggtagcgcagagctgttgtcggggtggccttcagaggggtyggtctgcgrgagttggggctgcgtctcaggcagcgttctgmggcagcagcstcgggatgaaacggcgtttggtgcccgggtctcggctccgcgctgacccttcttgggcgagaggcggcgggccgtgccgggagggcgcggcggtgcctcgtagtgcctccccgcacctcacctggggctgcgttctcaaccagcagctgccgctgtgctctgtgcacgcaacggtctgttaacgccgtggccgcctgtcctcgcagggcgctgccgtcaggggcgcggrkggctctcggcctgcctgtgctgtccccttctgtgcwcagcacagcgagcagttttttagctggcattcg

SEQ ID NO: 74538 - DNA, 600 bp, Chicken  19866894357192_6
gggtggccttcagaggggtyggtctgcgrgagttggggctgcgtctcaggcagcgttctgmggcagcagcstcgggatgaaacggcgtttggtgcccgggtctcggctccgcgctgacccttcttgggcgagaggcggcgggccgtgccgggagggcgcggcggtgcctcgtagtgcctccccgcacctcacctggggctgcgttctcaaccagcagctgccgctgtgctctgtgcacgcaacggtctgttaacgccgtggccgcctgtcctcgcagggcgctgccgtcaggggcgcggrkggctctcggcctgcctgtgctgtccccttctgtgcwcagcacagcgagcagttttttagctggcattcgttgtacccgaggtttctgcttgcccagggtgactgggatctgctgttctgttttcagcttccaccacacataagctcttgtttcacgtgtatgctccccgacgtcgtctggtaaaagctcttggcttgtttgtgtgtgcttcaggaggattaaggtgactttttwcccacctgttagtctggactgactttgaaaaagctccggtgtggattctggttctctgagccatc

SEQ ID NO: 74539 - DNA, 600 bp, Chicken  19866894357192_7
ggtggccttcagaggggtyggtctgcgrgagttggggctgcgtctcaggcagcgttctgmggcagcagcstcgggatgaaacggcgtttggtgcccgggtctcggctccgcgctgacccttcttgggcgagaggcggcgggccgtgccgggagggcgcggcggtgcctcgtagtgcctccccgcacctcacctggggctgcgttctcaaccagcagctgccgctgtgctctgtgcacgcaacggtctgttaacgccgtggccgcctgtcctcgcagggcgctgccgtcaggggcgcggrkggctctcggcctgcctgtgctgtccccttctgtgcwcagcacagcgagcagttttttagctggcattcgttgtacccgaggtttctgcttgcccagggtgactgggatctgctgttctgttttcagcttccaccacacataagctcttgtttcacgtgtatgctccccgacgtcgtctggtaaaagctcttggcttgtttgtgtgtgcttcaggaggattaaggtgactttttwcccacctgttagtctggactgactttgaaaaagctccggtgtggattctggttctctgagccatcg

SEQ ID NO: 74540 - DNA, 600 bp, Chicken  19866894357192_8
gctgcgtctcaggcagcgttctgmggcagcagcstcgggatgaaacggcgtttggtgcccgggtctcggctccgcgctgacccttcttgggcgagaggcggcgggccgtgccgggagggcgcggcggtgcctcgtagtgcctccccgcacctcacctggggctgcgttctcaaccagcagctgccgctgtgctctgtgcacgcaacggtctgttaacgccgtggccgcctgtcctcgcagggcgctgccgtcaggggcgcggrkggctctcggcctgcctgtgctgtccccttctgtgcwcagcacagcgagcagttttttagctggcattcgttgtacccgaggtttctgcttgcccagggtgactgggatctgctgttctgttttcagcttccaccacacataagctcttgtttcacgtgtatgctccccgacgtcgtctggtaaaagctcttggcttgtttgtgtgtgcttcaggaggattaaggtgactttttwcccacctgttagtctggactgactttgaaaaagctccggtgtggattctggttctctgagccatcggaactcatggctcgatgctgctgaggctttaaagcc

SEQ ID NO: 74541 - DNA, 600 bp, Chicken  19866894357192_9
cacgcaacggtctgttaacgccgtggccgcctgtcctcgcagggcgctgccgtcaggggcgcggrkggctctcggcctgcctgtgctgtccccttctgtgcwcagcacagcgagcagttttttagctggcattcgttgtacccgaggtttctgcttgcccagggtgactgggatctgctgttctgttttcagcttccaccacacataagctcttgtttcacgtgtatgctccccgacgtcgtctggtaaaagctcttggcttgtttgtgtgtgcttcaggaggattaaggtgactttttwcccacctgttagtctggactgactttgaaaaagctccggtgtggattctggttctctgagccatcggaactcatggctcgatgctgctgaggctttaaagccagccaatgcctccctcttcctgggggctgttgtagtttgtgcttggtggttgtgctgttgttgtggttgttcatttggttttgttcccctggtgaattgaattttggataaattaacttctatctcaggcatttaatacgtgctgtgaagtgccacagagtcacttccccgtgttcatttctgttcctcccagacatc

SEQ ID NO: 74542 - DNA, 600 bp, Chicken  19866894357196_1
tgtgatgctggcttagggattagcattttgctcatattttgccagagagctttcagtggtggattaagtatgatgcattagatcatcgaacaaaatcgttgtgcaaaacttctgaattgaagcagacctacatagatcagcactaaaagtgtgtacttggacaatggatcttcagtaaatacgcatttttgctgttgtaggcttttttttttttttcagttaaattttagtaggagcagatcatagtcgtatgtaaattgaatgttcagctccttactgagttgcatatagtgttccatwatgtacaagcctgggcaagatctttctcactctatctggagctcataaaggtgtggaatccaatcaaaatacaaatcttggctaaggttgcataggcacttcttaacactgcagtaagagtgtccttttaaaacactgttttattccctcagtgttttcaactaccttctattgttcaacctcctgagcctccgctgtgttttttcttagtgtgagaaatatttgtttactgactgtagattttgttcctgtttttattagcttcaatccttgaaatctttttctgccatcagaacgagc

SEQ ID NO: 74543 - DNA, 600 bp, Chicken  19866894357209_1
gtatacttgggccatgcatgggcacagagaaatgtcctgaaatgaatttctcattcccagacagacaaatgctcgattacccttattcctttaccagcattaaggatcttatggggctttttagaccgttggagagcatggataacgatcacatttctgccatagcgaggctgttgttgtcatcctcttagctgcagtcggagagatcagaaaaacacttcattattaatctagggtctagtgtttgcatgagtttgtttttaatagcagtcataaaaggtagattaaagcattagagcygtgtttttagaggtcttcrtaggtacatgataaattggcagacagctgtttgatggtatgtgacatgttgtctggtactcaagtagcataacatttcccagctgcaatccagcatggtttgcataggattctgtyctgatatcacttgcttgctcrcagcaaattgagtgtattaaaatgtatctgagattgttcagctttactctgagagaccttcaatttctcattaattctagtagtccatgaggagttaacaactctctaaggcttctgtttctcaagagccatatttaattacct

SEQ ID NO: 74544 - DNA, 600 bp, Chicken  19866894357209_2
gggcacagagaaatgtcctgaaatgaatttctcattcccagacagacaaatgctcgattacccttattcctttaccagcattaaggatcttatggggctttttagaccgttggagagcatggataacgatcacatttctgccatagcgaggctgttgttgtcatcctcttagctgcagtcggagagatcagaaaaacacttcattattaatctagggtctagtgtttgcatgagtttgtttttaatagcagtcataaaaggtagattaaagcattagagcygtgtttttagaggtcttcrtaggtacatgataaattggcagacagctgtttgatggtatgtgacatgttgtctggtactcaagtagcataacatttcccagctgcaatccagcatggtttgcataggattctgtyctgatatcacttgcttgctcrcagcaaattgagtgtattaaaatgtatctgagattgttcagctttactctgagagaccttcaatttctcattaattctagtagtccatgaggagttaacaactctctaaggcttctgtttctcaagagccatatttaattacctggcagttggcctttatgtt

SEQ ID NO: 74545 - DNA, 600 bp, Chicken  19866894357209_3
gcatggataacgatcacatttctgccatagcgaggctgttgttgtcatcctcttagctgcagtcggagagatcagaaaaacacttcattattaatctagggtctagtgtttgcatgagtttgtttttaatagcagtcataaaaggtagattaaagcattagagcygtgtttttagaggtcttcrtaggtacatgataaattggcagacagctgtttgatggtatgtgacatgttgtctggtactcaagtagcataacatttcccagctgcaatccagcatggtttgcataggattctgtyctgatatcacttgcttgctcrcagcaaattgagtgtattaaaatgtatctgagattgttcagctttactctgagagaccttcaatttctcattaattctagtagtccatgaggagttaacaactctctaaggcttctgtttctcaagagccatatttaattacctggcagttggcctttatgttggggttttgtttggtgaatgcagagaaaaatcctttgtatcagactttgtggtgtttttgtattgtttcagtgtagtctccaaactggtcattccacttgtcaaagtgggttggct

SEQ ID NO: 74546 - DNA, 600 bp, Chicken  19866894357209_4
ctgccatagcgaggctgttgttgtcatcctcttagctgcagtcggagagatcagaaaaacacttcattattaatctagggtctagtgtttgcatgagtttgtttttaatagcagtcataaaaggtagattaaagcattagagcygtgtttttagaggtcttcrtaggtacatgataaattggcagacagctgtttgatggtatgtgacatgttgtctggtactcaagtagcataacatttcccagctgcaatccagcatggtttgcataggattctgtyctgatatcacttgcttgctcrcagcaaattgagtgtattaaaatgtatctgagattgttcagctttactctgagagaccttcaatttctcattaattctagtagtccatgaggagttaacaactctctaaggcttctgtttctcaagagccatatttaattacctggcagttggcctttatgttggggttttgtttggtgaatgcagagaaaaatcctttgtatcagactttgtggtgtttttgtattgtttcagtgtagtctccaaactggtcattccacttgtcaaagtgggttggcttttgcaatctcttttgttgtg

SEQ ID NO: 74547 - DNA, 600 bp, Chicken  19866894357209_5
tcagctttactctgagagaccttcaatttctcattaattctagtagtccatgaggagttaacaactctctaaggcttctgtttctcaagagccatatttaattacctggcagttggcctttatgttggggttttgtttggtgaatgcagagaaaaatcctttgtatcagactttgtggtgtttttgtattgtttcagtgtagtctccaaactggtcattccacttgtcaaagtgggttggcttttgcaatctcttttgttgtgggattcttctttgctttccccagtgcattccagaaamggtttgcttgcaggcaatgctatttttaaacttgtttcatttctgtttgatgtttggaaaggtttttttttcataattcttacctttcctttggctttgctgtgatatgctaatcaaatgttccttaactagttaaaactgaatgcttatttgttaaatgcagctggccaaggaagtccttcaggcatgcatccccatgtctctacttcattgttctcaggatcacagcatgggaaaaccaagtgtggtctacagtacggtgggcggctgcgcatcccatgaaccttctattgagacctc

SEQ ID NO: 74548 - DNA, 600 bp, Chicken  19866894357210_1
cagctacagtatttgtcaaatagcctgaagtaaacagaggcagcctttttttaagctcactatgataacataatcgatagcagcatatatatacaacgctgtccattctgtgattggaaatttctctttaaattatgaaacgtccaaagtttattttagctctagagaggcaaatgtaaggcatttgaaaaattatctatagtcgttaccggggtaacaatagggcattttctaaatgtttggttacctatgtaatttaatcatgttttttctctgaaggaaaaccaaacacacttgatrtgtaaagatagtgaaatagggcgaaaacagccaatacttgaagtttagggaagatgtagttttaaaatcctttgggtatcctgtgatcttaaaatcctttgagtatctaggaggaccaatatttaatattatattttcagtgcatcctcttctctggtgagttagttgctgaacatatttacaacacttctttaggcaagagtgtaatttttagtgcttggcaattttagagcgctgtgggaaaacgcagtaattatatcacctctcaacaactgtgagccaaaatatttcacattttgt

SEQ ID NO: 74549 - DNA, 600 bp, Chicken  19866894357213_1
gctcttgtcctttgctggtaaaactgcataggtaatggtggtgattaagttgaaaaatagtgttttatacctaagaatttcctcaatcaaacaatgttactgtgctcaccatatctgttgtactttccatggaaataaataggaggtattactttcagagcaacctacatgtatgtggcccaagacaattcctcttcacttcaatgcggcccatgcaagctaaaatgtttaataattcatgctatatggtgtccttgtttcgttaccatgaatggacagccttaggtttttctttcctcrttwatagtagcaagacagccagatgatcgtcttaatgyagttcccaactcagtttttgaaaggaactctaatatcagagcagacacatttcagtaagtctcttccattagctaatgactgctctggactgttttggtggtgctgtcaagctgactgaagaatgaagaaagaaaaccaagcctcaggtagatttgctgacctgataacctgaggagtgagwtgatgtgattgcacacaaaagaaaacaacttctgacttacacrtagcagtcacttcaaagaatagggagcaggataggta

SEQ ID NO: 74550 - DNA, 600 bp, Chicken  19866894357213_2
cttgtcctttgctggtaaaactgcataggtaatggtggtgattaagttgaaaaatagtgttttatacctaagaatttcctcaatcaaacaatgttactgtgctcaccatatctgttgtactttccatggaaataaataggaggtattactttcagagcaacctacatgtatgtggcccaagacaattcctcttcacttcaatgcggcccatgcaagctaaaatgtttaataattcatgctatatggtgtccttgtttcgttaccatgaatggacagccttaggtttttctttcctcrttwatagtagcaagacagccagatgatcgtcttaatgyagttcccaactcagtttttgaaaggaactctaatatcagagcagacacatttcagtaagtctcttccattagctaatgactgctctggactgttttggtggtgctgtcaagctgactgaagaatgaagaaagaaaaccaagcctcaggtagatttgctgacctgataacctgaggagtgagwtgatgtgattgcacacaaaagaaaacaacttctgacttacacrtagcagtcacttcaaagaatagggagcaggataggtaaaa

SEQ ID NO: 74551 - DNA, 600 bp, Chicken  19866894357213_3
tggtgattaagttgaaaaatagtgttttatacctaagaatttcctcaatcaaacaatgttactgtgctcaccatatctgttgtactttccatggaaataaataggaggtattactttcagagcaacctacatgtatgtggcccaagacaattcctcttcacttcaatgcggcccatgcaagctaaaatgtttaataattcatgctatatggtgtccttgtttcgttaccatgaatggacagccttaggtttttctttcctcrttwatagtagcaagacagccagatgatcgtcttaatgyagttcccaactcagtttttgaaaggaactctaatatcagagcagacacatttcagtaagtctcttccattagctaatgactgctctggactgttttggtggtgctgtcaagctgactgaagaatgaagaaagaaaaccaagcctcaggtagatttgctgacctgataacctgaggagtgagwtgatgtgattgcacacaaaagaaaacaacttctgacttacacrtagcagtcacttcaaagaatagggagcaggataggtaaaatacacgatcaagcttatacttacatgacctccact

SEQ ID NO: 74552 - DNA, 600 bp, Chicken  19866894357213_4
taaaatgtttaataattcatgctatatggtgtccttgtttcgttaccatgaatggacagccttaggtttttctttcctcrttwatagtagcaagacagccagatgatcgtcttaatgyagttcccaactcagtttttgaaaggaactctaatatcagagcagacacatttcagtaagtctcttccattagctaatgactgctctggactgttttggtggtgctgtcaagctgactgaagaatgaagaaagaaaaccaagcctcaggtagatttgctgacctgataacctgaggagtgagwtgatgtgattgcacacaaaagaaaacaacttctgacttacacrtagcagtcacttcaaagaatagggagcaggataggtaaaatacacgatcaagcttatacttacatgacctccactccagtaactgtctggggctttctgtggtgcttttaatggcagaagtatttctcaattaaacaccgaaataytggctctgaaccacagccctgtgacagcacactttggccgaatgcagtctgagctaatagatggatcccaaactgagagggcttccttgtggtttggcttgcctttgatcg

SEQ ID NO: 74553 - DNA, 600 bp, Chicken  19866894357213_5
taccatgaatggacagccttaggtttttctttcctcrttwatagtagcaagacagccagatgatcgtcttaatgyagttcccaactcagtttttgaaaggaactctaatatcagagcagacacatttcagtaagtctcttccattagctaatgactgctctggactgttttggtggtgctgtcaagctgactgaagaatgaagaaagaaaaccaagcctcaggtagatttgctgacctgataacctgaggagtgagwtgatgtgattgcacacaaaagaaaacaacttctgacttacacrtagcagtcacttcaaagaatagggagcaggataggtaaaatacacgatcaagcttatacttacatgacctccactccagtaactgtctggggctttctgtggtgcttttaatggcagaagtatttctcaattaaacaccgaaataytggctctgaaccacagccctgtgacagcacactttggccgaatgcagtctgagctaatagatggatcccaaactgagagggcttccttgtggtttggcttgcctttgatcgcagaacaccaaaccatgtttgaaagggcatgggcctgcacccg

SEQ ID NO: 74554 - DNA, 600 bp, Chicken  19866894357213_6
gctaatgactgctctggactgttttggtggtgctgtcaagctgactgaagaatgaagaaagaaaaccaagcctcaggtagatttgctgacctgataacctgaggagtgagwtgatgtgattgcacacaaaagaaaacaacttctgacttacacrtagcagtcacttcaaagaatagggagcaggataggtaaaatacacgatcaagcttatacttacatgacctccactccagtaactgtctggggctttctgtggtgcttttaatggcagaagtatttctcaattaaacaccgaaataytggctctgaaccacagccctgtgacagcacactttggccgaatgcagtctgagctaatagatggatcccaaactgagagggcttccttgtggtttggcttgcctttgatcgcagaacaccaaaccatgtttgaaagggcatgggcctgcacccgcctgactgccgtctggggaattagactcaggcccagactctcagaataaacctacacctacaagtgacaaggggactttctacaagcaaaggtgcctgagatctgtaacattttccaagactttattctgcaacagcaagtgcact

SEQ ID NO: 74555 - DNA, 600 bp, Chicken  19866894357214_1
agggtcctccccctgctgccccaccacaaagcccagggacatgcgtgagcagccaacatctttcatggccgtggcttctgcccctggagcactgcattggtgcccgacctgcctggggccctgctgcccagctctgtctgtgtgtccttccaactatctgtctagctcactgatctgaaagggttgttgcaggaaagctggaggaggaggaggaatgtctcgctcagccgtggcttcctttggaaagtctggaaaaaactgtggcatcttgacgtgcgtgaaggtctgactagcgaaagsacattttctttccaaagctgctttagagatgtgaatcatgagaaattaatgctcctggcagaatgaaaactgattcccctgagatgcaatgctggcagcagctctggcgcatcccttggatggaaaacacgagcgtcgctccmagcctcgccgtgctgcagcccagggctcaggacctgcccacccccagcagtggcactgctggcactcagcacgaggtgatggtcccactgccttgtcagccccatgtaacaccccgaggtctccatcacctgycccggtgtgtgttggaggtgatgg

SEQ ID NO: 74556 - DNA, 600 bp, Chicken  19866894357214_2
gtccttccaactatctgtctagctcactgatctgaaagggttgttgcaggaaagctggaggaggaggaggaatgtctcgctcagccgtggcttcctttggaaagtctggaaaaaactgtggcatcttgacgtgcgtgaaggtctgactagcgaaagsacattttctttccaaagctgctttagagatgtgaatcatgagaaattaatgctcctggcagaatgaaaactgattcccctgagatgcaatgctggcagcagctctggcgcatcccttggatggaaaacacgagcgtcgctccmagcctcgccgtgctgcagcccagggctcaggacctgcccacccccagcagtggcactgctggcactcagcacgaggtgatggtcccactgccttgtcagccccatgtaacaccccgaggtctccatcacctgycccggtgtgtgttggaggtgatgggctgctccctgcacaaggctcagaatcctgaataagcttccccacscccccacatttttrtattttgcctattaaaaggtaccacctgtaacctcatcaccccagcggcaccgctgcatttcagggatgaaagcatcatagaa

SEQ ID NO: 74557 - DNA, 522 bp, Chicken  19866894357214_3
cgtgaaggtctgactagcgaaagsacattttctttccaaagctgctttagagatgtgaatcatgagaaattaatgctcctggcagaatgaaaactgattcccctgagatgcaatgctggcagcagctctggcgcatcccttggatggaaaacacgagcgtcgctccmagcctcgccgtgctgcagcccagggctcaggacctgcccacccccagcagtggcactgctggcactcagcacgaggtgatggtcccactgccttgtcagccccatgtaacaccccgaggtctccatcacctgycccggtgtgtgttggaggtgatgggctgctccctgcacaaggctcagaatcctgaataagcttccccacscccccacatttttrtattttgcctattaaaaggtaccacctgtaacctcatcaccccagcggcaccgctgcatttcagggatgaaagcatcatagaacaactgatgctgggagggaccttaaagaccatccacttccaacccaacccagtgg

SEQ ID NO: 74558 - DNA, 452 bp, Chicken  19866894357214_4
taatgctcctggcagaatgaaaactgattcccctgagatgcaatgctggcagcagctctggcgcatcccttggatggaaaacacgagcgtcgctccmagcctcgccgtgctgcagcccagggctcaggacctgcccacccccagcagtggcactgctggcactcagcacgaggtgatggtcccactgccttgtcagccccatgtaacaccccgaggtctccatcacctgycccggtgtgtgttggaggtgatgggctgctccctgcacaaggctcagaatcctgaataagcttccccacscccccacatttttrtattttgcctattaaaaggtaccacctgtaacctcatcaccccagcggcaccgctgcatttcagggatgaaagcatcatagaacaactgatgctgggagggaccttaaagaccatccacttccaacccaacccagtgg

SEQ ID NO: 74559 - DNA, 438 bp, Chicken  19866894357214_5
gaatgaaaactgattcccctgagatgcaatgctggcagcagctctggcgcatcccttggatggaaaacacgagcgtcgctccmagcctcgccgtgctgcagcccagggctcaggacctgcccacccccagcagtggcactgctggcactcagcacgaggtgatggtcccactgccttgtcagccccatgtaacaccccgaggtctccatcacctgycccggtgtgtgttggaggtgatgggctgctccctgcacaaggctcagaatcctgaataagcttccccacscccccacatttttrtattttgcctattaaaaggtaccacctgtaacctcatcaccccagcggcaccgctgcatttcagggatgaaagcatcatagaacaactgatgctgggagggaccttaaagaccatccacttccaacccaacccagtgg

SEQ ID NO: 74560 - DNA, 599 bp, Chicken  19866894357219_1
  misc_feature (1)..(149): n is any nucleotide
nnnnnnnnnnnnnnnnnnnnnnnnnnnnnnnnnnnnnnnnnnnnnnnnnnnnnnnnnnnnnnnnnnnnnnnnnnnnnnnnnnnnnnnnnnnnnnnnnnnnnnnnnnnnnnnnnnnnnnnnnnnnnnnnnnnnnnnnnnnnnnnnnnnnntctgcagagcttctttgcagcaggacagcctctatactgtactcatatgtgaggctattcctcccttggtgtagaagtttacacttacccttgtagaaccttgtaaggttcctttctgcccaactgagaaaagtgtattcaggttcatatstgcttctggttttccctctttcccttatttctactgtataatttatattctctggctttttttttttwatttttttttcaggaacagattgttgtatatagtctgattttttttgagaatccctttgttttgccctttaggtaatatctatcacctttattataccagacttctcacccttttctctttggatcccctcagaagatacgtctccattaagatgccaacaaacttatagataaatgataatggtgtgttttaaaggcttttaacaaaaaggtagcataaccacattacct

SEQ ID NO: 74561 - DNA, 599 bp, Chicken  19866894357219_2
  misc_feature (1)..(81): n is any nucleotide
nnnnnnnnnnnnnnnnnnnnnnnnnnnnnnnnnnnnnnnnnnnnnnnnnnnnnnnnnnnnnnnnnnnnnnnnnnnnnnnnntctgcagagcttctttgcagcaggacagcctctatactgtactcatatgtgaggctattcctcccttggtgtagaagtttacacttacccttgtagaaccttgtaaggttcctttctgcccaactgagaaaagtgtattcaggttcatatstgcttctggttttccctctttcccttatttctactgtataatttatattctctggctttttttttttwatttttttttcaggaacagattgttgtatatagtctgattttttttgagaatccctttgttttgccctttaggtaatatctatcacctttattataccagacttctcacccttttctctttggatcccctcagaagatacgtctccattaagatgccaacaaacttatagataaatgataatggtgtgttttaaaggcttttaacaaaaaggtagcataaccacattacctttacatttatgcatcattccattttcactacttattttttttttaacttctaaattggcacattgatg

SEQ ID NO: 74562 - DNA, 600 bp, Chicken  19866894357226_1
tttttttttttttgactgaatgaggtaatactaccaagaaattaactactggataaaaataatcattcgcactttcttttaatcaactcagttcatctgcctttggagctgcaattctttctgtcatttagtaactttgtcttatatcccagaactccgtttttttggagtttaaaacattagagacagaaacagagtatgtctcagccagtacaggatacccaattcaatacatattttgaaatagataaatcagaaaactaacagttatttactaattgcaatgtattaccaaaaaamcaccaacgacaagaagaacaaaaaaaaaaaaccaaccaaaaacccacctctccaaaaacttaaaccaagcatgtaggtaccacatgggaaacaagtagctggaaacccaggtaagtcttgatgtgataagacctcaaagcattcatgcagaccaaagtgtgttggatcccatgaagtatgtcaatttttctttgtccatctgtattaacgtcagtgacggtggaggggaaatgagatctgtctgaggttcctgtagcaaaccacaggtataccagaaacaaatgatttgcaattttccca

SEQ ID NO: 74563 - DNA, 600 bp, Chicken  19866894357226_2
aaagcattcatgcagaccaaagtgtgttggatcccatgaagtatgtcaatttttctttgtccatctgtattaacgtcagtgacggtggaggggaaatgagatctgtctgaggttcctgtagcaaaccacaggtataccagaaacaaatgatttgcaattttcccagccgtgggaggaaacatcaacatgcttaaccaggcatattattctaattttaaacttaggcaaagcaaagccagcttagaaaaatattttctttcatactacctcagggtgcacagcaagctataatattctgawagcactgaaaggaattatcagtgaaaattgaagtccattgataaagaagcaggtttgatcctaactgcagctctgccccacaatagtttgctatarccagcttctcagactcgamctaacctcatatttgacttaattttkgtagaagttttcaaagcacatacatacactgcttcattataagcattccagtaagaaaaactgtcctgtagcatgttacccagactattttaatactgtactgcagagactgaaatagctgggggggggaaaaaaagaagaaaaaaacccaagaaacca

SEQ ID NO: 74564 - DNA, 600 bp, Chicken  19866894357226_3
tgagatctgtctgaggttcctgtagcaaaccacaggtataccagaaacaaatgatttgcaattttcccagccgtgggaggaaacatcaacatgcttaaccaggcatattattctaattttaaacttaggcaaagcaaagccagcttagaaaaatattttctttcatactacctcagggtgcacagcaagctataatattctgawagcactgaaaggaattatcagtgaaaattgaagtccattgataaagaagcaggtttgatcctaactgcagctctgccccacaatagtttgctatarccagcttctcagactcgamctaacctcatatttgacttaattttkgtagaagttttcaaagcacatacatacactgcttcattataagcattccagtaagaaaaactgtcctgtagcatgttacccagactattttaatactgtactgcagagactgaaatagctgggggggggaaaaaaagaagaaaaaaacccaagaaaccagtttttatcatttactgagcaaacatgaagtactacaaccctacagtataattttactatgggttatttccaacattttaaagtttcctaattact

SEQ ID NO: 74565 - DNA, 600 bp, Chicken  19866894357226_4
ctgtagcaaaccacaggtataccagaaacaaatgatttgcaattttcccagccgtgggaggaaacatcaacatgcttaaccaggcatattattctaattttaaacttaggcaaagcaaagccagcttagaaaaatattttctttcatactacctcagggtgcacagcaagctataatattctgawagcactgaaaggaattatcagtgaaaattgaagtccattgataaagaagcaggtttgatcctaactgcagctctgccccacaatagtttgctatarccagcttctcagactcgamctaacctcatatttgacttaattttkgtagaagttttcaaagcacatacatacactgcttcattataagcattccagtaagaaaaactgtcctgtagcatgttacccagactattttaatactgtactgcagagactgaaatagctgggggggggaaaaaaagaagaaaaaaacccaagaaaccagtttttatcatttactgagcaaacatgaagtactacaaccctacagtataattttactatgggttatttccaacattttaaagtttcctaattactggtatataacgcttgtcct

SEQ ID NO: 74566 - DNA, 580 bp, Chicken  19866894357226_5
aacaaatgatttgcaattttcccagccgtgggaggaaacatcaacatgcttaaccaggcatattattctaattttaaacttaggcaaagcaaagccagcttagaaaaatattttctttcatactacctcagggtgcacagcaagctataatattctgawagcactgaaaggaattatcagtgaaaattgaagtccattgataaagaagcaggtttgatcctaactgcagctctgccccacaatagtttgctatarccagcttctcagactcgamctaacctcatatttgacttaattttkgtagaagttttcaaagcacatacatacactgcttcattataagcattccagtaagaaaaactgtcctgtagcatgttacccagactattttaatactgtactgcagagactgaaatagctgggggggggaaaaaaagaagaaaaaaacccaagaaaccagtttttatcatttactgagcaaacatgaagtactacaaccctacagtataattttactatgggttatttccaacattttaaagtttcctaattactggtatataacgcttgtcctaaagct

SEQ ID NO: 74567 - DNA, 600 bp, Chicken  19866894357229_1
atgtgcggaaatcaaggaatttaccacccagaaaagaaccaagctaaatatgctagttaattccagcccctgcagttggtttgtctatttctaaagggtcaggtattgcttaggctcagaaaaagaatcaaaataaaagaccaggatgatatattttggggaaaacttgctagacagtcatggttctgaaagtttgcagtgacctctgtccaaaaggcaccacaactgtgctgttcagtgttaataaaaacataagaacaaggtgtttgggaagccactgtcctcaaaataaggcatgtytgtaagcagtacagggggaacaaacaggacagcctctgaaatcaaattaccagctgtagcagagttgtctgtcacctactgcaggcagtacacagcaaggatgtcctaagggaaatgatgctctccatttttggtttcatctcttctgacaatggtatgaaagcaaatggactttgtaaaagctggggtcttctggctcctcatttgctttytggtgccaagtgacctctacccttgatgctgagcgcagttctcagtcaggcatgtgagtgcagtatgtgtcagccattgcactgcaca

SEQ ID NO: 74568 - DNA, 600 bp, Chicken  19866894357229_2
aaaggcaccacaactgtgctgttcagtgttaataaaaacataagaacaaggtgtttgggaagccactgtcctcaaaataaggcatgtytgtaagcagtacagggggaacaaacaggacagcctctgaaatcaaattaccagctgtagcagagttgtctgtcacctactgcaggcagtacacagcaaggatgtcctaagggaaatgatgctctccatttttggtttcatctcttctgacaatggtatgaaagcaaatggactttgtaaaagctggggtcttctggctcctcatttgctttytggtgccaagtgacctctacccttgatgctgagcgcagttctcagtcaggcatgtgagtgcagtatgtgtcagccattgcactgcacacatacgtattttttatttatccttgggacatgcagggtgaaagacttcttgagcccctgctgtaatgcagcatgtcaacttggcagccctgcttagagaagaactcagcctcttccttccctcacccatacaaatgcttcgttttggcacgtgtgtcaacaagtgtgatcaggtgtaaagaggcatgaggcacagaagtgacgtagctgtca

SEQ ID NO: 74569 - DNA, 600 bp, Chicken  19866894357233_1
aaactaaaaaaccttggctagcttttagtctgtactgactgatgtgtcttttaggttattaaaaccctgggctatattaaatgatcttaaagatacaagcatgttattaggaagtcacttgagatactgttgagtgtgactgcagagctatgcaaattggagtcatttccatttgacatatgcactataactgttgaaagcttttttttttcagatttattttttatgtcttttgtagctaattcacaatctccttttaacactgtgaagtataattatttgccaacagcaaatccatgmtaacaaaaatatattttttgtttgcctgcagcctttcttttgatttcatgatgaggtgctgctattcaggggaaccagtgctggcctcrgagtacccagcagagcaggaaaacattgcagtcagaaaaagaaatacaattaattagcttaagcttctttccagcatcccaacactgggcctcctggtcatagtgagttgcccctgtgaacagatcagtcagaattaaaatctcaataggactaatagtgaagctgtgtcaactctgaggcttcttgctcttcttctgtaggggctacagc

SEQ ID NO: 74570 - DNA, 550 bp, Chicken  19866894357233_2
aagatacaagcatgttattaggaagtcacttgagatactgttgagtgtgactgcagagctatgcaaattggagtcatttccatttgacatatgcactataactgttgaaagcttttttttttcagatttattttttatgtcttttgtagctaattcacaatctccttttaacactgtgaagtataattatttgccaacagcaaatccatgmtaacaaaaatatattttttgtttgcctgcagcctttcttttgatttcatgatgaggtgctgctattcaggggaaccagtgctggcctcrgagtacccagcagagcaggaaaacattgcagtcagaaaaagaaatacaattaattagcttaagcttctttccagcatcccaacactgggcctcctggtcatagtgagttgcccctgtgaacagatcagtcagaattaaaatctcaataggactaatagtgaagctgtgtcaactctgaggcttcttgctcttcttctgtaggggctacagctagaaaatgacgtgtatttggggaaaattgtgatattaa

SEQ ID NO: 74571 - DNA, 600 bp, Chicken  19866894357239_1
ggggagggaggtgtttcccataagtacccaaaacacagcggagtgcggatggcggcagcaggttgctctcaatctgacagcatatgccttctatgaattggggaggtttcctggttggcagaaagcttggctttctcaggagtttgtctgggccagctgttgctttgaacggagtccagggagagttgggcaacagctcttctcacgtctgatgtgcagtttgtgtggtgtcactggcccaggaacaggctgctgtgtccagggagggtcggtgtgccgctgccgcgcagtgctggtgcygaacacaaggagtagcaggtgaggagctcattgagaggtcagcttcacaggcaaactgccccacggaggatggagacccagaacaaaactctcagaactgcagcgagaggagcttgctggcgttggaaagaggaatttcgtggtcaaccatgtcagcttgtgcaagggacttctgtaatgtgcataagggtacctgcaccctgcgtgtgacttgaaggagatcatccatactgtggctgagccagaaaccaggttggtgctgcctaggaaaagcacagcagccctcctgtggaagtctgc

SEQ ID NO: 74572 - DNA, 599 bp, Chicken  19866894357245_1
  misc_feature (1)..(106): n is any nucleotide
nnnnnnnnnnnnnnnnnnnnnnnnnnnnnnnnnnnnnnnnnnnnnnnnnnnnnnnnnnnnnnnnnnnnnnnnnnnnnnnnnnnnnnnnnnnnnnnnnnnnnnnnnnaatggtgcacagcagcagagcatgtccttgaacacgttgctcagaatgacagagcccattccagcagtccatggttctgggatatacctccttatcttgctggcatgtctcgtaatgaagtcatctgttgatagtgcggtgtggtttagctcaaagctatcaaattgagctaatctcccactgaataaacaacrcaaaggttcctggattcattcctatttccttaaaggagtacaatcaagtgcaggcaattaaaagagagagagagtgtgtaccagatattgcacctgattgcaggctcacagcccagggtgtgtatgggttctcttaacttttaaagaaaaaaagccttataaaacaattgmtgttttttctaatttttcagtgtattttttttcctgccgttccctttgggaagggagaacccaacaaccacccaaacagatcccaaacaatgggagcgaatttcctacaagaagggaaagattaaaat

SEQ ID NO: 74573 - DNA, 600 bp, Chicken  19866894357245_2
agtccatggttctgggatatacctccttatcttgctggcatgtctcgtaatgaagtcatctgttgatagtgcggtgtggtttagctcaaagctatcaaattgagctaatctcccactgaataaacaacrcaaaggttcctggattcattcctatttccttaaaggagtacaatcaagtgcaggcaattaaaagagagagagagtgtgtaccagatattgcacctgattgcaggctcacagcccagggtgtgtatgggttctcttaacttttaaagaaaaaaagccttataaaacaattgmtgttttttctaatttttcagtgtattttttttcctgccgttccctttgggaagggagaacccaacaaccacccaaacagatcccaaacaatgggagcgaatttcctacaagaagggaaagattaaaatgaatgttatacaaagtatgctgagaaggaacttttcttcctgctttcctcccagccttctcagaggcygtggcagaactttttacagtttccaccaaatgggtgcccagtgtcctggagcaactcttggaaattcagcctgcatggtttgacatggagatcgatggggttct

SEQ ID NO: 74574 - DNA, 594 bp, Chicken  19866894357245_3
gagagagtgtgtaccagatattgcacctgattgcaggctcacagcccagggtgtgtatgggttctcttaacttttaaagaaaaaaagccttataaaacaattgmtgttttttctaatttttcagtgtattttttttcctgccgttccctttgggaagggagaacccaacaaccacccaaacagatcccaaacaatgggagcgaatttcctacaagaagggaaagattaaaatgaatgttatacaaagtatgctgagaaggaacttttcttcctgctttcctcccagccttctcagaggcygtggcagaactttttacagtttccaccaaatgggtgcccagtgtcctggagcaactcttggaaattcagcctgcatggtttgacatggagatcgatggggttctctggcaaggctcatttctcctttacattcacctgatcagagaggcttgtctggctgtaatgcagtccaaatacgkgctttttgcgtgtaatgaggatacttgttgtaagtatgtgtcagtaatgatagtcattgtaagtatgtgagaacattgaatctcacagtgctataaaatcggagagcctactcac

SEQ ID NO: 74575 - DNA, 415 bp, Chicken  19866894357245_4
acagatcccaaacaatgggagcgaatttcctacaagaagggaaagattaaaatgaatgttatacaaagtatgctgagaaggaacttttcttcctgctttcctcccagccttctcagaggcygtggcagaactttttacagtttccaccaaatgggtgcccagtgtcctggagcaactcttggaaattcagcctgcatggtttgacatggagatcgatggggttctctggcaaggctcatttctcctttacattcacctgatcagagaggcttgtctggctgtaatgcagtccaaatacgkgctttttgcgtgtaatgaggatacttgttgtaagtatgtgtcagtaatgatagtcattgtaagtatgtgagaacattgaatctcacagtgctataaaatcggagagcctactcac

SEQ ID NO: 74576 - DNA, 600 bp, Chicken  19866894357247_1
ggtgggatggactgtgtgcaaatactcggaatctgaactaagtacagtatctgatttagtacagcagttcttgtgtgcgtgttcccagggacacatgagtcggttccttttagaaacgaagctctgcatatccaagtgagttttcatttttcactggcacttatttcagaaagtacagtttcagtcagtatctccgtatcttttcagtgaatgatgttattatacctccacatcttgagaggctctcaggatctgtagtgagatcaaagatgtcaagtactctctgatcttcattaaaarggagaggcaacagggagtgggctggctcatgsagtggaaagatcttttaaaaatcttggtctcttcaggcttcaataacaaagcaatcatagaatgacttaggttggaagggacccgagagaccatccacttccaaccccttgctgtgggcagggatgctactcaccagctcaggctgctcggggccccatccagcctggccttgaatgcatccagggatggggtacccacagcctgtgggcagcctgtgccagtgcctcaccaccgcagcaacaaccctactgtggctaaaagacgcag

SEQ ID NO: 74577 - DNA, 600 bp, Chicken  19866894357247_2
ctgaactaagtacagtatctgatttagtacagcagttcttgtgtgcgtgttcccagggacacatgagtcggttccttttagaaacgaagctctgcatatccaagtgagttttcatttttcactggcacttatttcagaaagtacagtttcagtcagtatctccgtatcttttcagtgaatgatgttattatacctccacatcttgagaggctctcaggatctgtagtgagatcaaagatgtcaagtactctctgatcttcattaaaarggagaggcaacagggagtgggctggctcatgsagtggaaagatcttttaaaaatcttggtctcttcaggcttcaataacaaagcaatcatagaatgacttaggttggaagggacccgagagaccatccacttccaaccccttgctgtgggcagggatgctactcaccagctcaggctgctcggggccccatccagcctggccttgaatgcatccagggatggggtacccacagcctgtgggcagcctgtgccagtgcctcaccaccgcagcaacaaccctactgtggctaaaagacgcagaataaaaggtagaacaatgctgaaatcagaca

SEQ ID NO: 74578 - DNA, 600 bp, Chicken  19866894357257_1
gcttgtgttcatagagggtgctttcgtatctcaacatttaaacctctgttttcagttgtctttttccatccttgtcacaggcgtgtagcagcgtttgaggctaagcaaaaacagctgaaaggacaacagaaggcagatggaaaaccactcggtcaagatggctccagataccgagggctctccaaagaggatagagctattgcagagagactggagaagctcagggaggaaaggaaacccagtgagttttggagggcaccagaaattccctgggagggaatgctgctacttgaaaaacgrtggagggaragggaagtgctgggcattcagtatctgccttcttagggaactgaaggcagtgatgggatcagagctgccacagtggccaggttctgcagtggttttagattaatcttccccttgagatttctcctgaaatggcttcacaatcctggggtagggtcttacctatgaaatcacttcctcattttttcattgtttggtggtaaaaatctgtgttgggcacagtagcagcagaatgaaagagagaggtcttctggccaatccattttgcagaagttatcctatatgtcattgtgc

SEQ ID NO: 74579 - DNA, 600 bp, Chicken  19866894357257_2
catagagggtgctttcgtatctcaacatttaaacctctgttttcagttgtctttttccatccttgtcacaggcgtgtagcagcgtttgaggctaagcaaaaacagctgaaaggacaacagaaggcagatggaaaaccactcggtcaagatggctccagataccgagggctctccaaagaggatagagctattgcagagagactggagaagctcagggaggaaaggaaacccagtgagttttggagggcaccagaaattccctgggagggaatgctgctacttgaaaaacgrtggagggaragggaagtgctgggcattcagtatctgccttcttagggaactgaaggcagtgatgggatcagagctgccacagtggccaggttctgcagtggttttagattaatcttccccttgagatttctcctgaaatggcttcacaatcctggggtagggtcttacctatgaaatcacttcctcattttttcattgtttggtggtaaaaatctgtgttgggcacagtagcagcagaatgaaagagagaggtcttctggccaatccattttgcagaagttatcctatatgtcattgtgctgagccaca

SEQ ID NO: 74580 - DNA, 600 bp, Chicken  19866894357261_1
ggactgaaatccatctcttgtcatcccacagcgtcctcctgtggcttaatgcaattatccttttaattaggctggaaaaataatccctatgccaacagtcgcagcataaaaaaccctaaaaaaaaaaatcctagaaaaccaaacccatgtcttgtactgtgcctttctcatcagcatctcacccaaaagagctgcaggaaacacagaacgcctggagaagaaacaaatgggatttcacacctgtttattaagcatgtaagtggagtctgaacagcaaagcatctgacaaacagaatcctyaaaggtaccattatgtccatttgcacactttcatttcaagaaccacagaaaccccaatttctaattattttactctgaaccatgtggcctttatgtcattctaagcgagttgctcttctctagttgttacagcttttgaattaatttgaagaattgctaaccccatcagcagcatgactggaggatctgctgtttgctgatggccctttcccgacaggattactgcctaaaagatggagcacagccctggcaggctgaattaaggtacgaatgttcccatttttaatcctctttgataga

SEQ ID NO: 74581 - DNA, 600 bp, Chicken  19866894357265_1
tggcagtggcctgataagcaaatcaatgttgttttagctttcttggtcaccttactgctccttctgctttgatgatgttttttatgatagatgtttgttacctcctgattaggtgatttatgtgaaaagtgagtttctactgattactcaacatagctctcagtaatacattagcctagatctgtgactgtgtaagagagaaatcatcgttaactgtgcatgacgtttgacagaccaggcaggtatgcatttatttattcttaattagaatgtccaaggtgatcatctgtccaaactttyaaaaaaaaaaaaaaaaagaaattatataagtttcagtatgaatcagtatatgctaccagtatcctaacgacagtggaagaaatgctgatttacaattatgtatatgagtatttcagaaacattgttttgaactatatatgtaaattgatgcttccttagacaaactatccatttgtcaaatctggcaaacagcgttgtgtcctgcatgactagatatggaactataagggcttcccagaaagtgatgcctcctaatttattctgttggcccacgaagtcaaaggcagatattggaggtat

SEQ ID NO: 74582 - DNA, 600 bp, Chicken  19866894357265_2; identical to SEQ ID NO: 74581

SEQ ID NO: 74583 - DNA, 600 bp, Chicken  19866894357267_1
tgagtctatgatgattctatgatctgtccccccgtgccatctgtcactgtcctcccccaggggcggcggagaagagctccaagcacggagccgaggatcgcacgcagaacatcattcatggtgctgaaagaccgcatgaagatccgcgagcgcaacaagccggagatcttcgagctgatccaggaggtgtttggggtcaccaagaccacgcacacgcagcagatgaaggcggtgaagcagagcgtcctggatggcacctccaagtggtcggccaagatcagcatcacgggtacatcaccycccacggggacactgcatccccgctgctcccatcatgggacatycctgtgggcacagctcttgcctcccctaactgcatcccctataagctacagcatttggggtgagagtggggatacagcagckccagcccttggagacgtcaccatccctgtgcacaaggacactgtgtgtcccagctgctcatcctgcagagtggctttggggggacttcgggtgctcagcgtggggacctcagcatggggacctcagcactgactttgctctttgtttgttgtctcctctgtgctgcgtgtggtt

SEQ ID NO: 74584 - DNA, 600 bp, Chicken  19866894357267_2
cactgtcctcccccaggggcggcggagaagagctccaagcacggagccgaggatcgcacgcagaacatcattcatggtgctgaaagaccgcatgaagatccgcgagcgcaacaagccggagatcttcgagctgatccaggaggtgtttggggtcaccaagaccacgcacacgcagcagatgaaggcggtgaagcagagcgtcctggatggcacctccaagtggtcggccaagatcagcatcacgggtacatcaccycccacggggacactgcatccccgctgctcccatcatgggacatycctgtgggcacagctcttgcctcccctaactgcatcccctataagctacagcatttggggtgagagtggggatacagcagckccagcccttggagacgtcaccatccctgtgcacaaggacactgtgtgtcccagctgctcatcctgcagagtggctttggggggacttcgggtgctcagcgtggggacctcagcatggggacctcagcactgactttgctctttgtttgttgtctcctctgtgctgcgtgtggttggtgtggatgggcgtctgtgccgcactgtgctgtgccttgctgc

SEQ ID NO: 74585 - DNA, 600 bp, Chicken  19866894357267_3
aaagaccgcatgaagatccgcgagcgcaacaagccggagatcttcgagctgatccaggaggtgtttggggtcaccaagaccacgcacacgcagcagatgaaggcggtgaagcagagcgtcctggatggcacctccaagtggtcggccaagatcagcatcacgggtacatcaccycccacggggacactgcatccccgctgctcccatcatgggacatycctgtgggcacagctcttgcctcccctaactgcatcccctataagctacagcatttggggtgagagtggggatacagcagckccagcccttggagacgtcaccatccctgtgcacaaggacactgtgtgtcccagctgctcatcctgcagagtggctttggggggacttcgggtgctcagcgtggggacctcagcatggggacctcagcactgactttgctctttgtttgttgtctcctctgtgctgcgtgtggttggtgtggatgggcgtctgtgccgcactgtgctgtgccttgctgcagtggtttgtgcccagggcctgcaagcaaaggataagacgggctccagtgacccctatgtgaccgtccaggttggaaagacg

SEQ ID NO: 74586 - DNA, 600 bp, Chicken  19866894357267_4
gacactgtgtgtcccagctgctcatcctgcagagtggctttggggggacttcgggtgctcagcgtggggacctcagcatggggacctcagcactgactttgctctttgtttgttgtctcctctgtgctgcgtgtggttggtgtggatgggcgtctgtgccgcactgtgctgtgccttgctgcagtggtttgtgcccagggcctgcaagcaaaggataagacgggctccagtgacccctatgtgaccgtccaggttggaaagacgaaaaaaaggactaaaaccatctatggcaatctcaayccggtctgggaggagaatttccatttgtaagttgggtggtgggggtggcagggagctgtctggagggggtccacaggagatggggctgtccctggttctgggcaaactgaggcacgtttccccgctcatcctggtccccactcccctctccctgcagtgagtgccataactcctccgaccgcatcaaagtccgtgtctgggatgaggatgacgacatcaagtcccgcgtcaagcagcgcttcaagagggagtccgacgacttcctgggccaaaccatcatcgaggtgcggacgctgagcg

SEQ ID NO: 74587 - DNA, 600 bp, Chicken  19866894357270_1
catgagaattttaattagggcagaaccaagcacacagctgaagtacaaccttcaaccacactccgttgtaccaaacaaaattaatccaatacatttttatagcatgctacaggtagctaattaattgtaatcacacaacagtcacaagattaacaaaatggctttatgtaggtagctagcactgctcactaagaacattactgtattcagtatacggtatgggaactgaatacatgcaggaaaattccatttctcctacaaagagagcagtgaccccaccgaacaggcagctcccttcayctgccacaaaagctctcagcgagggtgaggagtacactgtgcaaccagctgacacatgggctgagcatccactcacctgacggcagctgtggtacgttacaggaaacatcgctgctggagctgacaaagtacacatattcagttcaagggaaaatgttttccaactagtagttccagatttttgccttcgtactgttccaaatgcaaactcaaagaaatcttaattagtaatttcaatacagcaaacactatgatgaaaaataacaaacttttttttttttcaaactacatatagatact

SEQ ID NO: 74588 - DNA, 600 bp, Chicken  19866894357272_1
atggaattggaggcccacattttgagaagattccactcacttttagcatcagactgaggtacagaggtgactctgagggtttgtttctgcgggggagttcctgtgaagtaagctgaagtgtgaatttacactgtgtatactgttgggtctttaagtaggctgtaaattcaaaacctagcctactttgcagggatttccccaagtagataaaagccttaaattggccttctaatcatggaggcagacagaataaacagacatttccaaaactccagacccacacaggaatctctcaaatgyaggtgcaagtgagtgccagataacatataccatagtcctgcaaatacccttcttccttatctcccaaatcccacttccaccatctctctcagcatccctccgcttcaagacactacctgcaaaccccatgcccctaccccagcttcatgccagatttccatgtctcggtgcctggctcttcccttccccattctatatctagaggtccacatcctcctttgccctgaccctcatgggggatggtaaaatggttctggtacaaaggtgtctcctatcagttctttgcccctgaacaaacct

SEQ ID NO: 74589 - DNA, 600 bp, Chicken  19866894357274_1
ccttaaagatgctgtttttgtcctttctagttcttctgaagtaacaaatacagcttcggtaggaagtattagtttataataaactaaatactattagtttagtattgatttaatccaaccataattgctgttcaccattttgatccatttctcttttacaggaagagttatgaaacaagtagccgtgcttaaccttcataacctcaatactttcattctggatatgtaccacactttcccagcaaccataaatagagtacagagcccagtcttcaagatttgtttttgttttcagcaacwagacttctttccactaaaatttcatgtcaaaattaccagaaaaagaattatcccatattgacaagaccaacaaatattagtttaatattaagttataccttctgtggcatcaaacatatcagcaccattttgtagtggctttaaagctgttaaatatcccatcattgctgactctaaaggtttggtgcttcacaccatagctgaactcaattaactgtttgctgttcctcctttaaaatgaatcaacgcaaatttctggagaggttccaaattcctagaactccttttcaaatcactggg

SEQ ID NO: 74590 - DNA, 600 bp, Chicken  19866894357276_1
gaagctgaaaatggctgcttgagattttcctttctgtcgaactgaaaatgagagaaaagctaagactttctgggtgcaactgtagtttcccaatcaatagcaactgactgagcccgaaatgttctgcacagagcactgcatttcctgtcacagcctgaggtgaaaccttccactgcctagtgcgatgattcatttccaaaacttcagttatcacaacgcaggtgacctccaattttcacccatgtcttttccccacccttgctttcttttattctgtttctattaaaatgtgactcactrtgatggaattttgtcagagtccattaaacttgattctcttcctctccaaaccctgtttctaatacatgtgtcacaaacatgtattttaaatcttgttatttgttgttgtcatttcattggataggtctgctctttccagaagctgaattcagaagggctctgctgtgccaggtgctgtatacacataatgaaaccttttcccaggagctatttttaaaaagatcttccaggcctttaacgatacgctttctttctcttattttttttctgtttctcaggctactgttggtgctctcatga

SEQ ID NO: 74591 - DNA, 600 bp, Chicken  19866894357279_1
ggcagctatagttagtttatcgttaaagtgtgtcatagctagcattaaagaatgtctcccaaatctgacaaacagatggttcagggaacctgtccctttagtaactattagccaatgactggatcagataaccaaaaactatttttcctaatcaaaatgaatattttttttctgaattattagtactactattttgataacatcttaacagtgcagttttcctggccaattagtttccttctattttcattaatgttttggttttaatagtgcactacattaaagtttacatcttttttyactcctctgtagtcagatttcagaacaaatctgggaatagggtttgctttctaactcaggcaccctctgctggccttcccaaagcaaaacacaaaatatcagaaagtcttcatacacaactgtggctttgaagaccaaaaataaaataataataaaaataaaataacagaaaacagatttctttgtttctataccttttactatcagaatataagctacaaggaagatcagctttagggctagtttgtttgtttgtatttaatgaattcaagaaaataattscataatcaagcatgtgaa

SEQ ID NO: 74592 - DNA, 600 bp, Chicken  19866894357279_2
aagtttacatcttttttyactcctctgtagtcagatttcagaacaaatctgggaatagggtttgctttctaactcaggcaccctctgctggccttcccaaagcaaaacacaaaatatcagaaagtcttcatacacaactgtggctttgaagaccaaaaataaaataataataaaaataaaataacagaaaacagatttctttgtttctataccttttactatcagaatataagctacaaggaagatcagctttagggctagtttgtttgtttgtatttaatgaattcaagaaaataattscataatcaagcatgtgaacctgtggaatttctcaggcaaaaagtccaaatgtgaacatggcctaaaaagttgatcacagttccacttggctctttgtagaaagctgtgattggcattttaatgaaggtgttatgtaaggagctccagaagtttattctacttgtgggcttttttctactatttgctatatttactatttactatatttactatttactatatttaatagatgatactattaatcatctgagaaaatccttggatgtcagggaatcaaactggagcactatactttgtgaa

SEQ ID NO: 74593 - DNA, 600 bp, Chicken  19866894357284_1
aaaatactattttgaatgctctcctctgatttagctgagctagtggcaataacgtgtttaggcataggcttcagtatgctggaatgatcctgaaactaattttgcatgtgttggagttggaccgtggccacacacgtcagtatgctggaacagagttatctaaatcctgagccttattttacatgtgctggtgttggactgtggccctgcaatcttttaggtctccatctgtagatatgaaagccagggtgtgcccagtcactcgctgctgctcgctgctttcctgccacaggccatgtyggagctgaatgctcggcagccgcagccttgcagctccctccacaccagtgcaactgggagctcctcagagccctcctggcctcatgagcctacctacaaagcccctcttctgcctcgactggcactttgcacctattgcagctcttgtaccactgttttcctacatagctattgtgtgccacatcagggatgagaaataccaacctctcagacagatggtcccacagattcagtgagttaattcctctttccatactaggtaaacagcccactaatttttaagtaagctcacagacttaa

SEQ ID NO: 74594 - DNA, 600 bp, Chicken  19866894357284_2
agtgcaactgggagctcctcagagccctcctggcctcatgagcctacctacaaagcccctcttctgcctcgactggcactttgcacctattgcagctcttgtaccactgttttcctacatagctattgtgtgccacatcagggatgagaaataccaacctctcagacagatggtcccacagattcagtgagttaattcctctttccatactaggtaaacagcccactaatttttaagtaagctcacagacttaaggaaggtctctcagagcttcctagccttccattccctccaaaatasaagaaacastgtaggcacataaatctggagcaccaacataaagacagcaacgtgtagcgctgagacaagcaaaggtagctgcacaaagtgctcatcatcatcaccctaatgggaaccagtgacccagtgggacatgctgcccataacaaggaacaaagtttttgcgtgcttccttccacctgtttatggctcctccacatttatatttctacctgaaattaataaccctttgtctatatgaagcctggcagactaggaaaacaacaataaggtcaaaattgcacatctgaatgaagatct

SEQ ID NO: 74595 - DNA, 600 bp, Chicken  19866894357284_3
gggagctcctcagagccctcctggcctcatgagcctacctacaaagcccctcttctgcctcgactggcactttgcacctattgcagctcttgtaccactgttttcctacatagctattgtgtgccacatcagggatgagaaataccaacctctcagacagatggtcccacagattcagtgagttaattcctctttccatactaggtaaacagcccactaatttttaagtaagctcacagacttaaggaaggtctctcagagcttcctagccttccattccctccaaaatasaagaaacastgtaggcacataaatctggagcaccaacataaagacagcaacgtgtagcgctgagacaagcaaaggtagctgcacaaagtgctcatcatcatcaccctaatgggaaccagtgacccagtgggacatgctgcccataacaaggaacaaagtttttgcgtgcttccttccacctgtttatggctcctccacatttatatttctacctgaaattaataaccctttgtctatatgaagcctggcagactaggaaaacaacaataaggtcaaaattgcacatctgaatgaagatctagcatttct

SEQ ID NO: 74596 - DNA, 600 bp, Chicken  19866894357284_4
cgtgtagcgctgagacaagcaaaggtagctgcacaaagtgctcatcatcatcaccctaatgggaaccagtgacccagtgggacatgctgcccataacaaggaacaaagtttttgcgtgcttccttccacctgtttatggctcctccacatttatatttctacctgaaattaataaccctttgtctatatgaagcctggcagactaggaaaacaacaataaggtcaaaattgcacatctgaatgaagatctagcatttctttctgcaactagtcagacacaatttagtttattagctgccwcagagacagagaaagatgtattttagaagaaggggagttattccattcctgtgcttattagcaatgtactttctcaaattctatttccgcaaactccaatggtaaaagaaattcaaaaaacaggtagtctgcatgcacagaagcaccttttgtttaataaataattcaaccatgtattcctttttaatttaaaaacggtctgactgaatagtcaacaaagtgaactaaagttggcaaaatacagtgttgaaaaattaaaaagtgtattcaaggccatattcatttgcttcactcctacac

SEQ ID NO: 74597 - DNA, 600 bp, Chicken  19866894357289_1
tctgggggaaaagtaaccttccttgttacagtctgagcatactaggcaggagcatactacagcttttgattgcgtattaggtaataatgtcatggttttaaaaagaacattcaccaaggaccagaagtaatcattcaacagactatcagtatgtcttacttagaaacaattcagctcactttcttagagcattatttatttatttatttattacacatgaaagaaaattattcagctaacaactaccatacatggtattcagtgttgagcaactgtatttaaagttaagaatgcatctaygtttgctacatagaaaacttgaagctggtatacttaccaaagatcgtcgcatctgcattaatatactcataaagcaatcaaagctgatcattccttcyggactttgtagcaacttggttttctccatggtgttcactacagctgaagcatttaatgccatttctatccactcaagaaggtatcgcagggaacctcgctgggcagccaagccaagaagcaattcagaagctaacctacgacctaaagtgtctgccccagagttcggaattgttactcccttaagaaatgtcgttacttgcg

SEQ ID NO: 74598 - DNA, 600 bp, Chicken  19866894357289_2
taaaaagaacattcaccaaggaccagaagtaatcattcaacagactatcagtatgtcttacttagaaacaattcagctcactttcttagagcattatttatttatttatttattacacatgaaagaaaattattcagctaacaactaccatacatggtattcagtgttgagcaactgtatttaaagttaagaatgcatctaygtttgctacatagaaaacttgaagctggtatacttaccaaagatcgtcgcatctgcattaatatactcataaagcaatcaaagctgatcattccttcyggactttgtagcaacttggttttctccatggtgttcactacagctgaagcatttaatgccatttctatccactcaagaaggtatcgcagggaacctcgctgggcagccaagccaagaagcaattcagaagctaacctacgacctaaagtgtctgccccagagttcggaattgttactcccttaagaaatgtcgttacttgcgataaacagtccagccccattggtggaatcttgctttcgtttgctaaagataaaggtggtaaagagctcacgacttctattgcagtatggataacatcg

SEQ ID NO: 74599 - DNA, 600 bp, Chicken  19866894357296_1
atttaaaaatgtttgaacaatttttttgttaatagccactgaatattaactaaattgcaaatttaaaattgtttaataaatttaaaaatgtcaagaaaccatatggtgaaaggtgaaggtatctgtcacatgaaatacatccattaaaaggttcaggaaataaaaatgcccagcagaaatgaaatgaatgagtaagcatttcaatagaaggtgtcaaaaagtggttttttttcatctttttaattaggaaaggcttttcttttctttttttttttttttaagcaaaatttatattttctraatattcactgcttgtcatataaatatgacctacagaggccaaaactatggatcagcatgataaatactccaatactttgcagtgttgaaggccgttcccagaggtgttgattgtactgaaagatcagccttgtgagattgctggtaaaatcttcaaagttrttagctgactactgcagtatgtcactagctgtaagccagtgcttttcctggtaaggtatgtttattttgtataaaaaatttctgagttaaccttccttcactcattttctattagttacagagaaaatctctggttta

SEQ ID NO: 74600 - DNA, 600 bp, Chicken  19866894357296_2
aaaatgcccagcagaaatgaaatgaatgagtaagcatttcaatagaaggtgtcaaaaagtggttttttttcatctttttaattaggaaaggcttttcttttctttttttttttttttaagcaaaatttatattttctraatattcactgcttgtcatataaatatgacctacagaggccaaaactatggatcagcatgataaatactccaatactttgcagtgttgaaggccgttcccagaggtgttgattgtactgaaagatcagccttgtgagattgctggtaaaatcttcaaagttrttagctgactactgcagtatgtcactagctgtaagccagtgcttttcctggtaaggtatgtttattttgtataaaaaatttctgagttaaccttccttcactcattttctattagttacagagaaaatctctggtttagtatcttttccccatgcagcaggctcagtctcatgcttcgagagaaatatctctcatgttctcttcagctgtttcactttggtttgacccaatcagatcaagtagaacacacttgtgccagctgcagcacaactgcagtggactgacacacaaggaaactag

SEQ ID NO: 74601 - DNA, 389 bp, Chicken  19866894357296_3
gtaaggtatgtttattttgtataaaaaatttctgagttaaccttccttcactcattttctattagttacagagaaaatctctggtttagtatcttttccccatgcagcaggctcagtctcatgcttcgagagaaatatctctcatgttctcttcagctgtttcactttggtttgacccaatcagatcaagtagaacacacttgtgccagctgcagcacaactgcagtggactgacacacaaggaaactagagctgtagattcataccttagggaggcctgttaacctcgtctggctgtgmaaatccaccactctcattcagtttactaacaggaaatgtaagggtgctttatataatacaaaaatccttctcagttcataaattagcca

SEQ ID NO: 74602 - DNA, 599 bp, Chicken  19866894357301_1
  misc_feature (1)..(146): n is any nucleotide
nnnnnnnnnnnnnnnnnnnnnnnnnnnnnnnnnnnnnnnnnnnnnnnnnnnnnnnnnnnnnnnnnnnnnnnnnnnnnnnnnnnnnnnnnnnnnnnnnnnnnnnnnnnnnnnnnnnnnnnnnnnnnnnnnnnnnnnnnnnnnnnnnnattttcagtgaatctgaatatcatgaagcatgtcagaagttctcagggtcttgaacactacatttggaaaacgctctccaagaaaatccttccgcagattaaaccagagatcacatccccagctgatatagatgagattagttgattttccccmcttgaggatttgaccaaggaactgtatattatttgcatttgatttccaagagcaaactgaagctgatatatttcagatgattaaaatttcttataaaatctgcaagtatatccaataatcttctctggatttaattttatgaattaagctgagatatctccagccatgcaattaatcagatgaaagaaagattaaaaatacctggttgtagaaaatgttagagaatcagaggccctgttcttccaattccttcctctcacagcccagttttaaaagtgataagcaagaatgaccctgaa

SEQ ID NO: 74603 - DNA, 600 bp, Chicken  19866894357313_1
ttctctttttttctccatttctttttctcatttctcccttttctctttctcccgcttctcttccttccttccttccttccttcttctcattttcactcttttttcctccaattctttctccctctgctttctttctccttttttctccttttttctttctcctttttttcctctttctcattttttctcccttctttttttctttctcctttttcctctttttttcccctatttcttcccccatttccctctccttttccctttctgctttctcttcttctcccttccttctccctccamccctttccccagctctcccatctcccatttccaccattccctttcccccaccctttaccccccagcacagggccccgtccatccccattgtggccgggaccggggcaggagcagcgccaggagcggggtgtccccgccgtccccacgtccccatcccgcacacctcattttgggggcggggcagcggggggagcacagcctgtcccgtcccccccattgtacatagctcacctgtgtgtcgcatcgcccgtccccgccataggaataacgtagtcctccccggccccttattgtgaccag

SEQ ID NO: 74604 - DNA, 600 bp, Chicken  19866894357315_1
agatcaagttcttaaaatggctcaacattaggcttaaccttagcagctgaatggccttcagccacctagagatgactgtgcttaaaaccataagctattacagaaaccctaatgacccaacaactcagaacatgcctaataatgtttgtcttgccttttgttggtggtcaaaatgaatgagaaagagcctggtgggcacagctggctgctccagctcaatatgtataaatatatttaaaatagcaaataatgagttctgctgacttgatttctgactagccatacacgccttagtctatmatttcccaggtttttccagtggtttgcatgagccacagcagcagatgcttgtgtgtggggcgtgtgtaggggctttccagagtgctgaagaatcccctcccaaaggcacttggacaagcagaaggattgccagccctgggctccagcagagctaacacatgggctaccaaagtcagggtcctgcaagacaccaatgtgggccccacagaccacctctggtcctacagggagtttctgctggaccttagcatcctagaagtataaagcattctgagtggaagagacccacaaaggatcacc

SEQ ID NO: 74605 - DNA, 600 bp, Chicken  19866894357322_1
gcatcaccccgaggccaagcattgccccgagcccgagagcttcccggtgctgcggcgggggacgcccagccacatccctgtttatctgcgggttccggctggagttttgcatacgccggatttacagattccctttgaagctctggctgctgccggtccctcctctctgcctcggcggagataaagcagctcccgcagcctccgcacccgggggggatgctgacaccggctgtcacacacctccctgccccccctggccctgcaggtttgctccacatccccttcctcctttccccacaycccagcacgtggccggggctgcatccatccccgtcatccccacaccctcckgtgccagacaggagcggagcgtcccccggggtgcggagaagggcgatgccacctttctaatgaaaactgattggcactaatcccttctcattgtttactcgggactgatttaagcacatttcaggctagactgagcagttgagcatttctaatgtatttttctttctgctttaatgaccttgttcctgccaccccgctgctgactccctgctccggagagcgatgcggagatgagtgttaacttaatca

SEQ ID NO: 74606 - DNA, 600 bp, Chicken  19866894357322_2
gcggcgggggacgcccagccacatccctgtttatctgcgggttccggctggagttttgcatacgccggatttacagattccctttgaagctctggctgctgccggtccctcctctctgcctcggcggagataaagcagctcccgcagcctccgcacccgggggggatgctgacaccggctgtcacacacctccctgccccccctggccctgcaggtttgctccacatccccttcctcctttccccacaycccagcacgtggccggggctgcatccatccccgtcatccccacaccctcckgtgccagacaggagcggagcgtcccccggggtgcggagaagggcgatgccacctttctaatgaaaactgattggcactaatcccttctcattgtttactcgggactgatttaagcacatttcaggctagactgagcagttgagcatttctaatgtatttttctttctgctttaatgaccttgttcctgccaccccgctgctgactccctgctccggagagcgatgcggagatgagtgttaacttaatcaacttcatccagaaagaggaaaacctttgtaaggaaagagctctcctgggtg

SEQ ID NO: 74607 - DNA, 564 bp, Chicken  19866894357325_1
cgattaccgacgggcaccccgcggccctgcccctgccgcctcctccgcggcacggccgcccccggcgagagacccgcgttcccctcccaccaggagccaatggggtgagggtgcggcgctcactctgggtgtccgagagggagatcatggtggcggcggggcaacaacggggaaggagaaagagccgaacagcagcagcggggcgacaacggccacgtcttccggaaacacgcagcccccttcgcctcgccgccggctgaaaggagagcgccgattggcggggtggcgtccaatgagcakmtgccttgttcgcgtggctccgcccctccgctttcgttccgctgagcgggaggctcgtaacatcggcgtggattggggggagagggcagcacgtggtaacacccacgctcgcctcgctgtaggtgattggctgaggggagccggcagcggaagtaggggactgggggggcggagcttggtggtcggagggcaggtgggagggcgcggcagccgcggggtgtgtgtagccgcgtgggagcagggggtagcggggcgcggttagag

SEQ ID NO: 74608 - DNA, 563 bp, Chicken  19866894357325_2
gattaccgacgggcaccccgcggccctgcccctgccgcctcctccgcggcacggccgcccccggcgagagacccgcgttcccctcccaccaggagccaatggggtgagggtgcggcgctcactctgggtgtccgagagggagatcatggtggcggcggggcaacaacggggaaggagaaagagccgaacagcagcagcggggcgacaacggccacgtcttccggaaacacgcagcccccttcgcctcgccgccggctgaaaggagagcgccgattggcggggtggcgtccaatgagcakmtgccttgttcgcgtggctccgcccctccgctttcgttccgctgagcgggaggctcgtaacatcggcgtggattggggggagagggcagcacgtggtaacacccacgctcgcctcgctgtaggtgattggctgaggggagccggcagcggaagtaggggactgggggggcggagcttggtggtcggagggcaggtgggagggcgcggcagccgcggggtgtgtgtagccgcgtgggagcagggggtagcggggcgcggttagag

SEQ ID NO: 74609 - DNA, 599 bp, Chicken  19866894357326_1
  misc_feature (1)..(127): n is any nucleotide
nnnnnnnnnnnnnnnnnnnnnnnnnnnnnnnnnnnnnnnnnnnnnnnnnnnnnnnnnnnnnnnnnnnnnnnnnnnnnnnnnnnnnnnnnnnnnnnnnnnnnnnnnnnnnnnnnnnnnnnnnnnnnnngtgtgtgtagccgcgtgggagcagggggtagcggggcgcggttagaggttgcaggcgtcgtcgccgcggtttcgtcacgggcctcgggagatgtgggacttgctacactgaggtgggcgctgcccgcgtatctgcggaatgctctgcccgcaggtggcggacgctgggacggycggtttgcacgcttttccctgatgtgagttcaggtatctttctatttatgtactcgtttttctctcagtgagaggttatagacgtacatgttggggctttattgctgagggagggagctrtctctaagaagaggcgttattgtgggttttattgcctcagtatatgcaaacacagaatgccttgagctggagaggccgttaaagctcactcgggtccaacccccgtcacgaatagggctgccgcccagcagctcaggctggccagggccccatccaatctggcctggagcgcctatagg

SEQ ID NO: 74610 - DNA, 599 bp, Chicken  19866894357326_2
  misc_feature (1)..(7): n is any nucleotide
nnnnnnngtgtgtgtagccgcgtgggagcagggggtagcggggcgcggttagaggttgcaggcgtcgtcgccgcggtttcgtcacgggcctcgggagatgtgggacttgctacactgaggtgggcgctgcccgcgtatctgcggaatgctctgcccgcaggtggcggacgctgggacggycggtttgcacgcttttccctgatgtgagttcaggtatctttctatttatgtactcgtttttctctcagtgagaggttatagacgtacatgttggggctttattgctgagggagggagctrtctctaagaagaggcgttattgtgggttttattgcctcagtatatgcaaacacagaatgccttgagctggagaggccgttaaagctcactcgggtccaacccccgtcacgaatagggctgccgcccagcagctcaggctggccagggccccatccaatctggcctggagcgcctatagggatggggcacccacagcttctctgggcagcctgtgcctcattgctctcagagtaaaacatttccccctaacatctaacctagatttccccttttagttaaaaaccattctcccttgtcct

SEQ ID NO: 74611 - DNA, 600 bp, Chicken  19866894357332_1
cagccttgatcgctcctccctaggagggaatggataagcaaagaggggaaaaatggagggtaagaagaagggatgagaaaggagtggtgtcgatgttaaaaccaactctgtgatatgagtgtccatctgtccatattagtaattaataataatacgagtgatgtcatgggctgttggcaagagtatggggcctctgagatgactctggagcaagtcaaaggaaacagccgtggctgcacatgcagctagggagaggtttggctcaccaggtggttgcagtgccaagctgctctcagaggragggcaggagcatgctggctctgtgctaaygcttcagggaggccaggtcggctcctctgcaaaggagccccgtgagcagggaacgctgcgtggtcagaaagcatgtaacttgaaaagcacatggtctctctcaaccctttccaaccctgccaccagccaaggaacttcagttttatagtttcacacgtcttcatttttgtggacttaactggaccaacagcgttgttggggattaactcggagttaaacaagcattatgcggtctctgttctgctagaagaatgtaatgctcgttggcat

SEQ ID NO: 74612 - DNA, 600 bp, Chicken  19866894357332_2
tggataagcaaagaggggaaaaatggagggtaagaagaagggatgagaaaggagtggtgtcgatgttaaaaccaactctgtgatatgagtgtccatctgtccatattagtaattaataataatacgagtgatgtcatgggctgttggcaagagtatggggcctctgagatgactctggagcaagtcaaaggaaacagccgtggctgcacatgcagctagggagaggtttggctcaccaggtggttgcagtgccaagctgctctcagaggragggcaggagcatgctggctctgtgctaaygcttcagggaggccaggtcggctcctctgcaaaggagccccgtgagcagggaacgctgcgtggtcagaaagcatgtaacttgaaaagcacatggtctctctcaaccctttccaaccctgccaccagccaaggaacttcagttttatagtttcacacgtcttcatttttgtggacttaactggaccaacagcgttgttggggattaactcggagttaaacaagcattatgcggtctctgttctgctagaagaatgtaatgctcgttggcatggagtactcattgcatctccaggggctggg

SEQ ID NO: 74613 - DNA, 599 bp, Chicken  19866894357335_1
  misc_feature (1)..(93): n is any nucleotide
nnnnnnnnnnnnnnnnnnnnnnnnnnnnnnnnnnnnnnnnnnnnnnnnnnnnnnnnnnnnnnnnnnnnnnnnnnnnnnnnnnnnnnnnnnnnntgtaacaagtcttggctctgttccccactgaccagataaagccctgtcaaaggccgcgggatgctgaaccaaaataggattttatgatgatagtaacatcctggatatgtttctgttgttttgcaaaaagcagggaaaaaaaaaaagagatctgggatttcaaccagccccaaggatgagaagcagtgctggtaataaacaaacccrtatcaaggctagcatgacctcagaaactaccggagtgggaggagagggagcgaggctagagagragcgatgggacagggcctgaaatacgagtcgaggcagaggaagggaggccagacgtgaactgggcactgggagaggcttctgatgatgcagttgggctgtctgtgtgctggactaagcgatttgtcagcaggggaaggtgggctggagcacggagcagaacttttggaaaataaattacagccgcgagagagaggtttggaaggtcctgagtgcagaagaagcgcttgaatttgc

SEQ ID NO: 74614 - DNA, 599 bp, Chicken  19866894357335_2
  misc_feature (1)..(29): n is any nucleotide
nnnnnnnnnnnnnnnnnnnnnnnnnnnnntgtaacaagtcttggctctgttccccactgaccagataaagccctgtcaaaggccgcgggatgctgaaccaaaataggattttatgatgatagtaacatcctggatatgtttctgttgttttgcaaaaagcagggaaaaaaaaaaagagatctgggatttcaaccagccccaaggatgagaagcagtgctggtaataaacaaacccrtatcaaggctagcatgacctcagaaactaccggagtgggaggagagggagcgaggctagagagragcgatgggacagggcctgaaatacgagtcgaggcagaggaagggaggccagacgtgaactgggcactgggagaggcttctgatgatgcagttgggctgtctgtgtgctggactaagcgatttgtcagcaggggaaggtgggctggagcacggagcagaacttttggaaaataaattacagccgcgagagagaggtttggaaggtcctgagtgcagaagaagcgcttgaatttgcatggaggaactgaatgccttctcctttggctctgtggaaggcgtgctttcactgcacataggaa

SEQ ID NO: 74615 - DNA, 600 bp, Chicken  19866894357337_1
ttctgtctatgaaaattaatacatatatatttatataaaaactgacaacaattttgatctagatctcaccttatgcagaatttcctcctaaataactgcctaggaattgccttattccatttctcttgtctattctttggactaaatggcttgccaatgggcagccctctgctctccactgttatcaaccaatatacactgacaggtgaaattccatgagaaagaaagcatacgtataccaggaaataaaggaaaatgtgttagaaggaggccaccaacttcacacatcacaccaatctytggaccacctctgctttccaaggaaccacctaggagcaattctggtatagaacagtgccttttatcaactcctaaagaaagaaacttaaaaaaaaaaaaagtttctaagtctagttaaaatgtaaaatgtttctaacttcaagagagctgcagcttttctagggagcagccttggaatcctgtcagcatttattagcaccagcattagcttcgaacaataacttcatctgctcctttgaaacctactccgatttcaagacttgcttagaacaatgctttacttcacaaaagcacaatctc

SEQ ID NO: 74616 - DNA, 600 bp, Chicken  19866894357337_2
ccttttatcaactcctaaagaaagaaacttaaaaaaaaaaaaagtttctaagtctagttaaaatgtaaaatgtttctaacttcaagagagctgcagcttttctagggagcagccttggaatcctgtcagcatttattagcaccagcattagcttcgaacaataacttcatctgctcctttgaaacctactccgatttcaagacttgcttagaacaatgctttacttcacaaaagcacaatctctacagaagaatctacttcaaagcaagttgccagtaaggttcgtaacaactacaaccrcctgaccacctgwacataatgaaataaaatcagagtatcttagttgagttgccacttcaggcacgtcccatgcttctggagatataaagagctccgctgagaaggcaaaatcttggaaaaacagaagttacagttacaggcaatttggttttgatgtgaaggtttgtcatcagataatacagtgctcattaggcaacaccattcaaagttgcttaagagtaattggctcctctgccatttgaagatattgctttttaattgcacatttacaactgtatattctaatgaaaacagctggcg

SEQ ID NO: 74617 - DNA, 600 bp, Chicken  19866894357337_3
cctaaagaaagaaacttaaaaaaaaaaaaagtttctaagtctagttaaaatgtaaaatgtttctaacttcaagagagctgcagcttttctagggagcagccttggaatcctgtcagcatttattagcaccagcattagcttcgaacaataacttcatctgctcctttgaaacctactccgatttcaagacttgcttagaacaatgctttacttcacaaaagcacaatctctacagaagaatctacttcaaagcaagttgccagtaaggttcgtaacaactacaaccrcctgaccacctgwacataatgaaataaaatcagagtatcttagttgagttgccacttcaggcacgtcccatgcttctggagatataaagagctccgctgagaaggcaaaatcttggaaaaacagaagttacagttacaggcaatttggttttgatgtgaaggtttgtcatcagataatacagtgctcattaggcaacaccattcaaagttgcttaagagtaattggctcctctgccatttgaagatattgctttttaattgcacatttacaactgtatattctaatgaaaacagctggcgtgaaactgtaaat

SEQ ID NO: 74618 - DNA, 600 bp, Chicken  19866894357337_4
cggtggtaaaagattactattttcataccttcaatcattccttccaaaaatgaagccccaaatgagaaaggcaacttctcttactgagtggcttaactgctcgcctctgcttttgacagctcacttcatcaaaaacagctaaaatataactgattgaacagacattctcttttcaactgggcttcagcagaagttattttcttaatttttagagctgaatgatgaaggggcaggtctgattttgttgtctgattgaccaagtctaatcagaattatttctgcacactgcttcactacagytgtagccccattaaacactaagtgttctggaggcccmttccctttcagcttcccactgtgattcgtacttttcagacagtagctactcagtgggctactcaaaacattcaaaaaaatggagatgctatatttaatggtaagctcaaaacccacagcaaaaaatctgtcacttggctttgtcaggatggcagctatgaaaacagactctttaaggtggagacttaaaaagaaccctatgaactggttttcttaccccacaatacgtttttattatgagaaagctttcagttgtaacagtaa

SEQ ID NO: 74619 - DNA, 600 bp, Chicken  19866894357337_5
ttccttccaaaaatgaagccccaaatgagaaaggcaacttctcttactgagtggcttaactgctcgcctctgcttttgacagctcacttcatcaaaaacagctaaaatataactgattgaacagacattctcttttcaactgggcttcagcagaagttattttcttaatttttagagctgaatgatgaaggggcaggtctgattttgttgtctgattgaccaagtctaatcagaattatttctgcacactgcttcactacagytgtagccccattaaacactaagtgttctggaggcccmttccctttcagcttcccactgtgattcgtacttttcagacagtagctactcagtgggctactcaaaacattcaaaaaaatggagatgctatatttaatggtaagctcaaaacccacagcaaaaaatctgtcacttggctttgtcaggatggcagctatgaaaacagactctttaaggtggagacttaaaaagaaccctatgaactggttttcttaccccacaatacgtttttattatgagaaagctttcagttgtaacagtaagttttttctttgacagaaataatcatgtatgcgtcaa

SEQ ID NO: 74620 - DNA, 600 bp, Chicken  19866894357339_1
cctgtaagtcagagcagagctcccagtaccaatcctgccttagtggggctctgaataaggagggtctttggtttacatcagctcagttcagttgggattgttcagccttaaggatgttgccctgcgactgtttaacagtgtctgtcttttttatatttgccttccattggtacgttctgcgctggagccgcgtgcagctccacgcgtgacacctcttttatttttgtaatacaaggtttccaagccttccctgtcttgtcctgtgcttccagggacacggggaggtgggagcagtggtcwgatcccatccgttgctgtacaaagagcctctgctcacataggaccattcctggggatgcgcgagtgatgctggggctgagacagatgttatctggggagcaaacccaggatttcacattgcacaccagcgagctacaaagcagctgtgaccacaattcagcttcccacagagcccagagatcacccttggagggaattcaccgccgtgtgaattctgtctgcccttttgcctgcatgcactctgtggctcgcttgctcgcttccctccgtgccaacgctgtgcccagtcccagcaggcag

SEQ ID NO: 74621 - DNA, 600 bp, Chicken  19866894357341_1
caaaggtactgcaggcattatgaaaatgatcttaaataacaatacattctactctagctcagacagacactgaaaactttgggcagtaaatgactaaaagacactggtctgtgggatgctgaagtagcctggaatggaaccaaggtccatagaagtctacaagaggtgcccagtgcatgcattcagctttggcctgggtcctcagatgagttttccagaagtgctcagtcttgttactcctatctgcagtgggagcagggaagccagcgctgagccttcctgggctgctggatttaactstctctgtgagtgggttaaaagcatggaggggagggggcagaactgcattatcgttagatgctgtatgctctcccaagagctggttttgcaagtggctcaaactcagctgggaaactccttttaccacactgccaatgtgaattgtattcttctgcccagatgtgccatgccagtggcagtgaatgcataacttagtgagcttcctgagctctctggcttctgctgtcttcaggctgcccttaactacacttgaacagacggcgaggttggtatggcagcctccataccctgctggagggt

SEQ ID NO: 74622 - DNA, 600 bp, Chicken  19866894357341_2
taattcttctaactggggaacaaagcacaacctaaatgcaataaaaacaagagcaagtcttcctgcaagtacaagatcaggctgttctttcccactgaggctatctgagccaggcagcctttcccctctcatcttcaaagcccttgatttaaggaaggagaacaattatgcaatcagtaaggataatggctatttacttttggaaacaatggacctgatgaaccacaaaaaatgacctaattttcagaagcacatttgccttggagcaaaccgtcttggtttggaatggaagtaagtgcrttatcttcatgrggtggtaggaagtgaccttgtgtcactggctttctcttgagattgatgtggcccaaatcatggaagtacatcaggttggaaaactatgcaaagatgtttagagtaatgaacacaaaataaaaaaccacaacttcataatgattccaaattctcaaacttataagtcaacttgctgtaatcacctcgcgtatgctgaaagtatggcttttctctgactgcagtgggattttgccacaaattcgtcactgtgtggaaaatagctgccctgtttagacatgtccacttacg

SEQ ID NO: 74623 - DNA, 600 bp, Chicken  19866894357341_3
ctggggaacaaagcacaacctaaatgcaataaaaacaagagcaagtcttcctgcaagtacaagatcaggctgttctttcccactgaggctatctgagccaggcagcctttcccctctcatcttcaaagcccttgatttaaggaaggagaacaattatgcaatcagtaaggataatggctatttacttttggaaacaatggacctgatgaaccacaaaaaatgacctaattttcagaagcacatttgccttggagcaaaccgtcttggtttggaatggaagtaagtgcrttatcttcatgrggtggtaggaagtgaccttgtgtcactggctttctcttgagattgatgtggcccaaatcatggaagtacatcaggttggaaaactatgcaaagatgtttagagtaatgaacacaaaataaaaaaccacaacttcataatgattccaaattctcaaacttataagtcaacttgctgtaatcacctcgcgtatgctgaaagtatggcttttctctgactgcagtgggattttgccacaaattcgtcactgtgtggaaaatagctgccctgtttagacatgtccacttacgttacagtgtaat

SEQ ID NO: 74624 - DNA, 472 bp, Chicken  19866894357343_1
tgctacgtgttgataaaaatcacaaaatacctagcattaaattgcctattgcattattcctctaaattaaaacacaacttttgtaaaaatgggtcttctgctttttgttatgttacatttagcctttttagggacatttctctggagtaatttgctccccctgtagctgaattttgccttatcatgcaatttctggggtgttgtaatgctgcttatctttgaaatcaggtattagatgagaataaactagaaagcttacagcaattacaattagtatgtgtattcgaacctcacagatayacaaataattaaaaagtaccccttttgtctgcttcagcatacataaaggatgaaagtggtcttaagatttagaaagctaattacaattggttgtaatggacagagtgggaagaacccgcatgtaggaacaagggagtcgtttcatgttctttcatattggttactacagcag

SEQ ID NO: 74625 - DNA, 600 bp, Chicken  19866894357357_1
atttatttcagaccttatccttcaactcatttttctgaaatacttaatgtgatattcagtctttacatattactttcataatttttgttttcagctgatattctttatcacaagagcctctaactctttaaacacaatttttaatctgttccatgcaaaggcactagaaaacaatagctcaaaaggtcttcgtatcatttattgcttgcaatagacttttaacaaaaaatagaagaacctgttttcccacaatcaatgtcatattcccttcctcgtggcatagcagaatgctataataayatggtagaatatcgaaagaaggtagataatttgagatctaaagttgtcataccttttaaaggccaaagaaaacattccaattttcatcttaatttctttctttggtgccttcacattgaaatggaactatattcaaatatgtttttcaaatgtgtagttataccttaccaatctttttttaaacactcaccaatgtttcttctgctgtatgcccttggacatgggagaaaagcctttcagaagtcactgattcacgtgtggtctgtcytaatacataaccagactkgctsttagaacaca

SEQ ID NO: 74626 - DNA, 600 bp, Chicken  19866894357357_2
ttcctcgtggcatagcagaatgctataataayatggtagaatatcgaaagaaggtagataatttgagatctaaagttgtcataccttttaaaggccaaagaaaacattccaattttcatcttaatttctttctttggtgccttcacattgaaatggaactatattcaaatatgtttttcaaatgtgtagttataccttaccaatctttttttaaacactcaccaatgtttcttctgctgtatgcccttggacatgggagaaaagcctttcagaagtcactgattcacgtgtggtctgtcytaatacataaccagactkgctsttagaacacagctgttctccaagcaagcccatctcaccagactcttcactgagttccttgcaaagtgatttcaattcttcatgtttrcttttttctgttgctttcttaagagggccrtcaacctcttctatgctacattccctcctcatttcaaaatgcattccctgtcgatgctcaatttgtgtttgtgtttcttccttcttctgcctagcaattcttgataactcactctgtttggcaaacgctacactcattgacacaattaccgaagaaataag

SEQ ID NO: 74627 - DNA, 600 bp, Chicken  19866894357357_3
aatgctataataayatggtagaatatcgaaagaaggtagataatttgagatctaaagttgtcataccttttaaaggccaaagaaaacattccaattttcatcttaatttctttctttggtgccttcacattgaaatggaactatattcaaatatgtttttcaaatgtgtagttataccttaccaatctttttttaaacactcaccaatgtttcttctgctgtatgcccttggacatgggagaaaagcctttcagaagtcactgattcacgtgtggtctgtcytaatacataaccagactkgctsttagaacacagctgttctccaagcaagcccatctcaccagactcttcactgagttccttgcaaagtgatttcaattcttcatgtttrcttttttctgttgctttcttaagagggccrtcaacctcttctatgctacattccctcctcatttcaaaatgcattccctgtcgatgctcaatttgtgtttgtgtttcttccttcttctgcctagcaattcttgataactcactctgtttggcaaacgctacactcattgacacaattaccgaagaaataagaaaaatatgcattaattt

SEQ ID NO: 74628 - DNA, 600 bp, Chicken  19866894357357_4
ctataataayatggtagaatatcgaaagaaggtagataatttgagatctaaagttgtcataccttttaaaggccaaagaaaacattccaattttcatcttaatttctttctttggtgccttcacattgaaatggaactatattcaaatatgtttttcaaatgtgtagttataccttaccaatctttttttaaacactcaccaatgtttcttctgctgtatgcccttggacatgggagaaaagcctttcagaagtcactgattcacgtgtggtctgtcytaatacataaccagactkgctsttagaacacagctgttctccaagcaagcccatctcaccagactcttcactgagttccttgcaaagtgatttcaattcttcatgtttrcttttttctgttgctttcttaagagggccrtcaacctcttctatgctacattccctcctcatttcaaaatgcattccctgtcgatgctcaatttgtgtttgtgtttcttccttcttctgcctagcaattcttgataactcactctgtttggcaaacgctacactcattgacacaattaccgaagaaataagaaaaatatgcattaatttatac

SEQ ID NO: 74629 - DNA, 525 bp, Chicken  19866894357357_5
caattttcatcttaatttctttctttggtgccttcacattgaaatggaactatattcaaatatgtttttcaaatgtgtagttataccttaccaatctttttttaaacactcaccaatgtttcttctgctgtatgcccttggacatgggagaaaagcctttcagaagtcactgattcacgtgtggtctgtcytaatacataaccagactkgctsttagaacacagctgttctccaagcaagcccatctcaccagactcttcactgagttccttgcaaagtgatttcaattcttcatgtttrcttttttctgttgctttcttaagagggccrtcaacctcttctatgctacattccctcctcatttcaaaatgcattccctgtcgatgctcaatttgtgtttgtgtttcttccttcttctgcctagcaattcttgataactcactctgtttggcaaacgctacactcattgacacaattaccgaagaaataagaaaaatatgcattaatttatactttgtagtatct

SEQ ID NO: 74630 - DNA, 495 bp, Chicken  19866894357357_6
ccttcacattgaaatggaactatattcaaatatgtttttcaaatgtgtagttataccttaccaatctttttttaaacactcaccaatgtttcttctgctgtatgcccttggacatgggagaaaagcctttcagaagtcactgattcacgtgtggtctgtcytaatacataaccagactkgctsttagaacacagctgttctccaagcaagcccatctcaccagactcttcactgagttccttgcaaagtgatttcaattcttcatgtttrcttttttctgttgctttcttaagagggccrtcaacctcttctatgctacattccctcctcatttcaaaatgcattccctgtcgatgctcaatttgtgtttgtgtttcttccttcttctgcctagcaattcttgataactcactctgtttggcaaacgctacactcattgacacaattaccgaagaaataagaaaaatatgcattaatttatactttgtagtatct

SEQ ID NO: 74631 - DNA, 599 bp, Chicken  19866894357364_1
  misc_feature (1)..(48): n is any nucleotide
nnnnnnnnnnnnnnnnnnnnnnnnnnnnnnnnnnnnnnnnnnnnnnnntgaaggacacttgcagagttactcttacgcagaaacacgtacttttattcagttgtcttcgtatcattcctaagagctttccacgcttcagattccaaacacgcaattgttatgatcccataagatttagagaattgctgttgcatggtgatattcttctgtactggagaaggcaatacctattttttaaaaaacttactgtgtcacaaagcctgtcacaaataaggagaaatgttatatgtggaatttttragtgaatatttgagaatttcaggaatttctaaattaatgttccatgtacgtatgtatgttttaatgtttattatgtatttctaatgtagccatgatttaggctgtagctttgtaataagatttaatccagctgaacacttgatgtttctaacacagtagtaatcttattttacattatraatttacrttattgcatgcaattatgtattaaaaaaaacttgaataacaatagtattatttgatatgtgaattctaagtattataaaattgtttgttttttaaaatgtaagcttttcagt

SEQ ID NO: 74632 - DNA, 600 bp, Chicken  19866894357364_2
gaattgctgttgcatggtgatattcttctgtactggagaaggcaatacctattttttaaaaaacttactgtgtcacaaagcctgtcacaaataaggagaaatgttatatgtggaatttttragtgaatatttgagaatttcaggaatttctaaattaatgttccatgtacgtatgtatgttttaatgtttattatgtatttctaatgtagccatgatttaggctgtagctttgtaataagatttaatccagctgaacacttgatgtttctaacacagtagtaatcttattttacattatraatttacrttattgcatgcaattatgtattaaaaaaaacttgaataacaatagtattatttgatatgtgaattctaagtattataaaattgtttgttttttaaaatgtaagcttttcagtttagatgctggaacacttgaaattggcgcccattcagtaagggcattttcacctacaacctacaacttataattgcttgatatccattatagtaccaataaaagttgagacaaattcaaatttaacatatgtatattttctgtcattaatactctctgtgagctttagaatatgctctca

SEQ ID NO: 74633 - DNA, 600 bp, Chicken  19866894357364_3
gttgcatggtgatattcttctgtactggagaaggcaatacctattttttaaaaaacttactgtgtcacaaagcctgtcacaaataaggagaaatgttatatgtggaatttttragtgaatatttgagaatttcaggaatttctaaattaatgttccatgtacgtatgtatgttttaatgtttattatgtatttctaatgtagccatgatttaggctgtagctttgtaataagatttaatccagctgaacacttgatgtttctaacacagtagtaatcttattttacattatraatttacrttattgcatgcaattatgtattaaaaaaaacttgaataacaatagtattatttgatatgtgaattctaagtattataaaattgtttgttttttaaaatgtaagcttttcagtttagatgctggaacacttgaaattggcgcccattcagtaagggcattttcacctacaacctacaacttataattgcttgatatccattatagtaccaataaaagttgagacaaattcaaatttaacatatgtatattttctgtcattaatactctctgtgagctttagaatatgctctcagtgcatct

SEQ ID NO: 74634 - DNA, 600 bp, Chicken  19866894357364_4
tactggagaaggcaatacctattttttaaaaaacttactgtgtcacaaagcctgtcacaaataaggagaaatgttatatgtggaatttttragtgaatatttgagaatttcaggaatttctaaattaatgttccatgtacgtatgtatgttttaatgtttattatgtatttctaatgtagccatgatttaggctgtagctttgtaataagatttaatccagctgaacacttgatgtttctaacacagtagtaatcttattttacattatraatttacrttattgcatgcaattatgtatraaaaaaaacttgaataacaatagtattatttgatatgtgaattctaagtattataaaattgtttgttttttaaaatgtaagcttttcagtttagatgctggaacacttgaaattggcgcccattcagtaagggcattttcacctacaacctacaacttataattgcttgatatccattatagtaccaataaaagttgagacaaattcaaatttaacatatgtatattttctgtcattaatactctctgtgagctttagaatatgctctcagtgcatctgtaggctaactagtacctgctc

SEQ ID NO: 74635 - DNA, 600 bp, Chicken  19866894357364_5
actggagaaggcaatacctattttttaaaaaacttactgtgtcacaaagcctgtcacaaataaggagaaatgttatatgtggaatttttragtgaatatttgagaatttcaggaatttctaaattaatgttccatgtacgtatgtatgttttaatgtttattatgtatttctaatgtagccatgatttaggctgtagctttgtaataagatttaatccagctgaacacttgatgtttctaacacagtagtaatcttattttacattatraatttacrttattgcatgcaattatgtattraaaaaaacttgaataacaatagtattatttgatatgtgaattctaagtattataaaattgtttgttttttaaaatgtaagcttttcagtttagatgctggaacacttgaaattggcgcccattcagtaagggcattttcacctacaacctacaacttataattgcttgatatccattatagtaccaataaaagttgagacaaattcaaatttaacatatgtatattttctgtcattaatactctctgtgagctttagaatatgctctcagtgcatctgtaggctaactagtacctgctca

SEQ ID NO: 74636 - DNA, 600 bp, Chicken  19866894357366_1
gtggattttgtacctcctggaattggtaatagaaacatcaagctttcgctttacataaaatactttttgttgctgctattaaaggtttaaaatatagataaattaatgtagatatgcagcaagccttaagtcactaaaatatttgaaagtcatgttgcaagaagtacaacatgaaggaaagtctttagggataatttccccaaaagattcttctcttctctttggtaaagataaaagagcaaaccaataacatatgacaaatgaatcatatcactttatatattgctgagaagtgtctgrctaccatgaaraagaggatacaataaaaacatatccgtaacagtttgaaacaaaacaagaatctaagaatactgtgggaatactcgtagaagagattgcaaaaaagttaaatcctcacccaatctgcctaaactgtccagattatgcatcccttagactcgccatgtaagagtcagttgggcacatgacagtcaaacttctctttattctcagaataaatcttccaatcaggataacaaatggagctcagaaatcaatccagatcacttatatatagatctttgtagcagtaggttagct

SEQ ID NO: 74637 - DNA, 600 bp, Chicken  19866894357366_2
acctcctggaattggtaatagaaacatcaagctttcgctttacataaaatactttttgttgctgctattaaaggtttaaaatatagataaattaatgtagatatgcagcaagccttaagtcactaaaatatttgaaagtcatgttgcaagaagtacaacatgaaggaaagtctttagggataatttccccaaaagattcttctcttctctttggtaaagataaaagagcaaaccaataacatatgacaaatgaatcatatcactttatatattgctgagaagtgtctgrctaccatgaaraagaggatacaataaaaacatatccgtaacagtttgaaacaaaacaagaatctaagaatactgtgggaatactcgtagaagagattgcaaaaaagttaaatcctcacccaatctgcctaaactgtccagattatgcatcccttagactcgccatgtaagagtcagttgggcacatgacagtcaaacttctctttattctcagaataaatcttccaatcaggataacaaatggagctcagaaatcaatccagatcacttatatatagatctttgtagcagtaggttagcttaagctttctc

SEQ ID NO: 74638 - DNA, 600 bp, Chicken  19866894357372_1
ttcatttttcacagccatcacctccaggttttctgtaagtggtgttaaataccttgttagtatataatcttgcaggccttggatggtgggtttttgtgaaccactgcagagaaggaagaaaattgctattcaaaggctaatgtactggggactgccataagggatccttatacagtggataagagatagagtggtatgagctgtcaaagcttttacaggtgtgttgctatcattgcagctgtggtggaagaactacagatacccagagtacagaaagacaaggggggtagcccatggatrctactacctccaccragaagaagcaatgttctacatgggctagtagctgtccccagcttcacaagagctgatttccttgaatgacagattttgttttatcttcagacaaatcatttacagtgcaactggatggaagtgttgaagtagcgaatgctgctgaacaagcaggttcctccccctgctccaggccaaaccccagtctcttttcttgcattagtactaatgctcaccttgtcctgaagagagctgaagcagcagaaaatattgtctaatagcagtaatataaatataataatccta

SEQ ID NO: 74639 - DNA, 600 bp, Chicken  19866894357372_2
catcacctccaggttttctgtaagtggtgttaaataccttgttagtatataatcttgcaggccttggatggtgggtttttgtgaaccactgcagagaaggaagaaaattgctattcaaaggctaatgtactggggactgccataagggatccttatacagtggataagagatagagtggtatgagctgtcaaagcttttacaggtgtgttgctatcattgcagctgtggtggaagaactacagatacccagagtacagaaagacaaggggggtagcccatggatrctactacctccaccragaagaagcaatgttctacatgggctagtagctgtccccagcttcacaagagctgatttccttgaatgacagattttgttttatcttcagacaaatcatttacagtgcaactggatggaagtgttgaagtagcgaatgctgctgaacaagcaggttcctccccctgctccaggccaaaccccagtctcttttcttgcattagtactaatgctcaccttgtcctgaagagagctgaagcagcagaaaatattgtctaatagcagtaatataaatataataatcctaaaacaatatttcagc

SEQ ID NO: 74640 - DNA, 413 bp, Chicken  19866894357373_1
acatcctaattgctgttgtctcaggccacacctttggcatcaaaaatgaccctggccaacagacaaacactcagcaactctaaatcacctcatgaacaggacaaagagaaagtaagaggagaaaaaacttgtggataaaaatgagagtttaagagggaaagtataaactgcaggcataagcaagcaaaaacaggaattaattcctccccatagacaggcagacctccagccacttcctgaaaagtagaatctctccacacaagtaataattccttcagaaaacaagcaccgtaaccacaratgtttcccgcattctttttgctgcactttcaatcactgaatgccacgtcatatggaatagaacatccctttgatcagtctgggagagagaaagctttgatgctgtgcaagta

SEQ ID NO: 74641 - DNA, 600 bp, Chicken  19866894357375_1
tatcctgcccctccatgtaaaaggcaaaaccatattatcacaggggaaacagaaatccattccatccacattgaatttaaagatgttttaatgtttcagatcatggcttaatggatagatatccactattctatctcacaaaagctcagctcaaaaatgacttggaagtgcaaagctaggaaaatgctggtgctataggcagtaattctgtcagctctacactatgactgctgatctggagagacctacagaacttccccttgacaattcagtgctttttttcagttgtattttaatctrggcaaagataggataaattattactttttgtcaccaccaaaacttgagtttccctttccacacttaatgttttaaacaaagttccctaggtacagaaatgtctctgcttcccagcacagcctccagaccagcaaggcctgctcccagttggatctcctcactctaacaaaattaaaatttgcagtaaaatgattatttaaaaaatgatactyttaataattaatagtggatagctcagattttatgggaaaggggaagtcgtctgtcctgtaggacttcatgcaacagagatatgtcaag

SEQ ID NO: 74642 - DNA, 600 bp, Chicken  19866894357375_2
agctctacactatgactgctgatctggagagacctacagaacttccccttgacaattcagtgctttttttcagttgtattttaatctrggcaaagataggataaattattactttttgtcaccaccaaaacttgagtttccctttccacacttaatgttttaaacaaagttccctaggtacagaaatgtctctgcttcccagcacagcctccagaccagcaaggcctgctcccagttggatctcctcactctaacaaaattaaaatttgcagtaaaatgattatttaaaaaatgatactyttaataattaatagtggatagctcagattttatgggaaaggggaagtcgtctgtcctgtaggacttcatgcaacagagatatgtcaagtaccagaaaaaatattcagagtcccatttctgagcacagaaaatcatgctgctgggatgagactccaagagctgcacatgctggagttggggcatggaaactgcagagggcatgcaaagatgacctgatcctttcctctctgtgccataggtgatcactgtaagcaaaagagaatgaccttccacagtatttgatatgaaacacatctgtgc

SEQ ID NO: 74643 - DNA, 599 bp, Chicken  19866894357386_1
  misc_feature (1)..(104): n is any nucleotide
nnnnnnnnnnnnnnnnnnnnnnnnnnnnnnnnnnnnnnnnnnnnnnnnnnnnnnnnnnnnnnnnnnnnnnnnnnnnnnnnnnnnnnnnnnnnnnnnnnnnnnnnttataaagcatgagaaaataccgatgtataaacatctttgcattttgatttccattacaacttatttaagcacttaacaactgcaaaaacccaacttcaaacgcttcctgcaactacttagggattaatttgaattaagataattcaagtgttggcatatatccatgagtagggcttttttaaaaaaatatctttktgaaatgaaaggattcttttttttcctaataaaaacaaacagctgtgtctcccatatggtattctcttgtaaaatatttacatttgaaaggcgcccagactccttgcagtagaacacaatttaaacaatgagcgtaagtgaagaaaaatctattgttgtcagctctgatygcagaggtttttagcgtgcaccttcctccttccgacccctctgtgctcagcatcatctcattgttggaagatttccctttgttgagtaatgcagtgtttccctttctaaagataaaataattttcatca

SEQ ID NO: 74644 - DNA, 600 bp, Chicken  19866894357386_2
taagcacttaacaactgcaaaaacccaacttcaaacgcttcctgcaactacttagggattaatttgaattaagataattcaagtgttggcatatatccatgagtagggcttttttaaaaaaatatctttktgaaatgaaaggattcttttttttcctaataaaaacaaacagctgtgtctcccatatggtattctcttgtaaaatatttacatttgaaaggcgcccagactccttgcagtagaacacaatttaaacaatgagcgtaagtgaagaaaaatctattgttgtcagctctgatygcagaggtttttagcgtgcaccttcctccttccgacccctctgtgctcagcatcatctcattgttggaagatttccctttgttgagtaatgcagtgtttccctttctaaagataaaataattttcatcaggactcagcctgctgtggttcaaagggtgcgtgtgagaagaggggtattttggaagaatcagaaattaaaaacaaaaagaaaaaatcaacgacaaacaatgggggaagaaggcatgagatattgtacgtgaagtttttgcagtgattccctattctggaccatagaaaagc

SEQ ID NO: 74645 - DNA, 600 bp, Chicken  19866894357387_1
ttagcaagctgttctttttcttaattatgcaaaggggctcgggatagagcagccagagggcatgtgttagaaataccagggaatatcccatagttctttcctcatgaactgcttctatggtccaccttgtcctaatgttcctagttccttcctgaccttaggaccttaaaaggaaactgtccagttcagaagtatttcttttgggctgatgcttatgagtattgtctgtaagtccaattaattggacttctctaagtattactgccattacataaatttctatggctatctctattttcygaggggtaatttcactggtatctgaattctttcttacctcatgctacagccttgaagtagatttctgtggaaatctactggaaatgaaattttgttttcacagcactgacagaaagacaacaggtttggccaggggacagaacaagcttcactggactcatgggtgatgtcctgtccacagagtaggacatgacccccaaaatccctctccctcccacagactggtcactgagctcagggaaatgaggtacacagggctaaaagaggaggctccaggtacacagtgcaccagggctgcac

SEQ ID NO: 74646 - DNA, 600 bp, Chicken  19866894357389_1
tggtataggagaacagccactttgacggacagctgcatgcagttaaactgaacacgcttttctcgacatcaggatttcatcacctatgccaaccaaaccctgaggtttgacctcccatcattttggccagactcacaagctgagccacaacgaattcacaggtaagaccaaacagacgtgcctcagacaactgtagatggcagcacacagcacctgtgactgcagcaacacagccttttttcactaaatgaaggcctaagcacaaagccttgccagtgcacagcagttttaaacgccacmtgaaaataagactggctgattttgccttttgggtttactatgcctttaggtttctgttgtcccagttcagaagtcagtacctctcaacttccacttaagagctgtagaagatctcaggcacaaagttatgctgtacctgagctcaaaagcagcatctctgcccagctctaatacggactgctcagagaacaagaaaaatgattgttgtcaacagcaggtttcaaatctactttcaaatctactttcagcttccctacacagaaaacttgcttgatctgtttcccagtgagctgctccagc

SEQ ID NO: 74647 - DNA, 600 bp, Chicken  19866894357393_1
tgctgtgacctcaccttgagcactgtgtgcgattttgggcaacacagttcaagaaggatgtaaaactgtcagtgtccaagggaaggctgtgaagttggtgaaggtctagagagcaagaatatttctcacttgcattctttatcctttaaatgtggcttgtgttattgtttggtgacccaaagggcttgattgatctgttatggtgttggtttgtatgtaggtagctcctagaataatgcttcttatttatttccatggaaactacaacagatacaaagagcacaaaaatggtgttgtagmtagagcaaattctcagctacaaaattctatttttcaacctagtctccaccattagctatgcattttcaccagtggtgactaagagcctgcatgttgtgcatgtaaatatctgcaccagcagaggtgacagctgtgcatagccacccaaaacatggcttgtctttcatgtcagtgtcaccactgctgaaacacaccacccgctgcctcactgtgctaacattcactgtttggtctccataaatgttaagcaagcgtcagtgaatgttgatagatgctattttttctgcatggaggaattca

SEQ ID NO: 74648 - DNA, 600 bp, Chicken  19866894357393_2
ctccaccattagctatgcattttcaccagtggtgactaagagcctgcatgttgtgcatgtaaatatctgcaccagcagaggtgacagctgtgcatagccacccaaaacatggcttgtctttcatgtcagtgtcaccactgctgaaacacaccacccgctgcctcactgtgctaacattcactgtttggtctccataaatgttaagcaagcgtcagtgaatgttgatagatgctattttttctgcatggaggaattcagttccacatctttgcttcatatgcacttctgcgttggataccrttttgtcagactgtccttctgctactgtctgtggcatggcaacagaatttaatggaatattaatgggaaaagttcagcctctactactgtctcaccaacatctgtctctgactttgcaggccaacagaataaaataagaggcattacttctagagcagcccctgtgtattttatgttttttgtcagaaaaagtgatgagctaagtatacatttaagtatttctcctccttttagattttagttaccaatctggatttccatgatgaacagaaacgtcggaacttaaatggaacactacat

SEQ ID NO: 74649 - DNA, 599 bp, Chicken  19866894357394_1
  misc_feature (1)..(94): n is any nucleotide
nnnnnnnnnnnnnnnnnnnnnnnnnnnnnnnnnnnnnnnnnnnnnnnnnnnnnnnnnnnnnnnnnnnnnnnnnnnnnnnnnnnnnnnnnnnnnncttgttcttggccagatgaagctgagagattgaaatctaaattaattgatgtgtacaggtttattctgttgatagcatgagatgctataaatgcccacctaccagtgtagaaaaactgtttgatgagttactgtataattggattccattatttatttcatactatatgaagtaagaagcataggttggatttagttctgacttaygctcacataaacctagagtaatggagtaaacctagagtaagagtaattgtttgsctgcagtgcaattactctggagttgcgtggagttagaaaatcagcagaagaatctgctgtgagcattgcacgtggaaaggaaagcaaagggaagtgctgcactgagccaggagggcctttgcctgtctttggctgggctactgtagctttttcatactgcttggtttccttgctttttaatagaaytcatgagtggaaatgattacactttagaacagaactctccttgttcttttgtctgaaat

SEQ ID NO: 74650 - DNA, 599 bp, Chicken  19866894357394_2
  misc_feature (1)..(40): n is any nucleotide
nnnnnnnnnnnnnnnnnnnnnnnnnnnnnnnnnnnnnnnncttgttcttggccagatgaagctgagagattgaaatctaaattaattgatgtgtacaggtttattctgttgatagcatgagatgctataaatgcccacctaccagtgtagaaaaactgtttgatgagttactgtataattggattccattatttatttcatactatatgaagtaagaagcataggttggatttagttctgacttaygctcacataaacctagagtaatggagtaaacctagagtaagagtaattgtttgsctgcagtgcaattactctggagttgcgtggagttagaaaatcagcagaagaatctgctgtgagcattgcacgtggaaaggaaagcaaagggaagtgctgcactgagccaggagggcctttgcctgtctttggctgggctactgtagctttttcatactgcttggtttccttgctttttaatagaaytcatgagtggaaatgattacactttagaacagaactctccttgttcttttgtctgaaattagaaacaggtgatttttcttgtatctgacagaagaggaatcagaaaaaaacaa

SEQ ID NO: 74651 - DNA, 600 bp, Chicken  19866894357394_3
cattatttatttcatactatatgaagtaagaagcataggttggatttagttctgacttaygctcacataaacctagagtaatggagtaaacctagagtaagagtaattgtttgsctgcagtgcaattactctggagttgcgtggagttagaaaatcagcagaagaatctgctgtgagcattgcacgtggaaaggaaagcaaagggaagtgctgcactgagccaggagggcctttgcctgtctttggctgggctactgtagctttttcatactgcttggtttccttgctttttaatagaaytcatgagtggaaatgattacactttagaacagaactctccttgttcttttgtctgaaattagaaacaggtgatttttcttgtatctgacagaagaggaatcagaaaaaaacaagataactttttggaaatcgattgagaatttcaatgtggtttgcctctggctactgtctcagcttaacatgagggacactgtgatactgtcacatttgcctgtcccttcaaatgttcagccgaactcctgactgaaattccacgacacttgccaagggagatgaaggcttgttagcagtgacgcccct

SEQ ID NO: 74652 - DNA, 600 bp, Chicken  19866894357403_1
aagatgaaagaaagcaaccagaaatgcaattagcttcttcctaatgcataagaatttacaagggcaatttccctagtagtgcagacgtattacacgtattttaacattcaaacttaggatagaaagcagcagatttaaatggggctgaaagtgcaacatcctcctacagatccatgaaacattcagggctgtgtttcagccaggtgagaggcttcagctcaggacattacagaattctgtcagcagctctgaactgctttcctttggtcttgtgaacctagaattcatctcaatttaacygagacaaattggcactgttttataatttactaaatttgagggcttcagtaacacctctagctcatgctgcactatgcaaattaaacaaacgtggaaatagagataagcctctccaagatgttccaagtactgaaaggaataattcaatttgatcttagttctgtattttggtgctagatttcttggcttttaatatctaacactatttctctctccttccctcccttcccctctccccccgcaattataaatcacttatcaatcacagtcactctccagctctgttcctcattaagtaat

SEQ ID NO: 74653 - DNA, 600 bp, Chicken  19866894357403_2
gtggaaatagagataagcctctccaagatgttccaagtactgaaaggaataattcaatttgatcttagttctgtattttggtgctagatttcttggcttttaatatctaacactatttctctctccttccctcccttcccctctccccccgcaattataaatcacttatcaatcacagtcactctccagctctgttcctcattaagtaattgcacaagttgttgtcctctgcattcacttgctggagaaatgactcctagttgtatttgtaaccctgggtgatcagtgttctcatgcctyctttgccacagcataatacctatcctaatatgtctatccaaaaggtctactctttgctccactgccttcagcttccaataacccttcaaattctaccagactagattctctgaaataagttcactttcctagaaacaaacagtgattcagctgaaaccatccagaccaaatagctgcagatttaacttgagagatcagagccaaatcctccatgtacctttagcaggaatactgccagcaggcttgctgtggctgtgtgcatttctcggcactcatgccaggtttcacacatatcctgta

SEQ ID NO: 74654 - DNA, 599 bp, Chicken  19866894357408_1
  misc_feature (1)..(40): n is any nucleotide
nnnnnnnnnnnnnnnnnnnnnnnnnnnnnnnnnnnnnnnncggtgttggtgaggggaagaggtttgctgtgctgtcggagccctcgtgctcctcagtgctgtgtgtgtgtgtgtggcacgctcacacacgtgctgttctaatcggcggctttctgtcacttactttgtatgagttttctgcccggcccgcgcagcctgcaagcgacgggcgctgcggtgcctcccttctgggccgtgccgtgctgagctgtgcagctgggtttcaggttttccacgtctgtttgtgtggatttggacagyttataggcagcgtgtttcagttgtaagtccacgtgtgagtgccgaacgggtgagctgaagtggttttagtgaattagaattcgggcaaacctccgtgctgaaggatccctacaaatgctgcacgcggtgtatttcaagagcagagctaaagtgaacggcaggaaacctctaatgttgcaggtggctacagcaactttttctctttggttgctcagtgaagtgcagggagaacctcaccaattcccaggctcagagtgcttctggtgcttttcctccgaagctgttagtgtaaacattgc

SEQ ID NO: 74655 - DNA, 600 bp, Chicken  19866894357408_2
gctccttcccttttaacaaagtaacttgcgcataaactgtgttgttaacattgtagacagcatggctttcagctgttactttgcagtcacagggcttgcagcgcctgtagcctctctctcaggtgtgcatcttcatagtgctgtatcttctttgcatgtgtgttgtggtggaaacgtgaggaggggcgaaacgttgctgcacgtgaagtgctttctcctggagcatttgtttaatcttcaggtgggttttcagaagttggtcgtcttgtggaacgtctctcatatatgttcctgaaaggyggttgtgcagataggtctgttcccatgggacacctccaggaagggtttacttgcaggagctctgtgcatttcttttcagtgctcagttgatgctaagcagctccatgatgaggatttgtgcacctcagtgtgatgtgtgtgaacagccttcgttcgctgctgaatgaaactgttgaagttttgtattggaagattaatactgtggttatgcttcttattttcacctgggaaatcttgctgttggttattaattgagtgagatacgagtcagtggcatggaaatggcctttggtattgtaa

SEQ ID NO: 74656 - DNA, 600 bp, Chicken  19866894357415_1
gtgagggctgtggtcatttgtaaaagatacaaccatcactgccatcatccgctcctgtcattcctgggacagattacttatactcgctgtggcttcatttctctcccaaaactgaagcaggtttagaatttaatagcccccaggataaacaatatatataacctgagctatggctctcacaagcccgagtgggatttcagatgttgcttttgatctgtaaaacactcagcaatttcctcacaaggccactcccaactgctttggcagcctctggggaggcacaggaggagtagttcatgyrgattcatctgcctacgcagtgaagggcttctgtgggcaaactccttcactgtggaagggtttaagaggatctgctgcgtttgcatttcagaacagccatcaaaaacagttcttggggattctgagaggcaaagataaggtttatttatctgttgtttaaactacagcaaagaactgtaagaaatcacagaatcatagaatcacagaatcattaaggttggaaagaccactaggattatgtagtccagccaccaatccatgcctgtgactgctctagagcatgtcacgcagtgcaacatc

SEQ ID NO: 74657 - DNA, 600 bp, Chicken  19866894357415_2
tgagggctgtggtcatttgtaaaagatacaaccatcactgccatcatccgctcctgtcattcctgggacagattacttatactcgctgtggcttcatttctctcccaaaactgaagcaggtttagaatttaatagcccccaggataaacaatatatataacctgagctatggctctcacaagcccgagtgggatttcagatgttgcttttgatctgtaaaacactcagcaatttcctcacaaggccactcccaactgctttggcagcctctggggaggcacaggaggagtagttcatgyrgattcatctgcctacgcagtgaagggcttctgtgggcaaactccttcactgtggaagggtttaagaggatctgctgcgtttgcatttcagaacagccatcaaaaacagttcttggggattctgagaggcaaagataaggtttatttatctgttgtttaaactacagcaaagaactgtaagaaatcacagaatcatagaatcacagaatcattaaggttggaaagaccactaggattatgtagtccagccaccaatccatgcctgtgactgctctagagcatgtcacgcagtgcaacatcc

SEQ ID NO: 74658 - DNA, 600 bp, Chicken  19866894357421_1
acaatgtggatgagaagagagatgaggaatgctaacaaaaaataaggccagaggcagatggggaggatcaaggctttatttaattgtgttgacttgctttgtttttggtgctgaggtatccttacatgtaacactttagaggactcattaaggtagactactaacggcagaaacaagtcagctgatccatcagggctcagatgtattcttcaggcatttccctgttcagctttggctggaggtaggaaaaggacagagtgagagagaattcctggtgaagcaatacccagaaccctggaygacttctctgcatcctgtggtagccccttttgtgccacgtgagcttaagtcgtgttaaaatctgggaacctacatcacctaaaattgccacgttgtagaaggataacacattgggaatggctggacatgttcattatatccatgctatgggagaaggaaggggaggcatgagctatcacagtaagtgttgtctcttggcacctgcatttcccacaggatcggaaaaaataacccagggcaaagcttgaaatttgctagaagacatgtgaacatttcaccaaggtggctgggagacaattc

SEQ ID NO: 74659 - DNA, 600 bp, Chicken  19866894357422_1
gttatagcctattgaaatcagtggaactgtgaaaatttacacagccaatggtctgtcttacagctgtaacaatttcaagaggtttcattgtgttgcaaacgctttatagcagcagtggcttgtagtaaatacatttgaacttacttcttgtggattgtggaggatttggcagcaatgcctacagcccccagctctccttggaaacaagttctgagcagccttctgggagctgcatggccagagggaccagaccacagagttgtggtgacagaggtgcatcgatgtgtgcttgtcactgtkttttctgttgtggcgcttctggactttaaactggttggatccttgacagagaaggttttcaccatcgtaatcacccaatctgtttgtgtgctgtctttatcttgatggtaatcaacagtctgtcttgatgatgcgttcagttcccaccttctggcacgaatccttgggtacrctcacgttgtgtttactttcttgttccctggcaggctccttacccctcaggacagaatgcagctccaaccacgctggtgtaccctcaagccccacaaacaatgaacactcagcctcagacccgctcgc

SEQ ID NO: 74660 - DNA, 600 bp, Chicken  19866894357422_2
caatgcctacagcccccagctctccttggaaacaagttctgagcagccttctgggagctgcatggccagagggaccagaccacagagttgtggtgacagaggtgcatcgatgtgtgcttgtcactgtkttttctgttgtggcgcttctggactttaaactggttggatccttgacagagaaggttttcaccatcgtaatcacccaatctgtttgtgtgctgtctttatcttgatggtaatcaacagtctgtcttgatgatgcgttcagttcccaccttctggcacgaatccttgggtacrctcacgttgtgtttactttcttgttccctggcaggctccttacccctcaggacagaatgcagctccaaccacgctggtgtaccctcaagccccacaaacaatgaacactcagcctcagacccgctcgccggtaaggcagcccacctttgctttatctyctcctccttcttccttctctgcgtggttctctgtgtgtatgtgtgtctgcagcacttggccacttctctggaaagtcagttttactgaactggaagcacattccaaatggcaaatcttgactgaatatgcaggcattgtcct

SEQ ID NO: 74661 - DNA, 600 bp, Chicken  19866894357422_3
ctggttggatccttgacagagaaggttttcaccatcgtaatcacccaatctgtttgtgtgctgtctttatcttgatggtaatcaacagtctgtcttgatgatgcgttcagttcccaccttctggcacgaatccttgggtacrctcacgttgtgtttactttcttgttccctggcaggctccttacccctcaggacagaatgcagctccaaccacgctggtgtaccctcaagccccacaaacaatgaacactcagcctcagacccgctcgccggtaaggcagcccacctttgctttatctyctcctccttcttccttctctgcgtggttctctgtgtgtatgtgtgtctgcagcacttggccacttctctggaaagtcagttttactgaactggaagcacattccaaatggcaaatcttgactgaatatgcaggcattgtcctcataggataattttccttatcagaaaagaagtgatggagggattcttatctacattcaaataacatgatttatttttagcatagttgctttcaggttcacttcattttaggattagattcattaccagagtctttctctttgcttcattttttttttc

SEQ ID NO: 74662 - DNA, 600 bp, Chicken  19866894357422_4
tgatagaacaaagatcagtaaatgaaagcgcttctctgcagccacactcagtcccagtggcctgtgggctttactcagtgccactggatcagttctacctatttacttcttagcactaggtaggtgctcacggatggaaggtagagcttctgtgtccccccgtcttgctgtggcaagcccccttccatctgccttcaggtttggttgtcctctgtaatctttttgtactgctctgctatgacaggcctttggttccctgagctcttgttggcaaatctcagcttgtagtgcagtcccaartggtgctaggagaccttcctgtggcatcgcacacttagccctgtgctgcaggcctgctagtgtgctgccctggtgccaaaagcctcgggtagccaagggagcagcagtccctgcgtctcttgtgaacctgcatatgcgtcacaacacttcaggttacctgtaaaaccactgcaccattcccagcactcttctctttttagagtaagatgaatgctgctgaagcatggcaactgaaagcctccgagacagaagccttctgtttgcccacttaacagggacagtacagggctagcttccccc

SEQ ID NO: 74663 - DNA, 599 bp, Chicken  19866894357423_1
  misc_feature (1)..(16): n is any nucleotide
nnnnnnnnnnnnnnnntgtcacacaaaatcaaagcacatttttgataagggattttatggtcacacaagaatgtcagtgacactgctaacaaggtgctcttgcagcttgaaaagcaaatggtaacctgggctccatcagatgaggggtggccagcagggccagaaaggtgattgtccctctctactgtgctctcatgaggctccatctggagtattgcatccaggtctggggcccccagtacaagaaagacagggagctgttagagagggtccagagaagggccacaaagatgatcagargactgaagcacctccactacaaagacaggctgagggagctgggcttgttcagcctggagaacagaaggctgtggggtgacctcactgcagccttccagtaccaaaagggagcctrcaaacaggaggggagtcaattctttacaagggtagataatagcaggacaagaggaaacggttttaaattgaagaagggaagatttagtttggatatcagggggacgttcttttactatgagagtagtgaggtgctggaacaggctgcccagagtttgtggatgccccgtccctggaggtgttca

SEQ ID NO: 74664 - DNA, 600 bp, Chicken  19866894357423_2
aaatggtaacctgggctccatcagatgaggggtggccagcagggccagaaaggtgattgtccctctctactgtgctctcatgaggctccatctggagtattgcatccaggtctggggcccccagtacaagaaagacagggagctgttagagagggtccagagaagggccacaaagatgatcagargactgaagcacctccactacaaagacaggctgagggagctgggcttgttcagcctggagaacagaaggctgtggggtgacctcactgcagccttccagtaccaaaagggagcctrcaaacaggaggggagtcaattctttacaagggtagataatagcaggacaagaggaaacggttttaaattgaagaagggaagatttagtttggatatcagggggacgttcttttactatgagagtagtgaggtgctggaacaggctgcccagagtttgtggatgccccgtccctggaggtgttcaaggccaggttggatggggccctgagcagcctggtctactattaaatgtggaggttggcagccctgcctgcatcagatgggttggagcttgatgatccttgaggtcccttccaaccc

SEQ ID NO: 74665 - DNA, 599 bp, Chicken  19866894357428_1
  misc_feature (1)..(147): n is any nucleotide
nnnnnnnnnnnnnnnnnnnnnnnnnnnnnnnnnnnnnnnnnnnnnnnnnnnnnnnnnnnnnnnnnnnnnnnnnnnnnnnnnnnnnnnnnnnnnnnnnnnnnnnnnnnnnnnnnnnnnnnnnnnnnnnnnnnnnnnnnnnnnnnnnnncgtatttggtttcagaagttcctgaatcatggcttggtgagagatggttgcactaccccgatcatttcgctgtactgctgaatttgctcagaagttgatgttttgcccctcctctctgttctgcttcacagcagaaaggaaccaggttcactmgcggaatcagctttagactaaaaagaggtttgctaacttggcaaacattgtggagaaaacggcatcatctttctttgctgaacaacaagagatcttaacaatcagttagaaagcaatcaaggatcatycccagcacaaatgtcagactcaaatctctactgctcttcttctccygggctctaacaaagtgtagcagccsggacccccagaggagctggagctgttctcagacgcatccccctcgacacctccctctccacatgccagcaggagggccgtctgcagcagcccacatctgc

SEQ ID NO: 74666 - DNA, 599 bp, Chicken  19866894357428_2
  misc_feature (1)..(19): n is any nucleotide
nnnnnnnnnnnnnnnnnnncgtatttggtttcagaagttcctgaatcatggcttggtgagagatggttgcactaccccgatcatttcgctgtactgctgaatttgctcagaagttgatgttttgcccctcctctctgttctgcttcacagcagaaaggaaccaggttcactmgcggaatcagctttagactaaaaagaggtttgctaacttggcaaacattgtggagaaaacggcatcatctttctttgctgaacaacaagagatcttaacaatcagttagaaagcaatcaaggatcatycccagcacaaatgtcagactcaaatctctactgctcttcttctccygggctctaacaaagtgtagcagccsggacccccagaggagctggagctgttctcagacgcatccccctcgacacctccctctccacatgccagcaggagggccgtctgcagcagcccacatctgcccttgccagtgctgcaggcacacatcctagcgttctgcaagggcagaggagctcctggcagctctgaccctgtgggtgccacgctgtcaggcagccaagaagcctctgtcacatggcagcccccaccc

SEQ ID NO: 74667 - DNA, 600 bp, Chicken  19866894357428_3
catggcttggtgagagatggttgcactaccccgatcatttcgctgtactgctgaatttgctcagaagttgatgttttgcccctcctctctgttctgcttcacagcagaaaggaaccaggttcactmgcggaatcagctttagactaaaaagaggtttgctaacttggcaaacattgtggagaaaacggcatcatctttctttgctgaacaacaagagatcttaacaatcagttagaaagcaatcaaggatcatycccagcacaaatgtcagactcaaatctctactgctcttcttctccygggctctaacaaagtgtagcagccsggacccccagaggagctggagctgttctcagacgcatccccctcgacacctccctctccacatgccagcaggagggccgtctgcagcagcccacatctgcccttgccagtgctgcaggcacacatcctagcgttctgcaagggcagaggagctcctggcagctctgaccctgtgggtgccacgctgtcaggcagccaagaagcctctgtcacatggcagcccccacccccacatgcaacttctgctcagggaacaaatccrcaggcacatcacgc

SEQ ID NO: 74668 - DNA, 600 bp, Chicken  19866894357428_4
ctaccccgatcatttcgctgtactgctgaatttgctcagaagttgatgttttgcccctcctctctgttctgcttcacagcagaaaggaaccaggttcactmgcggaatcagctttagactaaaaagaggtttgctaacttggcaaacattgtggagaaaacggcatcatctttctttgctgaacaacaagagatcttaacaatcagttagaaagcaatcaaggatcatycccagcacaaatgtcagactcaaatctctactgctcttcttctccygggctctaacaaagtgtagcagccsggacccccagaggagctggagctgttctcagacgcatccccctcgacacctccctctccacatgccagcaggagggccgtctgcagcagcccacatctgcccttgccagtgctgcaggcacacatcctagcgttctgcaagggcagaggagctcctggcagctctgaccctgtgggtgccacgctgtcaggcagccaagaagcctctgtcacatggcagcccccacccccacatgcaacttctgctcagggaacaaatccrcaggcacatcacgctaagtcttctggatcttggtgggca

SEQ ID NO: 74669 - DNA, 544 bp, Chicken  19866894357428_5
gctcttcttctccygggctctaacaaagtgtagcagccsggacccccagaggagctggagctgttctcagacgcatccccctcgacacctccctctccacatgccagcaggagggccgtctgcagcagcccacatctgcccttgccagtgctgcaggcacacatcctagcgttctgcaagggcagaggagctcctggcagctctgaccctgtgggtgccacgctgtcaggcagccaagaagcctctgtcacatggcagcccccacccccacatgcaacttctgctcagggaacaaatccrcaggcacatcacgctaagtcttctggatcttggtgggcaaattccttcccacctactgctccccagtcctcttcacacatgaagtctccatgctggacctcaatgcccttccctttatgtgaattttcccagaaggattggaagagatgcctttcattagccaagcaaccttgaaaactatgttgttttctaagaaaggtgttttacatatcttagataattccagaagggatttatgtacttt

SEQ ID NO: 74670 - DNA, 600 bp, Chicken  19866894357431_1
tttcagtagctggaaggacactgtacttccaagttcaattccaaaagtgacttcagtgcacactgatctatggattcctgtttgtatatttaactatggaaagcagttgtttcttgattagcatgtattgtgtgaagaataccactgttttactgacagtatgtcgctgcagttaactggtgcagaaaatggctcctcaaaaatttttgcagcttatcagctttgaacaaacacttgaaaaggtaatgtcattatgataaatgtttaacttgataggaaaaaaaaaaaagttgtttgggrttttcatttgtttattttgatttaattccattgcatttgtttgtttttaatatttatgtggccaaatcattatgaggggacaaatgctccacagtacaatctaagtggaagtaataaaaacaatcaaacaaaccacaacaacaaaacacgaaacaattgcctaaaaattggaagtataacggcataataaatagaagtaggggatctgttgcaaactacttaatgagctttattattttttgttcagaaaaaaagcaaacatctgtagtaactaaacaatcgtttctccaattttcttag

SEQ ID NO: 74671 - DNA, 600 bp, Chicken  19866894357436_1
tggcgttgtgcctgcatcttttgccagcatctttctgcacgtttaaaggggaaaagcatactgcaatcatgactttgttccctgttagctgtcagtactgctgcagggaaatgtggtgtcttaaattcttgagagaagaaatctaccctcaaatttatctcagatacttgcattccttcagagagtctcaaatgcataattccaggaagagatgcaagtccaggtttctgttagagcagtctgtaagcttcccttgcaagggaaacttaggatatttcgtgtccagctgctttgttgcartaaattgctcagctacacttgatttctgcctgtgcagcaaatctaatgcatatgtgctgcaattacatatctgttaccatgcatgggctgtgtgtatctgttgtgtgtctctgatatggagcaacactggcaggacagtgtctgagagcaygctgctactgctaaatatgtctttttgctggcagttttcttcttmtcctaaggaatttgaagctgagcagtggaacaggtgagttgctcccacatactttgcatgggctgttagtcacaggtttggtgtctctgtgtcaaaggtmtggt

SEQ ID NO: 74672 - DNA, 600 bp, Chicken  19866894357436_2
aatttatctcagatacttgcattccttcagagagtctcaaatgcataattccaggaagagatgcaagtccaggtttctgttagagcagtctgtaagcttcccttgcaagggaaacttaggatatttcgtgtccagctgctttgttgcartaaattgctcagctacacttgatttctgcctgtgcagcaaatctaatgcatatgtgctgcaattacatatctgttaccatgcatgggctgtgtgtatctgttgtgtgtctctgatatggagcaacactggcaggacagtgtctgagagcaygctgctactgctaaatatgtctttttgctggcagttttcttcttmtcctaaggaatttgaagctgagcagtggaacaggtgagttgctcccacatactttgcatgggctgttagtcacaggtttggtgtctctgtgtcaaaggtmtggtgctgctttctaggctcaggtgataagtgtgctgaccaattaggtcagtgccagtgtcccggtccctaattattttggctgctgctcrgagtttaccagtagtgttcacaaggtctgatgggctgtgtataatactggcctgtctgttgtag

SEQ ID NO: 74673 - DNA, 600 bp, Chicken  19866894357436_3
taattccaggaagagatgcaagtccaggtttctgttagagcagtctgtaagcttcccttgcaagggaaacttaggatatttcgtgtccagctgctttgttgcartaaattgctcagctacacttgatttctgcctgtgcagcaaatctaatgcatatgtgctgcaattacatatctgttaccatgcatgggctgtgtgtatctgttgtgtgtctctgatatggagcaacactggcaggacagtgtctgagagcaygctgctactgctaaatatgtctttttgctggcagttttcttcttmtcctaaggaatttgaagctgagcagtggaacaggtgagttgctcccacatactttgcatgggctgttagtcacaggtttggtgtctctgtgtcaaaggtmtggtgctgctttctaggctcaggtgataagtgtgctgaccaattaggtcagtgccagtgtcccggtccctaattattttggctgctgctcrgagtttaccagtagtgttcacaaggtctgatgggctgtgtataatactggcctgtctgttgtagaattctactgagctgttgtacttggtggatgctttcaactgctta

SEQ ID NO: 74674 - DNA, 600 bp, Chicken  19866894357436_4
gcartaaattgctcagctacacttgatttctgcctgtgcagcaaatctaatgcatatgtgctgcaattacatatctgttaccatgcatgggctgtgtgtatctgttgtgtgtctctgatatggagcaacactggcaggacagtgtctgagagcaygctgctactgctaaatatgtctttttgctggcagttttcttcttmtcctaaggaatttgaagctgagcagtggaacaggtgagttgctcccacatactttgcatgggctgttagtcacaggtttggtgtctctgtgtcaaaggtmtggtgctgctttctaggctcaggtgataagtgtgctgaccaattaggtcagtgccagtgtcccggtccctaattattttggctgctgctcrgagtttaccagtagtgttcacaaggtctgatgggctgtgtataatactggcctgtctgttgtagaattctactgagctgttgtacttggtggatgctttcaactgcttatctgttttaacgtttaattacagcacagactggatttctcatcatctctcttggcatacttcctggagtaaagtggactgtgagaggatttcaggaatgc

SEQ ID NO: 74675 - DNA, 600 bp, Chicken  19866894357436_5
ctgtgtgtatctgttgtgtgtctctgatatggagcaacactggcaggacagtgtctgagagcaygctgctactgctaaatatgtctttttgctggcagttttcttcttmtcctaaggaatttgaagctgagcagtggaacaggtgagttgctcccacatactttgcatgggctgttagtcacaggtttggtgtctctgtgtcaaaggtmtggtgctgctttctaggctcaggtgataagtgtgctgaccaattaggtcagtgccagtgtcccggtccctaattattttggctgctgctcrgagtttaccagtagtgttcacaaggtctgatgggctgtgtataatactggcctgtctgttgtagaattctactgagctgttgtacttggtggatgctttcaactgcttatctgttttaacgtttaattacagcacagactggatttctcatcatctctcttggcatacttcctggagtaaagtggactgtgagaggatttcaggaatgcttggtgctctgctatagggaaagtttggtagaacccacttgtgggctcaatgctaaccgcggggtcgaaccacatggtcacaactgatagc

SEQ ID NO: 74676 - DNA, 600 bp, Chicken  19866894357444_1
tattttataaacatctacatttggagaaataatagaaatgtcaacaaacttggtcactgaggtgacacaagtttgtacacttacatttctctaaaaaaaatctctaaaaaaatatttaaaaaatgtagaagtaatctcttcagtttttttttatccctaactccatgtttcttccagaaaatacactttcttatgctatgaacaataaccaacagaactatctgcatcatattcaacaaaagcatgcaagttttaagcagcattttttaaatgatgcaaagcctatgtccaagaccactsaaaataatatactaattatattagtataaatttttagatgccactttccttcataacactgtaagcccatatcacacaagaatcaaggcagaaaaattagttgattaaaatatgaagtgcattgcataaactgctacttgtgtgttcttcaagaacatgtgaaaaatccaaaattcctctgaaacaaaacacaaccaaaagagatataccatcagaaacacaagtcaagttgacttacatatttgcaatattttggcggtcaaaagatgaattaagaacagaaaaccaacattattcaat

SEQ ID NO: 74677 - DNA, 568 bp, Chicken  19866894357452_1
cagtgccgggcacggggcactgctgcatgcggcacggccacacgtgtgctgggccaccagcggggaatgcttcccacccagctctgaccttgagcacagacacctcctggagaggggccaagcacaatagccggttccttctactcccttccttcccaggcagccacactatcacagggctctgccgcccaccgaagccctgcacacgaggatgggtgccatgaggacgctgccccgtgatgctgcttccacccacctccacgcacggtgcccatctgcgggtgtcacggagctcatggwgctgcagccagagggtttggaaaggccccagggccctctgccactgtatggacaaccatagatgagtgatttatatcctgggaaatcgctgcggatttactagaggattaggctgaaaaataaagaaaccaagaaaaaccaaaacccctttgctcactcagcagccatggggcaggatggagtcatcacggaggaaagcacacagacaccactgagcacactggtgctgtcccctcctgcccccccgctgccctttgcagctgcccca

SEQ ID NO: 74678 - DNA, 525 bp, Chicken  19866894357455_1
aaaatcagtagagcttcctggagttttgcttctgctccccagatgatctatctgggggattaagacctttcatctgagaaactgtaaaccacaaattggagactgcaatacaaagtgacactgggactcctaattcctaaccaatttaggtaagctgtcatatgtaaggagagattagatgatgttgccctagagtggtgataaatagaggaagcatatttacgagtaggaggctttacagtggaaaagcttcacagcacaaatggcctacgagatccagtgaggatacttgaaatagcytctttaagctgatcgaataaagaactgccacaagcccatggcatgggctgacatgctcctggctcagcagagacaaggaattgtgaagtcaagaatcaggaaaaccagtgtctcattttgggaccattcacagtttggtcacaaatcaggctggagcttaaatccaagcttctgactgagaaacaatacagtgtgactacatctccaccttaaaatctgggccta

SEQ ID NO: 74679 - DNA, 456 bp, Chicken  19866894357456_1
ttattagcaaatgctgccaaaacagaatcactatgagcaaagacacctttctccacagcctctactagcctcttttcaatgtctttaagaaagctttaatcacctgccaccattttatgggttgtacgagccccactgcagtaaacgcaagcttgcaattgcctgttcaaattcatactttgtttctaaagttttgctgtgccagaaatcctcagcactgtccaaataattccacagaacagagttaaaaaaaacaaaacactaacaaacacaccacagaaaaaaagatagcaactagarggggatatcagatccttccacagcactgagtgataggcctaatccggttgtctcttctcaatttaacaaaccaagaaatacggcattgtttaacaagcaatgtgtcaaaaccatgaagttctacaattaccaagctatcagaatgctgggaaatcc

SEQ ID NO: 74680 - DNA, 600 bp, Chicken  19866894357459_1
tcatagtcctgccaatgtcttagattttatatttctagaaattaatttccatgaatatcaactgcaactactaaactaaacaaaggtagtttaaaagtgaagttgtttagatgttaagacacagtcagaatagaagctggaaaaaaagaaattcaaatgaaaaattaagcaatggttatatggaaatgtgttccctaaaagaattagctatctaagctatatctagtaaatgcaagctttgctctctgttgcataaaagatcagaaatatgacagcctttaggagctgacaaggcatcastaaaaggcagaaaatatttaattaaaaccttgtgcataatactctaaatacagttatcatagagagcattgacattcatctacatttgaacttttaccctaaggcatgcattacaaaagctagttcttttaaaaccaagctgaatagctcttgaattgttgttggtgctgttgttattattgctgttggtttgggtttttttttaattgatatataaatggtttgcatacaagttcacgtggttaaaataatgaaatactactgagcatagtccctttgtgtacctgtttcacacaagac

SEQ ID NO: 74681 - DNA, 600 bp, Chicken  19866894357471_1
aggtaaataataggtacggtaggaaaatgaccgtgtccctaagtgattgggattcaagtagcccatatagataaaatgtaaagaatagaggtattgaaagactgtgttttagttgtaatcattaagtgacagaggcacccgctcctcaaacaccatcctagaccctaaaatcctctagcagtattgttattctgaagtaaaatactgaatgaaattcacattgaaaagcaaaaagtgagaaggaagaaataatatttctcttcagaactgttttctttgagaacaaacttagtaaaattwattattattattattattattatccctattttgttcataaaccaggacaaactggttaggaaaatcaattaatttgggataattagcagtaaaaggcttttgaatattacttaatttaagaatttactaacttgatgcttaataatgtttgtttcttgtgtaaaaccaacatgaatttagtatcttttagcaatgtttaaggtattttatttctgaaacctgtacaactcttgtgctgtattccattttgagcactttctaacagattttattttacatatgcttccctagatactctta

SEQ ID NO: 74682 - DNA, 600 bp, Chicken  19866894357483_1
gaagtctcttcaagaattgttacttaattcacagtatacaaccccaatggaaaaaaaaaaaaaaaaaaaggaaaaaaaatctgagtgctcatccaagaaaaaaaaattatatctgatgtagaagaattcttttggttggaatagtttaacagtttgaagctctgaattttcataaatactttcaagtctcatttgtagaggtgcagagcagctgcagctcacattgacgtcagtggagtcctggctgctcagctcctctggaaatctggccctaaaattagacttttgaatgggaatggraaaaaaaggaacaaagaaaatacatgctttctatagagaaagtacattccaaagaacaaatctgtgattctacgtagaactttgaagttcctaaaacagtaactgcaacattttgtactgtaaccaagcatattcttcacaagacaacacagggttcagttcagcatcagaattacagacaaagctccaaagcacattcatttctagtcatttcaagttttctgatttagagcctctactgttgagcagacaagatgtacaacagttttgatttttttaatttgtttattaaccttgaag

SEQ ID NO: 74683 - DNA, 600 bp, Chicken  19866894357483_2
ttccaaagaacaaatctgtgattctacgtagaactttgaagttcctaaaacagtaactgcaacattttgtactgtaaccaagcatattcttcacaagacaacacagggttcagttcagcatcagaattacagacaaagctccaaagcacattcatttctagtcatttcaagttttctgatttagagcctctactgttgagcagacaagatgtacaacagttttgatttttttaatttgtttattaaccttgaagtgaatgaaaatagcatggccttcataaccaaaatcatcaattgtaytctctgaactactacagaaaactcatgggaaatggtaacaactaagttgtcattcaagaaagaaagaatctgttcatatgtatccatggatatgaatgcatgctgcacatcttattatcagaagtcttccataaagcataatgaatgatcaataaaaagtatgtaacaagttgactgactttgcactacatcttttgctttaattttaatccactatttgtccctaacatgtatttttcaggcactgaaaaagttaattcccagatagtacttcaggaacttacaaacataggttgttta

SEQ ID NO: 74684 - DNA, 600 bp, Chicken  19866894357483_3
gaaagaatctgttcatatgtatccatggatatgaatgcatgctgcacatcttattatcagaagtcttccataaagcataatgaatgatcaataaaaagtatgtaacaagttgactgactttgcactacatcttttgctttaattttaatccactatttgtccctaacatgtatttttcaggcactgaaaaagttaattcccagatagtacttcaggaacttacaaacataggttgtttaattaatactatgttgtggggtctagctcctttattacaggcaacatggctacactgccagygcacccgtaaaatgtctgtttgccatttcccaggacactattgcaacctgtagaacttcttggaggaccacagctacaatatgctacaagaggaatgaaaaggtcatcaaagaagttactcatgtctcttttrctaggttattcccagcaatgtcaaagaatccctttagtaattttggattacgtgaatggacactgtatttcctactgtagaacaaagcaaagactcctaaaggaccttgtcaagcaaagctgtgcatcagattattcttggttccaaataagtgactcaattttgtg

SEQ ID NO: 74685 - DNA, 600 bp, Chicken  19866894357483_4
ttgctttaattttaatccactatttgtccctaacatgtatttttcaggcactgaaaaagttaattcccagatagtacttcaggaacttacaaacataggttgtttaattaatactatgttgtggggtctagctcctttattacaggcaacatggctacactgccagygcacccgtaaaatgtctgtttgccatttcccaggacactattgcaacctgtagaacttcttggaggaccacagctacaatatgctacaagaggaatgaaaaggtcatcaaagaagttactcatgtctcttttrctaggttattcccagcaatgtcaaagaatccctttagtaattttggattacgtgaatggacactgtatttcctactgtagaacaaagcaaagactcctaaaggaccttgtcaagcaaagctgtgcatcagattattcttggttccaaataagtgactcaattttgtgtgagtgagcaagacaaatcagctgggaacagaaaaactgatgcaactaayagtatctatgcaactcagctgatgttttgccttaagctaatgccaatgctatggatttggctgggatagagttaattttcatt

SEQ ID NO: 74686 - DNA, 600 bp, Chicken  19866894357483_5
tagaacttcttggaggaccacagctacaatatgctacaagaggaatgaaaaggtcatcaaagaagttactcatgtctcttttrctaggttattcccagcaatgtcaaagaatccctttagtaattttggattacgtgaatggacactgtatttcctactgtagaacaaagcaaagactcctaaaggaccttgtcaagcaaagctgtgcatcagattattcttggttccaaataagtgactcaattttgtgtgagtgagcaagacaaatcagctgggaacagaaaaactgatgcaactaayagtatctatgcaactcagctgatgttttgccttaagctaatgccaatgctatggatttggctgggatagagttaattttcattagagttttttatgatgctgtattttggatttttgatgaaaatagtgttgataacacactgatgttttagtcatagcacagcagcgcttgcactgagccaaggacgtttcagattctcatactaccctgtcagcaacggggctgaggttgcatagagaactgggaggagacaggaccaggacagctgactcaaactggccagagggatattccatacc

SEQ ID NO: 74687 - DNA, 600 bp, Chicken  19866894357487_1
tggagcactgatgttcccaatttacacatatactggaaaatctggttttgtgcttcctgatgatgatgtgcaagggatccaagagctctatggtaagtctgtataatgtaaaatatgtattgcctgtgtcattataacctgttacagacacactgaacagttattaaaggccttcaggtgttcagtagcaacacttgtgattgattaagtcctaatcactgaactcttggcaaccagactaaaggacaaaagatgcttagatttaatagttcagggggattaaaaagaaagtaatactgyagaggactgttggtagctgtgctgctcctttgatgaggtgggaaaagagagcacacagagtccttttattttttaacccgaaaagagaaggtaaaacaggcagatatagaagggagaaacagaaatattcagatttcaatgtttcatcatggaaagaacaaaacttttagaagaccttcaaaattaggataaaggaaattagtccatttaacatttttgcagctgaactacaaagtactttagtgtatttggctaaagaagagaaagagagaacagactttctctggtacaaatcatttg

SEQ ID NO: 74688 - DNA, 600 bp, Chicken  19866894357487_2
tgttggtagctgtgctgctcctttgatgaggtgggaaaagagagcacacagagtccttttattttttaacccgaaaagagaaggtaaaacaggcagatatagaagggagaaacagaaatattcagatttcaatgtttcatcatggaaagaacaaaacttttagaagaccttcaaaattaggataaaggaaattagtccatttaacatttttgcagctgaactacaaagtactttagtgtatttggctaaagaagagaaagagagaacagactttctctggtacaaatcatttgccattcygcttttattcattgtggcatttggggacatttccatatcctatttaatattatgagccatagaaygggaataaaagttggcaaatttttatcatactatatggttccaggtgctggagacagagatcccaacccaaaacatcccaaaacgccagagaaatgtgctgcagatttatcgattgatgccataacaaaacttcgtggagaaatgctggtcttcaaggacaggtaaagaacctgcggtgtgatggatggtggctacttgataagatttgggtgacagaaagccatttcagttttt

SEQ ID NO: 74689 - DNA, 600 bp, Chicken  19866894357487_3
ttaacccgaaaagagaaggtaaaacaggcagatatagaagggagaaacagaaatattcagatttcaatgtttcatcatggaaagaacaaaacttttagaagaccttcaaaattaggataaaggaaattagtccatttaacatttttgcagctgaactacaaagtactttagtgtatttggctaaagaagagaaagagagaacagactttctctggtacaaatcatttgccattcygcttttattcattgtggcatttggggacatttccatatcctatttaatattatgagccatagaaygggaataaaagttggcaaatttttatcatactatatggttccaggtgctggagacagagatcccaacccaaaacatcccaaaacgccagagaaatgtgctgcagatttatcgattgatgccataacaaaacttcgtggagaaatgctggtcttcaaggacaggtaaagaacctgcggtgtgatggatggtggctacttgataagatttgggtgacagaaagccatttcagtttttcactamagatctgtgtaaatataaaaattcccgaatcagcagtagatgtttttaagaagttacat

SEQ ID NO: 74690 - DNA, 600 bp, Chicken  19866894357487_4
attcattgtggcatttggggacatttccatatcctatttaatattatgagccatagaaygggaataaaagttggcaaatttttatcatactatatggttccaggtgctggagacagagatcccaacccaaaacatcccaaaacgccagagaaatgtgctgcagatttatcgattgatgccataacaaaacttcgtggagaaatgctggtcttcaaggacaggtaaagaacctgcggtgtgatggatggtggctacttgataagatttgggtgacagaaagccatttcagtttttcactamagatctgtgtaaatataaaaattcccgaatcagcagtagatgtttttaagaagttacatcacatgtgtttttaggcaggacttgcaatgcaattacatcccagactgcccgacaatgtaaagtgaagctgatatggytgaaggctgccactatttcttcacatttttcatttcaccgggcttctgtcaatacataaatctaccaacatttattttgatgaagttatactacattcataaaccttacattgagtgcaattgtttctcttattctgaatgaaaacaacaacaacaacaaaaa

SEQ ID NO: 74691 - DNA, 600 bp, Chicken  19866894357487_5
caaaacgccagagaaatgtgctgcagatttatcgattgatgccataacaaaacttcgtggagaaatgctggtcttcaaggacaggtaaagaacctgcggtgtgatggatggtggctacttgataagatttgggtgacagaaagccatttcagtttttcactamagatctgtgtaaatataaaaattcccgaatcagcagtagatgtttttaagaagttacatcacatgtgtttttaggcaggacttgcaatgcaattacatcccagactgcccgacaatgtaaagtgaagctgatatggytgaaggctgccactatttcttcacatttttcatttcaccgggcttctgtcaatacataaatctaccaacatttattttgatgaagttatactacattcataaaccttacattgagtgcaattgtttctcttattctgaatgaaaacaacaacaacaacaaaaaaccccaacaacaaaaaaacagcacccaacttctctgttattctctttttgtgaactaggtttttctggcgactgcacccgcagatggttgaagcagaacttgttttaattaaatccttttggccggagcttccaaac

SEQ ID NO: 74692 - DNA, 600 bp, Chicken  19866894357488_1
aacctcctgcattaaaattttgcctattgctcacacacacacacacacacacattaagcaagctaacttgaatgatgaaatcattctgggtttattcgcttggttcaattaatctacgtttaacatctttttctttaaagtgattaaaactctagatatgaatatccatgatttttcacattaaaatcaaatgctacttgcaagttcagaactgaacttggcaaataaggcagcctctttccttcatcaaacagataacttgctggaagcagaaagggagaccttctgcttacaccctcrtccctggagttttacaaatgatcacagtataggctagaacagaaagcaggattaatgcacttcattgatcctgtatttctgagaaaatcagtggctccataaagctgtcattttttggaattttaactaactttttaatatgatgcttaaggaaaaccgtgaagaattttcactagttgattttcacaggttctgaggtgcccacacacccatgtcagccgcaaaaggagaccaactcaccacttctgaaaagcagtctggatgtacattgctcccaggtaagctggactgacagcagac

SEQ ID NO: 74693 - DNA, 599 bp, Chicken  19866894357498_1
  misc_feature (1)..(171): n is any nucleotide
nnnnnnnnnnnnnnnnnnnnnnnnnnnnnnnnnnnnnnnnnnnnnnnnnnnnnnnnnnnnnnnnnnnnnnnnnnnnnnnnnnnnnnnnnnnnnnnnnnnnnnnnnnnnnnnnnnnnnnnnnnnnnnnnnnnnnnnnnnnnnnnnnnnnnnnnnnnnnnnnnnnnnnnnnnncttctatataaatggtgcactctataccttatttaggcttcgtttagaattactgttatgctgtgatagctgtaacgctttccagctgatggggatctctgtaaatactttttagtagatacacacttstgtgcctgcaaatagcagaacagggttaggagaacactggcatgcaaaccaattatttattatagatattctcgttattaagacaacagtgacaagccaggaaatgggggtgggagtcattggcttgtaaagggccttgtagatacttttccctgctctttttcacatttggcccaagttgcaacatgcccctcacagagggagagtattttgacacataactgcttgttctgagtttccaaagccattctgttcctcattagaccctaaagatccttgtccatttgaacacccgtgcc

SEQ ID NO: 74694 - DNA, 600 bp, Chicken  19866894357498_2
aaccaattatttattatagatattctcgttattaagacaacagtgacaagccaggaaatgggggtgggagtcattggcttgtaaagggccttgtagatacttttccctgctctttttcacatttggcccaagttgcaacatgcccctcacagagggagagtattttgacacataactgcttgttctgagtttccaaagccattctgttcctcattagaccctaaagatccttgtccatttgaacacccgtgccatagccgcctgtagggattctgcaggccacatgccagctctcagagragcttcaccacagcytaattttctcctcatttgtacaatacttaggcagaacaccacaaagattatagcaaaccgaacgaagtttggtaggaatggggctcagyacccccaagtaggagccaccactctgagcaataaagacaacctcaaccagctttcttttgatgctcattgtttctgtcaagttgcaatacagtacttattgctactacatgcacacagttcttgttctcagagcagaagctttaaaaatgtttactccgggcttctattgtgaaaggaagcatagcagctaaaagg

SEQ ID NO: 74695 - DNA, 600 bp, Chicken  19866894357498_3
atagatattctcgttattaagacaacagtgacaagccaggaaatgggggtgggagtcattggcttgtaaagggccttgtagatacttttccctgctctttttcacatttggcccaagttgcaacatgcccctcacagagggagagtattttgacacataactgcttgttctgagtttccaaagccattctgttcctcattagaccctaaagatccttgtccatttgaacacccgtgccatagccgcctgtagggattctgcaggccacatgccagctctcagagragcttcaccacagcytaattttctcctcatttgtacaatacttaggcagaacaccacaaagattatagcaaaccgaacgaagtttggtaggaatggggctcagyacccccaagtaggagccaccactctgagcaataaagacaacctcaaccagctttcttttgatgctcattgtttctgtcaagttgcaatacagtacttattgctactacatgcacacagttcttgttctcagagcagaagctttaaaaatgtttactccgggcttctattgtgaaaggaagcatagcagctaaaaggtttacacaggaggga

SEQ ID NO: 74696 - DNA, 600 bp, Chicken  19866894357498_4
ccctgctctttttcacatttggcccaagttgcaacatgcccctcacagagggagagtattttgacacataactgcttgttctgagtttccaaagccattctgttcctcattagaccctaaagatccttgtccatttgaacacccgtgccatagccgcctgtagggattctgcaggccacatgccagctctcagagragcttcaccacagcytaattttctcctcatttgtacaatacttaggcagaacaccacaaagattatagcaaaccgaacgaagtttggtaggaatggggctcagyacccccaagtaggagccaccactctgagcaataaagacaacctcaaccagctttcttttgatgctcattgtttctgtcaagttgcaatacagtacttattgctactacatgcacacagttcttgttctcagagcagaagctttaaaaatgtttactccgggcttctattgtgaaaggaagcatagcagctaaaaggtttacacaggagggagaccagatattttgtacagccaaatgtcctatggttacagttgcaaacaggtaatttgtatgaggttttaacttcctttgtattcttaa

SEQ ID NO: 74697 - DNA, 600 bp, Chicken  19866894357500_1
agactgatgcagtctatttctagaaagtgctttctttaaggctgtatccaaaaggtcaccaccctggcacagaggagaaaaataatacagatctcttgcagtcagagacaaatagttttccgccttagtacacatctctgctactaaaagtgtactgcagcaaggaaatccatttacagttttccttttacataacagttgcagtgcccttaagagcccccagttgtttccatattctcttctctagttgtcctacagtatagctgcaataaaaagcctgtttactgagagccagtactrttctgtgaagtgtttctcagcaaacattataggtcaaaagcatgtgttttgacagctttgaaagtgttctcagataataatrataagactcctactctttttttttttcatttttcattcaytctttacataagtaccttttacatttttgttttatagtgatctaactgtaaacatgcttgtaaaaggataagcaaatggaaatagactggccttaggattgctacttgtttgactggtcataatctgtgtgtggggtcgctgcttacacctgtgctgaacttcttcactactgtgtaa

SEQ ID NO: 74698 - DNA, 600 bp, Chicken  19866894357500_2
taatacagatctcttgcagtcagagacaaatagttttccgccttagtacacatctctgctactaaaagtgtactgcagcaaggaaatccatttacagttttccttttacataacagttgcagtgcccttaagagcccccagttgtttccatattctcttctctagttgtcctacagtatagctgcaataaaaagcctgtttactgagagccagtactrttctgtgaagtgtttctcagcaaacattataggtcaaaagcatgtgttttgacagctttgaaagtgttctcagataataatrataagactcctactctttttttttttcatttttcattcaytctttacataagtaccttttacatttttgttttatagtgatctaactgtaaacatgcttgtaaaaggataagcaaatggaaatagactggccttaggattgctacttgtttgactggtcataatctgtgtgtggggtcgctgcttacacctgtgctgaacttcttcactactgtgtaactgctaacacctgtagcctttgcacaggcatgtttgattagtgggctgtttttcctactgctccttcatctttgatcatttt

SEQ ID NO: 74699 - DNA, 600 bp, Chicken  19866894357500_3
ccttagtacacatctctgctactaaaagtgtactgcagcaaggaaatccatttacagttttccttttacataacagttgcagtgcccttaagagcccccagttgtttccatattctcttctctagttgtcctacagtatagctgcaataaaaagcctgtttactgagagccagtactrttctgtgaagtgtttctcagcaaacattataggtcaaaagcatgtgttttgacagctttgaaagtgttctcagataataatrataagactcctactctttttttttttcatttttcattcaytctttacataagtaccttttacatttttgttttatagtgatctaactgtaaacatgcttgtaaaaggataagcaaatggaaatagactggccttaggattgctacttgtttgactggtcataatctgtgtgtggggtcgctgcttacacctgtgctgaacttcttcactactgtgtaactgctaacacctgtagcctttgcacaggcatgtttgattagtgggctgtttttcctactgctccttcatctttgatcatttttatacttctatctacatatccaacaaccaagttttatgca

SEQ ID NO: 74700 - DNA, 600 bp, Chicken  19866894357503_1
agggtgttttgtgtaagggtgtttcttataattcggactgtgtttagtagaacatgtggatctggtttgtgtgagggaaggcgataatcagaacatgctgtcagcaaggggtataatagtaagatagaactatttgctgcgcccttctgaaatagaagtgcaaaatattccatgaaggcgacactgaggtgacacacacagcccctattagtacactgttttcttcttcatggctaaaagttgtcttgaaatttggctacagttaatgtaagtctaccatgttacgtaactcctagctaytttatgaaattcagcctccggttggaagagcggagtgttgtaggtaagcagagatggagcatcacaggctttgaacaactttctcccctttcctacgttcctatttccagcctaaggatttgagagttgccagtaattctctttgaaatcagtttcaaatggtaaataatttaaaattgcagtgaggcacttcgtttgaacgtgctctgtttttctcagtttttaagaaaattatgtacttgatcgtgattaataggaccttcagttccttccaagtgatagcaattagctttaatttgc

SEQ ID NO: 74701 - DNA, 600 bp, Chicken  19866894357508_1
gtattgattgatctgtatttttcaataatgttcacatttggtctgttaaaccacttaaaaacatagaatcataaaatatcttcagttagaagggacccaaagagatcactgaacccaactcctggctccacactggaccactcaaaattcaaatcatatgtctgagagcatcatccaaatgcttcttgaactccagcagctcagtgctatgaccactgctctggggagcgtgctccagtgtccgaccacaatctggtaaagaacctttccctaacacacccaacctgaccctcccctgasacagctccatgctgttccctcagattctgtagctcttaccagagagcagagctcagtgctgcccctccactcccctcatgatgagctgtagactgtaatgaattcacctctcttatctcttctctaagaagaacaaatacacygttttagacctttcactgtctttgttgctctcctttgggcaatctctatatacatagttcttataacgtggaatccaaaagttcatacagtaatcaaggtgaagctactccagtgcagagtgaagggcaacaatcacttccctcagtgagctagttc

SEQ ID NO: 74702 - DNA, 600 bp, Chicken  19866894357508_2
aaaattcaaatcatatgtctgagagcatcatccaaatgcttcttgaactccagcagctcagtgctatgaccactgctctggggagcgtgctccagtgtccgaccacaatctggtaaagaacctttccctaacacacccaacctgaccctcccctgasacagctccatgctgttccctcagattctgtagctcttaccagagagcagagctcagtgctgcccctccactcccctcatgatgagctgtagactgtaatgaattcacctctcttatctcttctctaagaagaacaaatacacygttttagacctttcactgtctttgttgctctcctttgggcaatctctatatacatagttcttataacgtggaatccaaaagttcatacagtaatcaaggtgaagctactccagtgcagagtgaagggcaacaatcacttccctcagtgagctagttcaattgagcttaacacaccctaagggtataattggcccttttggctattaggcctcaccactggctcatatacaatttatcattgaccagaactccccagatctaaattgcttattgactgctctctatagttaaaaaagtcca

SEQ ID NO: 74703 - DNA, 600 bp, Chicken  19866894357511_1
gccttttcactgcgtcacactgaatgaagaggaattgtctcaggccacatacagaataaatggtatagttaatatacaagagctactcccagagtaaagcctcctattttatgatgttggcccacaacatcacaggtagatgttggtggcatggcagtagaggttgaaccttctcaccaataaaaagcaatggcaacagcggcaatggatcaccttcactggtgcagattttaacgagcatggctggtgaaaatacatagctaatggtgttgactatgttgaaaaatagagttttgtagytgaaaatttgctctatcaaatagtgttattgcgctctttgctgtagttcccatggaaatagatagcaggcattactttcagagcaactttggtatataagtaaaaaactttctttttgaatttttttaattaaaacacacaaaaaaagaaggcaataaaaacattaatctagtgagatatttgaccttgttttcttgaaactaacaaatatgttaacttggtagcttattacattgtattatgaaacaacacaagcccaagcttaataattaaataagaagggtttcctgtctgcataag

SEQ ID NO: 74704 - DNA, 600 bp, Chicken  19866894357525_1
ggaagagcctgtgggggctgggaggaggcttgccgggaggctaagagcctcttggtagaggcctgggcgcaggcctaggaggaggccttggttttggggtgcagtccccctttgctgtgagcccagctctgaggtgaggccctgcgctgagcctgaccggtaccgcccggccccggagctggggggacctctgagcacctcagaaacttaacaaaaaaaaggggtttccctgctccactgcgttgtgtgagcccttgttagtaaacaggagagctcacagcccctcacagtgagaacttstgggcgttgaaggaggaaagaaggcataaaacctttgcttcatgtctcctcttgctgagctcctcttgctcctttggsttttcctcccgttctccctgcgatttcacaccctagggaacctagcacacctgtgtgggctgctccctgggacgtggctgtggttaytgctgtgagtgtgggtgctctggtagcagagctttccgtctctgggatgggttgggtaataaggggcttgtcagctgtgtcagggagagatggggagggaaagcagcacccacactcttctgrcgaggtggaatc

SEQ ID NO: 74705 - DNA, 600 bp, Chicken  19866894357525_2
gaggaggccttggttttggggtgcagtccccctttgctgtgagcccagctctgaggtgaggccctgcgctgagcctgaccggtaccgcccggccccggagctggggggacctctgagcacctcagaaacttaacaaaaaaaaggggtttccctgctccactgcgttgtgtgagcccttgttagtaaacaggagagctcacagcccctcacagtgagaacttstgggcgttgaaggaggaaagaaggcataaaacctttgcttcatgtctcctcttgctgagctcctcttgctcctttggsttttcctcccgttctccctgcgatttcacaccctagggaacctagcacacctgtgtgggctgctccctgggacgtggctgtggttaytgctgtgagtgtgggtgctctggtagcagagctttccgtctctgggatgggttgggtaataaggggcttgtcagctgtgtcagggagagatggggagggaaagcagcacccacactcttctgrcgaggtggaatcagagggcgtctggttctgaccgtgcggtgtctgcatggaggttgcagccccattggtgtggggtaggaaaaaaagcag

SEQ ID NO: 74706 - DNA, 600 bp, Chicken  19866894357525_3
cccggccccggagctggggggacctctgagcacctcagaaacttaacaaaaaaaaggggtttccctgctccactgcgttgtgtgagcccttgttagtaaacaggagagctcacagcccctcacagtgagaacttstgggcgttgaaggaggaaagaaggcataaaacctttgcttcatgtctcctcttgctgagctcctcttgctcctttggsttttcctcccgttctccctgcgatttcacaccctagggaacctagcacacctgtgtgggctgctccctgggacgtggctgtggttaytgctgtgagtgtgggtgctctggtagcagagctttccgtctctgggatgggttgggtaataaggggcttgtcagctgtgtcagggagagatggggagggaaagcagcacccacactcttctgrcgaggtggaatcagagggcgtctggttctgaccgtgcggtgtctgcatggaggttgcagccccattggtgtggggtaggaaaaaaagcagcaagaaaccgctgtgggtttcgcacagctctgagggcagtgagttttgtagtttaaaacagagggtttgcagtgcatttctcccygg

SEQ ID NO: 74707 - DNA, 600 bp, Chicken  19866894357525_4
agtgagaacttstgggcgttgaaggaggaaagaaggcataaaacctttgcttcatgtctcctcttgctgagctcctcttgctcctttggsttttcctcccgttctccctgcgatttcacaccctagggaacctagcacacctgtgtgggctgctccctgggacgtggctgtggttaytgctgtgagtgtgggtgctctggtagcagagctttccgtctctgggatgggttgggtaataaggggcttgtcagctgtgtcagggagagatggggagggaaagcagcacccacactcttctgrcgaggtggaatcagagggcgtctggttctgaccgtgcggtgtctgcatggaggttgcagccccattggtgtggggtaggaaaaaaagcagcaagaaaccgctgtgggtttcgcacagctctgagggcagtgagttttgtagtttaaaacagagggtttgcagtgcatttctcccyggagggctgcgtggagtctgacttcagcaccagggaggggcggattctggaggagagccacaaactcytcattcctcgtagtgctcggtctggcrgttggcgaccctgcacatagcagggggggt

SEQ ID NO: 74708 - DNA, 600 bp, Chicken  19866894357525_5
aytgctgtgagtgtgggtgctctggtagcagagctttccgtctctgggatgggttgggtaataaggggcttgtcagctgtgtcagggagagatggggagggaaagcagcacccacactcttctgrcgaggtggaatcagagggcgtctggttctgaccgtgcggtgtctgcatggaggttgcagccccattggtgtggggtaggaaaaaaagcagcaagaaaccgctgtgggtttcgcacagctctgagggcagtgagttttgtagtttaaaacagagggtttgcagtgcatttctcccyggagggctgcgtggagtctgacttcagcaccagggaggggcggattctggaggagagccacaaactcytcattcctcgtagtgctcggtctggcrgttggcgaccctgcacatagcagggggggttgaaactagatgatcactgtggtccttttcaacccaggccactctatgattcccagttctgctcctgagatctctcggtggcacacgggtgcaaccaagcaccgttcctcttctgtctttcaggcacagagctragcgagggggctctgatacatccttgtgtgtcacagcactg

SEQ ID NO: 74709 - DNA, 600 bp, Chicken  19866894357525_6
cttgtcagctgtgtcagggagagatggggagggaaagcagcacccacactcttctgrcgaggtggaatcagagggcgtctggttctgaccgtgcggtgtctgcatggaggttgcagccccattggtgtggggtaggaaaaaaagcagcaagaaaccgctgtgggtttcgcacagctctgagggcagtgagttttgtagtttaaaacagagggtttgcagtgcatttctcccyggagggctgcgtggagtctgacttcagcaccagggaggggcggattctggaggagagccacaaactcytcattcctcgtagtgctcggtctggcrgttggcgaccctgcacatagcagggggggttgaaactagatgatcactgtggtccttttcaacccaggccactctatgattcccagttctgctcctgagatctctcggtggcacacgggtgcaaccaagcaccgttcctcttctgtctttcaggcacagagctragcgagggggctctgatacatccttgtgtgtcacagcactgatagaaaaagggtttgtgctgatgtcagccgctttctttagcagtcctgattgtattccttttttttt

SEQ ID NO: 74710 - DNA, 600 bp, Chicken  19866894357525_7
ggagggaaagcagcacccacactcttctgrcgaggtggaatcagagggcgtctggttctgaccgtgcggtgtctgcatggaggttgcagccccattggtgtggggtaggaaaaaaagcagcaagaaaccgctgtgggtttcgcacagctctgagggcagtgagttttgtagtttaaaacagagggtttgcagtgcatttctcccyggagggctgcgtggagtctgacttcagcaccagggaggggcggattctggaggagagccacaaactcytcattcctcgtagtgctcggtctggcrgttggcgaccctgcacatagcagggggggttgaaactagatgatcactgtggtccttttcaacccaggccactctatgattcccagttctgctcctgagatctctcggtggcacacgggtgcaaccaagcaccgttcctcttctgtctttcaggcacagagctragcgagggggctctgatacatccttgtgtgtcacagcactgatagaaaaagggtttgtgctgatgtcagccgctttctttagcagtcctgattgtattccttttttttttcctgctcccagtcctctcccattgtg

SEQ ID NO: 74711 - DNA, 600 bp, Chicken  19866894357525_8
ttctgrcgaggtggaatcagagggcgtctggttctgaccgtgcggtgtctgcatggaggttgcagccccattggtgtggggtaggaaaaaaagcagcaagaaaccgctgtgggtttcgcacagctctgagggcagtgagttttgtagtttaaaacagagggtttgcagtgcatttctcccyggagggctgcgtggagtctgacttcagcaccagggaggggcggattctggaggagagccacaaactcytcattcctcgtagtgctcggtctggcrgttggcgaccctgcacatagcagrgggggttgaaactagatgatcactgtggtccttttcaacccaggccactctatgattcccagttctgctcctgagatctctcggtggcacacgggtgcaaccaagcaccgttcctcttctgtctttcaggcacagagctragcgagggggctctgatacatccttgtgtgtcacagcactgatagaaaaagggtttgtgctgatgtcagccgctttctttagcagtcctgattgtattccttttttttttcctgctcccagtcctctcccattgtgtttgcctgcagctcagagctttct

SEQ ID NO: 74712 - DNA, 600 bp, Chicken  19866894357525_9
tttgtagtttaaaacagagggtttgcagtgcatttctcccyggagggctgcgtggagtctgacttcagcaccagggaggggcggattctggaggagagccacaaactcytcattcctcgtagtgctcggtctggcrgttggcgaccctgcacatagcagggggggttgaaactagatgatcactgtggtccttttcaacccaggccactctatgattcccagttctgctcctgagatctctcggtggcacacgggtgcaaccaagcaccgttcctcttctgtctttcaggcacagagctragcgagggggctctgatacatccttgtgtgtcacagcactgatagaaaaagggtttgtgctgatgtcagccgctttctttagcagtcctgattgtattccttttttttttcctgctcccagtcctctcccattgtgtttgcctgcagctcagagctttctaagcacataaggcagcattgtttgtgctgctgggaaagtgctctttttccagtgaagcagagtttcccttgcaaactttaatgagtcttttatttatatatatatatgtatttagacagatcttgatgcaaatattgctg

SEQ ID NO: 74713 - DNA, 600 bp, Chicken  19866894357528_1
acagtgatgttctgtgcaactgcttgtaacacacgggggtgtttctgctggaattttatttggctataactggcagtgaacaaggtggttagctgatagtcaggcacagaaagactcctggctggaagcgagggaggctaacttgaacaaaacattcatttcatctaaaatctgcccaatctgggctgtctcagcatgttttcctgaagcaggctttcagaaacacaaccccagccactgtgtcgaatgacgaaccagaggtggggctctgtgcaaggcaggtcagcatttgatcattcrmatcctctcttgggtgacaagtcccagtgagcagctgggagcagggcgtggaggatgtccaggcagtgatatgagccgaagagacaaaaaaaaccccaagctttatgtatgcaggttgctttaacgtgatggttcccatgtgcagacaggtgatgttgctgttcagaacaagccttggtctcgctgtgagccatttcacagcccagcactcatctgaatccggcctggcccgtcctgggtgcacgcaggtttctgcactcgtgtttctggctgtaggaccagccccttgtttgcagtgag

SEQ ID NO: 74714 - DNA, 600 bp, Chicken  19866894357528_2
cagtgatgttctgtgcaactgcttgtaacacacgggggtgtttctgctggaattttatttggctataactggcagtgaacaaggtggttagctgatagtcaggcacagaaagactcctggctggaagcgagggaggctaacttgaacaaaacattcatttcatctaaaatctgcccaatctgggctgtctcagcatgttttcctgaagcaggctttcagaaacacaaccccagccactgtgtcgaatgacgaaccagaggtggggctctgtgcaaggcaggtcagcatttgatcattcrmatcctctcttgggtgacaagtcccagtgagcagctgggagcagggcgtggaggatgtccaggcagtgatatgagccgaagagacaaaaaaaaccccaagctttatgtatgcaggttgctttaacgtgatggttcccatgtgcagacaggtgatgttgctgttcagaacaagccttggtctcgctgtgagccatttcacagcccagcactcatctgaatccggcctggcccgtcctgggtgcacgcaggtttctgcactcgtgtttctggctgtaggaccagccccttgtttgcagtgagc

SEQ ID NO: 74715 - DNA, 600 bp, Chicken  19866894357533_1
ttcagaaagtgaagttaggaaacattcgtactatggtgaatgtgtgatttgagctttttctgaatggggacaatacagtgaataggcagtttagagaggtgggtttgtgtgtgctttttgttgttttcttttgtggggtttggaatgtgctgagttgtggagttgtcttgtatgttccaacagtaactctttgctaccagatctctcctgccacatacttgtagttttcttcctgcatgctaataactctcaaatagggattcaccaattacagtgattttagcaaatcttcacaattaraaggtcaattaaaatgaaattttctgaagttgtcaacaacaattgaattaatagaaatgtctttgctacttaaaattcattgctgattgttatcttgattcttcctcccttgacctcacagtgtgtttcaagctctactaaaatagtttggaaatctgaggagatcctaatcccacatgctcatgaagatcagtttcttttctagtttttcagcagccatccccccaagagcaaattgtctgatttttgttcatttctatcattcagcatgacctgaaagtgatctttttctgtttaagc

SEQ ID NO: 74716 - DNA, 600 bp, Chicken  19866894357538_1
aattgtccccattgcaggacagtcaagggaagttccatgtaaatgactcagcccaatctcagagcaagttaacagggtgtcctcagtgcctggatttaaattaaggaaaaatcaatcaaagaggctacagtacagaattcaccctgtaagagagtggaggggggagtgaaggtgattctgagcagagaaacaatttcagcacggaaatttgccctgccttcagtaaccaggatgggtacctcatcatgggaactctgctctgaaaatgcagggcagtgggtaatgctgcaagtgggcacmgcgggaacatgctgatgaaggtacctgtcaccttcagatcccactgctccctgcatctcagtcacactctggtagataccctcccatgtgctgtgtaggaagcaagagagccatatccctctcctaacctctgtgcctcaattctgctcttgtatacatcacagtgttatctgtctccttgtgcaaggacagagataacatcctcctccagctcctcagcacgtgtccccaaaataaattaactacagcggccacttttggttttctcaaacacattaagattttgttctcaaatcaggc

SEQ ID NO: 74717 - DNA, 599 bp, Chicken  19866894357544_1
  misc_feature (1)..(122): n is any nucleotide
nnnnnnnnnnnnnnnnnnnnnnnnnnnnnnnnnnnnnnnnnnnnnnnnnnnnnnnnnnnnnnnnnnnnnnnnnnnnnnnnnnnnnnnnnnnnnnnnnnnnnnnnnnnnnnnnnnnnnnnnnnaccctgcaggccttgattgggcagctcatttaaacatcaggttaaatcctgtttaagtgagtactttactgaagtttttcagcagtacccttaatggctgcaaaataaatgtcgggaaacaaaacacagtcagttctcattttatttccccttttcagctaaccatccaaagaaaccytactcaygcttttttttttaaccccctcccccagatatttaaatgaattctgtgcagaccgagagggaaataagcatttccttttcccaccaagtgtcacgttccctcacactacatcrccaccaccatttatttataccgccacgaacctcccgctgctctctccasctccacatgcccctcaggctcgggttctcgtgcaggacccactgtccarctgcatccagctgtgcccagctgccgccctcctccggagccctgtccccagcaggtggcactcgggctctgccgctggcccc

SEQ ID NO: 74718 - DNA, 599 bp, Chicken  19866894357544_2
  misc_feature (1)..(115): n is any nucleotide
nnnnnnnnnnnnnnnnnnnnnnnnnnnnnnnnnnnnnnnnnnnnnnnnnnnnnnnnnnnnnnnnnnnnnnnnnnnnnnnnnnnnnnnnnnnnnnnnnnnnnnnnnnnnnnnnnnnaccctgcaggccttgattgggcagctcatttaaacatcaggttaaatcctgtttaagtgagtactttactgaagtttttcagcagtacccttaatggctgcaaaataaatgtcgggaaacaaaacacagtcagttctcattttatttccccttttcagctaaccatccaaagaaaccytactcaygcttttttttttaaccccctcccccagatatttaaatgaattctgtgcagaccgagagggaaataagcatttccttttcccaccaagtgtcacgttccctcacactacatcrccaccaccatttatttataccgccacgaacctcccgctgctctctccasctccacatgcccctcaggctcgggttctcgtgcaggacccactgtccarctgcatccagctgtgcccagctgccgccctcctccggagccctgtccccagcaggtggcactcgggctctgccgctggccccggcagac

SEQ ID NO: 74719 - DNA, 599 bp, Chicken  19866894357544_3
  misc_feature (1)..(3): n is any nucleotide
nnnaccctgcaggccttgattgggcagctcatttaaacatcaggttaaatcctgtttaagtgagtactttactgaagtttttcagcagtacccttaatggctgcaaaataaatgtcgggaaacaaaacacagtcagttctcattttatttccccttttcagctaaccatccaaagaaaccytactcaygcttttttttttaaccccctcccccagatatttaaatgaattctgtgcagaccgagagggaaataagcatttccttttcccaccaagtgtcacgttccctcacactacatcrccaccaccatttatttataccgccacgaacctcccgctgctctctccasctccacatgcccctcaggctcgggttctcgtgcaggacccactgtccarctgcatccagctgtgcccagctgccgccctcctccggagccctgtccccagcaggtggcactcgggctctgccgctggccccggcagactgcggggcacagtgctggccggcaaacgaccgagcgtttgcttgcaaacacctttttcatctccgggatagaggcaaacgggtgctttccatgcctaaatcatcagtagcat

SEQ ID NO: 74720 - DNA, 600 bp, Chicken  19866894357544_4
tcctgtttaagtgagtactttactgaagtttttcagcagtacccttaatggctgcaaaataaatgtcgggaaacaaaacacagtcagttctcattttatttccccttttcagctaaccatccaaagaaaccytactcaygcttttttttttaaccccctcccccagatatttaaatgaattctgtgcagaccgagagggaaataagcatttccttttcccaccaagtgtcacgttccctcacactacatcrccaccaccatttatttataccgccacgaacctcccgctgctctctccasctccacatgcccctcaggctcgggttctcgtgcaggacccactgtccarctgcatccagctgtgcccagctgccgccctcctccggagccctgtccccagcaggtggcactcgggctctgccgctggccccggcagactgcggggcacagtgctggccggcaaacgaccgagcgtttgcttgcaaacacctttttcatctccgggatagaggcaaacgggtgctttccatgcctaaatcatcagtagcatcagttgtgagccctttcatgccgtccatccctaactcctgtctcagccga

SEQ ID NO: 74721 - DNA, 600 bp, Chicken  19866894357544_5
ggctgcaaaataaatgtcgggaaacaaaacacagtcagttctcattttatttccccttttcagctaaccatccaaagaaaccytactcaygcttttttttttaaccccctcccccagatatttaaatgaattctgtgcagaccgagagggaaataagcatttccttttcccaccaagtgtcacgttccctcacactacatcrccaccaccatttatttataccgccacgaacctcccgctgctctctccasctccacatgcccctcaggctcgggttctcgtgcaggacccactgtccarctgcatccagctgtgcccagctgccgccctcctccggagccctgtccccagcaggtggcactcgggctctgccgctggccccggcagactgcggggcacagtgctggccggcaaacgaccgagcgtttgcttgcaaacacctttttcatctccgggatagaggcaaacgggtgctttccatgcctaaatcatcagtagcatcagttgtgagccctttcatgccgtccatccctaactcctgtctcagccgaggtgggcacatagcagcaacagtgagggctgaaagggatatccctcatg

SEQ ID NO: 74722 - DNA, 600 bp, Chicken  19866894357548_1
caaaacaagagttgtcacgttacaaaattatatatcctctctgtatttaattaggtatttaacttaaaattgttcccatcctaattggggacttaaaatcacttttagcactgaatttactgaagcctaagaattttctaacagtggttccaattctgcaagaaaacctccctagctctacataggagctgcaagactttcctacgttacccacatcagacaaaacatcctcatgctacaaacaggcattttcaaaatatccctcagaaaagggtacttctgtcctcacagtcactcccwgacaatccttagagaaaagacgactcraaattcctcgcttgcaggcaatccagtccaggcactatatagctgtcacaagcctgacaggttattgtatggaggatatcataccttccccacagaaaatcccatgggaaaagctgagaatgaaggaaaccctggtgcaatccatccagtcgagcagggcagccattgctttttctgtgagggttaaycttgcagccctgccaagcctgtctgaatggaaccactgcagctctcctctcccacatcaccatcaaaaggcctccagatctctct

SEQ ID NO: 74723 - DNA, 600 bp, Chicken  19866894357548_2
ttatatatcctctctgtatttaattaggtatttaacttaaaattgttcccatcctaattggggacttaaaatcacttttagcactgaatttactgaagcctaagaattttctaacagtggttccaattctgcaagaaaacctccctagctctacataggagctgcaagactttcctacgttacccacatcagacaaaacatcctcatgctacaaacaggcattttcaaaatatccctcagaaaagggtacttctgtcctcacagtcactcccwgacaatccttagagaaaagacgactcraaattcctcgcttgcaggcaatccagtccaggcactatatagctgtcacaagcctgacaggttattgtatggaggatatcataccttccccacagaaaatcccatgggaaaagctgagaatgaaggaaaccctggtgcaatccatccagtcgagcagggcagccattgctttttctgtgagggttaaycttgcagccctgccaagcctgtctgaatggaaccactgcagctctcctctcccacatcaccatcaaaaggcctccagatctctctggtgcccaagtctgcagcgtcccccac

SEQ ID NO: 74724 - DNA, 529 bp, Chicken  19866894357548_3
tcagacaaaacatcctcatgctacaaacaggcattttcaaaatatccctcagaaaagggtacttctgtcctcacagtcactcccwgacaatccttagagaaaagacgactcraaattcctcgcttgcaggcaatccagtccaggcactatatagctgtcacaagcctgacaggttattgtatggaggatatcataccttccccacagaaaatcccatgggaaaagctgagaatgaaggaaaccctggtgcaatccatccagtcgagcagggcagccattgctttttctgtgagggttaaycttgcagccctgccaagcctgtctgaatggaaccactgcagctctcctctcccacatcaccatcaaaaggcctccagatctctctggtgcccaagtctgcagcgtcccccaccccaagccgccacacagggcaggcagcccacccaccctgggacaaaccggccacctcaggcctacatgtgggccaggagcaggaagccggccaggaggcagcaccaggtccagccag

SEQ ID NO: 74725 - DNA, 599 bp, Chicken  19866894357576_1
  misc_feature (1)..(205): n is any nucleotide
nnnnnnnnnnnnnnnnnnnnnnnnnnnnnnnnnnnnnnnnnnnnnnnnnnnnnnnnnnnnnnnnnnnnnnnnnnnnnnnnnnnnnnnnnnnnnnnnnnnnnnnnnnnnnnnnnnnnnnnnnnnnnnnnnnnnnnnnnnnnnnnnnnnnnnnnnnnnnnnnnnnnnnnnnnnnnnnnnnnnnnnnnnnnnnnnnnnnnnnnnnnnncaactccatatttactgggttggaagtatgtgctgactattaaaaatggctcttcttcttagcactgagctaggaattcattactttatttgagytccctatagatactgagcaataatacaacggccccctaaatttcttgaaggactcagtaagtgacagtttgaagaagtgaaccagtaaaaaaagtttgggatacacaacgtactttgtcaagctcctctggagtacagattattgaagaacattctagtttgacaagcaacgcacaaaactgaatacactcgtaaatgttaaactcgtatcctgttcatgaatgtttcttcactggaagcttttagcctctttatcttgtatttatttatttggatcagtagcttggattgtggatttt

SEQ ID NO: 74726 - DNA, 600 bp, Chicken  19866894357577_1
aaggttcttgcatgttttcggaaaactgcacctccaacaaaatcttctcaacactccactttctctgtggtttcatgctgacccagggagccatctactcaatcaagagtataaattactgaggcattccatgttttgaaagacttccatcctgacacaagcaaaatccaacaatgctaaaattggaaggcttaaggcaaaattctccttgcatcattgatgttttcttattgatttgaatgggattacttagcagaatagtgtgaatagggtttgacccgaaacaaaaacaatgcataygctgtcaggctgaaagagcgtctggttactttgagtagtaacagtatgatatagtagatgagtcctcatgtcctttgccttccagaatgaagaacagtactttaaaatctttttttctttaccaaacatgaaaagaataggaagcatatttttcttggccatggtaatattagaactcctgggctggcaaatactttcctgaagtttctgacaaactcttagctctcaacaatgattgtattgtcttgtaccccttaaactattctatttgtaaatcaagatttattttataaaaaaatt

SEQ ID NO: 74727 - DNA, 600 bp, Chicken  19866894357581_1
ttgctgaaggagcaggaggaatgtcaaaaacatgtctttatatactactgtacaaaaagttatttgaggatatagctctgccatgacaacaactgcagggtgttgtaagggaatattttatgctttcacttgtctgcaggctcatataggatctttttctggccataagcaggctctttgtcagtgtatgcacgtgtgtgtgcatgactgtgtgaatgcacactctatagccatggaaatagctaaaaattttacaaggacagtgaatagacacagaggaatactatcagattctctggwgatgccattgtttggttcttaatgttttccccagctgatcagcaaggaaatagctaaatatccctataytaatgaaagcctcatgctgtcccattgcaggttgtagaatagaatcacagaatcattacgtttggaaaggaccaccaagatcatccagtccaaccagcagcccacccctaccatgcccactgaccacgtccctcagtgccacatccacacggctcttgagcacctccagggatggtgactgcaccacctccctgggcagctgtgccactccttctgagaagaaatctttcc

SEQ ID NO: 74728 - DNA, 600 bp, Chicken  19866894357581_2
atatagctctgccatgacaacaactgcagggtgttgtaagggaatattttatgctttcacttgtctgcaggctcatataggatctttttctggccataagcaggctctttgtcagtgtatgcacgtgtgtgtgcatgactgtgtgaatgcacactctatagccatggaaatagctaaaaattttacaaggacagtgaatagacacagaggaatactatcagattctctggwgatgccattgtttggttcttaatgttttccccagctgatcagcaaggaaatagctaaatatccctataytaatgaaagcctcatgctgtcccattgcaggttgtagaatagaatcacagaatcattacgtttggaaaggaccaccaagatcatccagtccaaccagcagcccacccctaccatgcccactgaccacgtccctcagtgccacatccacacggctcttgagcacctccagggatggtgactgcaccacctccctgggcagctgtgccactccttctgagaagaaatctttcctcacatccagcctgcaccttgccagtaaaacttgagaccgttacctgttgtgctattgatgagatagat

SEQ ID NO: 74729 - DNA, 599 bp, Chicken  19866894357582_1
  misc_feature (1)..(139): n is any nucleotide
nnnnnnnnnnnnnnnnnnnnnnnnnnnnnnnnnnnnnnnnnnnnnnnnnnnnnnnnnnnnnnnnnnnnnnnnnnnnnnnnnnnnnnnnnnnnnnnnnnnnnnnnnnnnnnnnnnnnnnnnnnnnnnnnnnnnnnnnnnnaacatgctttctttgcactctatatctagatgaggacatctctgcacaggctaatttcagcttggagtttttcccatacgtatttcacttagtatagcaatttaaacgggtggccaaaactagctggatacgcttttaaatattttggtaattttagatayttaggttaattcgattcatttctgaatccaataggcttttggttttactcttcaacttacttttggaatgaagtactacagcctagaacaaaatagaaatgcaggttttaagcaaatcagtgtgcgatgtgaatggcatacttgcactacaactaatgtcacacagggacctttttcagggcaaaacgataacgagactctcagttctcagttctgcrctccaaactgcacacaaactcagcctggtgcttctgagatgcagtttggttttgttttagtaacacaayctcatcagggtc

SEQ ID NO: 74730 - DNA, 600 bp, Chicken  19866894357582_2
gtatttcacttagtatagcaatttaaacgggtggccaaaactagctggatacgcttttaaatattttggtaattttagatayttaggttaattcgattcatttctgaatccaataggcttttggttttactcttcaacttacttttggaatgaagtactacagcctagaacaaaatagaaatgcaggttttaagcaaatcagtgtgcgatgtgaatggcatacttgcactacaactaatgtcacacagggacctttttcagggcaaaacgataacgagactctcagttctcagttctgcrctccaaactgcacacaaactcagcctggtgcttctgagatgcagtttggttttgttttagtaacacaayctcatcagggtcagccagcccagctttaattcacagactgctgtgactctgtgtttagaaacaaatccggacaatgacagtgcgcaagagaagcaggagcacgtccttcatctttctcctctggcctgacacactcccagtgataaagccaggggatgggcgcagctactgcccgtgggtggaacgagagcacaggccgtgacagaacttgtttgcacaggcatttctgga

SEQ ID NO: 74731 - DNA, 595 bp, Chicken  19866894357582_3
taattttagatayttaggttaattcgattcatttctgaatccaataggcttttggttttactcttcaacttacttttggaatgaagtactacagcctagaacaaaatagaaatgcaggttttaagcaaatcagtgtgcgatgtgaatggcatacttgcactacaactaatgtcacacagggacctttttcagggcaaaacgataacgagactctcagttctcagttctgcrctccaaactgcacacaaactcagcctggtgcttctgagatgcagtttggttttgttttagtaacacaayctcatcagggtcagccagcccagctttaattcacagactgctgtgactctgtgtttagaaacaaatccggacaatgacagtgcgcaagagaagcaggagcacgtccttcatctttctcctctggcctgacacactcccagtgataaagccaggggatgggcgcagctactgcccgtgggtggaacgagagcacaggccgtgacagaacttgtttgcacaggcatttctggagcgaaagcacacgctccctggcagggggagagctgaatgctgcctcacggagctgcaggagcag

SEQ ID NO: 74732 - DNA, 600 bp, Chicken  19866894357597_1
ctaaatatggaaaattaaaattgttatttggttacactgtttagtgcaacatggtgccaaaacttttgatgtgatgctattcaaaagcagaagtcagtgcagtgatgcaactgggctgatcagccttaccaggagatggttatccatgagacatgatgctgcattaacacaatcatgttgtttctgtgctctgaacaagtacctgcctgctgagagcagatggctgtggatgatactctgagcaaactaggaaagtgtggatttgcactgtgtgggcagaccctttgtggtggattctgygggatctcgctccccatcagtcatgacgcataaagtcttcagtggtcatgagaactccttgtgtttattggaaagggaagaggaggaatattacaagacagtgattgtttttaagaaaacttctggttttgtggtactgctgaaaaaaacttagttccatagaagtgcatggtgagttaaaccaggctgttcaatgtgacttgaaacaggactagcagaggaggaattttttcatcaagtttattttgaaattgaatgctcttaccaacattaaatactgatcctgttaaatgctctgag

SEQ ID NO: 74733 - DNA, 600 bp, Chicken  19866894357613_1
cgcgtggcctctggtgggcaacgtcctgcagatgggccgcctgccccacctcaccttcatgcgcatggcgtgccgctatggagccatcttccagctgcgcctgggccggcaccgggtggtggtgctcaatggcgaggcggccatccggcgggcgctggtggggctgggcacgcgcttcgccggccggcctgacttcccttccttcgggctggtgtcaggtgggcgcagcatcgcctttgggggctgcacgccccaatggcgggcacggcggcggctggcccacgctgccctaagggctcrttcaacggyggcygaggtggagcggcacgtggcggccgaggcgggtgacctggtgcrgctcttcctgaggcacagccagggtggtgcttacttccagccctgcccgctcttagtggtggccaacgccaatgtcctctgcgctctctgctttggccgccgctatgaccacgctgacggcgagttcaccgcgttgcttggccgcaatgaccgctttgggcagacggtgggggctggcagtctggtagatgtactgccctggctcctgcgcttccccaaccccgtccgtcatgtctaccgtga

SEQ ID NO: 74734 - DNA, 600 bp, Chicken  19866894357613_2
tctggtgggcaacgtcctgcagatgggccgcctgccccacctcaccttcatgcgcatggcgtgccgctatggagccatcttccagctgcgcctgggccggcaccgggtggtggtgctcaatggcgaggcggccatccggcgggcgctggtggggctgggcacgcgcttcgccggccggcctgacttcccttccttcgggctggtgtcaggtgggcgcagcatcgcctttgggggctgcacgccccaatggcgggcacggcggcggctggcccacgctgccctaagggctcrttcaacggyggcygaggtggagcggcacgtggcggccgaggcgggtgacctggtgcrgctcttcctgaggcacagccagggtggtgcttacttccagccctgcccgctcttagtggtggccaacgccaatgtcctctgcgctctctgctttggccgccgctatgaccacgctgacggcgagttcaccgcgttgcttggccgcaatgaccgctttgggcagacggtgggggctggcagtctggtagatgtactgccctggctcctgcgcttccccaaccccgtccgtcatgtctaccgtgacttccaggc

SEQ ID NO: 74735 - DNA, 600 bp, Chicken  19866894357613_3
gtgggcaacgtcctgcagatgggccgcctgccccacctcaccttcatgcgcatggcgtgccgctatggagccatcttccagctgcgcctgggccggcaccgggtggtggtgctcaatggcgaggcggccatccggcgggcgctggtggggctgggcacgcgcttcgccggccggcctgacttcccttccttcgggctggtgtcaggtgggcgcagcatcgcctttgggggctgcacgccccaatggcgggcacggcggcggctggcccacgctgccctaagggctcrttcaacggyggcygaggtggagcggcacgtggcggccgaggcgggtgacctggtgcrgctcttcctgaggcacagccagggtggtgcttacttccagccctgcccgctcttagtggtggccaacgccaatgtcctctgcgctctctgctttggccgccgctatgaccacgctgacggcgagttcaccgcgttgcttggccgcaatgaccgctttgggcagacggtgggggctggcagtctggtagatgtactgccctggctcctgcgcttccccaaccccgtccgtcatgtctaccgtgacttccaggccctc

SEQ ID NO: 74736 - DNA, 600 bp, Chicken  19866894357613_4
catgcgcatggcgtgccgctatggagccatcttccagctgcgcctgggccggcaccgggtggtggtgctcaatggcgaggcggccatccggcgggcgctggtggggctgggcacgcgcttcgccggccggcctgacttcccttccttcgggctggtgtcaggtgggcgcagcatcgcctttgggggctgcacgccccaatggcgggcacggcggcggctggcccacgctgccctaagggctcrttcaacggyggcygaggtggagcggcacgtggcggccgaggcgggtgacctggtgcrgctcttcctgaggcacagccagggtggtgcttacttccagccctgcccgctcttagtggtggccaacgccaatgtcctctgcgctctctgctttggccgccgctatgaccacgctgacggcgagttcaccgcgttgcttggccgcaatgaccgctttgggcagacggtgggggctggcagtctggtagatgtactgccctggctcctgcgcttccccaaccccgtccgtcatgtctaccgtgacttccaggccctcaaccgggagctgcacggctttgtgcaggccaaggtggcacagca

SEQ ID NO: 74737 - DNA, 600 bp, Chicken  19866894357631_1
aatcccctccagagcgatagatttgatgtgagcaaacctttgtgtcacactgaaatgcaccaaatgttcaggactcaaaaacaaattactccgggcaggaaatgttctcagaaacgtccgattctgcagctggaatgccgaaatgcagttcagatccattcacagtttaaatgtaagcttaatttctgtaacttaaacgacataaaaaaatcagtatacgtacgtgtttgtataaacaagcgtagatataaatctacttcatttattactttgttttgcttttgctttgctatgaagttkgttgtaggtgtgttgcctacgagactgcagttatggttttcccaactgaaaaatgagtagaagtacatgtgtggtcagcagggctccatgcatccagccacagcctgccatgctgccccactgcctgcagcccagccctccttcaaagcgcccagaaatatcagaactggaaaaaacagggaatgtcacaagtcttggaagtaggagatggctggtagcagctcagccttgatccatcccagacggtacccttaatgacagcctgctggccccttccgtgttagcaaggaagtgagtata

SEQ ID NO: 74738 - DNA, 599 bp, Chicken  19866894357636_1
  misc_feature (1)..(85): n is any nucleotide
nnnnnnnnnnnnnnnnnnnnnnnnnnnnnnnnnnnnnnnnnnnnnnnnnnnnnnnnnnnnnnnnnnnnnnnnnnnnnnnnnnnnncaaaaattgatatgaaataaatgtatgagtagatctgaagaggaaaaaaaaaaaaaccattaaggttataaaacacaaggttaaaaatcactggaggctgtgaacacttaccacaaaagctctctaagtttaccctgatctcgtacatttccccaggcttgccaatattgaactgtttggaggtacaatatgagcctaggaatgatctgaattayaaacgtctcgagatcttttaatatcctggaaacctcattctttgaacatatggaaatggaatattgaaygtggtacacttcaggaagtaaatctaaataaagcaaggtgacataaaaacaaagtgataacacaagtgaaacttcaaaggcttacaccagttcttctgttcccccaaacattttcaaactaacttttccagtcaaagacaaaaccagcccatagggaaaacaaagatatattgaacaaataattagaaaactcttaaaaattacaaagcagcgactcttaattaatttaa

SEQ ID NO: 74739 - DNA, 599 bp, Chicken  19866894357636_2
  misc_feature (1)..(16): n is any nucleotide
nnnnnnnnnnnnnnnncaaaaattgatatgaaataaatgtatgagtagatctgaagaggaaaaaaaaaaaaaccattaaggttataaaacacaaggttaaaaatcactggaggctgtgaacacttaccacaaaagctctctaagtttaccctgatctcgtacatttccccaggcttgccaatattgaactgtttggaggtacaatatgagcctaggaatgatctgaattayaaacgtctcgagatcttttaatatcctggaaacctcattctttgaacatatggaaatggaatattgaaygtggtacacttcaggaagtaaatctaaataaagcaaggtgacataaaaacaaagtgataacacaagtgaaacttcaaaggcttacaccagttcttctgttcccccaaacattttcaaactaacttttccagtcaaagacaaaaccagcccatagggaaaacaaagatatattgaacaaataattagaaaactcttaaaaattacaaagcagcgactcttaattaatttaaatccactgatttgtaggccagtacgaacactttcaattgagaaattacagagctaaaaagtgattttgg

SEQ ID NO: 74740 - DNA, 600 bp, Chicken  19866894357636_3
taaagcaaggtgacataaaaacaaagtgataacacaagtgaaacttcaaaggcttacaccagttcttctgttcccccaaacattttcaaactaacttttccagtcaaagacaaaaccagcccatagggaaaacaaagatatattgaacaaataattagaaaactcttaaaaattacaaagcagcgactcttaattaatttaaatccactgatttgtaggccagtacgaacactttcaattgagaaattacagagctaaaaagtgattttgggcatataaaaacctggttccctggtcccycttctgtaggtcccacagtccagaaacctcctataaatctaaaagattataaaaccaaacgtaacagctactgtaatgaaaaagagaaatctacgacacagtaatacagaatcgcatattttctttagacatcccaatctttttgtgacctgtaaggtgaatgaagtacatcacaacacagtcagagaagcatatacracaagtcgcctacctgctgaacgaatcaggctctgtcaggtaatcctgacaaggctttaaatgcctccgattttactctgataaagtgctatagacttaggg

SEQ ID NO: 74741 - DNA, 600 bp, Chicken  19866894357636_4
ttaaatccactgatttgtaggccagtacgaacactttcaattgagaaattacagagctaaaaagtgattttgggcatataaaaacctggttccctggtcccycttctgtaggtcccacagtccagaaacctcctataaatctaaaagattataaaaccaaacgtaacagctactgtaatgaaaaagagaaatctacgacacagtaatacagaatcgcatattttctttagacatcccaatctttttgtgacctgtaaggtgaatgaagtacatcacaacacagtcagagaagcatatacracaagtcgcctacctgctgaacgaatcaggctctgtcaggtaatcctgacaaggctttaaatgcctccgattttactctgataaagtgctatagacttagggcgccttcagagacacartatgtgcagtatttcactgtatggaatcacactactccctcagtgatgatactgatgtttatgctgagctctaactgtttatgtccttcacattcatgtaatttatatttctggagagtctcaaatcttcacagtgtgcaagacatctaattagagggactgtttcacagattcctaactt

SEQ ID NO: 74742 - DNA, 600 bp, Chicken  19866894357636_5
gtccagaaacctcctataaatctaaaagattataaaaccaaacgtaacagctactgtaatgaaaaagagaaatctacgacacagtaatacagaatcgcatattttctttagacatcccaatctttttgtgacctgtaaggtgaatgaagtacatcacaacacagtcagagaagcatatacracaagtcgcctacctgctgaacgaatcaggctctgtcaggtaatcctgacaaggctttaaatgcctccgattttactctgataaagtgctatagacttagggcgccttcagagacacartatgtgcagtatttcactgtatggaatcacactactccctcagtgatgatactgatgtttatgctgagctctaactgtttatgtccttcacattcatgtaatttatatttctggagagtctcaaatcttcacagtgtgcaagacatctaattagagggactgtttcacagattcctaacttcccatttgcaaatacaaaacaactcttcagcaatttcagaactgcttaaatggaaaattactgtagttttcgtttccagctgttgaactccattaaaaatgacctgagccaaatgtccc

SEQ ID NO: 74743 - DNA, 600 bp, Chicken  19866894357637_1
ggccaaaaagccaagaaaataagttacctgctgcaattatcctcttctcctctcagcacatgcaagcacatctggcactgactctggcctctatacaatgtttttatgtcactgtgtggaatttaaaaaaatgctgtaaatgtactgagtaagcactcctggcatagataatagtttgctacacttcagcctcaaaggtttcaaaggatgactcccaggctatgtctgaagtatattgtgctgaagcagctgagatagctcatggatataactgtttttcccatcctgagaggaatgcargatgaagtgtgaggagccttgaagaagcctgttgctcacatttagataaattaatgatgtactctgtatacaaacaagacaagatkatgtttcagcagtgatgggcctgattagttttaaatgatgatgaagggaccactttggtggtttgcactgagcttttaaagccaagtttgcagtgagctagttgaggtaaaaatatgttttcattcgtacactcagctatgcagtggtatgtagatactgtataaatctraattgtgcatcaaatgtatgctactgattgtcctcatgagtcat

SEQ ID NO: 74744 - DNA, 600 bp, Chicken  19866894357637_2
gcctctatacaatgtttttatgtcactgtgtggaatttaaaaaaatgctgtaaatgtactgagtaagcactcctggcatagataatagtttgctacacttcagcctcaaaggtttcaaaggatgactcccaggctatgtctgaagtatattgtgctgaagcagctgagatagctcatggatataactgtttttcccatcctgagaggaatgcargatgaagtgtgaggagccttgaagaagcctgttgctcacatttagataaattaatgatgtactctgtatacaaacaagacaagatkatgtttcagcagtgatgggcctgattagttttaaatgatgatgaagggaccactttggtggtttgcactgagcttttaaagccaagtttgcagtgagctagttgaggtaaaaatatgttttcattcgtacactcagctatgcagtggtatgtagatactgtataaatctraattgtgcatcaaatgtatgctactgattgtcctcatgagtcattcagggagcaaatgtgcctcccttcaggctgtacacttgcttccttcccaagaaaatcacaaatctgaaagtggaagcagtgcctg

SEQ ID NO: 74745 - DNA, 600 bp, Chicken  19866894357637_3
agctcatggatataactgtttttcccatcctgagaggaatgcargatgaagtgtgaggagccttgaagaagcctgttgctcacatttagataaattaatgatgtactctgtatacaaacaagacaagatkatgtttcagcagtgatgggcctgattagttttaaatgatgatgaagggaccactttggtggtttgcactgagcttttaaagccaagtttgcagtgagctagttgaggtaaaaatatgttttcattcgtacactcagctatgcagtggtatgtagatactgtataaatctraattgtgcatcaaatgtatgctactgattgtcctcatgagtcattcagggagcaaatgtgcctcccttcaggctgtacacttgcttccttcccaagaaaatcacaaatctgaaagtggaagcagtgcctgggcctgtgtctctcctggacacatcatgaaacatctaaaagctttatacatagsagccgagaagtgcctctggctcagttaacttagacatggccgctgccattatcctgtcagctgtactctcaaaggaggggagcgtctgtctttttgcagtggtagctataagacag

SEQ ID NO: 74746 - DNA, 493 bp, Chicken  19866894357637_4
ttggtggtttgcactgagcttttaaagccaagtttgcagtgagctagttgaggtaaaaatatgttttcattcgtacactcagctatgcagtggtatgtagatactgtataaatctraattgtgcatcaaatgtatgctactgattgtcctcatgagtcattcagggagcaaatgtgcctcccttcaggctgtacacttgcttccttcccaagaaaatcacaaatctgaaagtggaagcagtgcctgggcctgtgtctctcctggacacatcatgaaacatctaaaagctttatacatagsagccgagaagtgcctctggctcagttaacttagacatggccgctgccattatcctgtcagctgtactctcaaaggaggggagcgtctgtctttttgcagtggtagctataagacagctcctatttttttgagagcaatagatgcaatgcattaagagaatgattttaacatggataccatactggtatctttt

SEQ ID NO: 74747 - DNA, 600 bp, Chicken  19866894357641_1
tgtagttcatgtgagtgtttagagagcttagcatttaaattgtgctcctatagggtgcttaagaggcatgtaccagatggtcagccaacagggtaggaagatagaaaagtgggtgaaggaagcttccttattccttctaactgacaacttctcaaaagatgcatccagactgggaggaaatgaagtataacgtataatgtttcctcatttgacttgggtaaggaaaaggtgtttggaatttgggagaaaagtaatttggtgaggaatggataaagagatgaaacagcagcatgatgagcyctggaaatgggagtggggaatgaagaagtaattaaaatgcatgagaaaaggatgcctaaaataacaatcttataggcagcttgtgggaaggaggaagaaatgaaaaggtgggtaccatgagtttggcctccataagcctaactgaaactatctcatttacttcgttctacagtccatagcaatgcagggaagcaattctgcatctcttgacttgtgtgattaaaatgttcttggcatcagctttggttttaatgcgattggtttgtaacataattagaagggattttacagctttgtgta

SEQ ID NO: 74748 - DNA, 600 bp, Chicken  19866894357643_1
ctatgacttgctccggtcctatttttgctgcatattaaattaaatattttactttactccaagcccatcatgttgtccttgtctaaggaggaagcaggtttttttaagacatttatctagcttttttaacattcaaaaccacatattattcttctcatttatttctagtacttggttctgttcttgttccttcatcaagtagggaaattccttctcaaaggtcactgtgtcaaatgttctatcagatatgaaaccactccttacctgaaagtaaagatttcattcaccgcatctttacarggcwcaaatggatttcgtgtcttgcctatctttgcttccacggggcaggaggatatgtgagcttctggtcagtatgtttyctgaagctgaatgcaattgctccagtgccttgctgagtgccatttcatgggtttttcggatggtcccaggatgtgtatttgtttcttcagcgtagaagatagtagaccaggaaatgtatttacttttagataaggatgctttgccatttgatgctaaaggcaagtcttccttggagaacaaaagtcaagaatgggaaagttgaagtaattctttagtttt

SEQ ID NO: 74749 - DNA, 600 bp, Chicken  19866894357643_2
gacttgctccggtcctatttttgctgcatattaaattaaatattttactttactccaagcccatcatgttgtccttgtctaaggaggaagcaggtttttttaagacatttatctagcttttttaacattcaaaaccacatattattcttctcatttatttctagtacttggttctgttcttgttccttcatcaagtagggaaattccttctcaaaggtcactgtgtcaaatgttctatcagatatgaaaccactccttacctgaaagtaaagatttcattcaccgcatctttacarggcwcaaatggatttcgtgtcttgcctatctttgcttccacggggcaggaggatatgtgagcttctggtcagtatgtttyctgaagctgaatgcaattgctccagtgccttgctgagtgccatttcatgggtttttcggatggtcccaggatgtgtatttgtttcttcagcgtagaagatagtagaccaggaaatgtatttacttttagataaggatgctttgccatttgatgctaaaggcaagtcttccttggagaacaaaagtcaagaatgggaaagttgaagtaattctttagttttcatg

SEQ ID NO: 74750 - DNA, 529 bp, Chicken  19866894357643_3
gtctaaggaggaagcaggtttttttaagacatttatctagcttttttaacattcaaaaccacatattattcttctcatttatttctagtacttggttctgttcttgttccttcatcaagtagggaaattccttctcaaaggtcactgtgtcaaatgttctatcagatatgaaaccactccttacctgaaagtaaagatttcattcaccgcatctttacarggcwcaaatggatttcgtgtcttgcctatctttgcttccacggggcaggaggatatgtgagcttctggtcagtatgtttyctgaagctgaatgcaattgctccagtgccttgctgagtgccatttcatgggtttttcggatggtcccaggatgtgtatttgtttcttcagcgtagaagatagtagaccaggaaatgtatttacttttagataaggatgctttgccatttgatgctaaaggcaagtcttccttggagaacaaaagtcaagaatgggaaagttgaagtaattctttagttttcatgatgat

SEQ ID NO: 74751 - DNA, 599 bp, Chicken  19866894357645_1
  misc_feature (1)..(76): n is any nucleotide
nnnnnnnnnnnnnnnnnnnnnnnnnnnnnnnnnnnnnnnnnnnnnnnnnnnnnnnnnnnnnnnnnnnnnnnnnnnnaaaatctgaatacattgtattgtaatcactaaatcccagctttctcctggatataagcagaacacctatttttagttaaaaagctgccgttaggttccacaatatcttttatgggtaaagtaatgcagcaagctggcacaaaccaaatggcacttgactgtttgcaaattgaacatcaatgcaaacagcaggtggtcactcatcttcagtctgtcacgccgatygtcataataatagctgtaataacaatactaaataaataacatttagcaatctatgtggtttttccatggaggttttcaataccaaagattcacttttacaattcatgctcaggcaattattacctgcagctttatttttatcatcactttctccattttcctattgttgaaagttaggattagtatccctgcagccgagacctttagatcagatacacaccgggatctccagggtgcctctctattgtacatgactactgctccaggttttgtctggaaggaattttttggttctgtaa

SEQ ID NO: 74752 - DNA, 600 bp, Chicken  19866894357645_2
tttacaattcatgctcaggcaattattacctgcagctttatttttatcatcactttctccattttcctattgttgaaagttaggattagtatccctgcagccgagacctttagatcagatacacaccgggatctccagggtgcctctctattgtacatgactactgctccaggttttgtctggaaggaattttttggttctgtaagcactgaaagtaggaacgcacggcccacatctaggaatcatagttaaaaatgtctaaaatgggcatgtatgacagcagtgtccttatggcatttytcccagcttcaccaactattaacttatctgtttcacttccctatgtccgttgctctgggcagggggatgaactgaacattcatttactttggggcatcttatgacgctgtctctgtgaagatatctgtgaagaattcggattgttatgtggcagccagcaatgttaagctggaaaccagaagttaggctgagagtatctcttagaaacattaacattggaaaagacctctaagacaatcaagtccaactatcagagagaaacacgaacttctactgaataaaccttcttgctgtacatgc

SEQ ID NO: 74753 - DNA, 599 bp, Chicken  19866894357651_1
  misc_feature (1)..(144): n is any nucleotide
nnnnnnnnnnnnnnnnnnnnnnnnnnnnnnnnnnnnnnnnnnnnnnnnnnnnnnnnnnnnnnnnnnnnnnnnnnnnnnnnnnnnnnnnnnnnnnnnnnnnnnnnnnnnnnnnnnnnnnnnnnnnnnnnnnnnnnnnnnnnnnnnctcttacctgacatttctttttctttatttgtcactgaaatactaagcactgtgcccctgttttggaaaatgtgtagatatgtaaatgtataggtaataattatttttgctgactgaagtctattccatgtatttatctcctgggtgcttttcctstgtatccgtgacatgtaacctgcagtactgtttgtgtttttcttccttatttctctagtaactcttacggttggtagttaaattcccctccccagacagcagatgtcatagcccagcagctccagaactaacatcaatccccagtctgcagttaacttaagtacgtttgtctcccagtctattgaagggccactttaacttaaagtttttgaggatcatgggatagcatgatcctcaaaaccaatcctcaaataccaataccgtgattttttttttaaccagtgaatgatcactgtcaa

SEQ ID NO: 74754 - DNA, 600 bp, Chicken  19866894357661_1
taagcactgaagaaaataaatgctcctcaagaaacttatcatatgaaaaggaatcattttggttacatcctgctgaaaattttgaaacagtactcatcaagcatacctctgaaacatcattttcaatgaatacaaaatgagtgttacaggcctagatgtaagagtaatactgtttaatcccttgctgctgcatcacaataaaattttcaggtggcactgcagaggaaggttggtgattagcttatgaaaactcacaaaagtgtgatggaaatgttagtaaaaagggaattacattcagcyttgttgtcacatgcaatcagctcagtgtttttcaagatttgttaatgtaaattattttcaacagaaataggaaaaaaaargtttatgtagcctgtacgtatattttgatacataaaaacacacacagtgcagttgaaattctcagcttctcctggatcactgaatagctttccagatgttgcacagacaacatttgcttgctctgttcactgcataacattgagatatctagctgttgctagtgagtttctgtggaaagagtgcaatctttaaaatttcacagcaattagatactgcaga

SEQ ID NO: 74755 - DNA, 600 bp, Chicken  19866894357661_2
tttgaaacagtactcatcaagcatacctctgaaacatcattttcaatgaatacaaaatgagtgttacaggcctagatgtaagagtaatactgtttaatcccttgctgctgcatcacaataaaattttcaggtggcactgcagaggaaggttggtgattagcttatgaaaactcacaaaagtgtgatggaaatgttagtaaaaagggaattacattcagcyttgttgtcacatgcaatcagctcagtgtttttcaagatttgttaatgtaaattattttcaacagaaataggaaaaaaaargtttatgtagcctgtacgtatattttgatacataaaaacacacacagtgcagttgaaattctcagcttctcctggatcactgaatagctttccagatgttgcacagacaacatttgcttgctctgttcactgcataacattgagatatctagctgttgctagtgagtttctgtggaaagagtgcaatctttaaaatttcacagcaattagatactgcagagcatttcacatcagtagcccttcttacattttgttcttttcagactcactccttctggatggttattcagcagcccaaag

SEQ ID NO: 74756 - DNA, 600 bp, Chicken  19866894357665_1
ggccatgtagtctccaaggttgtttgtctgatgaattctgcctatccctgctccatccaggtttagagcaaggacatgaagtctagaagggtgtgacaaatctgttctgaaagagaacagatgcatggtgttgagtgcaaaagtggtttatgccttttccctgtgcaaactgtcctggcctgacagagaggctgctaggaagacattctgaaatccagccttcacttaacgctctccagagactggctttctctttagaagaccaggagaaagataaaacttatccataaataccgtacrgcttattagagtcagtcacattacagccatccgagagcaccaggaaataggtctccacagtgcttagagagagtaaatgtaattaggcacagacctaactcctctgcttctaatccttctgttgcaaacttcgttgtactgtatttccaaatgagtcaggcactccctgaagaactgatatcttctcatagcatcagctttaccattgtcctacgcaacacactcttgggcagcttgggtaacgtgctaaattaaatcgccaaaagacaaggaaaggttaactgcaaaacttgtcccaag

SEQ ID NO: 74757 - DNA, 600 bp, Chicken  19866894357673_1
attcataaaacccaagaggaaatgattttctcctcaaataaaaattccaagactttaagacaaatcctgtttccattccaaaaattcctttttttgttctttcttttttggtttctaaatgaaaaaagtgaacaaacatatcaattcaggttatttagagggagaccttctgtatgaactcctgcccctgattagcgagagatattctttgtgttatatgttgtataaagaaatatgtctaaaactggttttaaacctgaataatctgtgtatgccttggatgagtacttctctatttcrtccttatctttctctgtagttctatcagtagtttattatttaataaaatgaaacatctttaagacctaaatagttcttactgttcttacatgtagttctcaaaccaggatgtaatgccactacattgtataaagaaaaatctgctaaacagcaagtatttaattgcatgtttactttagatgtatagcaggtacaaggaaatgtcagagaccagagcacaggcagcttgggcctgattctcttctctttcttgccagtgcaaatgtattaactccagggcaataaacatgtgcatatgtc

SEQ ID NO: 74758 - DNA, 600 bp, Chicken  19866894357678_1
attcgtgcacagcgctgacagctgcaggcaaatgtgccagcagaaactttaataaagtcttcggttttcatagcttcaaaaccgaactgacactttgggttcttaatgatagaaataagtatattttgaccagtgtttgtttaagtgctgtgcagatgggataattgtgcctgaccatgctgtcactgtgatcttggtggtgagctgctgtgccctgaatagtgtggtggattgcgtcgctatgtttcttcaaactgaaactgctcaaagactatgccacaacagcagctaattggacamtgggcatcatgattttttgaaaatgcacagagttgtgttagggaagtttttaagtaatatgaagcagtaaccaggaaggtcttttcagcatccataggagactgtagaggatgatgctcttagcatgcaattaaatattaataatagagaraggttgggcttatttttattctctaaaacattgttaataggtctcagtctggcatagaaaacaccaggcacattgctcggtgtctcacctttttaaccctgtttgcatgtttaagtaaacacctcttaagatcttttgtgttagtgatt

SEQ ID NO: 74759 - DNA, 600 bp, Chicken  19866894357678_2
gcagatgggataattgtgcctgaccatgctgtcactgtgatcttggtggtgagctgctgtgccctgaatagtgtggtggattgcgtcgctatgtttcttcaaactgaaactgctcaaagactatgccacaacagcagctaattggacamtgggcatcatgattttttgaaaatgcacagagttgtgttagggaagtttttaagtaatatgaagcagtaaccaggaaggtcttttcagcatccataggagactgtagaggatgatgctcttagcatgcaattaaatattaataatagagaraggttgggcttatttttattctctaaaacattgttaataggtctcagtctggcatagaaaacaccaggcacattgctcggtgtctcacctttttaaccctgtttgcatgtttaagtaaacacctcttaagatcttttgtgttagtgattggtgacaaaaacaagcggtatgttaaatcatcactggctgggctcaggagaggagcatattctggttcaaattcatctctctgcaaactgagtaaagaatgatagccaccaactgttctgtcttgtttgtgaactgcacatagtttgcttg

SEQ ID NO: 74760 - DNA, 600 bp, Chicken  19866894357679_1
ctgaattgtgctgcaggcatccttctttttcttgattagattttcggtaactacagtaggcagtctcatgatgaatttcatcccattatgccaaaaacaacatttgcattaaggtcccacctagattaaggatctttgtaatgctcatcctggctccattctttcctagatacctttttttttgtctagcaaatgtcaagatatgttaaggaatggtgcatactccacagacaggactgcaggacttcccatcaaagagctccatcccaatgtttaatgccacaactgcaagtgtgaaargcttctgctttatctaaacaaaagacagatgctgaagtaaggaggctcacttatgggatcagggctggtactgaatttcaatagatatacttaatctcctggacaaaaagaatacagacttgttaccagtccctacagggttattggctattgacacaaacagtgctgaagtacaggcagacattaaatatagtagtcctgatgtaactgtcagcaaatgattaaagcaccacagtaagggggggggaaaaacccaaacaaaaaaacaaagtagaaaatgttaggtacaaattaacttct

SEQ ID NO: 74761 - DNA, 600 bp, Chicken  19866894357680_1
aatactgtcggcagcacctttgcaaaggagtgtgatatgcccctggacctggaggacaccacctctttctgtcaaagccaatgagtgcagaggatgaaaatcaaatgggagatcaagtcctaggtggtatttggtacttggcaaaatatgttatcgtggaaactatgaagctcactagagtcatgggacaaactgcctctcacctaagtgtcagtatcatttccgccccagactggagatgaccccatgttccccattcaggggtaatcctgatggacagctgtgtgtgctgcaaaatcytgtgatgcagtgcttgaagttcctcttagcatttttggcagaagggctgagactgcacagactgtggaaagtgaacttgtcctcaggaatggccccgactcattagaatcaagaagtgcatgtaggaaaaygtccctgccactgttctggttccctgtacactctaaggatagatatataatcagtcccaagtaactgtcagctcagaatctttctaaagtgataaattcatgataggaaatcaaggaaatgggaaggaatgtgtaagtgctgtttatattattaataaggaagggagtg

SEQ ID NO: 74762 - DNA, 600 bp, Chicken  19866894357680_2
tggtacttggcaaaatatgttatcgtggaaactatgaagctcactagagtcatgggacaaactgcctctcacctaagtgtcagtatcatttccgccccagactggagatgaccccatgttccccattcaggggtaatcctgatggacagctgtgtgtgctgcaaaatcytgtgatgcagtgcttgaagttcctcttagcatttttggcagaagggctgagactgcacagactgtggaaagtgaacttgtcctcaggaatggccccgactcattagaatcaagaagtgcatgtaggaaaaygtccctgccactgttctggttccctgtacactctaaggatagatatataatcagtcccaagtaactgtcagctcagaatctttctaaagtgataaattcatgataggaaatcaaggaaatgggaaggaatgtgtaagtgctgtttatattattaataaggaagggagtgatggaaaaaggttcatccttctgttgtatatgggaactgtcactgggaaggaatcgctgggaaggctcacttcacatgtatattgtcttcaaaacacctttgcaggatatgatggagagacagcaaggaca

SEQ ID NO: 74763 - DNA, 600 bp, Chicken  19866894357689_1
gcaaattataatttggcaaataggttcacctcctgagttaattcctgattattaatgaagaaatggtgtcacagtgaaattattattatgaccacctcagtaggcagtaagagtccaacatttaagatcatcttgtagtctcttagtccattcaaaatattcctgtgtcttaaacctaagtagaaagttggatattcttgaattagcttctttgagtgaaagtaaaacttgaaaacaaacttctgagtgtttgtagcttgtagtacctggaccagactaaacatttgctgtgcaattcartatcacttagcatgtaggtagatcacttttggtttgaaaatatattgtaaaaatttaatagcaggaatctggttatttcctgaaagacttcttgagctgtccattgcttagcaagtgggtttagccagaagtggtttcaagcatatttaaaactatttgaaaagagtacagaagcttttttgatccttctaatacttgacagtgccgtctctcttgcatttcttatctgcatattactgttcagatgctatttgcaacttttaggctcaaacatgaaactgggagatgtactctctccaa

SEQ ID NO: 74764 - DNA, 599 bp, Chicken  19866894357691_1
  misc_feature (1)..(258): n is any nucleotide
nnnnnnnnnnnnnnnnnnnnnnnnnnnnnnnnnnnnnnnnnnnnnnnnnnnnnnnnnnnnnnnnnnnnnnnnnnnnnnnnnnnnnnnnnnnnnnnnnnnnnnnnnnnnnnnnnnnnnnnnnnnnnnnnnnnnnnnnnnnnnnnnnnnnnnnnnnnnnnnnnnnnnnnnnnnnnnnnnnnnnnnnnnnnnnnnnnnnnnnnnnnnnnnnnnnnnnnnnnnnnnnnnnnnnnnnnnnnnnnnnnnnnnnnnnnnnnnnnnagggacaacaatgctctagtacagagatctacagtagatgastgtttgtttatggagcagactgtccatttcaaaagttgtgggactgcgtggaattccctcagtacagctttaggtctgctttacaggtggtggtgtgttttccatgggttttgtttttactgtaccttcacgttgacaccaaattttcagcttatatttaaaaaaaagtaaactagggttctttttgttgctgaacactttccaaagtcttaagatttagaaaaagaatagaattcattaagactgcttattttgccaaaacaatctttgtaaagaataattaaaatctgggctgtgga

SEQ ID NO: 74765 - DNA, 600 bp, Chicken  19866894357691_10
tcagatctggaatctttaatgcctttgaataaaatagccttttaatcctggatgtttcagtccttygttttatagattccagctattyaagtcaacatgctgcgtgatgaacatttaagtgcaggtttgcctacattcagagtccaaggcatacttctgagctgcaatgaaggcttactttctttgttctaagttaaaagaaagcaattcttcctgtctcttgaaagcgactgaagacaagtaggtctgattgrcttcataaaatctctgcattaaccaatacagtttccctgcatatarcagtgcaaaaaattgctgtagttttggatgcgaagggtttttacagatttggtttgttaatcaaatttagaagcactaagtgtatacatacaaaacaactttcttagatgcattacacatttcctcggaaaaataagatatttctgtgccaatacggaggtaacaagttttctttccttttcatgctagagtcatatgatctggactagaccatgcaatcttttgtatgaccattcattgctttagggctttgacttaagatgaactcagaaactcagttacttgcatatatctgaagtt

SEQ ID NO: 74766 - DNA, 600 bp, Chicken  19866894357691_11
tgtgccaatacggaggtaacaagttttctttccttttcatgctagagtcatatgatctggactagaccatgcaatcttttgtatgaccattcattgctttagggctttgacttaagatgaactcagaaactcagttacttgcatatatctgaagttatcagaagtttcaataataaggatttcatgctgcattcagacttccagtttaaatgagaacagcttttgcattatgtactataatgttattttcaagaacaattttatcttaaaatgttgagattgacctaatattccatactygtcttttgtgsacattatttgggtatcgtaattagaagaagctaaattagcatgatgtcaaaactgagtcctcttagaaatgacaagtgatgtgtatgctgaaaagctttgcctttctttttaggaactggcttaccgaaaggaaaaggtgaaacctgaactcattaacaagaaattaggcatcaggtgtgttactgcaaatagtaacttgttgggtttttttttagtctttttcaatcaagaattaataatgaaaaggatacttgaaaacrttggttattgctttgttttaaaaatgtt

SEQ ID NO: 74767 - DNA, 600 bp, Chicken  19866894357691_12
ggaggtaacaagttttctttccttttcatgctagagtcatatgatctggactagaccatgcaatcttttgtatgaccattcattgctttagggctttgacttaagatgaactcagaaactcagttacttgcatatatctgaagttatcagaagtttcaataataaggatttcatgctgcattcagacttccagtttaaatgagaacagcttttgcattatgtactataatgttattttcaagaacaattttatcttaaaatgttgagattgacctaatattccatactygtcttttgtgsacattatttgggtatcgtaattagaagaagctaaattagcatgatgtcaaaactgagtcctcttagaaatgacaagtgatgtgtatgctgaaaagctttgcctttctttttaggaactggcttaccgaaaggaaaaggtgaaacctgaactcattaacaagaaattaggcatcaggtgtgttactgcaaatagtaacttgttgggtttttttttagtctttttcaatcaagaattaataatgaaaaggatacttgaaaacrttggttattgctttgttttaaaaatgtttacagtgtgat

SEQ ID NO: 74768 - DNA, 600 bp, Chicken  19866894357691_13
agcttttgcattatgtactataatgttattttcaagaacaattttatcttaaaatgttgagattgacctaatattccatactygtcttttgtgsacattatttgggtatcgtaattagaagaagctaaattagcatgatgtcaaaactgagtcctcttagaaatgacaagtgatgtgtatgctgaaaagctttgcctttctttttaggaactggcttaccgaaaggaaaaggtgaaacctgaactcattaacaagaaattaggcatcaggtgtgttactgcaaatagtaacttgttgggsttttttttagtctttttcaatcaagaattaataatgaaaaggatacttgaaaacrttggttattgctttgttttaaaaatgtttacagtgtgatttttaatttatcagaaatgcagaggttaacctgggtgaatcagtcagttttgtaggacracccctcctcttttcagtaaatgtgaatcattccctttggcctcacacacagttgtaaaataaagaaaaatgactttatcagtcagaatctgagctggatctgatggcrtattcagtttatgtacattctataaagcacttctgaca

SEQ ID NO: 74769 - DNA, 600 bp, Chicken  19866894357691_14
gttgagattgacctaatattccatactygtcttttgtgsacattatttgggtatcgtaattagaagaagctaaattagcatgatgtcaaaactgagtcctcttagaaatgacaagtgatgtgtatgctgaaaagctttgcctttctttttaggaactggcttaccgaaaggaaaaggtgaaacctgaactcattaacaagaaattaggcatcaggtgtgttactgcaaatagtaacttgttgggtttttttttagtctttttcaatcaagaattaataatgaaaaggatacttgaaaacrttggttattgctttgttttaaaaatgtttacagtgtgatttttaatttatcagaaatgcagaggttaacctgggtgaatcagtcagttttgtaggacracccctcctcttttcagtaaatgtgaatcattccctttggcctcacacacagttgtaaaataaagaaaaatgactttatcagtcagaatctgagctggatctgatggcrtattcagtttatgtacattctataaagcacttctgacattattcaggaagtgaggcaacatagcagaaatgctgattacttgaaaaaaacagt

SEQ ID NO: 74770 - DNA, 600 bp, Chicken  19866894357691_15
ctcttagaaatgacaagtgatgtgtatgctgaaaagctttgcctttctttttaggaactggcttaccgaaaggaaaaggtgaaacctgaactcattaacaagaaattaggcatcaggtgtgttactgcaaatagtaacttgttgggtttttttttagtctttttcaatcaagaattaataatgaaaaggatacttgaaaacrttggttattgctttgttttaaaaatgtttacagtgtgatttttaatttatcagaaatgcagaggttaacctgggtgaatcagtcagttttgtaggacracccctcctcttttcagtaaatgtgaatcattccctttggcctcacacacagttgtaaaataaagaaaaatgactttatcagtcagaatctgagctggatctgatggcrtattcagtttatgtacattctataaagcacttctgacattattcaggaagtgaggcaacatagcagaaatgctgattacttgaaaaaaacagtatagtctgagacctgtaaattactactcttgttttgtttcagtgaaactccatcaagccttgcaaagctgctgactaggatgtgtttgagctcacacg

SEQ ID NO: 74771 - DNA, 600 bp, Chicken  19866894357691_16
gcatcaggtgtgttactgcaaatagtaacttgttgggtttttttttagtctttttcaatcaagaattaataatgaaaaggatacttgaaaacrttggttattgctttgttttaaaaatgtttacagtgtgatttttaatttatcagaaatgcagaggttaacctgggtgaatcagtcagttttgtaggacracccctcctcttttcagtaaatgtgaatcattccctttggcctcacacacagttgtaaaataaagaaaaatgactttatcagtcagaatctgagctggatctgatggcrtattcagtttatgtacattctataaagcacttctgacattattcaggaagtgaggcaacatagcagaaatgctgattacttgaaaaaaacagtatagtctgagacctgtaaattactactcttgttttgtttcagtgaaactccatcaagccttgcaaagctgctgactaggatgtgtttgagctcacacgtcacagggaatgggaacaatatagaggttgaaatccctcctaccagagcggacgttatccatgcatgcgatatcgtagaagatgcagcaatagcttatggttataacaa

SEQ ID NO: 74772 - DNA, 600 bp, Chicken  19866894357691_2
aaattctgcaactcagcaccaaagcgtgaaagcctagcagttataattgcctgttcttgaatgtaggttgtgcattcattgatagtttccctaaaatgtgtgtattgactctcaagaacaaaagtatttttaatttatcctactacacaatggttcattaatgacagaaatttgcatgttgtgatatgccttctaaggaaactaaaaaataactgcctcttgctactgcttactttgatagtaaatacaaaaatagcactggtttcttttcatgaaggaaattatagtgtgaggcatcayaaagcaactcccgtagattaagagtttgattaaaatctcatgattgtgttctgttatactgacttcttcaaatactgagcatagcataaaagatgccaatgtagcctcatttgcaacaatatgtttttaaacagagcgcagcgttttggcctcaatgaagtaaataattagattaaaggtttggaagacgcagttcagaaagctgtcttcagagcagttaagcaaaaatgtgcaaatgctttagagccttgagaaccaaagatctccacttatcaggtttttgattaacatctttgcagc

SEQ ID NO: 74773 - DNA, 600 bp, Chicken  19866894357691_3
tacgatgtttagtgaatactgtgagaagcaattcacgtgagtataaatttggagtcaaagacattacacttccaccacgttttaaaagtgtttttagttctgtttttatatctcttacagtgttgaagcagtagaagtaacttatcctaatgggaagactcacatctgtccggtaagtgagatgatgtctcactgtcactggggaaaggattttatttacacaaagaatgacatggtcatctttttctgcagaagtgaagagtaagtcagggctttctttaaccccacaaaggaaagaasattgtgtctcagtttcaccttatctagaaaactcattctgaagcgctgctaatttctgataaggctaagaacagtctcatttaatctgatgctcaagaaagaaggctarggtttaaagttatgagtggtaatgtggatttgagtttstgatacaaacgttcttaggaacaagtagagatggctatcagaagtctgtgtctaaagcctacctgttccaaatcaggaaacacgaatatagaaggaggtccttcaggcttaaaccactggacarctgaaatcagcctcagcataacatactta

SEQ ID NO: 74774 - DNA, 600 bp, Chicken  19866894357691_4
atctcttacagtgttgaagcagtagaagtaacttatcctaatgggaagactcacatctgtccggtaagtgagatgatgtctcactgtcactggggaaaggattttatttacacaaagaatgacatggtcatctttttctgcagaagtgaagagtaagtcagggctttctttaaccccacaaaggaaagaasattgtgtctcagtttcaccttatctagaaaactcattctgaagcgctgctaatttctgataaggctaagaacagtctcatttaatctgatgctcaagaaagaaggctarggtttaaagttatgagtggtaatgtggatttgagtttstgatacaaacgttcttaggaacaagtagagatggctatcagaagtctgtgtctaaagcctacctgttccaaatcaggaaacacgaatatagaaggaggtccttcaggcttaaaccactggacarctgaaatcagcctcagcataacatacttatcagatctggaatctttaatgcctttgaataaaatagccttttaatcctggatgtttcagtccttygttttatagattccagctattyaagtcaacatgctgcgtgatg

SEQ ID NO: 74775 - DNA, 600 bp, Chicken  19866894357691_5
taatgggaagactcacatctgtccggtaagtgagatgatgtctcactgtcactggggaaaggattttatttacacaaagaatgacatggtcatctttttctgcagaagtgaagagtaagtcagggctttctttaaccccacaaaggaaagaasattgtgtctcagtttcaccttatctagaaaactcattctgaagcgctgctaatttctgataaggctaagaacagtctcatttaatctgatgctcaagaaagaaggctarggtttaaagttatgagtggtaatgtggatttgagtttstgatacaaacgttcttaggaacaagtagagatggctatcagaagtctgtgtctaaagcctacctgttccaaatcaggaaacacgaatatagaaggaggtccttcaggcttaaaccactggacarctgaaatcagcctcagcataacatacttatcagatctggaatctttaatgcctttgaataaaatagccttttaatcctggatgtttcagtccttygttttatagattccagctattyaagtcaacatgctgcgtgatgaacatttaagtgcaggtttgcctacattcagagtccaa

SEQ ID NO: 74776 - DNA, 600 bp, Chicken  19866894357691_6
gctttctttaaccccacaaaggaaagaasattgtgtctcagtttcaccttatctagaaaactcattctgaagcgctgctaatttctgataaggctaagaacagtctcatttaatctgatgctcaagaaagaaggctarggtttaaagttatgagtggtaatgtggatttgagtttstgatacaaacgttcttaggaacaagtagagatggctatcagaagtctgtgtctaaagcctacctgttccaaatcaggaaacacgaatatagaaggaggtccttcaggcttaaaccactggacarctgaaatcagcctcagcataacatacttatcagatctggaatctttaatgcctttgaataaaatagccttttaatcctggatgtttcagtccttygttttatagattccagctattyaagtcaacatgctgcgtgatgaacatttaagtgcaggtttgcctacattcagagtccaaggcatacttctgagctgcaatgaaggcttactttctttgttctaagttaaaagaaagcaattcttcctgtctcttgaaagcgactgaagacaagtaggtctgattgrcttcataaaatctctgc

SEQ ID NO: 74777 - DNA, 600 bp, Chicken  19866894357691_7
aagaacagtctcatttaatctgatgctcaagaaagaaggctarggtttaaagttatgagtggtaatgtggatttgagtttstgatacaaacgttcttaggaacaagtagagatggctatcagaagtctgtgtctaaagcctacctgttccaaatcaggaaacacgaatatagaaggaggtccttcaggcttaaaccactggacarctgaaatcagcctcagcataacatacttatcagatctggaatctttaatgcctttgaataaaatagccttttaatcctggatgtttcagtccttygttttatagattccagctattyaagtcaacatgctgcgtgatgaacatttaagtgcaggtttgcctacattcagagtccaaggcatacttctgagctgcaatgaaggcttactttctttgttctaagttaaaagaaagcaattcttcctgtctcttgaaagcgactgaagacaagtaggtctgattgrcttcataaaatctctgcattaaccaatacagtttccctgcatatarcagtgcaaaaaattgctgtagttttggatgcgaagggtttttacagatttggtttgttaatcaaat

SEQ ID NO: 74778 - DNA, 600 bp, Chicken  19866894357691_8
atgctcaagaaagaaggctarggtttaaagttatgagtggtaatgtggatttgagtttstgatacaaacgttcttaggaacaagtagagatggctatcagaagtctgtgtctaaagcctacctgttccaaatcaggaaacacgaatatagaaggaggtccttcaggcttaaaccactggacarctgaaatcagcctcagcataacatacttatcagatctggaatctttaatgcctttgaataaaatagccttttaatcctggatgtttcagtccttygttttatagattccagctattyaagtcaacatgctgcgtgatgaacatttaagtgcaggtttgcctacattcagagtccaaggcatacttctgagctgcaatgaaggcttactttctttgttctaagttaaaagaaagcaattcttcctgtctcttgaaagcgactgaagacaagtaggtctgattgrcttcataaaatctctgcattaaccaatacagtttccctgcatatarcagtgcaaaaaattgctgtagttttggatgcgaagggtttttacagatttggtttgttaatcaaatttagaagcactaagtgtataca

SEQ ID NO: 74779 - DNA, 600 bp, Chicken  19866894357691_9
cttaaaccactggacarctgaaatcagcctcagcataacatacttatcagatctggaatctttaatgcctttgaataaaatagccttttaatcctggatgtttcagtccttygttttatagattccagctattyaagtcaacatgctgcgtgatgaacatttaagtgcaggtttgcctacattcagagtccaaggcatacttctgagctgcaatgaaggcttactttctttgttctaagttaaaagaaagcaattcttcctgtctcttgaaagcgactgaagacaagtaggtctgattgrcttcataaaatctctgcattaaccaatacagtttccctgcatatarcagtgcaaaaaattgctgtagttttggatgcgaagggtttttacagatttggtttgttaatcaaatttagaagcactaagtgtatacatacaaaacaactttcttagatgcattacacatttcctcggaaaaataagatatttctgtgccaatacggaggtaacaagttttctttccttttcatgctagagtcatatgatctggactagaccatgcaatcttttgtatgaccattcattgctttagggctttga

SEQ ID NO: 74780 - DNA, 600 bp, Chicken  19866894357693_1
cattgaatctttttctttgtggcagtaaatgcagacagctgaaaaggcagctgagataggagaagcataagggtgaacttaagcttcaagaaaaggttgaaggggtttgctgtggaaaacaaacaacactggcaccaattgctcattttgtgggtagtttcagtgaagtgaacgaatctttcctttgaaatataccgattctttgtgtgggtacccgagggcaggcatttaaaatgggtcaaatggctcacgctgtagaagtgcctgtttgtccccattgcctggaggaagagttgaggsgactggcccaggtgggggcatcacctgaggtgacatgggagtgctcctagcatctggctttctatgcctgttctctgcctcttggtgctgtgttccgtccattctcctgtatcttgagagtataaatcccccctggcactggaaagccccgtaaggtgtgacgtcagcatgacagcatctcaggatctttcagcagcaccgtcacaaaaataacagtgtgatactttccaattcgtgcagagagaaagaaatcggctgtgagagacaaactagtcacagtgtggtctttacagtagcaaa

SEQ ID NO: 74781 - DNA, 600 bp, Chicken  19866894357703_1
caagacttctgcaacaactgatttcttcctacactcagtaggagccttttggaagccaatctccatcatgccaactgacaggaagagcaagggaagatcacaggaagccactggaagccacagtactgaaagtaaaactgattttgccattacaaggatgaggcactgagatcatagcacctgtctttggcctctctcatacttgggcaggaaacacctttggtgcaatccagtgcagctgttgtgccttatgcacgaggaatacaggaatgggaagagcacaggcccttctcaccttgwtacttctgcacccagtggttcctgctgacacagctaacttccctccctggagcagcagcagcaaggccagctcttctctgctggtagaaagcagccatgttcatgtatctgccctagaaatgcgtcacagctccctgtttcacctgttcttcaagccagcctgatgactgatkttaagacttcaggcacttaaaaacacagatctctacataccaccctgtacagctgcagagaaagagcaccgtccaggcagcagagccaggttgtgcaggtgtggtggatacgtttctgaaggttcgt

SEQ ID NO: 74782 - DNA, 546 bp, Chicken  19866894357703_2
atagcacctgtctttggcctctctcatacttgggcaggaaacacctttggtgcaatccagtgcagctgttgtgccttatgcacgaggaatacaggaatgggaagagcacaggcccttctcaccttgwtacttctgcacccagtggttcctgctgacacagctaacttccctccctggagcagcagcagcaaggccagctcttctctgctggtagaaagcagccatgttcatgtatctgccctagaaatgcgtcacagctccctgtttcacctgttcttcaagccagcctgatgactgatkttaagacttcaggcacttaaaaacacagatctctacataccaccctgtacagctgcagagaaagagcaccgtccaggcagcagagccaggttgtgcaggtgtggtggatacgtttctgaaggttcgtgatagccacaaagttatcacagttcaaaagccatatctggaataaatacacaggggcagctgtatttgtttgagagggaaccctaaataaatgcacagaaagggccttttcagctcagc

SEQ ID NO: 74783 - DNA, 600 bp, Chicken  19866894357712_1
ttttgataaatataaaactacattagtatatatattttagaattttaaaatgaaatttagaaaagaataagcaataacacaatttttagtgagatttttcagtatttcatggatagctattgtagcttaaggtggaattttatgcaagttctaagtagcttacaaaagaaatttacaatggcatggttaaccaaacacttttttttttaagaagtaccaacagattcacatatctctgcagagaaaaagaaaaacatttacttccttttttcccccctggatacaggaattgaaagtgcrggggaargacccagtaagagaggaccactgaaagcacattggatgcattgggtatggcctattcccactgtgagtgacactgcttcttgcttgtaagttcttatagaagatcatattagaaacatacaaagacccagtggtttacctcattctgatttactgcatataaaaaatccctcagggctgttctatggacaactgtggctcaactggaagaatatgcttctgctaggtaacctttggcattgaaaagcattcccaatatttctttgcaatttctttggagagcagagaggtaaa

SEQ ID NO: 74784 - DNA, 600 bp, Chicken  19866894357712_2
aaatataaaactacattagtatatatattttagaattttaaaatgaaatttagaaaagaataagcaataacacaatttttagtgagatttttcagtatttcatggatagctattgtagcttaaggtggaattttatgcaagttctaagtagcttacaaaagaaatttacaatggcatggttaaccaaacacttttttttttaagaagtaccaacagattcacatatctctgcagagaaaaagaaaaacatttacttccttttttcccccctggatacaggaattgaaagtgcrggggaargacccagtaagagaggaccactgaaagcacattggatgcattgggtatggcctattcccactgtgagtgacactgcttcttgcttgtaagttcttatagaagatcatattagaaacatacaaagacccagtggtttacctcattctgatttactgcatataaaaaatccctcagggctgttctatggacaactgtggctcaactggaagaatatgcttctgctaggtaacctttggcattgaaaagcattcccaatatttctttgcaatttctttggagagcagagaggtaaagcaaatc

SEQ ID NO: 74785 - DNA, 600 bp, Chicken  19866894357712_3
caaatgcaaataatgacagtcatagatgcctgacatggagcctgcatgtatattaatgagataaaatagctgatctctgcagctagcaccaaatattatttttaatttccaaaattgagtcaatacctcacttgctttttggaaatggtctctgttttcttctaactacatgaaagttctcagatgttgtttgggagaatgctgatcagtttggagcatgctaagatgaagaatgctaagatgaagaatcttctgtgtgaagaatgtggcataaacatatacgctttagagaggctgagyatattccatggcattgttcatcttaccaggagtgacatagattgagagtcttatctgaaatgacgaaattgatttaagcataggttaaaagttttaataatggaactagcccttattcagagtgggtggttagcctgtagaggtgaaatgtaaatcctgtgaaagctatgatttctgaaaccaacttcagagtttctaatcatagaattatagagtcatagaatggcctgggttgaaaaggacaatgatcatcgactttcaacccccctgctatgtgcagggtcaccaaccaccagacca

SEQ ID NO: 74786 - DNA, 600 bp, Chicken  19866894357715_1
ggagccagagaactgtgttggctaccagtatggtacttgcaagactttgctttgctccttagcggtatctattatatatgcatgcatatgcatttccgcaaggcaaggattgctctatgcaatgcatgcagtaccatgctagaactctctaggctaccagctggtacgtctcagtggtgcaaagcagctttgatcacagaatctctgtaattatgttactgtgttgctctcttcaaagtgcttagctaagctgagaagccatctgaaagatggtttggataggatgacatcttgctcccrtatcgctrtcatgcatcaggtgatggtgccagatccctccaagacagctccagactcattcaagcctcactcacccagccccactcagcttcttggccagaatggggtgacaaaaactgggtgacaataatagggtgacaagaacagggtgcctgtgctctggcatcagctgttcatctgtgyctttcttacagctcaaagggttgagtgcaaccacaggactgaacagggctgggggtgtttccctgtactggaaggtgctctttccaccacccaaagtaccaattgcttctcctggtg

SEQ ID NO: 74787 - DNA, 600 bp, Chicken  19866894357715_2
agaactgtgttggctaccagtatggtacttgcaagactttgctttgctccttagcggtatctattatatatgcatgcatatgcatttccgcaaggcaaggattgctctatgcaatgcatgcagtaccatgctagaactctctaggctaccagctggtacgtctcagtggtgcaaagcagctttgatcacagaatctctgtaattatgttactgtgttgctctcttcaaagtgcttagctaagctgagaagccatctgaaagatggtttggataggatgacatcttgctcccrtatcgctrtcatgcatcaggtgatggtgccagatccctccaagacagctccagactcattcaagcctcactcacccagccccactcagcttcttggccagaatggggtgacaaaaactgggtgacaataatagggtgacaagaacagggtgcctgtgctctggcatcagctgttcatctgtgyctttcttacagctcaaagggttgagtgcaaccacaggactgaacagggctgggggtgtttccctgtactggaaggtgctctttccaccacccaaagtaccaattgcttctcctggtgatgagcgt

SEQ ID NO: 74788 - DNA, 600 bp, Chicken  19866894357715_3
gcagctttgatcacagaatctctgtaattatgttactgtgttgctctcttcaaagtgcttagctaagctgagaagccatctgaaagatggtttggataggatgacatcttgctcccrtatcgctrtcatgcatcaggtgatggtgccagatccctccaagacagctccagactcattcaagcctcactcacccagccccactcagcttcttggccagaatggggtgacaaaaactgggtgacaataatagggtgacaagaacagggtgcctgtgctctggcatcagctgttcatctgtgyctttcttacagctcaaagggttgagtgcaaccacaggactgaacagggctgggggtgtttccctgtactggaaggtgctctttccaccacccaaagtaccaattgcttctcctggtgatgagcgttcacagtggattccagcagccataggactgcaaaaggcatgactatggccaagggctcttgcgtgctacgtcatgggagattacccagttccttccaacatatgcaataatgatatttccctcaggctgggaaactgagtcatgcaaattttcactgtctcatccctactctggg

SEQ ID NO: 74789 - DNA, 562 bp, Chicken  19866894357717_1
tgctcccttcctgacatccttctcggtgcaaatgtgcctgcacccagcaccatgctgctgccatcagatgagggatgcctgcagctgcaggcactcaccaagataacatcaggggagtggctgcagtgggagggtgctgctggcctgcagggagcacatggccacacctggcagcacatcctctgctgatagggggagctgggacctgcctgggctttccagcagttctattttcatactaactttcttctttaaatcatacctggaactccccgtttcacaccaggatacccatcctcrtatggcaccatgatgttgccatgtgaaagygcatgcatcaactaaacccaacagcctctcatcaagcagctcctgcctgcaggtctcatcagctgccatcaacactccatcacctgccggggtgacatcaggctccacttcaccaccgagactggctgtgtctgaccatgctgcgctcctccctgggtgaatgcagcacctcgtgcaaaagcaaccaagtgaaatggggtggataactttagcagatgtccctacaacaaaa

SEQ ID NO: 74790 - DNA, 532 bp, Chicken  19866894357717_2
aatgtgcctgcacccagcaccatgctgctgccatcagatgagggatgcctgcagctgcaggcactcaccaagataacatcaggggagtggctgcagtgggagggtgctgctggcctgcagggagcacatggccacacctggcagcacatcctctgctgatagggggagctgggacctgcctgggctttccagcagttctattttcatactaactttcttctttaaatcatacctggaactccccgtttcacaccaggatacccatcctcrtatggcaccatgatgttgccatgtgaaagygcatgcatcaactaaacccaacagcctctcatcaagcagctcctgcctgcaggtctcatcagctgccatcaacactccatcacctgccggggtgacatcaggctccacttcaccaccgagactggctgtgtctgaccatgctgcgctcctccctgggtgaatgcagcacctcgtgcaaaagcaaccaagtgaaatggggtggataactttagcagatgtccctacaacaaaa

SEQ ID NO: 74791 - DNA, 599 bp, Chicken  19866894357718_1
  misc_feature (1)..(232): n is any nucleotide
nnnnnnnnnnnnnnnnnnnnnnnnnnnnnnnnnnnnnnnnnnnnnnnnnnnnnnnnnnnnnnnnnnnnnnnnnnnnnnnnnnnnnnnnnnnnnnnnnnnnnnnnnnnnnnnnnnnnnnnnnnnnnnnnnnnnnnnnnnnnnnnnnnnnnnnnnnnnnnnnnnnnnnnnnnnnnnnnnnnnnnnnnnnnnnnnnnnnnnnnnnnnnnnnnnnnnnnnnnnnnnnnnnnnnnnnattactgaagataagaggttgaattggttagcattgtgatcttgtcaccactcatggatatcttcttytttggtttcttgtgttatatgctcacagcacgtctgtctcaaccacaaaaccagatgagttacacaattgtggggagaagatggagggaaacaacagcgtgctgaagcctcctgctaacttctgcccaggcctctggcagcatgactcactgtgagctgccatggttacgaaacaagtattactgtgcagatacaaaccatgctcagaggcaagtacattgctgactggttccaaacttggaaaacactcgggtgtaggtaaggcctaataccaagtgggtgtttgcaaaaaagagagt

SEQ ID NO: 74792 - DNA, 599 bp, Chicken  19866894357721_1
  misc_feature (1)..(65): n is any nucleotide
nnnnnnnnnnnnnnnnnnnnnnnnnnnnnnnnnnnnnnnnnnnnnnnnnnnnnnnnnnnnnnnnntaaggatttctgaaataataagaaagatctaaaagatcgtatttcaagttttgggagtttaggtttgaagcacccagaacaagctgtgtctgtctctccttcatctctgattcccaagatctttctccaagagatctagcttctgttttatgtattttagcccaaattgacttttatgtattttagcccaaattgacttcagcgccctaccaaccatagcagctcacataacttytgagcagctgatttcaagcaatagtgcacatcactaaacaaaaattcaataaatactaaatcaaaatccaaaaacattttctactaatttattcggacagtattccatggagttacactgtcctttggcaattttaaactgctatacacaagaatgatttcttcctttgtgtactgtgtggacagctaatgtttacagacatccaaaagtattttgaaatggcatgatatgctcacacccgacttaagaatttcatctttgtttgcatacaacatatgctatttactggcttatagaag

SEQ ID NO: 74793 - DNA, 600 bp, Chicken  19866894357721_2
tacaagtcttcatacttagttcctactccgggaaacagtaataaaaccacagtgtgttttctaacagcactgtgggcccctgaatttttacagcttagtgttcagcacaaggtttacagagacacatgatcctaggcttgcttcagttccttctcactgcaaatttgtgaataaactactccttatcacccattctttgcacttctattatgaaaaacaaaagtacttgaaaacacaaaatgaagatgttaaatctaatgcactctatcactttgatgtatgatatatgccttcatggayctcttagaagatggaaaattagacagcttccctgtacagactgatacactattatttttttaattsagacttgaaaaacatttttgaaaaaattgaataagatttaccctgacctgagtgcaacactctcaagtaataygtaattttattgtytttgaaaatgttagttaaaaaacaaatttgataaaaatcaagtaaaaactgcactccgctgtcacagtttttactgaagtaccaataaacacacatactgagaaaaattggtgttgaaaaattactgcctgctaaaatggatttagc

SEQ ID NO: 74794 - DNA, 600 bp, Chicken  19866894357721_3
gcactgtgggcccctgaatttttacagcttagtgttcagcacaaggtttacagagacacatgatcctaggcttgcttcagttccttctcactgcaaatttgtgaataaactactccttatcacccattctttgcacttctattatgaaaaacaaaagtacttgaaaacacaaaatgaagatgttaaatctaatgcactctatcactttgatgtatgatatatgccttcatggayctcttagaagatggaaaattagacagcttccctgtacagactgatacactattatttttttaattsagacttgaaaaacatttttgaaaaaattgaataagatttaccctgacctgagtgcaacactctcaagtaataygtaattttattgtytttgaaaatgttagttaaaaaacaaatttgataaaaatcaagtaaaaactgcactccgctgtcacagtttttactgaagtaccaataaacacacatactgagaaaaattggtgttgaaaaattactgcctgctaaaatggatttagctcaagccagaatgcatagtataaaagaaaattgatcgctacttacagagtgctataaatgaacaca

SEQ ID NO: 74795 - DNA, 600 bp, Chicken  19866894357721_4
gcttcagttccttctcactgcaaatttgtgaataaactactccttatcacccattctttgcacttctattatgaaaaacaaaagtacttgaaaacacaaaatgaagatgttaaatctaatgcactctatcactttgatgtatgatatatgccttcatggayctcttagaagatggaaaattagacagcttccctgtacagactgatacactattatttttttaattsagacttgaaaaacatttttgaaaaaattgaataagatttaccctgacctgagtgcaacactctcaagtaataygtaattttattgtytttgaaaatgttagttaaaaaacaaatttgataaaaatcaagtaaaaactgcactccgctgtcacagtttttactgaagtaccaataaacacacatactgagaaaaattggtgttgaaaaattactgcctgctaaaatggatttagctcaagccagaatgcatagtataaaagaaaattgatcgctacttacagagtgctataaatgaacacagtgctttacagataaacattaacagggttccttccccataagagcgtataattgaactcaaatgggatactct

SEQ ID NO: 74796 - DNA, 600 bp, Chicken  19866894357721_5
tcactgcaaatttgtgaataaactactccttatcacccattctttgcacttctattatgaaaaacaaaagtacttgaaaacacaaaatgaagatgttaaatctaatgcactctatcactttgatgtatgatatatgccttcatggayctcttagaagatggaaaattagacagcttccctgtacagactgatacactattatttttttaattsagacttgaaaaacatttttgaaaaaattgaataagatttaccctgacctgagtgcaacactctcaagtaataygtaattttattgtytttgaaaatgttagttaaaaaacaaatttgataaaaatcaagtaaaaactgcactccgctgtcacagtttttactgaagtaccaataaacacacatactgagaaaaattggtgttgaaaaattactgcctgctaaaatggatttagctcaagccagaatgcatagtataaaagaaaattgatcgctacttacagagtgctataaatgaacacagtgctttacagataaacattaacagggttccttccccataagagcgtataattgaactcaaatgggatactctgaatgacaattaag

SEQ ID NO: 74797 - DNA, 600 bp, Chicken  19866894357727_1
acactgctgacatgcagctcactgcagacccacagctctgctcagagcccccaccagctgcaggagctgctcccagctcccggggtggttgggtgaggtccctttggtccctagggacgcttggggaagagggaggcagagctggcagtgctgtgcagctgatcccagcacaaaaacaacttaggagacagatactgagccgaagcctaatccagtgtgatcgctcctatgtaagtaggtcagcaagaaagcccccgaacgcagcgccttccagcccagcagcggttctccctgcaagcrcatttgacagatacttcttttagaaggtaaygtgttgggggggttgatcttgagagcttgtgtgtttgccataggaaggtaaagcaagttccatttaagaagtacagctgtttcagcccctgctttgttttgctgcagcatcatctctctgcagttcaaaagaagcttttcactcttccatgctctgtcgcaacaaaagctcacactgattctgtgaagacaaaacattttcccctacttagcccaggctcgaggctctgtggtgtgggtgagggtaccagcagacagctcagaactcgc

SEQ ID NO: 74798 - DNA, 600 bp, Chicken  19866894357727_2
acagctctgctcagagcccccaccagctgcaggagctgctcccagctcccggggtggttgggtgaggtccctttggtccctagggacgcttggggaagagggaggcagagctggcagtgctgtgcagctgatcccagcacaaaaacaacttaggagacagatactgagccgaagcctaatccagtgtgatcgctcctatgtaagtaggtcagcaagaaagcccccgaacgcagcgccttccagcccagcagcggttctccctgcaagcrcatttgacagatacttcttttagaaggtaaygtgttgggggggttgatcttgagagcttgtgtgtttgccataggaaggtaaagcaagttccatttaagaagtacagctgtttcagcccctgctttgttttgctgcagcatcatctctctgcagttcaaaagaagcttttcactcttccatgctctgtcgcaacaaaagctcacactgattctgtgaagacaaaacattttcccctacttagcccaggctcgaggctctgtggtgtgggtgagggtaccagcagacagctcagaactcgctgcctttcatcagtgtgcttcagagaacttt

SEQ ID NO: 74799 - DNA, 600 bp, Chicken  19866894357729_1
ctatgtagggtcaatacaatgataggtagttggttttattcattaaagatatgtttttttgtaaattgtataataacagatcagattacgctaggaaactgtcttacaatgtacaaaaaccacaaacagattcattgggaaatgaatattttatgtatttgtgggtaagaaaaatatcaaaaccacaagcatcttgtgatctgtaacatttaagacacttggcagttcttttaccttttctctatattttcttgggattgtctatctttgatttttactgatatatatgtctctaacagktacagattaaagttgaagggttcttgtccctcatgttggagtaattcttattttaaaaaggtgtaaagatcatattttattttcagargtattaattacttacataaacagaatgaattggctktgtctcctccctaccatacaggcccacaggttaaatggagcggattgttgatggatgtgccctactccttctcctgctgacaaggatatttattaccragaaagctcaggcttgcatttttttcccttcagagtgggttctcatagcattagggtgaaaacagaaatgcaaaatta

SEQ ID NO: 74800 - DNA, 600 bp, Chicken  19866894357729_2
cgctaggaaactgtcttacaatgtacaaaaaccacaaacagattcattgggaaatgaatattttatgtatttgtgggtaagaaaaatatcaaaaccacaagcatcttgtgatctgtaacatttaagacacttggcagttcttttaccttttctctatattttcttgggattgtctatctttgatttttactgatatatatgtctctaacagktacagattaaagttgaagggttcttgtccctcatgttggagtaattcttattttaaaaaggtgtaaagatcatattttattttcagargtattaattacttacataaacagaatgaattggctktgtctcctccctaccatacaggcccacaggttaaatggagcggattgttgatggatgtgccctactccttctcctgctgacaaggatatttattaccragaaagctcaggcttgcatttttttcccttcagagtgggttctcatagcattagggtgaaaacagaaatgcaaaattatatgcttctggttttctaatactgattttaaagagataatttatacctttaaagttgctccttgaagatttcacactagagaaagaag

SEQ ID NO: 74801 - DNA, 600 bp, Chicken  19866894357729_3
aacagattcattgggaaatgaatattttatgtatttgtgggtaagaaaaatatcaaaaccacaagcatcttgtgatctgtaacatttaagacacttggcagttcttttaccttttctctatattttcttgggattgtctatctttgatttttactgatatatatgtctctaacagktacagattaaagttgaagggttcttgtccctcatgttggagtaattcttattttaaaaaggtgtaaagatcatattttattttcagargtattaattacttacataaacagaatgaattggctktgtctcctccctaccatacaggcccacaggttaaatggagcggattgttgatggatgtgccctactccttctcctgctgacaaggatatttattaccragaaagctcaggcttgcatttttttcccttcagagtgggttctcatagcattagggtgaaaacagaaatgcaaaattatatgcttctggttttctaatactgattttaaagagataatttatacctttaaagttgctccttgaagatttcacactagagaaagaagagagaaaggctctatcctacagacagtgtttctatg

SEQ ID NO: 74802 - DNA, 600 bp, Chicken  19866894357729_4
cagttcttttaccttttctctatattttcttgggattgtctatctttgatttttactgatatatatgtctctaacagktacagattaaagttgaagggttcttgtccctcatgttggagtaattcttattttaaaaaggtgtaaagatcatattttattttcagargtattaattacttacataaacagaatgaattggctktgtctcctccctaccatacaggcccacaggttaaatggagcggattgttgatggatgtgccctactccttctcctgctgacaaggatatttattaccragaaagctcaggcttgcatttttttcccttcagagtgggttctcatagcattagggtgaaaacagaaatgcaaaattatatgcttctggttttctaatactgattttaaagagataatttatacctttaaagttgctccttgaagatttcacactagagaaagaagagagaaaggctctatcctacagacagtgtttctatggcagaacttcagtcctggagggtgggacttcactgaaatgtgtttacttctaaatccttgccattagtttagatgtgcatagttcattctgctttgtg

SEQ ID NO: 74803 - DNA, 600 bp, Chicken  19866894357729_5
gctctcgtgtttctgtcagcaggtttccacctgctggttgtaggcattgagctagctgaataaggaaacatgtttgcaaccgatttgtttttcatttggcagaaagaaaaagcattcagaataggaaggaatatttttgactgctttcagagttggttaacagaagaaaatgtatttatgtttaaatagcatattgagacataggaaaatttagtgaagccgttcacatataacagtcaaccagctcaaattcagattactggtaatagaagcaatgcattttgactgtgaaaatgtccyttattaggagcacagctctctatataccctctcttctcctataaaaatgcgagagtgcagctttcctgaaataaattgcacatctctgaggcttgtggtatggattccttgatgtcagggactgtgagtggtacagaaggagttaagcactgaagagkmgaatatagattaccatgctgcrggcatctatcacagcagtggatgaaacaaaaaaactttgggaaacagacacatcttccagcagaaaaacaatcaattttggatccatatgtaacacagcatatatattattgcactaaa

SEQ ID NO: 74804 - DNA, 600 bp, Chicken  19866894357729_6
aacagaagaaaatgtatttatgtttaaatagcatattgagacataggaaaatttagtgaagccgttcacatataacagtcaaccagctcaaattcagattactggtaatagaagcaatgcattttgactgtgaaaatgtccyttattaggagcacagctctctatataccctctcttctcctataaaaatgcgagagtgcagctttcctgaaataaattgcacatctctgaggcttgtggtatggattccttgatgtcagggactgtgagtggtacagaaggagttaagcactgaagagkmgaatatagattaccatgctgcrggcatctatcacagcagtggatgaaacaaaaaaactttgggaaacagacacatcttccagcagaaaaacaatcaattttggatccatatgtaacacagcatatatattattgcactaaaaggcttcagttttccagtcaatacttttatgggaaatacactataaaacagtttttataacaggagattgtttgtaaaattgtgtgttgcaaatagtcaggagtccaaagaatttttaaaaagcagttaatttttaagatgtacttattttgatcaaa

SEQ ID NO: 74805 - DNA, 600 bp, Chicken  19866894357729_7
acagaagaaaatgtatttatgtttaaatagcatattgagacataggaaaatttagtgaagccgttcacatataacagtcaaccagctcaaattcagattactggtaatagaagcaatgcattttgactgtgaaaatgtccyttattaggagcacagctctctatataccctctcttctcctataaaaatgcgagagtgcagctttcctgaaataaattgcacatctctgaggcttgtggtatggattccttgatgtcagggactgtgagtggtacagaaggagttaagcactgaagagkmgaatatagattaccatgctgcrggcatctatcacagcagtggatgaaacaaaaaaactttgggaaacagacacatcttccagcagaaaaacaatcaattttggatccatatgtaacacagcatatatattattgcactaaaaggcttcagttttccagtcaatacttttatgggaaatacactataaaacagtttttataacaggagattgtttgtaaaattgtgtgttgcaaatagtcaggagtccaaagaatttttaaaaagcagttaatttttaagatgtacttattttgatcaaag

SEQ ID NO: 74806 - DNA, 600 bp, Chicken  19866894357729_8
ttaaatagcatattgagacataggaaaatttagtgaagccgttcacatataacagtcaaccagctcaaattcagattactggtaatagaagcaatgcattttgactgtgaaaatgtccyttattaggagcacagctctctatataccctctcttctcctataaaaatgcgagagtgcagctttcctgaaataaattgcacatctctgaggcttgtggtatggattccttgatgtcagggactgtgagtggtacagaaggagttaagcactgaagagkmgaatatagattaccatgctgcrggcatctatcacagcagtggatgaaacaaaaaaactttgggaaacagacacatcttccagcagaaaaacaatcaattttggatccatatgtaacacagcatatatattattgcactaaaaggcttcagttttccagtcaatacttttatgggaaatacactataaaacagtttttataacaggagattgtttgtaaaattgtgtgttgcaaatagtcaggagtccaaagaatttttaaaaagcagttaatttttaagatgtacttattttgatcaaagattttggactggctcaccatgc

SEQ ID NO: 74807 - DNA, 600 bp, Chicken  19866894357741_1
gagtataaggctgctttcaaattgatttgtgaagacttgctaacttggcagcagtgcaacccactgaagctgcaattagcagcaggtgcaggaggaagtgatacggcttaagtgtatctgttcagagggacaaagtttggggctggcaaggccaagacaggcacacacgtgcacgcagagaacaacttgtttcagtgtataaatactagctctccctgtatcatcagaaaacgggatactctgaataaaacaactttgggtgcatcataggtatgccaacaacttttctaattcccagcygaaggtggaagaataagagtttctccaagtttcagactgctgtacaagaagtcacacagcaccccagtagcttcaccattaccttacaggaagcaacagcaccccctgctgcagacacgcaatctgtcctcgtttactttgcctaaccctgtcactggtcacagtaaattttgtgtttaactataagagcagagtttaccacattctccccccaaaagcctccccagcagcagtccttccctccccataccttttatcatacctccccccacactcccacctgtaccatcctgcctgctc

SEQ ID NO: 74808 - DNA, 600 bp, Chicken  19866894357744_1
gttggattttggataacacaaactgaactaatagggcagtttcgctggttatcactagtccagagatgttcacagcagctgcgctggagcatcccacatataggtagcagagcatacactctgtaaatctataggactctactacactgatttaagcagataaaatgagtgagctggagggaccaacagaggctgcagattgcccagaccagaacaggctcatccacacagggcagtgctggcttccagcacgcaggcgtgcagggaatatccaaacgggacaagcaaagtaacaacatygctgcaacagaaccaaattaggaaggtaaatctgtggttttatgatggttttgttcctttcaagtgtgaagagaatttcacttttctggtaattatggttttgtgcagcaatagcgtttcagtgtttctaccactggcacacaatagatgtatcccatctagaaatctccccagtctaaagaaatgtgtgctaggactttaaaatgatatgttggaaggtgagttccaaacgctgtgtacatccaacagacaacaaacatcagaatagatgaacaaatatttttgtttttaattagtata

SEQ ID NO: 74809 - DNA, 443 bp, Chicken  19866894357746_1
atctggtatcagttctagacaaatcatttgctcctcctggtttacgatgatatgaatatagacagcagctacacagtgttttcttatttattaccatgtagatctctatactccttagcggttattatgcttgttttggatgctgcacctctatggattactaaggctggaaagaacaagaacacattatgtctccctctgccttttcaattttatcttaatcggctcaaatttgtcatttgcaatctctttatttttcctctttctcccgagtaataaagacttggagcacatgagaayggaacagagaaatactgtactaatagaagtaacatcttaaattgattaaaagcagatgtagtgaagaatgtctacacacttactgccagcgcacacaaatacatctgttaaagctattcagtgtaacacaaatttcctggata

SEQ ID NO: 74810 - DNA, 575 bp, Chicken  19866894357747_1
gagtagtaaggtacatttttgcctatgtatcatagtatgccttacttgtgatgtttttttatcccttcattttaacttgcaagtccatttcatttgaactggcattcagccagatggttgtcaggatgaatttgtgccggagattattcacccagtatgtgagaaatggttattttccttgaagaatttcaggaaatttccattggttcagtccttaagtttctaaaggaatttcttggtaaaaaaatcttttatatatgcctacaacttagctttgtttatgaattttctgactgcgcrttacagatatttaataacacatgagccatcagccctcagatactccactcactccagttgacacccagtgtcaactggatttggacctgctgatttctgttctttaagattaaaaagatactatgtcaaaagctttcctgcaagttaatgtatgtactacatccatgactgttctgttatccacataatcatttcatcatttaaagttgttcaaacatgatttgacctttggtaaccccttcctaaatcttcttctacatcatttttgaattttt

SEQ ID NO: 74811 - DNA, 599 bp, Chicken  19866894357748_1
  misc_feature (1)..(144): n is any nucleotide
nnnnnnnnnnnnnnnnnnnnnnnnnnnnnnnnnnnnnnnnnnnnnnnnnnnnnnnnnnnnnnnnnnnnnnnnnnnnnnnnnnnnnnnnnnnnnnnnnnnnnnnnnnnnnnnnnnnnnnnnnnnnnnnnnnnnnnnnnnnnnnnncaaagagagtggtttaacccatatatgatctgcatcattgtccagattctgtctcctactgtcctgaaggatcccgatcaattttgcttaaatctgtaagttctgttgaatctgcgaattttatatgtttaagcaaacatttcactttctacacgrttccctgacagaagccttggaaacataaactgctcaggcatcagtttgactcagctgaaagaggatataagtccaaccaactagatttagattttcttatattgcagagtctttgaggaatggactctttcagtagttgtttgaaagttaactagcacaagacctgaccttggaaattcctatgtcttctaagatataaaattttattaaagctagtaaagacatcagtaaatggagatgcatatttttattctcagaatcaaaattctgaaataacaattgtctggattttgcatgtt

SEQ ID NO: 74812 - DNA, 504 bp, Chicken  19866894357748_2
gttgtttgaaagttaactagcacaagacctgaccttggaaattcctatgtcttctaagatataaaattttattaaagctagtaaagacatcagtaaatggagatgcatatttttattctcagaatcaaaattctgaaataacaattgtctggattttgcatgttgtcagtcactgctttgctatgttgaatctttgatagtgtggaacgtttcctatcacttcaaaacaaaagttatgtattgatgtaaattgagaacaaagtggaaaagctttaaaaagaaatacaaagaaatccaccyccrcaaaaagtccagaataatttaaaataacatgaattattaaatatgtttctaaagtaaaattattaaagtttatctcaataaacatctgagacacattttatttttaaaattgtaatgcgggaggaaggaggctattcttggtataagatcatgatatttgaaaatgttagagacaaagtttctgcttttcatttacaataa

SEQ ID NO: 74813 - DNA, 501 bp, Chicken  19866894357748_3
gtttgaaagttaactagcacaagacctgaccttggaaattcctatgtcttctaagatataaaattttattaaagctagtaaagacatcagtaaatggagatgcatatttttattctcagaatcaaaattctgaaataacaattgtctggattttgcatgttgtcagtcactgctttgctatgttgaatctttgatagtgtggaacgtttcctatcacttcaaaacaaaagttatgtattgatgtaaattgagaacaaagtggaaaagctttaaaaagaaatacaaagaaatccaccyccrcaaaaagtccagaataatttaaaataacatgaattattaaatatgtttctaaagtaaaattattaaagtttatctcaataaacatctgagacacattttatttttaaaattgtaatgcgggaggaaggaggctattcttggtataagatcatgatatttgaaaatgttagagacaaagtttctgcttttcatttacaataa

SEQ ID NO: 74814 - DNA, 600 bp, Chicken  19866894357757_1
acttttagacactagcaacatctaggaagacttagaggatccttaaagagtattgtttacaataaatcgtagaatcatatcatagaatggcttggattggatgggacctcaaggatcatgaagcaccaaccccccccgcctgctgcaggcagggccaccaaccttcacatttaatactagaccaggctgcccagggccccgtccaatctggcctttctcctgtttagggagaaataatgcagctgtgtatgggacatgggatatgggatgaggggtgggaaagaaatggtggagcacatycattcctgggttctttttttcatctgtgagccattcccaaaatcccaggaaagcacagatttcattatatttctatttacaggtatgttttctgaagataaaatgtcagtagtttttaacctcaatcccatctcatcaaatttagcctaacrtatctttttagattgcattttaccatgtcaaatcttattatcactgaatatatctgtatttcaaaattacattgctttgcccacagtggtattgcatccaagattctggttgtaattagtgactaagaaggaacaagaaggagcattt

SEQ ID NO: 74815 - DNA, 500 bp, Chicken  19866894357757_2
ggccaccaaccttcacatttaatactagaccaggctgcccagggccccgtccaatctggcctttctcctgtttagggagaaataatgcagctgtgtatgggacatgggatatgggatgaggggtgggaaagaaatggtggagcacatycattcctgggttctttttttcatctgtgagccattcccaaaatcccaggaaagcacagatttcattatatttctatttacaggtatgttttctgaagataaaatgtcagtagtttttaacctcaatcccatctcatcaaatttagcctaacrtatctttttagattgcattttaccatgtcaaatcttattatcactgaatatatctgtatttcaaaattacattgctttgcccacagtggtattgcatccaagattctggttgtaattagtgactaagaaggaacaagaaggagcatttctgaaagattcctgaaataccacagattcaggtaaacaacaaaacagaagag

SEQ ID NO: 74816 - DNA, 600 bp, Chicken  19866894357760_1
ctggcacagcttgtccctgtggactttaacacaaaggtgtcattgtgttggaggtggaacaaacagtggtcctcattgtcacagtgagtaacagcctgtttggacacccatcacagtgctgaactctgtggcaatctgcactcatcctgtactagttaatagtaataatacagcacagactgcactgaaatgcatgctaggaacaggcctacaaaaaatcagtactctgaatttatacattatgagaaacccttggccttgacgtgggatttcatgtgcacttcagacaataccatggaymwtcagtttttttcttctcaaatcttctgaaagccagtaaggaaccattaaaagggaaacgctggccattgctggtctcttccagtttctcagaatacttctacttcctctgtagcatttagatcaaatcccttgtttttactttggttaccttggggttctttcctagtgatgacattatctcttttataatattttttatcactgaaaaactttgtaaaatcataatttgtattttcccctgcagtcattcgcatatatatttcagaatggatctagcttctgttgtagacctgtgta

SEQ ID NO: 74817 - DNA, 600 bp, Chicken  19866894357760_2
tggcacagcttgtccctgtggactttaacacaaaggtgtcattgtgttggaggtggaacaaacagtggtcctcattgtcacagtgagtaacagcctgtttggacacccatcacagtgctgaactctgtggcaatctgcactcatcctgtactagttaatagtaataatacagcacagactgcactgaaatgcatgctaggaacaggcctacaaaaaatcagtactctgaatttatacattatgagaaacccttggccttgacgtgggatttcatgtgcacttcagacaataccatggaymwtcagtttttttcttctcaaatcttctgaaagccagtaaggaaccattaaaagggaaacgctggccattgctggtctcttccagtttctcagaatacttctacttcctctgtagcatttagatcaaatcccttgtttttactttggttaccttggggttctttcctagtgatgacattatctcttttataatattttttatcactgaaaaactttgtaaaatcataatttgtattttcccctgcagtcattcgcatatatatttcagaatggatctagcttctgttgtagacctgtgtaa

SEQ ID NO: 74818 - DNA, 600 bp, Chicken  19866894357760_3
ggcacagcttgtccctgtggactttaacacaaaggtgtcattgtgttggaggtggaacaaacagtggtcctcattgtcacagtgagtaacagcctgtttggacacccatcacagtgctgaactctgtggcaatctgcactcatcctgtactagttaatagtaataatacagcacagactgcactgaaatgcatgctaggaacaggcctacaaaaaatcagtactctgaatttatacattatgagaaacccttggccttgacgtgggatttcatgtgcacttcagacaataccatggaymwtcagtttttttcttctcaaatcttctgaaagccagtaaggaaccattaaaagggaaacgctggccattgctggtctcttccagtttctcagaatacttctacttcctctgtagcatttagatcaaatcccttgtttttactttggttaccttggggttctttcctagtgatgacattatctcttttataatattttttatcactgaaaaactttgtaaaatcataatttgtattttcccctgcagtcattcgcatatatatttcagaatggatctagcttctgttgtagacctgtgtaac

SEQ ID NO: 74819 - DNA, 496 bp, Chicken  19866894357760_4
aaatcttctgaaagccagtaaggaaccattaaaagggaaacgctggccattgctggtctcttccagtttctcagaatacttctacttcctctgtagcatttagatcaaatcccttgtttttactttggttaccttggggttctttcctagtgatgacattatctcttttataatattttttatcactgaaaaactttgtaaaatcataatttgtattttcccctgcagtcattcgcatatatatttcagaatggatctagcttctgttgtagacctgtgtaacagtccccacacaaagasgattattctgtatagcactgtttcagtgcaaatgtgcacaatcagcataatgtgcaatgtgacacttcatcagtagattcagctgctactgcagtgactgaaaactccacctaaaaatgagctatgtttactttctcatttacagcttccacaggatctgaagtgacaggtgagtgtcttaaattcatgtcattct

SEQ ID NO: 74820 - DNA, 600 bp, Chicken  19866894357765_1
ttgggagagcctgtgcagacaatgagcattcctgacccaggcttgacacagaccctgttccaatagctccagcaattttattgcctatttaagcactgtttgttaattaagattaaaagagattatgaagtggttttgtcgcgatgtgtacgaaacaggggcagtggcctcctcgtgcactcagcctcagcttcctcactaagatttaggagtggaatttgtccttgcagttaatagatttacaaaggaataaagcacacaatttgtcagactgctgtttttcccttttgaccagttagrctaagtatcatgaaagagctctatttgggcaccagccagtacgattggatgcatggtacattaaccagatttcttgggtttacaatcttgctcttttgagcacaattacttttctctgattgggttctctgtagctattagcaggtccaacaaggaccgtgaggcatttgtgcacagctttatgagagggcttccctgttggggtcatatgtcaggactgrggtcccgaagttcctgggaaagcaaatttcttctttatatggtcattacatccatcgtaccactcatggcccacacaat

SEQ ID NO: 74821 - DNA, 600 bp, Chicken  19866894357765_2
tccttgcagttaatagatttacaaaggaataaagcacacaatttgtcagactgctgtttttcccttttgaccagttagrctaagtatcatgaaagagctctatttgggcaccagccagtacgattggatgcatggtacattaaccagatttcttgggtttacaatcttgctcttttgagcacaattacttttctctgattgggttctctgtagctattagcaggtccaacaaggaccgtgaggcatttgtgcacagctttatgagagggcttccctgttggggtcatatgtcaggactgrggtcccgaagttcctgggaaagcaaatttcttctttatatggtcattacatccatcgtaccactcatggcccacacaatagggccacaatccagctctacagtttgtacctcacaaattgtgaaggatatgagattggatccctaagagattcaaaaagttagaactgatatgtacaattagaggcattttaatagcttctcagacacagacaaaaagatacataactcatgctatgtcattacagaaaaataagttctcccaaatactagagattggaccttaaggaacagcctatcca

SEQ ID NO: 74822 - DNA, 600 bp, Chicken  19866894357766_1
ggagggtccaataaaataagccttggcaatagaggagatgaggatggcagtaaacattctgatcctaatgtcttcctctagctgttagcaggaattttagaggtagcattgctgagtactaaaaatgtgggaaaaaatatatttgggtcttatccagtgagtctgacccaaggaatggaaagataaatccatgagggtatgacaagtctatttatttcaacctatcttgctttagtcactctaagttgtaaatttaaactgagcaatagacattttaatatccatgtttgtctttagcarttaaaaagttaaagttcctgtaccttgctgtcttccagtcccgaactgatcacaactcttctccattgtattttcagttacttttctactacaatccatacttcaggaaagatcacccagagctgctggaactctgcaagcgcagagttgcccaaaagagaagagctgtggctgcccccaacccacaggaagagctgaatgagggccccccaaggagcagcccagatgcccagcccatggagagaacagctgctgggccaaagaagagcctgctgacagcagatccagaagcaggcacac

SEQ ID NO: 74823 - DNA, 599 bp, Chicken  19866894357770_1
  misc_feature (1)..(3): n is any nucleotide
nnnatttggttttgaggcttggattagaaacaacaattgttttgcactacttatgacagagtggctgccttttatgttataccactttatgacatgtcatgacatatcacatgccgtggctgacaaataagataaaacattatgccagcacagcgactgtaaagcatcttaacctgagggcatcaattgcaatgcaaatgtactgcaaaaataagcataattacatagaaaatggttaggatgcaccaaaaattgatgatatattatttctttggcttttttagtaattaatcaagaaawctggtaaacttaactactattacatttgtatttagtttgatggctttatataccctcttgtgacccaaatacctgctacacagttcaawaaactttgcctctaaattatgaactgttctctctctcaccctcttagcatacaccagtatattttatttaggctggaatttgaaattttccacagattcactaatcttaaaatgatttctgtgttgagaattacttctgatggtcatctaatctaatctctcactctaagtaaaaccagttagataaggttgtttcagacaccctgttaa

SEQ ID NO: 74824 - DNA, 600 bp, Chicken  19866894357770_2
tgacatgtcatgacatatcacatgccgtggctgacaaataagataaaacattatgccagcacagcgactgtaaagcatcttaacctgagggcatcaattgcaatgcaaatgtactgcaaaaataagcataattacatagaaaatggttaggatgcaccaaaaattgatgatatattatttctttggcttttttagtaattaatcaagaaawctggtaaacttaactactattacatttgtatttagtttgatggctttatataccctcttgtgacccaaatacctgctacacagttcaawaaactttgcctctaaattatgaactgttctctctctcaccctcttagcatacaccagtatattttatttaggctggaatttgaaattttccacagattcactaatcttaaaatgatttctgtgttgagaattacttctgatggtcatctaatctaatctctcactctaagtaaaaccagttagataaggttgtttcagacaccctgttaaatttggaatatttccgtgactgaaattcaacaacctttaagagcaacctgtgccatatcagacaaccctcctgtcaatcttctcatcctg

SEQ ID NO: 74825 - DNA, 600 bp, Chicken  19866894357774_1
atcctgaagccaaaaattgtttgcttagtctcagaagatggcacgtatgtcctggaaatttgcattttagaacggaattaaattcaaaagctctgggaagctgtatggacctgttgatttccatcacaaattagaaagagaagacttgaaaatgggagaagagacaacaacagtgtctcttatatttgctagatgacgggaattacacccataaaagacaattctatgtttttggcagcagctaaactagtcatctgtttaagcaacttttgaggatttgacttgggcattatgaagaartggcacaaatcccttcaaaccaggactggaaaaaataaagcacctccagtctccagtacatgggaattgatatctacaagtgtaatcgtgtccactacagaacttctaatagattacacyggttcacgtgggaccatatgtgccagaggcactctcaaggaaaagtagatactcactgttatcacagtaacagatgagtttttttctgtgtgagagtaaagaaaaacagtccacttaatctactctcccatatctttcttttctagaggcattttttccactattgaggtattgtgtagg

SEQ ID NO: 74826 - DNA, 600 bp, Chicken  19866894357774_2
ccatcacaaattagaaagagaagacttgaaaatgggagaagagacaacaacagtgtctcttatatttgctagatgacgggaattacacccataaaagacaattctatgtttttggcagcagctaaactagtcatctgtttaagcaacttttgaggatttgacttgggcattatgaagaartggcacaaatcccttcaaaccaggactggaaaaaataaagcacctccagtctccagtacatgggaattgatatctacaagtgtaatcgtgtccactacagaacttctaatagattacacyggttcacgtgggaccatatgtgccagaggcactctcaaggaaaagtagatactcactgttatcacagtaacagatgagtttttttctgtgtgagagtaaagaaaaacagtccacttaatctactctcccatatctttcttttctagaggcattttttccactattgaggtattgtgtaggggtgggtttggtacttgatgggtgattttgtggtgctctgcaaacttttctgtaggctggggatgaggctctgtaggcaaacttttctataggctttgcctcgagtgaatgccttcttgt

SEQ ID NO: 74827 - DNA, 599 bp, Chicken  19866894357779_1
  misc_feature (1)..(26): n is any nucleotide
nnnnnnnnnnnnnnnnnnnnnnnnnntgtgtatattcatatgctgatataaagcgtgccctcaattttacattttaaaaatctgcttctaatcttgaggatgagaagtgcaatgaagatgcaccttagaatttcaaaagtcaggggtgactatagattcttatataaaataaaaaaaatgaaatgcttggagctttttaattgaaatgaatttggggcccctactcagtgaattctgagttgataaaaccagattttggttatcgtcctaacttcaccatgttcaacctttgtgacctcrtatcgcttttctgcactggattatgcttccatacttaatagaagaattgtgaaattatattatgcatccacagaaacagataatacacacatatatcaaaatgagttatcaatatcaaatataactgcaaatatatatttgcatgtatatatttgatgaacaggtacctaagtgggcaggtatagaaggctccagatagataaaacatgttgacttttaaatctaaagtttagaatgtctacatatttccactcatatataaggaaataattttgtcatctttgctttatgaactttat

SEQ ID NO: 74828 - DNA, 511 bp, Chicken  19866894357786_1
attggccagtaagtcaggctagcaaatcagttacaaacacagtggcaacagttacaccattttccatcctgccagtaagtgtgtttgtggagtttcctaggcaagaagtcaaggtcatatactcctcttttatagctgacccagttctcctcatatcttcttgggatgcataggtgtttccttgcctttgaaggcttttgttctcagcaaatgcataaattgttctctaaaatcttgtccaagttatatgaaaaccagttccagtaaatgatttcacagtatgatcttgtcccagttttrtgtttatccataaactctcttcattaatgtccttagtatttgtatcttcttcactcatagtttttattaccttgatactttgtgcttggcactcatgcagatatctaaaagtacatttttagccccgggatttagccatctgattcctattaagggtaatggaaactgcatggctaagtcaattaccatgaactgtgctaaacatttacca

SEQ ID NO: 74829 - DNA, 415 bp, Chicken  19866894357792_1
gtttcaggaatacattacaagagtttaccctagctagatactcactgaagatagtccaaaaatgtttctatatctgcatattctcagtctatcaaagaagtagaaagtttctgataggacctgtgaagatactatgagtctttcaactttcgtacaaagatcatttggaggctctaagattacagaacccttgaggagagttctctaacaatgtcaacatctcctttctttgtaacagaaatttgaataggggaattcagaaaaggagaactgcagctgatagtctggattttgtaattwtttttttaggattgtagtctcatggagtggaacattacaaggagaataataatacaacttacccatagcagcatataactttgggaagcaatttagctgccaggaattttcagct

SEQ ID NO: 74830 - DNA, 600 bp, Chicken  19866894357798_1
ctttctgaaagttttcagtcaaacctgtgaactgaccatatcactcactttgtattcctgcttcttctggttttgtgctgctttttgtagagagggtttcatttttattttccttcaacatttgggttttcatctatttttgtaaactgatgttgtcatagttagaaaaaagactttaaaaatgtcgtatgaataagcatgtagccactgttggaggtggttatgctttggaaaaccaagaggttgtataacctttatgaagaagacaattaagtgcatgacttgctgatgttggtatgyaatattttacaggcaagtgagacagtgataagctagcatttgtgtggttaaaattgattggatgcagtactgaaaagggcagaaatatacgggcatatcagctctgtgctccgactggaataagttaactcaaagctgactgtaaatgaccacagaaccttgtctattgtcgccaagtggcctgtggacaaaaagctggtgaaggtctacagacatggggtggaatctggagggacttagtaggtaggaatggcggtggctgaaatgtatattgtatctgtgttggagactttgaatcct

SEQ ID NO: 74831 - DNA, 599 bp, Chicken  19866894357799_1
  misc_feature (1)..(47): n is any nucleotide
nnnnnnnnnnnnnnnnnnnnnnnnnnnnnnnnnnnnnnnnnnnnnnnaccctgctgtagaaaaggtgttggagtctaaaaattgctgtgtgcattttgtattatggcccgacaccagtgaagacataaagagcaagggaatatcttgcagctgtacaagatgagacacactgaaggcaatccctccttcaagaatctcttatctatttctctacttggcagattaggtatgagttcgacagagagctgttcttctttggagtgttaattctgtcttcatttgtgaatttatgcataaaakaaakaaaacaygaacagcaccaatgtgatcattcacccaagagatgtccatcctgaatcaaagcaaactgtggcaggtaggatggctctcctgtacttctgctaacccagccagtacgatggtactggtgayagaaggctttaagcaagataatatctgtctgttttatgtgggtgaccatcagatgataacacagtcaggctgctgaactcaatttgtacagaygagtgagattcctttgcctgtcagcctgcagtggtagccattgtcctgggcagagttgttctaaataaaatcac

SEQ ID NO: 74832 - DNA, 599 bp, Chicken  19866894357799_2
  misc_feature (1)..(43): n is any nucleotide
nnnnnnnnnnnnnnnnnnnnnnnnnnnnnnnnnnnnnnnnnnnaccctgctgtagaaaaggtgttggagtctaaaaattgctgtgtgcattttgtattatggcccgacaccagtgaagacataaagagcaagggaatatcttgcagctgtacaagatgagacacactgaaggcaatccctccttcaagaatctcttatctatttctctacttggcagattaggtatgagttcgacagagagctgttcttctttggagtgttaattctgtcttcatttgtgaatttatgcataaaakaaakaaaacaygaacagcaccaatgtgatcattcacccaagagatgtccatcctgaatcaaagcaaactgtggcaggtaggatggctctcctgtacttctgctaacccagccagtacgatggtactggtgayagaaggctttaagcaagataatatctgtctgttttatgtgggtgaccatcagatgataacacagtcaggctgctgaactcaatttgtacagaygagtgagattcctttgcctgtcagcctgcagtggtagccattgtcctgggcagagttgttctaaataaaatcacggat

SEQ ID NO: 74833 - DNA, 599 bp, Chicken  19866894357799_3
  misc_feature (1)..(36): n is any nucleotide
nnnnnnnnnnnnnnnnnnnnnnnnnnnnnnnnnnnnaccctgctgtagaaaaggtgttggagtctaaaaattgctgtgtgcattttgtattatggcccgacaccagtgaagacataaagagcaagggaatatcttgcagctgtacaagatgagacacactgaaggcaatccctccttcaagaatctcttatctatttctctacttggcagattaggtatgagttcgacagagagctgttcttctttggagtgttaattctgtcttcatttgtgaatttatgcataaaakaaakaaaacaygaacagcaccaatgtgatcattcacccaagagatgtccatcctgaatcaaagcaaactgtggcaggtaggatggctctcctgtacttctgctaacccagccagtacgatggtactggtgayagaaggctttaagcaagataatatctgtctgttttatgtgggtgaccatcagatgataacacagtcaggctgctgaactcaatttgtacagaygagtgagattcctttgcctgtcagcctgcagtggtagccattgtcctgggcagagttgttctaaataaaatcacggatgtcaaag

SEQ ID NO: 74834 - DNA, 600 bp, Chicken  19866894357799_4
caagggaatatcttgcagctgtacaagatgagacacactgaaggcaatccctccttcaagaatctcttatctatttctctacttggcagattaggtatgagttcgacagagagctgttcttctttggagtgttaattctgtcttcatttgtgaatttatgcataaaakaaakaaaacaygaacagcaccaatgtgatcattcacccaagagatgtccatcctgaatcaaagcaaactgtggcaggtaggatggctctcctgtacttctgctaacccagccagtacgatggtactggtgayagaaggctttaagcaagataatatctgtctgttttatgtgggtgaccatcagatgataacacagtcaggctgctgaactcaatttgtacagaygagtgagattcctttgcctgtcagcctgcagtggtagccattgtcctgggcagagttgttctaaataaaatcacggatgtcaaagccttcctctgctttgctcctggtagcagaacacagcttgtggcagctgagtttctggtgctttcaagctgattctgagggccatataaaaataagttgtttgtttaacctgaagtaagcaga

SEQ ID NO: 74835 - DNA, 600 bp, Chicken  19866894357799_5
ggtatgagttcgacagagagctgttcttctttggagtgttaattctgtcttcatttgtgaatttatgcataaaakaaakaaaacaygaacagcaccaatgtgatcattcacccaagagatgtccatcctgaatcaaagcaaactgtggcaggtaggatggctctcctgtacttctgctaacccagccagtacgatggtactggtgayagaaggctttaagcaagataatatctgtctgttttatgtgggtgaccatcagatgataacacagtcaggctgctgaactcaatttgtacagaygagtgagattcctttgcctgtcagcctgcagtggtagccattgtcctgggcagagttgttctaaataaaatcacggatgtcaaagccttcctctgctttgctcctggtagcagaacacagcttgtggcagctgagtttctggtgctttcaagctgattctgagggccatataaaaataagttgtttgtttaacctgaagtaagcagagaaggaagtctttcacacaaatggtaaagatcctcaattcaggccctttaatgtagcagaaragagtcataaaagtctcagttttgcagtaaa

SEQ ID NO: 74836 - DNA, 600 bp, Chicken  19866894357799_6
agtcaggctgctgaactcaatttgtacagaygagtgagattcctttgcctgtcagcctgcagtggtagccattgtcctgggcagagttgttctaaataaaatcacggatgtcaaagccttcctctgctttgctcctggtagcagaacacagcttgtggcagctgagtttctggtgctttcaagctgattctgagggccatataaaaataagttgtttgtttaacctgaagtaagcagagaaggaagtctttcacacaaatggtaaagatcctcaattcaggccctttaatgtagcagaaragagtcataaaagtctcagttttgcagtaaaaggattcctttgatgtagggaatgtggaataagctttgtagatatcttctaaactccagtacaaggtgtatgtgctgaggagcatgtggtctaggtggaggtgctgtggagcgcaggcaacttcatggccccccagaggaaggactgtggggaggcttgcggtatttagtttagcctctgcatgactaaggcagggtagcagacttagtagaggcttcataataacagactgtgtgcaatggggaattttattaaggcaccttacactt

SEQ ID NO: 74837 - DNA, 600 bp, Chicken  19866894357799_7
ttaggggtttgctgccccactccctgcctctcgtttctcagggttcaaattaatcagtatctctgtagaacagcagtaccctggttatgtggcataaaccctaatgtgaaaacagcttttcaggccaagaaagacagaccttaggggactgtggccctatctatggcagtgatgtgtttttgaaagcccttactttcattagcaaacctgttcaaattctaaattgtctatcagactgaactagcccagttcagcttctagaaagaggtagctgctgaagcgtgtattttccacttacasaaggctccagcttcaaacatgatgatgctgttctgtcatctgcttcttcagcaatggaatattccacggaaataacttgttgtgtgtgaatttccattaaagcatattacttctgtgygcaaacatttttcctgaattagtcagccctggtccatataagtggtacagaggcagtcctggttataaaaaggaacaatgagaaatgtaaccatttaagtgtggtagggaatgctgtgcaaaaaatcatttgcatttctgcccttgtttctagtatctgcaagacagcagaataagtggcat

SEQ ID NO: 74838 - DNA, 600 bp, Chicken  19866894357799_8
ttcaggccaagaaagacagaccttaggggactgtggccctatctatggcagtgatgtgtttttgaaagcccttactttcattagcaaacctgttcaaattctaaattgtctatcagactgaactagcccagttcagcttctagaaagaggtagctgctgaagcgtgtattttccacttacasaaggctccagcttcaaacatgatgatgctgttctgtcatctgcttcttcagcaatggaatattccacggaaataacttgttgtgtgtgaatttccattaaagcatattacttctgtgygcaaacatttttcctgaattagtcagccctggtccatataagtggtacagaggcagtcctggttataaaaaggaacaatgagaaatgtaaccatttaagtgtggtagggaatgctgtgcaaaaaatcatttgcatttctgcccttgtttctagtatctgcaagacagcagaataagtggcatcaaacaaagcatcaaactcctttgtcctgttttaccaaatgtgctgctttgtgccagtggcggaaaggacaagaggaaaaaatacttccatcaggctgcatgcaagagcttcgtgata

SEQ ID NO: 74839 - DNA, 588 bp, Chicken  19866894357801_1
agctggaaattcaaaggcgggaggacaccaggcaggtctggctgccttagaaatgggacaggctcatgagccagaagtcctgttgaaggactcctgatcaagactgttagcatcctttaagcaacccggtcagctgcaccctcactgcagaagtctcagaacagaggctgagctgaaggaattcaggaatgcatcagctgtgttttctgaactgctcgttaggaagacttgacgttcagattttgtttaaagcactgtgcatgttctggatgaaaagagtagaatgaactacatcacaaygacaggctaattaaccaaatcgccttgtgaccrgttgcctatattgtttacagtgcgtgccttgcattctcaaacactaaacacaaaaccttcttcttggcagagctgaacagagtattcctctgtatcactcacacagccagacctggcccacggcgctgccagcccctctctactttaccattctcctaccatcaagacatttccctggccagagcccaaaatcctgcactgcccctgcttgaactgagaccgtgccacccagggcaggcacaaagggctcagaag

SEQ ID NO: 74840 - DNA, 555 bp, Chicken  19866894357801_2
aggtctggctgccttagaaatgggacaggctcatgagccagaagtcctgttgaaggactcctgatcaagactgttagcatcctttaagcaacccggtcagctgcaccctcactgcagaagtctcagaacagaggctgagctgaaggaattcaggaatgcatcagctgtgttttctgaactgctcgttaggaagacttgacgttcagattttgtttaaagcactgtgcatgttctggatgaaaagagtagaatgaactacatcacaaygacaggctaattaaccaaatcgccttgtgaccrgttgcctatattgtttacagtgcgtgccttgcattctcaaacactaaacacaaaaccttcttcttggcagagctgaacagagtattcctctgtatcactcacacagccagacctggcccacggcgctgccagcccctctctactttaccattctcctaccatcaagacatttccctggccagagcccaaaatcctgcactgcccctgcttgaactgagaccgtgccacccagggcaggcacaaagggctcagaag

SEQ ID NO: 74841 - DNA, 600 bp, Chicken  19866894357803_1
ggagtgtaagtggtaccatgtttttggtctcacagatcacattggggtcgctgcagcggacgtagacctcgggctcattgccctgcatccccgccagggcacctgcaggagacaacaccacatgtaacactacagagcattttatccgtgttttattctacgccatcacgcagctgggagctgcagtcccttatgttgagctaccagagaacaactgggtcatactggttcaagagtataaaattagtgcaagcagatggatggaaagcaagcaaggaagcccaaggccatagcaaaatyattagcagtcttcgaaggcgcaaagaagcagagaaaccatccctgatggtgggaactcactccccagatgccacccccacctcctagcagagccctgtgggtcacctgggagcgtgtgccgtggaggcaggcggatggccttcttcaggaaggtcagctcggggtggtagaagcggaaggtctgatccaccacgtggggccggggctcaaccttcacctgcagcagcgcgatgggtttgcccccactcacacgaaaagccacctgccgagggggggcagaacagagcagctcagtgccag

SEQ ID NO: 74842 - DNA, 599 bp, Chicken  19866894357816_1
  misc_feature (1)..(126): n is any nucleotide
nnnnnnnnnnnnnnnnnnnnnnnnnnnnnnnnnnnnnnnnnnnnnnnnnnnnnnnnnnnnnnnnnnnnnnnnnnnnnnnnnnnnnnnnnnnnnnnnnnnnnnnnnnnnnnnnnnnnnnnnnnnnnnatacacatgtagaagcacatgtggtacataaacctacgtatagaaataacttagaattgagtttcccatataattttatttctctagaataacaaaatattctaaacatcatttcccatcaaagaacagtattctagcttgtgacggaaataattatttctgcaaaatgtctgratggggaatacattattctgctgaaactttaatcrgtttgttcactgcagaaagcttccttcttgtgaaatgttttgccactttgaatataattctcctagactacttgatccctctgctacccttcaatgtgacctccctcaagtagggaagcttctgagaaaagatcaccacttcagaagcacacgtaaaccaccttgaaaagacagcagtttgcttatgtctagcaagcagagtgactctcgtttagagaggctcaagtaattagattctctgtaactcttatctttataaaactt

SEQ ID NO: 74843 - DNA, 599 bp, Chicken  19866894357816_2
  misc_feature (1)..(91): n is any nucleotide
nnnnnnnnnnnnnnnnnnnnnnnnnnnnnnnnnnnnnnnnnnnnnnnnnnnnnnnnnnnnnnnnnnnnnnnnnnnnnnnnnnnnnnnnnnnatacacatgtagaagcacatgtggtacataaacctacgtatagaaataacttagaattgagtttcccatataattttatttctctagaataacaaaatattctaaacatcatttcccatcaaagaacagtattctagcttgtgacggaaataattatttctgcaaaatgtctgratggggaatacattattctgctgaaactttaatcrgtttgttcactgcagaaagcttccttcttgtgaaatgttttgccactttgaatataattctcctagactacttgatccctctgctacccttcaatgtgacctccctcaagtagggaagcttctgagaaaagatcaccacttcagaagcacacgtaaaccaccttgaaaagacagcagtttgcttatgtctagcaagcagagtgactctcgtttagagaggctcaagtaattagattctctgtaactcttatctttataaaacttgacaagttagcgaattacctggagtctctttcatt

SEQ ID NO: 74844 - DNA, 599 bp, Chicken  19866894357819_1
  misc_feature (1)..(16): n is any nucleotide
nnnnnnnnnnnnnnnnctaaagggataagctataggcttgatgtcttgatcctaggtctatacagtactacaggtacatccaaaggaataagggccacagttgaattctaagctttgtataacgtgctttatttatatgtcgtatgttctccatggctgtactggaacattgttgtctataatatgggaaatattcaagcataggaattaaactgtgtttgattttcacttactttaattatgcatagcatttaagaacaggaactgagaaacacaactctgaaatctaaatgtcatatrtaaagagtaggaaaagggaaggtatcgtacactgaggagaatatgtacatatctacatatgtaggcaggattagtttagctatttgtacacagcactcacagatctggaaacagagtaggaggctttctgctgagcttcttttctaagatrgaggggaaaaggaagctgggagaaagaaaagtaacagtagtggtctgggtgctgagaagtgttgattctcctctccaaaacgtttgggggggcacaggagcagtggatccaacttgamatacttgcatcagctctgcttgtagtagtg

SEQ ID NO: 74845 - DNA, 600 bp, Chicken  19866894357819_2
catggctgtactggaacattgttgtctataatatgggaaatattcaagcataggaattaaactgtgtttgattttcacttactttaattatgcatagcatttaagaacaggaactgagaaacacaactctgaaatctaaatgtcatatrtaaagagtaggaaaagggaaggtatcgtacactgaggagaatatgtacatatctacatatgtaggcaggattagtttagctatttgtacacagcactcacagatctggaaacagagtaggaggctttctgctgagcttcttttctaagatrgaggggaaaaggaagctgggagaaagaaaagtaacagtagtggtctgggtgctgagaagtgttgattctcctctccaaaacgtttgggggggcacaggagcagtggatccaacttgamatacttgcatcagctctgcttgtagtagtgattgctttttgaaaacaaattccaattttaaacagcagttttgtttttcctctttcctaaccagatcaaaaagaaacagcaagaggtagtgggctttttagaggccaacaagattgactttcagcaaatggacatagcaggtgatgaggaca

SEQ ID NO: 74846 - DNA, 600 bp, Chicken  19866894357819_3
aaacacaactctgaaatctaaatgtcatatrtaaagagtaggaaaagggaaggtatcgtacactgaggagaatatgtacatatctacatatgtaggcaggattagtttagctatttgtacacagcactcacagatctggaaacagagtaggaggctttctgctgagcttcttttctaagatrgaggggaaaaggaagctgggagaaagaaaagtaacagtagtggtctgggtgctgagaagtgttgattctcctctccaaaacgtttgggggggcacaggagcagtggatccaacttgamatacttgcatcagctctgcttgtagtagtgattgctttttgaaaacaaattccaattttaaacagcagttttgtttttcctctttcctaaccagatcaaaaagaaacagcaagaggtagtgggctttttagaggccaacaagattgactttcagcaaatggacatagcaggtgatgaggacaacaggaaatggatgagagagaatgttcctggagaaaaaaagcctcaaaatggaattcctcttcctccacagatcttcaatgaggagcggtattgtggggtaagaagctatttgaaaac

SEQ ID NO: 74847 - DNA, 600 bp, Chicken  19866894357838_1
gcaaaacagaaatcagtaacaagcaaataaataaaaaattacaggcatataaaagctcgcagacaaatgtgctggattccaactgtatcaggtgaagaaggcagagggttttattctcttgatttgctactactactaagaaaggtgaactgaaaaaatgaagtcatgcaggcgtgagccccacagcactgctcttcataactggctttattatgaggcagcacaaacgtcttactgaatttcaagatactttcaaatattttaccattatctatttattggtcttacctaaatgaacasccctggtctgcttatcatacttctactgcagatgatgtaaaaaatgaaattataaggagcagcaaatatccaaattagtataataactatgaggtttaaaactcactaagatactgcagtaaactgctagcaggattcctcatacttactatttcgaactggtgtctgaaatagttaagtaaaaaatgatagaattcaaaactctgatactctcatgttagcatgtagacctctcgctctgatggtcggacatactgtgttggtttaattagctatctagtagcaatttccacacctttg

SEQ ID NO: 74848 - DNA, 599 bp, Chicken  19866894357847_1
  misc_feature (1)..(46): n is any nucleotide
nnnnnnnnnnnnnnnnnnnnnnnnnnnnnnnnnnnnnnnnnnnnnnattatttgtctgctagcaactaggtaattcttatatgatttgttataatcatacagtaagtaatacaaggagtatggaatgcactgtgtcaggctctccacctgttccactccagctaagaagtaaacaccagtccacacttttcctctcaaggaacaccatcttccctactcacactttacttgatatcaaaataagggaataaatggaaaactatatatggaaagatagtttgtcacactgttctaaagatwttttttttctagtagcacctatgcaaaaagacaaaacttggtaggattttttctgtttgttttgatccatttggaagtattttataggaaaactgttcctgaaggctaatggtttaacataatgatcctgatgctaacgtttgtattattctaaactagggaaatctagaaaaaaatattattttggatgtacaaaagtggaagagggcagactgctggcaccccactaaaaacctctttattttcagtgatagtgatcaaaaaagtatagcaagaatagagtgcttcagactacaagt

SEQ ID NO: 74849 - DNA, 600 bp, Chicken  19866894357853_1
agtttccaggagatatgagcaccatggggatgagacctcatggtcttaggtaagctgttcagtcttgtataaccaggctactaaagtcatagttttaaaatttacagaaatgattggatgcagggcttgggttttttggagacaaaaaattatctgaatggtctgcagtagttggtgattttactgaggttatgtatagtaagctttaagtatctgtaacataagaatgtgtgttttataattagtaacagtgctctgtgctgtattttatggggaattgatcataaattaaaaaaggawaaactgcagtgcttgtggaaattacaatgagattggtactgaatagtagtgtcacccactgttttagggcaaccttttaaaaaagaagggtctgctttgaactttgctmtcttaatartagataaaygtaatatttctgcttgtctttctaatgaatatataattcaaaattgacttttgtctgtgccgtttttacaacraatactaatattgacatatagtcttgggaataaatgttttcagtattttgaatttatttcagtaaatctacacgttaattttttaagcatactgcattga

SEQ ID NO: 74850 - DNA, 600 bp, Chicken  19866894357853_2
atgattggatgcagggcttgggttttttggagacaaaaaattatctgaatggtctgcagtagttggtgattttactgaggttatgtatagtaagctttaagtatctgtaacataagaatgtgtgttttataattagtaacagtgctctgtgctgtattttatggggaattgatcataaattaaaaaaggataaactgcagtgcttgtggaaattacaatgagattggtactgaatagtagtgtcacccactgttttagggcaaccttttaaaaaagaagggtctgctttgaactttgctmtcttaatartagataaaygtaatatttctgcttgtctttctaatgaatatataattcaaaattgacttttgtctgtgccgtttttacaacraatactaatattgacatatagtcttgggaataaatgttttcagtattttgaatttatttcagtaaatctacacgttaattttttaagcatactgcattgaattaataggtagttcatttgctcagatcttactatcacagagttttctctccgttatgactggaatttaaaacaggtgtgtttattaaacatgattaaagcaattattt

SEQ ID NO: 74851 - DNA, 600 bp, Chicken  19866894357853_3
tgcagggcttgggttttttggagacaaaaaattatctgaatggtctgcagtagttggtgattttactgaggttatgtatagtaagctttaagtatctgtaacataagaatgtgtgttttataattagtaacagtgctctgtgctgtattttatggggaattgatcataaattaaaaaaggataaactgcagtgcttgtggaaattacaatgagattggtactgaatagtagtgtcacccactgttttagggcaaccttttaaaaaagaagggtctgctttgaactttgctmtcttaatartagataaaygtaatatttctgcttgtctttctaatgaatatataattcaaaattgacttttgtctgtgccgtttttacaacraatactaatattgacatatagtcttgggaataaatgttttcagtattttgaatttatttcagtaaatctacacgttaattttttaagcatactgcattgaattaataggtagttcatttgctcagatcttactatcacagagttttctctccgttatgactggaatttaaaacaggtgtgtttattaaacatgattaaagcaattattttattgtagt

SEQ ID NO: 74852 - DNA, 600 bp, Chicken  19866894357853_4
tgggttttttggagacaaaaaattatctgaatggtctgcagtagttggtgattttactgaggttatgtatagtaagctttaagtatctgtaacataagaatgtgtgttttataattagtaacagtgctctgtgctgtattttatggggaattgatcataaattaaaaaaggataaactgcagtgcttgtggaaattacaatgagattggtactgaatagtagtgtcacccactgttttagggcaaccttttaaaaaagaagggtctgctttgaactttgctmtcttaatartagataaaygtaatatttctgcttgtctttctaatgaatatataattcaaaattgacttttgtctgtgccgtttttacaacraatactaatattgacatatagtcttgggaataaatgttttcagtattttgaatttatttcagtaaatctacacgttaattttttaagcatactgcattgaattaataggtagttcatttgctcagatcttactatcacagagttttctctccgttatgactggaatttaaaacaggtgtgtttattaaacatgattaaagcaattattttattgtagtcataaagct

SEQ ID NO: 74853 - DNA, 600 bp, Chicken  19866894357853_5
aagctttaagtatctgtaacataagaatgtgtgttttataattagtaacagtgctctgtgctgtattttatggggaattgatcataaattaaaaaaggataaactgcagtgcttgtggaaattacaatgagattggtactgaatagtagtgtcacccactgttttagggcaaccttttaaaaaagaagggtctgctttgaactttgctmtcttaatartagataaaygtaatatttctgcttgtctttctaatgaatatataattcaaaattgacttttgtctgtgccgtttttacaacraatactaatattgacatatagtcttgggaataaatgttttcagtattttgaatttatttcagtaaatctacacgttaattttttaagcatactgcattgaattaataggtagttcatttgctcagatcttactatcacagagttttctctccgttatgactggaatttaaaacaggtgtgtttattaaacatgattaaagcaattattttattgtagtcataaagctcatttaaatataagcataatcagcaacatatttatttaaatattttaatgaatgtgtcgtgtaaagcattttg

SEQ ID NO: 74854 - DNA, 600 bp, Chicken  19866894357859_1
tggttcactaataatgggaaacggagaaaaatagcaacaggcagtgggcttgcctcagtctcattcccacatgaagttaggccgcagatgcacagtttggtccaggtaaagggaacggtaaggaaagattaggatacacattaacagaacttctgttttgtacctaacacttatgtgaatgcaccagtggaaaggcaggataatgacaagagcttcataagctgacagaaggaattagtgctcacagctgataatcagaaaggacaagacacacaggagacaacgggtccgtaagctctytgtctttcagcaatacatttccacaatgatatttgagttctctgaaactcttagttccaacacgtacaggtgctgctttccccacagaaaaccactgaactttttcactacttgaactacctgaactcatcttaattttctcttctacaattgtagctgaatttctgcttagctttttctcatactaacttcagtatttgagaagtttatagaatggggttcacaatactccgggctcagaaactttattttaaaacaaagtccttgaaatacagaggtaacatttatgatgaagcatct

SEQ ID NO: 74855 - DNA, 600 bp, Chicken  19866894357859_2
ctgctttccccacagaaaaccactgaactttttcactacttgaactacctgaactcatcttaattttctcttctacaattgtagctgaatttctgcttagctttttctcatactaacttcagtatttgagaagtttatagaatggggttcacaatactccgggctcagaaactttattttaaaacaaagtccttgaaatacagaggtaacatttatgatgaagcatctatgtaaatgcttaatctgaaggaaataagtgattcataaaagttattcagcatcactactctagccaccatycagaatagaaggataaacatcatcaccttggcctgatatgctaaaaactcacaaaccaataaatatttgctgttgcagactacagtacaagaatctcaacccttacaaacacagctttggctgggggagaggtggggaggacacacagacatacaacttcactaattaagaacagcggttcacttcacatattttttgtactggtactgcaatttcaattgatcacatcagcattcctttaygcaggtgctctgttagggaagggaaataaggaacaaagacaggaagtcccacttctgg

SEQ ID NO: 74856 - DNA, 504 bp, Chicken  19866894357859_3
tctgaaggaaataagtgattcataaaagttattcagcatcactactctagccaccatycagaatagaaggataaacatcatcaccttggcctgatatgctaaaaactcacaaaccaataaatatttgctgttgcagactacagtacaagaatctcaacccttacaaacacagctttggctgggggagaggtggggaggacacacagacatacaacttcactaattaagaacagcggttcacttcacatattttttgtactggtactgcaatttcaattgatcacatcagcattcctttaygcaggtgctctgttagggaagggaaataaggaacaaagacaggaagtcccacttctggcactttgaaaaacctcaaagagcaaaagacaaacttcgtcagaaagcacatccccaaaaaaaaaaaaaaaaaaatcataagtttcagggaacgtgaattgcaattaaagtttctcttaactttcaggaagggacatacgaaaacat

SEQ ID NO: 74857 - DNA, 599 bp, Chicken  19866894357860_1
  misc_feature (1)..(192): n is any nucleotide
nnnnnnnnnnnnnnnnnnnnnnnnnnnnnnnnnnnnnnnnnnnnnnnnnnnnnnnnnnnnnnnnnnnnnnnnnnnnnnnnnnnnnnnnnnnnnnnnnnnnnnnnnnnnnnnnnnnnnnnnnnnnnnnnnnnnnnnnnnnnnnnnnnnnnnnnnnnnnnnnnnnnnnnnnnnnnnnnnnnnnnnnnnnnnnnnctcactggggctggtgttgctacctggctaaaaggctgttctgtttctgtggtgattggtaaaaacagattaatggcagagttctcttcaaagggtgcaaggaggacsggctctgagcaggcaggagctggtaatggtgcacccaggctgggggatgctgccttgtagctttgaaggcttcttttccagcagcratactgcagtgccagggcaattcttgggtgggtgatgtgtgtaatagatagagctctatttctcctaattaaatgagtgctgtactagggctgccaaattttgctctctgcaatgtgctacataaaaytgagagagaaggaaagttagattttaatgggagaacctaatcctgctttgtgccaaatgctctaaatggaagcacagccaaggga

SEQ ID NO: 74858 - DNA, 599 bp, Chicken  19866894357860_2
  misc_feature (1)..(106): n is any nucleotide
nnnnnnnnnnnnnnnnnnnnnnnnnnnnnnnnnnnnnnnnnnnnnnnnnnnnnnnnnnnnnnnnnnnnnnnnnnnnnnnnnnnnnnnnnnnnnnnnnnnnnnnnnnctcactggggctggtgttgctacctggctaaaaggctgttctgtttctgtggtgattggtaaaaacagattaatggcagagttctcttcaaagggtgcaaggaggacsggctctgagcaggcaggagctggtaatggtgcacccaggctgggggatgctgccttgtagctttgaaggcttcttttccagcagcratactgcagtgccagggcaattcttgggtgggtgatgtgtgtaatagatagagctctatttctcctaattaaatgagtgctgtactagggctgccaaattttgctctctgcaatgtgctacataaaaytgagagagaaggaaagttagattttaatgggagaacctaatcctgctttgtgccaaatgctctaaatggaagcacagccaagggaagaatgaacggtggtgagctacctaggggagaaactaactttattagttgggcaaaacagcagatgtcagactccttacctaaaag

SEQ ID NO: 74859 - DNA, 600 bp, Chicken  19866894357860_3
cctggctaaaaggctgttctgtttctgtggtgattggtaaaaacagattaatggcagagttctcttcaaagggtgcaaggaggacsggctctgagcaggcaggagctggtaatggtgcacccaggctgggggatgctgccttgtagctttgaaggcttcttttccagcagcratactgcagtgccagggcaattcttgggtgggtgatgtgtgtaatagatagagctctatttctcctaattaaatgagtgctgtactagggctgccaaattttgctctctgcaatgtgctacataaaaytgagagagaaggaaagttagattttaatgggagaacctaatcctgctttgtgccaaatgctctaaatggaagcacagccaagggaagaatgaacggtggtgagctacctaggggagaaactaactttattagttgggcaaaacagcagatgtcagactccttacctaaaagggaaaagggaataaagcatgaaatgtaaaagaggaggattctgttttccattctcttatgcatacttcctactacctaattaatgagacaaagatattaaagcttgcatgggaagtgagcttcagtata

SEQ ID NO: 74860 - DNA, 599 bp, Chicken  19866894357876_1
  misc_feature (1)..(87): n is any nucleotide
nnnnnnnnnnnnnnnnnnnnnnnnnnnnnnnnnnnnnnnnnnnnnnnnnnnnnnnnnnnnnnnnnnnnnnnnnnnnnnnnnnnnnnntatagcctctattcatatatgttccagcttgcttgtttaagggattaatcagtcttgaatgaaatccagactgtatgcatggaaggaggcactatacattacctcaggcatggtgcttgggccatagacataggtagtatgcaacagactcactgcccttcccaacaggctaccacaagcaactgtatgttcagtgtgttttgtttgcttgtyttacaattcccgttataagaagcttgacactttccaggtgtatgtacgatcgtaacccaggactctaacttctagggggcaggattggaaatagctcctaaaaatgcttttatataggatggaaatctccctgtcttggtgtataagttccctgtacagatctggtcctactggctactgcagaactccctgtactgccaactccagttgaagatgagaagggctgtgcacatcttttactctgaattaaaaggatgaacttggcataggctgctgctgccaagagtcaacaacagctt

SEQ ID NO: 74861 - DNA, 427 bp, Chicken  19866894357876_2
agatgagaagggctgtgcacatcttttactctgaattaaaaggatgaacttggcataggctgctgctgccaagagtcaacaacagcttgcaactgtgagaggatacagtgataaaatggaatgtgaaatttaacagcagcatgaaacagcctggaacaaaatgcctagctgtgccatttcctttggcacattcacattaagtcatcagaaagttaaatagtatcagtagtgagcactgctgccagaagacaagtcacaaagaatgtatttttaagagaaggaaggaaattattctaaatrcaaatacatatgtggttctgctgttgtataatacaggcttgcaccagatacatttcagctgtcgccatgaagtaccaattaaataaaactattattacagctcatgaacaaacaacatcagccaaga

SEQ ID NO: 74862 - DNA, 600 bp, Chicken  19866894357884_1
atccttgtgtatgtgtatatacatatgtattatgtacacaaacatataaatatacacaaatctgtcatgctccagctgtagataaatgtactataaaatattgaaattgatgctgaaattcaacacaaacaaattcctcaatctgcaaacaaggtttttatttacagcaagagaataaattttttctctacttcaaatgagagaacgttcctacaagcttttatttttccttattttccacttagaaagagctctcggataattgtaaatgcctttgcctcatctgctttgtattttgcygcaataaaggtgatgactacatcattctgctttttagagacggttgctggccctacacaatgtttgctcattgacaatttcccgagtatttttaatatgaagacctacttttcatatgctgcagcagacctgcctattgaattaaatgatctgtgaattaaaaataattctcctaggtcttcactgaaaccactcatgtgcctaaaattaagcatatgcttaagtgccttgctggatgggggccaggacgcttactactccgcagagcccttcacagggaagccagtctatgctatgtaa

SEQ ID NO: 74863 - DNA, 600 bp, Chicken  19866894357885_1
acaatcattatagagggagagcaagattctgatacactgaaattaagcaaagatatgtatctgcttagcgtatccgtgactgaggtacaatatatttcatcactgtggttgcaaaataatcgttattttttccatgggagattactcaaaccacaataacgcgttttcccaaattaaatagataactttacagactgctgggtaataaaatacgaataataaacacgaaagacataccttattaaaaaaattagcttgtcatttctcagactcttcttctgatttgcaagttaataaaarccacagccatttgccatagggaggataattaattagccatatctaaaattaatggggggcggggggagaaggagaaggctttcacttgaagcatacattatacatagcagaaatgtattccagtgctaaggtaagacatctgccacatggtctggtgtctttaaataacagtaattgtttgctgttgttgtttgggaccattctggtgatgataaaagttggtcaaaggaatgactcaatctcccaaccctcttgctaaatgaagtcgcctgccttcctccagagggacacaaagagttg

SEQ ID NO: 74864 - DNA, 600 bp, Chicken  19866894357892_1
ttaaaagtggaagctgctctgccaggttgactgaagggttacaacctatggcatggatttagactgtttgactataacaacttaactttcctctccgctctagtaatgtttagcactgagctttcccttcatgagctgtgatttcctcacttcctcgtaacagtcagcagtctaagtgtgtaatctgtgtatgtcagctgaggtcttgttctttacccatctattttcacaggttattgtataaaagggcttaaactataggaagagtgttttagatgataactttctaaaatacaatamtatttattcatttgtagatttgtaattattagaagggaaaagctgatttcaagtcatatggagaaactgaaagcaaacccacgtattaatgaagtggatcctgaaagcttgagatggactcctctgctagtttctaacgctgcagtttctgaggaagagagagaagcagaaaaggaggtaatagcaacaacttttcttttgaattttcttttgatttcatcaacccctaatattcaacagtaggctgtcttaaataaattatacttgtaattttcacctttgtttaatgatggagggcac

SEQ ID NO: 74865 - DNA, 600 bp, Chicken  19866894357892_2
aaagcaaacccacgtattaatgaagtggatcctgaaagcttgagatggactcctctgctagtttctaacgctgcagtttctgaggaagagagagaagcagaaaaggaggtaatagcaacaacttttcttttgaattttcttttgatttcatcaacccctaatattcaacagtaggctgtcttaaataaattatacttgtaattttcacctttgtttaatgatggagggcactggtgttattgtaatgtgcattttttagaagctgcccggtaagatgtagtaaattttgtgggatgtgtrtgaaaactttaaacctgaagcagttgttatgaagttgtatttatcactcctgaggtagtcgaggagcatgtaatcagatcaaatttggtgcagagctcaggggctgcagtgtcaatcgattctttgttatgaacttgctcaaagtgatccatgtcagtgggcatgtaatgtagtgctaaaggacttaaatcaattcgctgcatcattaatagtgctaaatatcccatgaaatgcaatcttctttggtttgttatcctaactgttgtaaaggagctagtagatgattcagctgaaatgttg

SEQ ID NO: 74866 - DNA, 600 bp, Chicken  19866894357897_1
agctctctgtgcccagggctttatctgctctggccatcacagcacagctggagctggcaacgacacggggccatgctacactgcccactgaggcgatgctcttaactgcaagcagattttgcaatataactgcatcaaagtttccacttactgccagaaaagctgcttgcttttctgctttttccacattggcagccatctatcactgcacatgctgaaaaggctgcattaaagcatctgatcatgtgctcaagagtcctcatgaacaaacgtcactgtccacgtgaatgtaactgcctkcatagacacaaacttctgcaccctctatctactgcatattttatacacgggtgggttaccagctgtagggttaaaataatttcccttaaattagaagtattctcatcctcgtagtgcagtctggggatgacaggagtgtacacatgactcagctacatgaaaataaatgttgcttttgcagtatgtttaagtcatcaatatgggatacacaaacaaacctatgacagaagggcaatcagtccaatggagcatttcagcattgcagggggttcgaaataagcaagagtcagaaaagtgcat

SEQ ID NO: 74867 - DNA, 600 bp, Chicken  19866894357898_1
ctccagcggcgcgacaggacccggggagggtcgcatttctcagctcgtccctctctccacactgttaccgggaggggtgagtcaattcctttctgatatcttttcctctagtgcctatttctcaaataaaggctctgtcattgccttcacttgttctacagctatttgtttcttctcattgaattcaagtcacatgttgcatagaagacctgactaagttcagtttgtcacccaaatactcagcactactttatcatttttatctgattcaaagtattacctaacttgtgttgccttagygttgggctccttcagttgctaaaacctgcattttttctgatctattgggtgtgtatacaaaataytttgtacttgtttctcctcagtatcagtctggctggtttctcttgaactaataaataaaatgacacttaaaaatagtggcgagaccacatttgttgaattcagcagcaagaggtgttattcctttgtagggggcccgctttgcagggggctggactcaatgatctctagaggtctcatgaaggagaaaatagatgtattgataagaacaacagaagtcctggtacacttagtatc

SEQ ID NO: 74868 - DNA, 600 bp, Chicken  19866894357898_2
taccgggaggggtgagtcaattcctttctgatatcttttcctctagtgcctatttctcaaataaaggctctgtcattgccttcacttgttctacagctatttgtttcttctcattgaattcaagtcacatgttgcatagaagacctgactaagttcagtttgtcacccaaatactcagcactactttatcatttttatctgattcaaagtattacctaacttgtgttgccttagygttgggctccttcagttgctaaaacctgcattttttctgatctattgggtgtgtatacaaaataytttgtacttgtttctcctcagtatcagtctggctggtttctcttgaactaataaataaaatgacacttaaaaatagtggcgagaccacatttgttgaattcagcagcaagaggtgttattcctttgtagggggcccgctttgcagggggctggactcaatgatctctagaggtctcatgaaggagaaaatagatgtattgataagaacaacagaagtcctggtacacttagtatctaaccaagtgtggttcattggaatcacaaaatattggatgaacaaatattttgctattagaaaaa

SEQ ID NO: 74869 - DNA, 599 bp, Chicken  19866894357905_1
  misc_feature (1)..(41): n is any nucleotide
nnnnnnnnnnnnnnnnnnnnnnnnnnnnnnnnnnnnnnnnntgggaagcacgcagatgtttgctatgacataactttgcctcttgacttggcactagacacgcgtatccaatgcaattctgttctggaaagggtaattgaagacatcatctgctgacttcatatcattttgaccactgatgtttctactaaattacatgaaaatgagagaggatccacttagagagttagctgacacggttgtctcctcaatcggccccaggcagaagagtcagagctgcaggagtatgaaaaacactgmagacatcgctgtgctgatctacacagagcccagattaacctgaaaaagccctcgaggagcagtactaaaggcatcagaaacaccactttccaaaacagatgtgcacttgaaaaaagaaacagaacaacaactgccaaccatcactgctggtgtggttgcttacagtctctcccattcacagctgatgctttcctccctggctccagctgagccacaggcagaaagctgcaaggagcagatcctcagccgctgcaactcagagcggctctgctgcagcaaatggatctttcctgctttcc

SEQ ID NO: 74870 - DNA, 358 bp, Chicken  19866894357905_2
acagatgtgcacttgaaaaaagaaacagaacaacaactgccaaccatcactgctggtgtggttgcttacagtctctcccattcacagctgatgctttcctccctggctccagctgagccacaggcagaaagctgcaaggagcagatcctcagccgctgcaactcagagcggctctgctgcagcaaatggatctttcctgctttccaagcccgtggcacacaagtgctgcctgccatcagcatgctctgtgttctcagcagtcccgagacaaagccccatgctggttacctcccctgttcsgtcactgcagcctcagattgattccagctgtcctaatacgcattagaggagacaacca

SEQ ID NO: 74871 - DNA, 600 bp, Chicken  19866894357910_1
agctgtcatagcagtttatgaaagattgtagtctcttccaaggaaaaggaaaactactttaggaatacttgaaacagaagtgtggtatttattttttttttttctctaatgctgttaaaattcatttaccaatatgtaactaaagttatgtcttctttgaatacattatttcagcatttacctgttcattcatggaataattctgaatagtcaaaaataaaaagcttgttacaggtagtcactgttgaaaacaagttttcaagttgatgaactgagagaaagaaattacttcagctcttsaattctttgttttccacagagaggcaaaatttcaaacttcatgcaagatcaattaattttcaccataaaatgttgtcacttccatcacttcatcacttttagaatagaaattctaccaatatatacaaaaacaaagaacaactgttttaaacactgaattatggtgttggaaacatatttctgttttgatgactgtattttttaaagtgatttgaagtgaatttggcctgaaaggtactatggaaatgaagatgtgtgttcagaaataaatgaaacctgtgagcagtataatggcccaac

SEQ ID NO: 74872 - DNA, 599 bp, Chicken  19866894357911_1
  misc_feature (1)..(73): n is any nucleotide
nnnnnnnnnnnnnnnnnnnnnnnnnnnnnnnnnnnnnnnnnnnnnnnnnnnnnnnnnnnnnnnnnnnnnnnnnttaagactgttcacagcaaatgcaaaaaaatgaaagtatcaccatgagaaatatcattcctacttgcttaaattgcctgagaaaaatgagtgttttctgcatgcacaaaatctctacagttgttttaatcatctgtttgaaacagcattgcaagataaatttaggaaatttctgatacgttactgtcagcaatataatcatttccatctgaatctgaattcaccgamaatagatgcaaatagaccagaggtatttgtttcactgaagcagttcaaagccagatgatattcagttaacacttgacaactgttgctctgtatatgtttgaaaatgtctctgaaaattcctgaacaaagtatgcaataatgcatattagatagggaaacttatttcaaaagacaaggatacagaagaacaagatccaagacctttggacctaacattatcaggcaaaatcagaactaatcggaattaatttcacattcccagtatgtggaaaataaataaatcaactgttaatcatttt

SEQ ID NO: 74873 - DNA, 600 bp, Chicken  19866894357913_1
tgtattactcaaaaataggcaagtcaaaaaaatggcctcatatctgacattaggttcagatacatttgagatttttgaaagcgtgcttccttcatcaaaattgaataactttgatatttccttgcaaaatttttaggtacagtaagcttttagctattctaggaatttctcttcaatagaatacgcaagaagtgaaactgtaaagggaatctgtgggccacacaagactagagagttgttttgcagttctagaaagagttaaaaaaaactgaattggtttttcacctcctgcaaaacttragtagaaattaggtgaattccattgcttggcaaattctagctttcttgctgtactttttttctgggtcactctgtggtcattaaggttcttattcacctaacaatgtccaacgtgtggatgtaattgagaataaatggcacaaacagattttgggtagaaaggcatgcgagcttctgaaagtataaaacaagaaatgcccacatagccgcatgtgttgtcacaattagagcaatgcaagctggtggctggtgtgcaggaaaagaagaaatacaagaaatgcagtggattatgttgctttg

SEQ ID NO: 74874 - DNA, 600 bp, Chicken  19866894357916_1
cccagcagcacggccgtgctctgcagcacatcgggactgagcttcagcttctggaaacgctgcacggggcggacaacatggagccgaacaaagcagcgtggggaggcagcaggggggtttcgctgctcgctcggctgcctgcagggctgggtgtggagcggtggtacccgacacagggagctgtgcccccactggtcaccccataggggcaccagccgtgctggcagcattgtcccgaggaccctcaggactacaggacctggcaccgcatggatgcgatgagcacatgggatgttgctygtggtgctgtgcacgcccatggctccatacatgccttcaaggctgcttcccttgaaaaaatcccaaagccttttatcgctctggtgaaccatggaygggggccgggcgggctgtgtacaaaagccccatcacacccagtgccagctgagcgcgtcgggcacccatttctctgagctgctgtgagcacagctggctgttctcctgacctgcacggagtgggatgaaaaacggggatttagggcagggccaggtgctggtcccatgggggcaatcccatatttccagtgggatctgagacca

SEQ ID NO: 74875 - DNA, 537 bp, Chicken  19866894357916_2
cgtggggaggcagcaggggggtttcgctgctcgctcggctgcctgcagggctgggtgtggagcggtggtacccgacacagggagctgtgcccccactggtcaccccataggggcaccagccgtgctggcagcattgtcccgaggaccctcaggactacaggacctggcaccgcatggatgcgatgagcacatgggatgttgctygtggtgctgtgcacgcccatggctccatacatgccttcaaggctgcttcccttgaaaaaatcccaaagccttttatcgctctggtgaaccatggaygggggccgggcgggctgtgtacaaaagccccatcacacccagtgccagctgagcgcgtcgggcacccatttctctgagctgctgtgagcacagctggctgttctcctgacctgcacggagtgggatgaaaaacggggatttagggcagggccaggtgctggtcccatgggggcaatcccatatttccagtgggatctgagaccatcctgtggacaatgccctttgcccccagcccca

SEQ ID NO: 74876 - DNA, 600 bp, Chicken  19866894357917_1
attcctcaggaaaaggcattttcgctacaggatgcggacccgtatgaaaatggcaatccggctgcaagttaaacacagcccttacgtaatttgcagcctattgatgtgctacgcagccgttctccaaaaggagagaagtctgagcaagaagcaggctgaaataaatgagatgcttccccaaaataagcaactgagccttcacaggaaaaaagaaaaaagaaaagaaggaaagaaaaaaaggaaaaacaaaatgctcagcctgaagcaataataggcagtatagctgcctaggaaagcacrgggcttttaaatcatccctgcacttacatccgaaagtacagcgaggttttaatctaagctagcacagcgttcttatggcagtgcttttttgaggcaactttaaccacagggccagtgccttgctttaaatacctcagtttgcatttctgattgaataataataataataatagtaataacaattggcgcctacagatttgagtgcatcaagcagcaagttggactgcagtcgtgggtgcttagcagygtcccttcattttgtcactgccaaagagctgaaggaagggaaactctgatcag

SEQ ID NO: 74877 - DNA, 600 bp, Chicken  19866894357917_2
aaaatgctcagcctgaagcaataataggcagtatagctgcctaggaaagcacrgggcttttaaatcatccctgcacttacatccgaaagtacagcgaggttttaatctaagctagcacagcgttcttatggcagtgcttttttgaggcaactttaaccacagggccagtgccttgctttaaatacctcagtttgcatttctgattgaataataataataataatagtaataacaattggcgcctacagatttgagtgcatcaagcagcaagttggactgcagtcgtgggtgcttagcagygtcccttcattttgtcactgccaaagagctgaaggaagggaaactctgatcagttcacatcaccaagtggttttaaactaagtaaaatkaaattctttgactacacaaagctgcaatagttggggaagctgaatcattaaagcgtatcatcagacaatcttcaaagcatatttcacaaatgaagcagtatgggtgctgggatatttgaggggtattttgcagttttggggggagatttctttgctaaagatgtctaaaaggcagagagcaaaaatgaccccctccggtccggcagcagac

SEQ ID NO: 74878 - DNA, 600 bp, Chicken  19866894357917_3
tacagcgaggttttaatctaagctagcacagcgttcttatggcagtgcttttttgaggcaactttaaccacagggccagtgccttgctttaaatacctcagtttgcatttctgattgaataataataataataatagtaataacaattggcgcctacagatttgagtgcatcaagcagcaagttggactgcagtcgtgggtgcttagcagygtcccttcattttgtcactgccaaagagctgaaggaagggaaactctgatcagttcacatcaccaagtggttttaaactaagtaaaatkaaattctttgactacacaaagctgcaatagttggggaagctgaatcattaaagcgtatcatcagacaatcttcaaagcatatttcacaaatgaagcagtatgggtgctgggatatttgaggggtattttgcagttttggggggagatttctttgctaaagatgtctaaaaggcagagagcaaaaatgaccccctccggtccggcagcagacaggggctctgtttgctgctttccagtaagtagttaattacaccgactgtgacatgtgggtgtaaaatacaaacaaacttcagtaggcac

SEQ ID NO: 74879 - DNA, 600 bp, Chicken  19866894357922_1
gcatctcctgcaaatggaaagccctggataatggcagcagtgaaacaaatgacaaaagcctgcaagtggatagctttgaaaactgataccattcagtatgatacggtaatgcaaaaaggttgcctgtcctggtgttatttataattccctgtatgcctggattccctccagccagcatacattatgctcaatccaggacatatgcaacaaatcatacccaattatggaagctcaggagacaagctctcctttgattactgccacagatttcttttccgtagaccaccagtcctaacaagrgaagcagacaatacatgaaaagaaaagaaagctccaatcaatgcccgtcatgtaccgatggatatatccaatcatagacctgaatgcaaaccattgacaagaattgttcctcgggtatttatgccctcaggcagcccgtggcacccagcctgcctgggatatcaacagggtgctcagcacactgcctcctactgcatcgctgtgtaaatccagccctgccatcaattacataaggcatggtgagtccatctcacccagcacactgctgttgatgggactcccactggtaggacggtggtt

SEQ ID NO: 74880 - DNA, 600 bp, Chicken  19866894357924_1
tatctggaatatctggtgcatgattctaatcctgtctctcagagacggcatggcagaataagaaatgatgcagaaaggggaaccgaagatggctggaggtatgttacaacttctgtactacaatctgggagaaaataaaaggaggactgagatgagaagctggagaggttataaactggttaagtgaatcaagaaggtggacaagaagtaattattgacactttgtcataacacgagaatggaaagcatcaggtggaattatcacgcatatttgtttaaagcaaagaagagaaagtgttyttctcctataacacaccatttaacagtgggatgccacaggatgctgtgaaggcaaaagactgtagttcaaatgcacttacattcatggaggaaaggctgttagggctggtaaacacagagcagcagatatatttctgggttctagaaacacttgtgctgccaactgctagaaatcaaaagagcataccagaaagagtaacaccatagatcgtagccytggatattttcttttgtcattcattcctaacctgttacaaagacgacaggctgagtgacatttcaggtatggctgttctactt

SEQ ID NO: 74881 - DNA, 600 bp, Chicken  19866894357924_2
acactttgtcataacacgagaatggaaagcatcaggtggaattatcacgcatatttgtttaaagcaaagaagagaaagtgttyttctcctataacacaccatttaacagtgggatgccacaggatgctgtgaaggcaaaagactgtagttcaaatgcacttacattcatggaggaaaggctgttagggctggtaaacacagagcagcagatatatttctgggttctagaaacacttgtgctgccaactgctagaaatcaaaagagcataccagaaagagtaacaccatagatcgtagccytggatattttcttttgtcattcattcctaacctgttacaaagacgacaggctgagtgacatttcaggtatggctgttctacttrcagtgcaataacagtagaaatgaatcgtctatcgtttgaggaaaatcagaaagaaacaaggctgaaacaaggttctctgggctggagaagagctacagcagggatccatatttactgtttgttttgaactgcatataactgcttggaatgccagtccttcccagataggtttggttgattgtgcttcctaagaaaagctgcagtctataattgatt

SEQ ID NO: 74882 - DNA, 600 bp, Chicken  19866894357924_3
tctcctataacacaccatttaacagtgggatgccacaggatgctgtgaaggcaaaagactgtagttcaaatgcacttacattcatggaggaaaggctgttagggctggtaaacacagagcagcagatatatttctgggttctagaaacacttgtgctgccaactgctagaaatcaaaagagcataccagaaagagtaacaccatagatcgtagccytggatattttcttttgtcattcattcctaacctgttacaaagacgacaggctgagtgacatttcaggtatggctgttctacttrcagtgcaataacagtagaaatgaatcgtctatcgtttgaggaaaatcagaaagaaacaaggctgaaacaaggttctctgggctggagaagagctacagcagggatccatatttactgtttgttttgaactgcatataactgcttggaatgccagtccttcccagataggtttggttgattgtgcttcctaagaaaagctgcagtctataattgattctgcttcttaagaaaggttgcagactataaaatagccataaataatgcaagtacaaaatatgctttggttggatgctagttttc

SEQ ID NO: 74883 - DNA, 600 bp, Chicken  19866894357930_1
tttcattctactggcagtaatagagactgggctggtcatgtaaaggcatgcctcctgctaaaacccagataggtgcttttgatttttggtgtaagcaagttttataaaactgtgttgaatgtataaggtattgactatttcaattgaaagaactcttgaagcttttgccttttagaagtgtatgaccatgatcagagagggggtgaaaaatgagccttaccctaatatttattttcttatattcttaagttgaaatttgaaaacattttataatgatttagctgaaattttatttttttwaaaaaattaacacttcttgctacattcacttgaccaactgcatctttagcaaaaatgaccattaaaaacatcacaagaatttgtaaaatgaattttaacaactgacattgtgaatcataaattttataatctagtaagaattcataatttgtttgtctcaagctaatttttgtatgaagtggcactctaaaataactatgtataaactccatacacatctgaagataatcttataaaaattaatgacttacaattgcacccactgaaaattttgggaggctgcaattagaaaagggggaa

SEQ ID NO: 74884 - DNA, 600 bp, Chicken  19866894357931_1
caaatatactattaaaggaagccacattttagcccctggtgcaacctaaaccaatagtagtggaaaatgctacaaggcattttcttaataaaatcattcttgtgacatcctagtagttggcacacccctctggagttttttaactgaaatgcatagcaaaagtaaatgtaataaagatagagaaacaaactctgtgagtttaagactgctgagaaatgatgaatgattatttgaagcccccatataaagccctcagctcagaggaactgagggtacagcagggctgttcagtacagctargagtatagtctcgataaaacaggtggggagtacacacagcatgctgggcgrgtctctgggatagcagagctgctccaaggcttcttctgctcccctttgaccttagcttcctgtcatccagtatgtggagaaaagcagggtgagtgaacgctttgcastctgtatgtcaaacccctgttctctgaaatctcyggcagctaagcattctcctgatattactcaatgtatataacacagcagaattcaactaagttattcatagttgttcagttgttacaggacagtacaaattctaatctg

SEQ ID NO: 74885 - DNA, 600 bp, Chicken  19866894357931_2
caatagtagtggaaaatgctacaaggcattttcttaataaaatcattcttgtgacatcctagtagttggcacacccctctggagttttttaactgaaatgcatagcaaaagtaaatgtaataaagatagagaaacaaactctgtgagtttaagactgctgagaaatgatgaatgattatttgaagcccccatataaagccctcagctcagaggaactgagggtacagcagggctgttcagtacagctargagtatagtctcgataaaacaggtggggagtacacacagcatgctgggcgrgtctctgggatagcagagctgctccaaggcttcttctgctcccctttgaccttagcttcctgtcatccagtatgtggagaaaagcagggtgagtgaacgctttgcastctgtatgtcaaacccctgttctctgaaatctcyggcagctaagcattctcctgatattactcaatgtatataacacagcagaattcaactaagttattcatagttgttcagttgttacaggacagtacaaattctaatctgcgagaattgcacttcattgctcggtattttccaaaccacctcttctggcac

SEQ ID NO: 74886 - DNA, 600 bp, Chicken  19866894357931_3
aaagtaaatgtaataaagatagagaaacaaactctgtgagtttaagactgctgagaaatgatgaatgattatttgaagcccccatataaagccctcagctcagaggaactgagggtacagcagggctgttcagtacagctargagtatagtctcgataaaacaggtggggagtacacacagcatgctgggcgrgtctctgggatagcagagctgctccaaggcttcttctgctcccctttgaccttagcttcctgtcatccagtatgtggagaaaagcagggtgagtgaacgctttgcastctgtatgtcaaacccctgttctctgaaatctcyggcagctaagcattctcctgatattactcaatgtatataacacagcagaattcaactaagttattcatagttgttcagttgttacaggacagtacaaattctaatctgcgagaattgcacttcattgctcggtattttccaaaccacctcttctggcacgttctgcaaaaccttcctgcacctccacctgcctcgcctccctccaacagggctggccatgcttgtacaaaggtggtcttcatgcacagcatcaggtctgatgcatg

SEQ ID NO: 74887 - DNA, 600 bp, Chicken  19866894357931_4
tgtgagtttaagactgctgagaaatgatgaatgattatttgaagcccccatataaagccctcagctcagaggaactgagggtacagcagggctgttcagtacagctargagtatagtctcgataaaacaggtggggagtacacacagcatgctgggcgrgtctctgggatagcagagctgctccaaggcttcttctgctcccctttgaccttagcttcctgtcatccagtatgtggagaaaagcagggtgagtgaacgctttgcastctgtatgtcaaacccctgttctctgaaatctcyggcagctaagcattctcctgatattactcaatgtatataacacagcagaattcaactaagttattcatagttgttcagttgttacaggacagtacaaattctaatctgcgagaattgcacttcattgctcggtattttccaaaccacctcttctggcacgttctgcaaaaccttcctgcacctccacctgcctcgcctccctccaacagggctggccatgcttgtacaaaggtggtcttcatgcacagcatcaggtctgatgcatgtcttacctcattttgctttggagagaacaattcg

SEQ ID NO: 74888 - DNA, 599 bp, Chicken  19866894357941_1
  misc_feature (1)..(116): n is any nucleotide
nnnnnnnnnnnnnnnnnnnnnnnnnnnnnnnnnnnnnnnnnnnnnnnnnnnnnnnnnnnnnnnnnnnnnnnnnnnnnnnnnnnnnnnnnnnnnnnnnnnnnnnnnnnnnnnnnnnntgttcctggtgcttttgatagagatgtttgtttagatatgtaattcccactatctgaagaaatagctgctaatggttgctgttgctgtctgctggttactggtagcaggaagcagtgaaaggccttactcttagaagcagtgttccagaacccttggaaacagattttccactggtggaagagytgtagagacttaaagctgacttgctgaaatggaacaagagtatccaatttgagagggcagttccaacttgggtaggcttcttttaaaggcatgggtagagagaaaaagatatatgtgaagtcacttttcctcttgtcaattctgtgatgatctgacatatctgacgagcaaaccttgcaagtaatcaacatacacagccacagtcttctgatcgtgttgtagggggctcaagctcctacagcaaagtgcaaggcaggcaggtcagtgtcacatctcctttttcacagtcagtaacgcta

SEQ ID NO: 74889 - DNA, 534 bp, Chicken  19866894357941_2
acttaaagctgacttgctgaaatggaacaagagtatccaatttgagagggcagttccaacttgggtaggcttcttttaaaggcatgggtagagagaaaaagatatatgtgaagtcacttttcctcttgtcaattctgtgatgatctgacatatctgacgagcaaaccttgcaagtaatcaacatacacagccacagtcttctgatcgtgttgtagggggctcaagctcctacagcaaagtgcaaggcaggcaggtcagtgtcacatctcctttttcacagtcagtaacgctatcaaaacrtgggctcaaaagcactgagatttattaggaatttttttctgaggaagtctttttattataaactaatgctgtttgattttccagtggatcagtgttattaaccagtgtactaattggtaaggcttttaaaaaacactttgaaacccgtaaaaataaaaattttagcatgcgttttcaacatgaaatgttcagctactgtatttcttcctggaaacaaacaaacaaacaacttta

SEQ ID NO: 74890 - DNA, 600 bp, Chicken  19866894357950_1
tggcattggggtcttccttgtttcctttctgatcagcttcatagccattctggtaagaaacataatccttgcacgctagccattgtaccagctggatagtgggaaaagttctaccccatttcatcattacatgagtcacaaatcactttgcatgcaagatgtttctcagtcggccaagtttgtttggatggtatcatcagccagacagtgtgaggagaagaattgtgcagtactgcttcccttttggaacagttcggggtaagagaaaatataaatccatctggagcagcccatctcaarcaggactcagtaggtagagaaggcttagagaacagcagcagagatcacatgccagctcagtgcaagagaccagtcaatgaaragtcctcagttctgagaagatcacrtgcaaagcaactgctctctcctaggaagcacagtgttgcacagtgtgaagaggtttaatagactgatgtgaggatttcaccaaaaagcatgagatactgttctgcagagaggcaagcaagatctgagcatatgttcaaaatgcaagcaagaatatgtgcttattctttccaggttgtactcattcaagcccga

SEQ ID NO: 74891 - DNA, 600 bp, Chicken  19866894357950_2
ttgtaccagctggatagtgggaaaagttctaccccatttcatcattacatgagtcacaaatcactttgcatgcaagatgtttctcagtcggccaagtttgtttggatggtatcatcagccagacagtgtgaggagaagaattgtgcagtactgcttcccttttggaacagttcggggtaagagaaaatataaatccatctggagcagcccatctcaarcaggactcagtaggtagagaaggcttagagaacagcagcagagatcacatgccagctcagtgcaagagaccagtcaatgaaragtcctcagttctgagaagatcacrtgcaaagcaactgctctctcctaggaagcacagtgttgcacagtgtgaagaggtttaatagactgatgtgaggatttcaccaaaaagcatgagatactgttctgcagagaggcaagcaagatctgagcatatgttcaaaatgcaagcaagaatatgtgcttattctttccaggttgtactcattcaagcccgaggtttgtacaaaaggttcgtaaactccacaggattcctgggagatcagcagtgggcaatgattaagatggtggaacaacgag

SEQ ID NO: 74892 - DNA, 600 bp, Chicken  19866894357950_3
gttctaccccatttcatcattacatgagtcacaaatcactttgcatgcaagatgtttctcagtcggccaagtttgtttggatggtatcatcagccagacagtgtgaggagaagaattgtgcagtactgcttcccttttggaacagttcggggtaagagaaaatataaatccatctggagcagcccatctcaarcaggactcagtaggtagagaaggcttagagaacagcagcagagatcacatgccagctcagtgcaagagaccagtcaatgaaragtcctcagttctgagaagatcacrtgcaaagcaactgctctctcctaggaagcacagtgttgcacagtgtgaagaggtttaatagactgatgtgaggatttcaccaaaaagcatgagatactgttctgcagagaggcaagcaagatctgagcatatgttcaaaatgcaagcaagaatatgtgcttattctttccaggttgtactcattcaagcccgaggtttgtacaaaaggttcgtaaactccacaggattcctgggagatcagcagtgggcaatgattaagatggtggaacaacgagtggttttttaccccatcgcattctt

SEQ ID NO: 74893 - DNA, 600 bp, Chicken  19866894357958_1
caacactgataagcctgacatttactgagaagtgccacaattctcagtccaatgaacattcccaagagggtatttttttcagttgtgcttcacattctattgactcaggataagctggaattttctgaagtatgttactaaaaaaaaaaagaaaaaaagaaaagcggaacccaactcctccacttgaattacatacagatgtactagctgtccttggcacgtttgttaatgattgtggtatgtttaatgatgctctacaagttgtctgtgccttatgtgccatatttcattcctgtagcrtattaaaagcacttgcacaagagttcttggtgccttgattgcaattacaaaaattatactcggaatactgtcacttaacacctctacataaaagctaaatcttgtagtgaaatacctgtttgtaacactaggcagtgttctggctcttattctaatcgctgcatgccggtctgtggtttgattttatgtagcacccaaaatatctggccatgtaggattcttttggaataggccttgcctgggaaaggctgtcaaaaggtttttgaatgttcaagtagattatgtcaagcagctcccttt

SEQ ID NO: 74894 - DNA, 491 bp, Chicken  19866894357960_1
tcacacattaccacagacagtaatacaccctttttgctctaatctcttacttccagttaccatctgaatagtacctatttactctcaccaaacacacaaagtccagaatccattttcactactgctgtatgtattaatagtctcatgtactaatacacaaactccttggaaagtgtcatggaaaacacttctttcctgcagtgaattccaaaaagataccatgtatgtataatgtgtttcatttacgccaatgaagcaatacctagcaatatattggaaaaggtaacaaccaaaaatcakgtactgaagataggttttacaagtcccatggaattcattgtactttttttgaattgccactttgatgcaagatttcttctataaaatggttggtgagttacacagaacgaagtattaacactactttagcaatcacaggggaaaaaaaagccttaagtcgcatgagtatatattttgctgcagaagatttt

SEQ ID NO: 74895 - DNA, 600 bp, Chicken  19866894357970_1
gtaacatttgcatttaggtcagaactccaaggaggcatttttctttgacacatgccagatagaataagagattcaccattctcacagtgaacacagaatcataaaggttggtaaagaccaatcatcaacccatcaccaccatgccgctaaaccatgtccctcagtgccacatctccatgtttcttgtaaaccttccagggacggtgactccaccacctctctgggcagctttctgagatgaaatttttcttaatatctaacctggacctcccttgacacaacttaaagccattaccaagyagtgccagcccatgaattttgaagcagtccacatcttcaccagactggtgcaagcttcttcacaattgcaccattccactccaacccataccattcagactttttggaagcaaacatctctgatcagcatttagcttagatggcctttacttcatttaggtacttactattctccttaagcttgccaactgctgaatagcatcrctatgatatatagcacagactatgttatacaacacaaaatctcttgaacgtataattgcctaaaagcacacagacatacaattctccctttttcat

SEQ ID NO: 74896 - DNA, 600 bp, Chicken  19866894357970_2
tgactccaccacctctctgggcagctttctgagatgaaatttttcttaatatctaacctggacctcccttgacacaacttaaagccattaccaagyagtgccagcccatgaattttgaagcagtccacatcttcaccagactggtgcaagcttcttcacaattgcaccattccactccaacccataccattcagactttttggaagcaaacatctctgatcagcatttagcttagatggcctttacttcatttaggtacttactattctccttaagcttgccaactgctgaatagcatcrctatgatatatagcacagactatgttatacaacacaaaatctcttgaacgtataattgcctaaaagcacacagacatacaattctccctttttcatcaaaaccaacattatcctatagaaaaatcgactgattcctaaaaagaaaatgtgaaggcactgtattctcccattaagaagagaaacataagtttattcctacaaaagaagacataatgctttaaaaagacataatgacaccaccattttccaggatcccttttgctgattcccacacagcttcaactatgctcactgtctgca

SEQ ID NO: 74897 - DNA, 600 bp, Chicken  19866894357976_1
atcaccttcgaccccttcctgtacctcccagtccccctcccacaaaagcagaaggtgctgactgtctactactttgcaaaggagccgcacaagaaacccatcaaggtaaaggacactaattactctggggaagtagcccgagagggctcttggaggtgccacaggcagctggtcctgtgcgagtgggctgaacgttgtgttaagccagggcctgcatgccttaatgtggtacttacattgtggcagttcctcgtgagtatcagcaaggagaactccagtgccatggaggtcctcgactcrgtggcccacagtgtgcatgtgaaaccagacaacctgcgcctagcagaggtgagaatgctaaaactgaccaccaagctgtggactgctgatgtgggtgcccctgggtcccacagttgtgcagaacacgttgccaccagcagccacttgtccatgggatgagttttgtctgtggatggtagtgtcatgcatgacgtgctgcccggcagaacactgctcaagtgagctgggcctctgcagtggggcaggtggtgctaccctggcaggatgatgggcagagcacaccatctctgtgatgctgct

SEQ ID NO: 74898 - DNA, 600 bp, Chicken  19866894357982_1
gatgctctcaaatagtttcatgtccttcttatgtgtggcacccaaaaacacacccagttctcgaggtgagcattgcatcactgcagagtatagtgggacaaacactgctgtctctgaaaaacctccagggatggcaactctaccatttccctgagcagcctgttcagtgcctaactaccctttccataaataaatctttccagatttccaatttaaactttccctggagcaactcaatgccatttaaggcagagttaaaagcttgcctcttaaatgatacatttctatcaactgtgtggkaaaaagctggtattatcttgcaatttgattttgtctaaaaaaaggccagaaagaggggccatgttgccttataacactgtggctggtagatcttttcttgagacattttgcaagaatgcatgagcatgcagtggtcatctatgatcagggacacagcttctggaacaaacaccaacttctctgtcctccacaagcagtacagasaagcttgctttcctggaaggataattttttctgttacttagctaaatggattttggagcctctattccaatgcttaggatttttgctttgaaaatc

SEQ ID NO: 74899 - DNA, 600 bp, Chicken  19866894357982_2
tttccaatttaaactttccctggagcaactcaatgccatttaaggcagagttaaaagcttgcctcttaaatgatacatttctatcaactgtgtggkaaaaagctggtattatcttgcaatttgattttgtctaaaaaaaggccagaaagaggggccatgttgccttataacactgtggctggtagatcttttcttgagacattttgcaagaatgcatgagcatgcagtggtcatctatgatcagggacacagcttctggaacaaacaccaacttctctgtcctccacaagcagtacagasaagcttgctttcctggaaggataattttttctgttacttagctaaatggattttggagcctctattccaatgcttaggatttttgctttgaaaatccaataggacaaaggaaaagctgtcatctttagcaggatttttatcctggcatttgagagggcttcattgattctggtgtaagaatgactgatacatgccatgaggagtaagagatgagagtctcaaagccaggctttgtccatgcaccccattgacaaaaatactctcaccatgagaaggcacaaccattcaccatggctctgt

SEQ ID NO: 74900 - DNA, 600 bp, Chicken  19866894357985_1
cggagaagaaccccaatgaaacatttccattcaaactccccaataatctgaagctttatgctaatgcacagagggaggcaaagcagaggagaacgacgctgggttgtttatttccatatgacccttaagggtcccttccaactcaaacaatcccgtggctctcaggctgtgccatgcagctccgagtgcctggaaagacatccactttcttcccaaacctcttcacgtgccacacgcaatctgcatatgagggaagagaatttcttccaacaatggtatgcattaatttataacattttsccaagatcctttatcaagtttcagtcgcgggtcaaataatttatgctttggaaagataatctctgcgtttagaatttatcgttccttcagaggttggttctcattagcgctcgtcatttccactgctcatgaaatacatctccacgagcagagccattcccactcgatatcaaggattcctccacgctaagtccatctaactgctgcaattatgaatcatctgacggagccgtaagttatgatcctcaatgaccactaatgaaggctgtctagcagttaaaatatcaaagcagcatatat

SEQ ID NO: 74901 - DNA, 599 bp, Chicken  19866894357992_1
  misc_feature (1)..(172): n is any nucleotide
nnnnnnnnnnnnnnnnnnnnnnnnnnnnnnnnnnnnnnnnnnnnnnnnnnnnnnnnnnnnnnnnnnnnnnnnnnnnnnnnnnnnnnnnnnnnnnnnnnnnnnnnnnnnnnnnnnnnnnnnnnnnnnnnnnnnnnnnnnnnnnnnnnnnnnnnnnnnnnnnnnnnnnnnnnnntgggcgtgggcatatccctagatgacctcaggccttccagtatctcatgtacattatcctggtttacctaagaaaagagaacggaactggtcttcccagttcactagatgctggattgttcctatgaytgggtttgcataggagacagtcaccaagtatatacacttaactgcataaaatctggtawtttgggatataggctgatgcaggaattatggcacagtgagaagtatattacttatagaatcatagaatatcccaagttggaagggacctgtgaggatcattgagtccaactccaagaaggagataaaaggaggacaagagttttaccatctgagcaaagcaagtcaattaagggaaagaaatgattcttrgtatcgctatgtgatgtttatgtacatacagaggggaaatgttcttcagc

SEQ ID NO: 74902 - DNA, 599 bp, Chicken  19866894357992_2
  misc_feature (1)..(113): n is any nucleotide
nnnnnnnnnnnnnnnnnnnnnnnnnnnnnnnnnnnnnnnnnnnnnnnnnnnnnnnnnnnnnnnnnnnnnnnnnnnnnnnnnnnnnnnnnnnnnnnnnnnnnnnnnnnnnnnnntgggcgtgggcatatccctagatgacctcaggccttccagtatctcatgtacattatcctggtttacctaagaaaagagaacggaactggtcttcccagttcactagatgctggattgttcctatgaytgggtttgcataggagacagtcaccaagtatatacacttaactgcataaaatctggtawtttgggatataggctgatgcaggaattatggcacagtgagaagtatattacttatagaatcatagaatatcccaagttggaagggacctgtgaggatcattgagtccaactccaagaaggagataaaaggaggacaagagttttaccatctgagcaaagcaagtcaattaagggaaagaaatgattcttrgtatcgctatgtgatgtttatgtacatacagaggggaaatgttcttcagcctgattaaagtgttggcaggaatatgtcctgctgagagaagctgcctggggctggaagc

SEQ ID NO: 74903 - DNA, 600 bp, Chicken  19866894357992_3
agaacggaactggtcttcccagttcactagatgctggattgttcctatgaytgggtttgcataggagacagtcaccaagtatatacacttaactgcataaaatctggtawtttgggatataggctgatgcaggaattatggcacagtgagaagtatattacttatagaatcatagaatatcccaagttggaagggacctgtgaggatcattgagtccaactccaagaaggagataaaaggaggacaagagttttaccatctgagcaaagcaagtcaattaagggaaagaaatgattcttrgtatcgctatgtgatgtttatgtacatacagaggggaaatgttcttcagcctgattaaagtgttggcaggaatatgtcctgctgagagaagctgcctggggctggaagcgtgtgctggaagttcctgaggctggaatggacccaatggctccccttgcatgtatttgtgctgactgggagataactaagccttcatctccacaaggatggtaggaagcctaggcaataaatgcctgggctccccttggcctgctccatagtggtcacagataggattgtgtggctggacagctggtgtgt

SEQ ID NO: 74904 - DNA, 600 bp, Chicken  19866894357993_1
gtcagaagtcaatgcaaacaaatggattgaatgtgacacagcactgggactgacatgagcagacacacaaagcatttatcaattactaaaaagtgagtgttaagatatctagccaagtataattaggggaaaataaaagcagagctcttagatctgtttgatttcctctgttcttcaaaaagtttaaatgagttttggttttagttcattcttttttattttactttagctgagattgctattgttttgtagaaaagcatctgtttactacttaaagcacaggaaaaaaccccatttacrggaaaaacctcagactacactagaagtcttgccastgggatttcttcagctgtgcatttcccttttgctcatcaggactgctcactttggttcatatgccaaaagcaaaccctaatgcaaaaccatggtggtcattctgtacacacataatgccagaatatccctgctgaggtgttattactcagtaaacagctttgcatggtgctggaatatttctggataaatgatgtgtgtgtgtttgtagtgactgacatccagtcattctgggggagttttaattttttttttcagtaggtgagt

SEQ ID NO: 74905 - DNA, 600 bp, Chicken  19866894357993_2
acacagcactgggactgacatgagcagacacacaaagcatttatcaattactaaaaagtgagtgttaagatatctagccaagtataattaggggaaaataaaagcagagctcttagatctgtttgatttcctctgttcttcaaaaagtttaaatgagttttggttttagttcattcttttttattttactttagctgagattgctattgttttgtagaaaagcatctgtttactacttaaagcacaggaaaaaaccccatttacrggaaaaacctcagactacactagaagtcttgccastgggatttcttcagctgtgcatttcccttttgctcatcaggactgctcactttggttcatatgccaaaagcaaaccctaatgcaaaaccatggtggtcattctgtacacacataatgccagaatatccctgctgaggtgttattactcagtaaacagctttgcatggtgctggaatatttctggataaatgatgtgtgtgtgtttgtagtgactgacatccagtcattctgggggagttttaattttttttttcagtaggtgagtttttttgactagcagcatgtggtgttagtcttatt

SEQ ID NO: 74906 - DNA, 600 bp, Chicken  19866894358000_1
acagctaccccgtgtgctcaagcatgtgcccaccaccactctgaaccatatcagctggaacagacagaaaaacaactagttgagtcctcacctcctgcttacaagcacggttatgaacaggatgcgtgccagttttattcgatggttttgcaatcctgccctatgcaactgccctcaaaagaagcatatccctggctaagggcagaaaaatgcaatctttccacagtgcagtctgttgttcaacttctttgacactgcaccattttcaatatattccatattggttagtattagcaaacwctcctcaaggagaaaaatgaaaccctccagatgaatcaagcaacagccacataccgagcaggtcactacagygaagcatatctccactttcccatttaagaatcttccatttctactgtactgcctgcagaggtggatccagagagccacctcaagcacttctcagcatttaaaaagcaagacaatccttcacctatctctgagttcttgccacttcttagctaacaaacttagaaagaaggaccttacaaggcctcacagcctagcragtcaaaatgcacctgtaggttgctgaccagt

SEQ ID NO: 74907 - DNA, 600 bp, Chicken  19866894358000_2
caactagttgagtcctcacctcctgcttacaagcacggttatgaacaggatgcgtgccagttttattcgatggttttgcaatcctgccctatgcaactgccctcaaaagaagcatatccctggctaagggcagaaaaatgcaatctttccacagtgcagtctgttgttcaacttctttgacactgcaccattttcaatatattccatattggttagtattagcaaacwctcctcaaggagaaaaatgaaaccctccagatgaatcaagcaacagccacataccgagcaggtcactacagygaagcatatctccactttcccatttaagaatcttccatttctactgtactgcctgcagaggtggatccagagagccacctcaagcacttctcagcatttaaaaagcaagacaatccttcacctatctctgagttcttgccacttcttagctaacaaacttagaaagaaggaccttacaaggcctcacagcctagcragtcaaaatgcacctgtaggttgctgaccagtacctattttctcactcaactgtgtataggtatcacttttacctgagacttcacatttctatggccttatttc

SEQ ID NO: 74908 - DNA, 600 bp, Chicken  19866894358000_3
atatattccatattggttagtattagcaaacwctcctcaaggagaaaaatgaaaccctccagatgaatcaagcaacagccacataccgagcaggtcactacagygaagcatatctccactttcccatttaagaatcttccatttctactgtactgcctgcagaggtggatccagagagccacctcaagcacttctcagcatttaaaaagcaagacaatccttcacctatctctgagttcttgccacttcttagctaacaaacttagaaagaaggaccttacaaggcctcacagcctagcragtcaaaatgcacctgtaggttgctgaccagtacctattttctcactcaactgtgtataggtatcacttttacctgagacttcacatttctatggccttatttccttcagcattaaattgaggtgaaccacaagactcctcagataaacatgatcttccttagggaattctacacacgcctgctctagaaactttcagtgtctactgaaacgtagataaagggtgagttatatttgcaacttcttgttcaaacagtgcaaagttacttaccccttatgcaataaaagtgacatctgccaa

SEQ ID NO: 74909 - DNA, 594 bp, Chicken  19866894358004_1
gagagttaaggctcttcagactgcttgcccttcaaatgacctctgactggacagaaatgtaaaactgccctgtatgaggattttctatgtctggtgggttaagcttggcctatgtgtgtgcacctagccagccagccagtcgcccctccgatggggatgggagcctggggtcagtactctctttgccagtccttcctctacacacttttcccctgctccagcatgcatcctctccacaggctgcagtccctcaggaatacccagctgttccagcacaggccctccatgagctgcgatatmtttgctccagtgaatgggtagtttcctcctttgacactggtgttccctctgctgttcctccctcctttcacactccacacctagcgtgttctgttccttcttaaatacattttcccagaggaagcatgcatgtggttgatgggctcagttgtggtctgcagtgagtccacttcagggacagctcaaactgcgtttagcacaggacagcccctgacctctctccacagaggccgtacctgtggtgtgctgactaccaaaacctttgtcacctacacccaatacacaattttccct

SEQ ID NO: 74910 - DNA, 600 bp, Chicken  19866894358009_1
cagttaaaatcatcagtctcttcagatgctgtccacagctgtacccacagctaccacagcccatttttaccatctgctgggtctcctttgagcacaaaacccagcgctactgaagaacagagtttaagtgactgggaacaacggttccctcaaggacatgctctgtttgagacctctcttcatatgtcacaagttggctgcgtgctgccacttgctgagatgttggaggatgtctgagacaatggggcagtgctgtccccgtcgtgctccctgaatggccgtgcatctgtcctcagctcygtggaaggacaaacactgaacagaggctttgtagactccagcagtgtatttttcagcaggttgtcttccacctccatctcttcagaagggagacaaccagcaaacacctgtgaggagtgttcctcagagttcaatgaattctcaactgggagycctttgtaagataatggctcagactgggccagcactaatggttgattacatgctggatcttcacatgtgttctcagagtaaaatccattttcctcctgggacactggcccatccgaacagtccatatcctcctcttgtcctggtaca

SEQ ID NO: 74911 - DNA, 474 bp, Chicken  19866894358009_2
ggacatgctctgtttgagacctctcttcatatgtcacaagttggctgcgtgctgccacttgctgagatgttggaggatgtctgagacaatggggcagtgctgtccccgtcgtgctccctgaatggccgtgcatctgtcctcagctcygtggaaggacaaacactgaacagaggctttgtagactccagcagtgtatttttcagcaggttgtcttccacctccatctcttcagaagggagacaaccagcaaacacctgtgaggagtgttcctcagagttcaatgaattctcaactgggagycctttgtaagataatggctcagactgggccagcactaatggttgattacatgctggatcttcacatgtgttctcagagtaaaatccattttcctcctgggacactggcccatccgaacagtccatatcctcctcttgtcctggtacagaaagaaattctggcctgtgatgcttg

SEQ ID NO: 74912 - DNA, 600 bp, Chicken  19866894358013_1
gcagctgcccattgggatggctgctgagcccaaggagtcgtcgcttttgcagttcaaggtgcaagaaatggggcagctggtgcctctcctgcccaatccatgcattcctatcagcagcaccaggtggcaaacacaagactatgatggaaataaaattctgcttcaggtatgtgtgtgcatggtgcttgcagacctgctgccttttgttttctttattccagcaaagagcaggactgattcaaaatggaaattaaggttttgcttgtccgtattttgttttcaattcatgaactcagcaakcgccttccagtgctatgatgtcgttgagcacagatccttacaatgcttccatactgttagcacctgaagtagaaagtattagtactttttttgagccgctgaattcacctttttcccttaactgcctaaatcagaggatagtagcagcctgctctctttctgatgtgaccttaaaaatgcttctgaaagcagagttttagcactgtgccatcccaaaccaggtgttttgcaagtacagcactgatgcaacatcacccacagtagttctgtaattgcagttgggcagaagggctaaataag

SEQ ID NO: 74913 - DNA, 600 bp, Chicken  19866894358017_1
ggaagggaggtcagccctgctgtagacgagccagagaagctgagcttcagctaagaaagcagcattgctaagcacctcccaggttagagacctgcagcttcaaaaaacaacacaatgtaagcaagccaactcttctgcatccgacaagcgaagccggctgagtcgattccacacgcgggtgattcacagcacacagacgggtgtgtttcggtgcgtaggagagggccatgagcgagctgtgcctgcactcgggggccctgcctacgtgaagcagagagctgcaggcatggagtgctgccygcaggtagtgaaaccacgctgcagagcactcccgcacagcgcagcgccccgggtgccgtgggctgttcagacaagcctgcctcaaaagtcggaggcgagaagaaagaagcacaggctgactccaaagggaaatrtgagcggtgagaagcagaactgcaaacaccgctccagtttacttcttccttgaagatgaaagagacacaccactacaaagggcgagtgctatttacagcctgtcctctatctgcgaaacacagtcctggttgcagctgccctaaaaataggcggaatcccacagga

SEQ ID NO: 74914 - DNA, 600 bp, Chicken  19866894358017_2
ctgcatccgacaagcgaagccggctgagtcgattccacacgcgggtgattcacagcacacagacgggtgtgtttcggtgcgtaggagagggccatgagcgagctgtgcctgcactcgggggccctgcctacgtgaagcagagagctgcaggcatggagtgctgccygcaggtagtgaaaccacgctgcagagcactcccgcacagcgcagcgccccgggtgccgtgggctgttcagacaagcctgcctcaaaagtcggaggcgagaagaaagaagcacaggctgactccaaagggaaatrtgagcggtgagaagcagaactgcaaacaccgctccagtttacttcttccttgaagatgaaagagacacaccactacaaagggcgagtgctatttacagcctgtcctctatctgcgaaacacagtcctggttgcagctgccctaaaaataggcggaatcccacaggaggaagctgacacatcccgaggtgacaggggtggggaagtcccagtgggtgtgaaaggatcacacgactgtgctggcgcttcagaaagatttacactctgatgtcagagagggcgttcagatagatgaggggaga

SEQ ID NO: 74915 - DNA, 600 bp, Chicken  19866894358033_1
ccaaagccgcatctgttaagggaaagtttgctgatttgtgctttttaactgtagcttgagagatcgagacttagaaaactaatttaaatttattttcattacacttcacattctttcactagaaataatgtcaaacggtagtgaatatcactgatgactgaatatttagatgcaaggactattgaagatgttcgccttcagaaacagcagagcactgcaatgctgggcaatgagagacccctctcctgtacaggcccacgagctaaagacaggaatcaccctcattttccatattctcawggraaaggaaataagagaaaggaacatgaagtagaagaatggttagtaaacaaagaaagtagaaattaaggaagtgtaatggtggtgacgggtgtacccagataggatgccaacccataagcctatgtccgactagaggtttagcctacagttgttaatagttaattattctttaagaaaatcaaaagatatttcatcaaagcaaatccctacatcaacatcttgcactgagcctggaagaaaagtgtcatgacatacggagttactgcataaatcagtatacttattatccccttgtat

SEQ ID NO: 74916 - DNA, 600 bp, Chicken  19866894358033_2
aagccgcatctgttaagggaaagtttgctgatttgtgctttttaactgtagcttgagagatcgagacttagaaaactaatttaaatttattttcattacacttcacattctttcactagaaataatgtcaaacggtagtgaatatcactgatgactgaatatttagatgcaaggactattgaagatgttcgccttcagaaacagcagagcactgcaatgctgggcaatgagagacccctctcctgtacaggcccacgagctaaagacaggaatcaccctcattttccatattctcawggraaaggaaataagagaaaggaacatgaagtagaagaatggttagtaaacaaagaaagtagaaattaaggaagtgtaatggtggtgacgggtgtacccagataggatgccaacccataagcctatgtccgactagaggtttagcctacagttgttaatagttaattattctttaagaaaatcaaaagatatttcatcaaagcaaatccctacatcaacatcttgcactgagcctggaagaaaagtgtcatgacatacggagttactgcataaatcagtatacttattatccccttgtataag

SEQ ID NO: 74917 - DNA, 600 bp, Chicken  19866894358036_1
atgtcctacatctctcagcaaaaaatctgctgctttttaagagcccttggaacgcttactgaggaaaaaaaaactcagcaaggttcactagctcagatacagtactgtgctaacagctggcacacagctggctaactcttgcatgaatagaacaaatatatgcctccctagaaaatgatatggcaaatatgtaacaactacattgaaaagaaagaaaacccactgaaggaagtagaggacattcacggcccagtttggaatggaaagccctttccatttccctattagagcataaacaakgtgcttgcagttcagaagggtctcacratggacatcaaaggatgaactacgtaataaagttagggcagataatcacaataaaaactctcctaaggatttgtttgcatcttgaaaattaagtctttgaaaatgtgttggcagccaccactgtcaacattttgtatattcttcattattatataaatattcaaatcttttcctaattttgctcagtttttggcttcagtatcagcctgtacaaaatgtgtttcatgggttaattatatactgcgtgaaaaagaatttccccagccagatttg

SEQ ID NO: 74918 - DNA, 600 bp, Chicken  19866894358036_2
tgctgctttttaagagcccttggaacgcttactgaggaaaaaaaaactcagcaaggttcactagctcagatacagtactgtgctaacagctggcacacagctggctaactcttgcatgaatagaacaaatatatgcctccctagaaaatgatatggcaaatatgtaacaactacattgaaaagaaagaaaacccactgaaggaagtagaggacattcacggcccagtttggaatggaaagccctttccatttccctattagagcataaacaakgtgcttgcagttcagaagggtctcacratggacatcaaaggatgaactacgtaataaagttagggcagataatcacaataaaaactctcctaaggatttgtttgcatcttgaaaattaagtctttgaaaatgtgttggcagccaccactgtcaacattttgtatattcttcattattatataaatattcaaatcttttcctaattttgctcagtttttggcttcagtatcagcctgtacaaaatgtgtttcatgggttaattatatactgcgtgaaaaagaatttccccagccagatttgaatcagctttcttccgtttctcttagt

SEQ ID NO: 74919 - DNA, 600 bp, Chicken  19866894358043_1
ttgatggccaagctatgtgaaattaattccacactaactgatacagaactaattacacaatggagacaactgctccatggagacactacactttgtgttgaccaaagctgtctcattagtcctgggagcttccttgctatctactacacttagtcagactacaagctcattgggttttagggcagtgtgaggtacattactaccttcacttgcatgctgcagaagtctgtaagtaatgaatcacatcatattagttggtagctgcctagcaggatttgtagatggattaaagtgctctcytgactttcaatggcagctaaatgcctacaggacttcttaaaaaaacattagtgcctagtgtcccatttagttgcataaagacctctataagtatctttgcaaattagaagaaaatgataatcaaaatctttaacatttgcaaaatgctttatgaccaataggtatatcaactattattagctcaaaggcagagctactcttatcactgccaccaatatctaagcgtgttttacttggcaaggtttaagcctaacggttcttatcataaaaagagaaagaaagtgtcatcagaactgattg

SEQ ID NO: 74920 - DNA, 599 bp, Chicken  19866894358048_1
  misc_feature (1)..(128): n is any nucleotide
nnnnnnnnnnnnnnnnnnnnnnnnnnnnnnnnnnnnnnnnnnnnnnnnnnnnnnnnnnnnnnnnnnnnnnnnnnnnnnnnnnnnnnnnnnnnnnnnnnnnnnnnnnnnnnnnnnnnnnnnnnnnnnnnatatagcaagctaggagcagaagaaggcatatggttgtgtcatctggatttgttctcagtgcattagaatcatgccatagaatcgtatcatagaatcataaaatgacttaggctggaggggaccttaaagatcatctagttccaactcccctgctgtgggcagggctgccayccaccagctcaggctgcccagggccccatccaacctggccttgagcatcatcaaggatggggcatccacaccttctctgggcagctgtgccagggccttctctgcagggctgttctcaatgagttcttctcccagtctgtactcctatctgggattacctcaactcgagtgcaagaccttgcacttggccttgttaaacttcattacattttcatgtgcccactttttgggagtgtccaggtccctctggatgaaaaaggttttgtgagtttcatggacaaacaagtatttgctgcagc

SEQ ID NO: 74921 - DNA, 599 bp, Chicken  19866894358055_1
  misc_feature (1)..(40): n is any nucleotide
nnnnnnnnnnnnnnnnnnnnnnnnnnnnnnnnnnnnnnnnaatggtcaagctctatcaaactgcaacatttcccataaataaaactgctgcagtgcatcagctggcaggaacccagcgcctaatctgtcccatcactgcctggagtgatagggacaccacagctggaaagatgccgttccgggaaacaatcacatctagtctgtacattcattcttggagattttctttggagttctgtctaatcagctttttcttattgttgtttttaaaaaatcttgtgactcctgctccagtgatcyggccaacaccaagggtgaggggctgagagactccaaataaatcagacatgagagccaattgaaagggggtgttcttggcagggctcctccaaaacacagaaacagatgtaaagaggcacaaaggagcagcaatgcctcactgctgctaacagagcccagcagggagctggttaaccccgcactggggcttgcaggctccagcctggctggcctgggacccagaaaggcaacgtcagcacatgcaggagttaaactggctctggtcagagcacactgccacacacgacatgaaatttggg

SEQ ID NO: 74922 - DNA, 600 bp, Chicken  19866894358065_1
aggttgggatgaatcagttaatggctttgtagtcactgactaagggcttcttgcctaactgcaaaggctgtggaaaaccaaattactttgttaactggaaattcaattctgtgttacaatatcttctgtgttcttccttcgcttagaagctgtttggaagttgttataacccttgagctcaatgtctgaataggggtaacgtagggtggaatccatctagcctgaatttaagaagttgaaaggtaaataccaatttttaagctcactttggaatcagaggaatgaaaaaatgcttttttycccaagtacttttgagtggattaaacaaatcagctctgcaagtaactatatcttcccagtgattataattctgtagagaacaacttaatagaaatgaataaatcagttatggtgctaattttccttgctggccatgcctgaatcctgcagaaaagacacatcgaaaaatatcaacttgtgcatgaaacagtttyttttgcttaagcaacggatttgcacatgcctttttcsttctcatttccagagaccaagggcagatgtagttttatctgttccttctgcaaaccaatattctgtatc

SEQ ID NO: 74923 - DNA, 600 bp, Chicken  19866894358065_2
ggtaacgtagggtggaatccatctagcctgaatttaagaagttgaaaggtaaataccaatttttaagctcactttggaatcagaggaatgaaaaaatgcttttttycccaagtacttttgagtggattaaacaaatcagctctgcaagtaactatatcttcccagtgattataattctgtagagaacaacttaatagaaatgaataaatcagttatggtgctaattttccttgctggccatgcctgaatcctgcagaaaagacacatcgaaaaatatcaacttgtgcatgaaacagtttyttttgcttaagcaacggatttgcacatgcctttttcsttctcatttccagagaccaagggcagatgtagttttatctgttccttctgcaaaccaatattctgtatcagcagctgtatagggaacagaatagtggagaagtgaagtaaatttgatcaatttattttctctgtgtgtatgagcatggaataagatccacaagctctgacgttgctctcaagctttcttttccagtagtgttgctcagtggctttgctgtttcattgcttattcatagcaaggaactgctcaagataagagat

SEQ ID NO: 74924 - DNA, 600 bp, Chicken  19866894358065_3
gaagttgaaaggtaaataccaatttttaagctcactttggaatcagaggaatgaaaaaatgcttttttycccaagtacttttgagtggattaaacaaatcagctctgcaagtaactatatcttcccagtgattataattctgtagagaacaacttaatagaaatgaataaatcagttatggtgctaattttccttgctggccatgcctgaatcctgcagaaaagacacatcgaaaaatatcaacttgtgcatgaaacagtttyttttgcttaagcaacggatttgcacatgcctttttcsttctcatttccagagaccaagggcagatgtagttttatctgttccttctgcaaaccaatattctgtatcagcagctgtatagggaacagaatagtggagaagtgaagtaaatttgatcaatttattttctctgtgtgtatgagcatggaataagatccacaagctctgacgttgctctcaagctttcttttccagtagtgttgctcagtggctttgctgtttcattgcttattcatagcaaggaactgctcaagataagagataaaaataaatcaacagtgtttattacaawccctgcat

SEQ ID NO: 74925 - DNA, 600 bp, Chicken  19866894358065_4
ctttttcsttctcatttccagagaccaagggcagatgtagttttatctgttccttctgcaaaccaatattctgtatcagcagctgtatagggaacagaatagtggagaagtgaagtaaatttgatcaatttattttctctgtgtgtatgagcatggaataagatccacaagctctgacgttgctctcaagctttcttttccagtagtgttgctcagtggctttgctgtttcattgcttattcatagcaaggaactgctcaagataagagataaaaataaatcaacagtgtttattacaawccctgcatttatttttaaaggtactgtggatgaacaactttccctaagtcattttgttacttgccaacttatcaggctgttgaagatgctgataagcatgctctaaatgctattttttgagtttctattaataattatactcattggagataactaaccaaggcaagtgttggttagttgtgcaatgagacatagagatcagataagcacttgcagggcacacacatgcttcctaggtttttatagaaaaaagacgtctctctctttatgtcatacaagatggaggtactttctcaataa

SEQ ID NO: 74926 - DNA, 600 bp, Chicken  19866894358065_5
acatgcttcctaggtttttatagaaaaaagacgtctctctctttatgtcatacaagatggaggtactttctcaataaagtggctgcttttgtcagcctaaatagctgtctgaaaagactgctcaacaatttactagctcataaagctgacaactaaatccaagagttgcaagcaatatcagggaaaggtatgaccaaactcgagaatccagctattcataacatttattttgagcctgccgaaggttgctcttattttgccaaactgctgagaggactgccactctccccatatcttcasaggactggaaatctttgatttgtagtgttcagaaccacgtgccaagtttccaccatgcctctstgtattactgaagatccagttgtccgttgcttctatgggaccatatcaagcctgggattaacctggcaacatataagtctctgtatgagatacatacagcagattctttaacagttggtaaaggactgatcactgtaatcagcaaattctaaggcataattttactcrtcacagtatagatgtagaaaacagataaagtgaatcactctctaaatgtttcattgtaaactcgctagc

SEQ ID NO: 74927 - DNA, 595 bp, Chicken  19866894358065_6
tactttctcaataaagtggctgcttttgtcagcctaaatagctgtctgaaaagactgctcaacaatttactagctcataaagctgacaactaaatccaagagttgcaagcaatatcagggaaaggtatgaccaaactcgagaatccagctattcataacatttattttgagcctgccgaaggttgctcttattttgccaaactgctgagaggactgccactctccccatatcttcasaggactggaaatctttgatttgtagtgttcagaaccacgtgccaagtttccaccatgcctctstgtattactgaagatccagttgtccgttgcttctatgggaccatatcaagcctgggattaacctggcaacatataagtctctgtatgagatacatacagcagattctttaacagttggtaaaggactgatcactgtaatcagcaaattctaaggcataattttactcrtcacagtatagatgtagaaaacagataaagtgaatcactctctaaatgtttcattgtaaactcgctagctgcccagttagctgctcaacacactgtgaaagaacaagcaacatgcatgtttattaca

SEQ ID NO: 74928 - DNA, 427 bp, Chicken  19866894358065_7
gagcctgccgaaggttgctcttattttgccaaactgctgagaggactgccactctccccatatcttcasaggactggaaatctttgatttgtagtgttcagaaccacgtgccaagtttccaccatgcctctstgtattactgaagatccagttgtccgttgcttctatgggaccatatcaagcctgggattaacctggcaacatataagtctctgtatgagatacatacagcagattctttaacagttggtaaaggactgatcactgtaatcagcaaattctaaggcataattttactcrtcacagtatagatgtagaaaacagataaagtgaatcactctctaaatgtttcattgtaaactcgctagctgcccagttagctgctcaacacactgtgaaagaacaagcaacatgcatgtttattaca

SEQ ID NO: 74929 - DNA, 599 bp, Chicken  19866894358072_1
  misc_feature (1)..(219): n is any nucleotide
nnnnnnnnnnnnnnnnnnnnnnnnnnnnnnnnnnnnnnnnnnnnnnnnnnnnnnnnnnnnnnnnnnnnnnnnnnnnnnnnnnnnnnnnnnnnnnnnnnnnnnnnnnnnnnnnnnnnnnnnnnnnnnnnnnnnnnnnnnnnnnnnnnnnnnnnnnnnnnnnnnnnnnnnnnnnnnnnnnnnnnnnnnnnnnnnnnnnnnnnnnnnnnnnnnnnnnnnnnntatttaagtacttctaagaacctaagcccaattcaaaagcaaatggcagctatgctcctaggtcaccatgtttctgagcaygccctcggagctctcagatgttttgaaatagccactttacaatacccttgaatgaagacctgaaatacacatgaaaagggaaagaacaaaatacacatcaagctgtactaccaatgcagttactcaagtatctacccatgtctaaccacagaacactgcagtggtcactgaaatgccactcccaatttatttttaggacctgaaagttcaatctgaagagcagataatgttgaaatgaactgctgcaaacatccaaatatcagtctcagcccttcagcttccagccagcaggtcaatgg

SEQ ID NO: 74930 - DNA, 600 bp, Chicken  19866894358072_2
gggaaagaacaaaatacacatcaagctgtactaccaatgcagttactcaagtatctacccatgtctaaccacagaacactgcagtggtcactgaaatgccactcccaatttatttttaggacctgaaagttcaatctgaagagcagataatgttgaaatgaactgctgcaaacatccaaatatcagtctcagcccttcagcttccagccagcaggtcaatggtcaggcaagcataatgtcaaggccaataaggtaattttattacagctgcctccaaatctttgcatgcacacgaaaacrtacaataaatcaatggagaagggtctgctgaagaactcatacactgtatttatagtgagttatcactgctggttactatagttacagaaatgctgcatgtgcttgttcactctctctccttttgtagtggaagatatttcataaataattacctttaatcgggtgaaactgttctaatttctccatgcaataagcaaycccacaatatccctatttatctgaaacaaaggaactcaaaagtaagaatagaaaactatagcaggctattctgaaaggcttttttgtatggattatcctttc

SEQ ID NO: 74931 - DNA, 565 bp, Chicken  19866894358072_3
agcttccagccagcaggtcaatggtcaggcaagcataatgtcaaggccaataaggtaattttattacagctgcctccaaatctttgcatgcacacgaaaacrtacaataaatcaatggagaagggtctgctgaagaactcatacactgtatttatagtgagttatcactgctggttactatagttacagaaatgctgcatgtgcttgttcactctctctccttttgtagtggaagatatttcataaataattacctttaatcgggtgaaactgttctaatttctccatgcaataagcaaycccacaatatccctatttatctgaaacaaaggaactcaaaagtaagaatagaaaactatagcaggctattctgaaaggcttttttgtatggattatcctttcatctgcacatcaattttgctgaaggtgcccaccatttccttcaatttaaaccatgaagtaaaggataaaatgaagagatcaccttagttcagaaaagacatttagctttctcagcttattctgaactttctaccaacacatatatttcaatgccataacttag

SEQ ID NO: 74932 - DNA, 600 bp, Chicken  19866894358095_1
actttgatgcctaaaggaatgtacaactcaatagttacctgttccaggcacaaaattacatttcccctccttattaggtgcattaggcctgagaatgtgagacgcaaatgtgggaatatatatatgacaacattcatcattgcataccacatgactatagccatcagtagcaggaagtcatctttttttgtaccttaacaggcaaaggacacactgaagccacttattttgctcacaaactatgatggaaagatgcaatcagagatcttccttagttgctgtgatttgatgcagaactaytgatgatgatttataccgaaggtatacctggtaaatttgcacagagcatgctctcctctttagcattcatttaactccttaagggtaattggagtactctgaaactttgtaggctctaaaattcatcagtggtgtgaatattttcatatacagaccaacgtgaaaatatctacttcattaaatatcagatacccatatggatttcgtttattttaactagtgacacactacagtaatactgaatttaaaaagagctccagaatctaatcaaattacccagtggtttatctgtaactatag

SEQ ID NO: 74933 - DNA, 600 bp, Chicken  19866894358097_1
taggatgctgtgttctagcactgtgtgccctcgtaagtagggtaatcttcatttatgcgtttgttacctatttatgcaggaggttaactagacaacttaacctggagttcttaaaactcagcagagccaagatcccggttagaatttagttctacagtatgtctgagccaaataactgcaggacagctggcaacatggacttgcactgttctacttagcctatcttcaaactctttccccctacccatgagctctgcgctctgtcccttgcttcctacctttttggtctgagggcagttytattgctggtttagtagcaggagtgcatggctgaggggaatggaattggactgtcctgttacgggcaaaaagcctaatagactgaaattaactcaagctgtgtggtaaaataagttatgaacgaagaaaggagtagagctttggcgttaaagtgcctgacctgtgcacagaaagatacacgtatctctaaacctttctgcaaagcacatgcttatgagctctgaactttctgaggaggaccgttggctgtttgaactgtctgaagaaatgaaggttgttctcctatgagagcctagtgac

SEQ ID NO: 74934 - DNA, 590 bp, Chicken  19866894358100_1
ctctcagcttccagttctaccaggcttgacaatcccacttttcccagttaaaaaaaaaagtcttttaatcatgatctccaaaaatctttaaagcatctaattccacatgttgcaatactggagaagctgagacactaaaggttgaacatactgacacactgcagaccacggctctgtaataatatgtgatttcactgccagagatgtactatccaactgccaactttatctgaaatgttcagcaaggaagtgcaggcacaggcagtgctttgcaaccccactgaaacatggagaaaggtrtagcgttagtatygtgctgcaacagcttatcctctcagattatagtacctgtttccagggtaggactagaagcagcatgactctgtagagattccaattccaggtgctgctttgcttcacgtgaggtcttctgctgatcacttacacaagactcagcactgctctctggtgggacaccgactgaatcttctgaattttcctgctctgctcctgtggcttgagatacgtgagaagagctttttcctgttgcaacaggaggtggcacttcttcctcattgatttttttgcct

SEQ ID NO: 74935 - DNA, 577 bp, Chicken  19866894358100_2
gttctaccaggcttgacaatcccacttttcccagttaaaaaaaaaagtcttttaatcatgatctccaaaaatctttaaagcatctaattccacatgttgcaatactggagaagctgagacactaaaggttgaacatactgacacactgcagaccacggctctgtaataatatgtgatttcactgccagagatgtactatccaactgccaactttatctgaaatgttcagcaaggaagtgcaggcacaggcagtgctttgcaaccccactgaaacatggagaaaggtrtagcgttagtatygtgctgcaacagcttatcctctcagattatagtacctgtttccagggtaggactagaagcagcatgactctgtagagattccaattccaggtgctgctttgcttcacgtgaggtcttctgctgatcacttacacaagactcagcactgctctctggtgggacaccgactgaatcttctgaattttcctgctctgctcctgtggcttgagatacgtgagaagagctttttcctgttgcaacaggaggtggcacttcttcctcattgatttttttgcct

SEQ ID NO: 74936 - DNA, 600 bp, Chicken  19866894358101_1
cccattctggatcatcacaaaataaaaactgtaattgaaggtcagaacaactgaacagttgtagtatgttacagtcttggttttcagtagctgtgttttcttaactgtgctttttttgtgttttcagtaggaaggtcagtgttcttcagatactcattgatgagacacagaaataaatctccattatgaatagcagtgatatgtaaaacatgcagtgtgctttagactttacatggaactttctagttactacgagcttttccttgcttttaacccgagagttagtctgctcaggatcayattcatgggatcttatcttgtgatcttcatatctcagccatttcaagccactttgagctgagattcaaagaaagtcactgttgagaatatttgaatttgtggatcagctcaatactgtaacaaacattcactaagaaaataaaaagtcaatacagagacataccgtcagttatgaagacttctctgctatgaatctaaagctaatcagaacagtgcaagatgattttcatttatagcatttgcatgaaatagcagaaatccattttgctcttacatggtaatctgtctccaatccttttc

SEQ ID NO: 74937 - DNA, 600 bp, Chicken  19866894358104_1
tagcatgagtttaggagttttcttttgttcaaatacatgttaaatacaaccttaaacatcaagctcagtgcccagttttgctaagcagatgggctgcaggtggtaggtgggttttagagatccttgcattttagaatcttactgtttgagagagaaactcaggttagcacctgtcaagagacatacttcaataatttggcaattaatattatctgcttacatacaggatcttacagcttcagaatcttatgacctctgttctctttcagtctgccaggtgaaaggtgtttggaagtgcartgtagccctgaagaaagattgtgaggaaaggagcagggagataaccttatgaaagctcattcagagttagatttttcactgtggtagtccctcagagaagctaatctgggatatgtgctccttttctggttaaaagcaaatgacttgttccttctgatatgggactgaagatcaaatttgtaagaactaaataatttttcatctttttctctcttgctatatgcagcttttgcagtgatccaggcagcttttgttctgttctgggactattctcagaggtatcacaccataatcagtttg

SEQ ID NO: 74938 - DNA, 600 bp, Chicken  19866894358104_2
agataaccttatgaaagctcattcagagttagatttttcactgtggtagtccctcagagaagctaatctgggatatgtgctccttttctggttaaaagcaaatgacttgttccttctgatatgggactgaagatcaaatttgtaagaactaaataatttttcatctttttctctcttgctatatgcagcttttgcagtgatccaggcagcttttgttctgttctgggactattctcagaggtatcacaccataatcagtttgagtttggtaagatatatgcagttcaatggtcagctccmtgttgggatatgttttgctgacaaggcaatgagtattcaggaataagaagaatggaaaaagcttttaaataatacataatgttaacaccacaaaaccactcacatcaatactgagatatgtgtcaagaaatcataggttttaaagtacatcatattcctattacttttgcttctttttatgtagggtttggtctgagatccttgttcaggtgttaattttgacttggcattatgagacatggaagaggatggtccaaatcttccacgtcaaaaagaactggcagagttgtctctcttcaa

SEQ ID NO: 74939 - DNA, 600 bp, Chicken  19866894358112_1
atttaagagaacagtcagaaaaacagtgatggaatgaaataaaatgtcaaaatatacctcaattcacgcatcttaaatactgcctaaaacaccactcccactttaaattcagagagcaaacaataagatagcatatactgtgctgagacatgctgaacctcagaagttaatccttaaaatagacttatttcaaaaagtctgcatcatccctttctgaatgagtctgctaagtaacaaaaatgttcctgacatttaaaactgcacacagtaaattgattacaatgcatcatttcctttggraaaacaatcacaaagcataccagctgaatcttgcagaggtaaataacaatgaatattaaagccttatataatctgtatctttgattacttttcagacaaagaacggatggaacgagcactcagctgagtttacaaaggaggggtttcatatctagcacaggccacattaacaaagtacttcaacaacacggaaagttcctatgctgctttatttgcaaattcataaccatgaactcccagttacaaaacatatcaagaagtgtcactggacatctaattccacccaaacaggtgagcaag

SEQ ID NO: 74940 - DNA, 600 bp, Chicken  19866894358112_2
ttcagacaaagaacggatggaacgagcactcagctgagtttacaaaggaggggtttcatatctagcacaggccacattaacaaagtacttcaacaacacggaaagttcctatgctgctttatttgcaaattcataaccatgaactcccagttacaaaacatatcaagaagtgtcactggacatctaattccacccaaacaggtgagcaagacacattcagaacatgccccaattgcttccgtaaagatgcagttcctttcccacacattattaagaagtatttcgaaaaccaatccaggrttcactaccacartggcttcttttccttttttgatacttactgttagagttggtttgaaacaatgctggtaaaaatatcctttctagttgccactctggccacatctctgcccgggtttcatgctgttccccaccacctcctccttgcagatgaaatgagtagctacctcaccttcagctcttgctacttgttgtctgctcctgtctgtgcttcccccctcataattacaggaatgcactgttacatatgctatctgtgttctgttgtgaaagcattaaaaaagaaagaagaagaaagga

SEQ ID NO: 74941 - DNA, 600 bp, Chicken  19866894358112_3
cggatggaacgagcactcagctgagtttacaaaggaggggtttcatatctagcacaggccacattaacaaagtacttcaacaacacggaaagttcctatgctgctttatttgcaaattcataaccatgaactcccagttacaaaacatatcaagaagtgtcactggacatctaattccacccaaacaggtgagcaagacacattcagaacatgccccaattgcttccgtaaagatgcagttcctttcccacacattattaagaagtatttcgaaaaccaatccaggrttcactaccacartggcttcttttccttttttgatacttactgttagagttggtttgaaacaatgctggtaaaaatatcctttctagttgccactctggccacatctctgcccgggtttcatgctgttccccaccacctcctccttgcagatgaaatgagtagctacctcaccttcagctcttgctacttgttgtctgctcctgtctgtgcttcccccctcataattacaggaatgcactgttacatatgctatctgtgttctgttgtgaaagcattaaaaaagaaagaagaagaaaggaggaaaatatgcct

SEQ ID NO: 74942 - DNA, 600 bp, Chicken  19866894358112_4
tagtctgcatttaattacaacatttctagaaagctctgtcttcagtatctgatgtgtatttatccctaaatatggtttagcttttgcctaacaataaaaatatcacaaaagggagttaaacgtgacagaacgtaagttgcaactgaccagtggttaagcttctgcaatgcttcccattttcagctttttcaaaatcaactatgcaattaaacagtacaaaatttatttaccacccatttatcaaagttcttttgttttgccatcagctgtcctttctagttcagattctgtactgttaargttatttgcctccatttttactgaacagattaagatttattatacaaatcagacatcacctatgaccccaactgtaacactatctgcatgctcaggatttcaggtaaattagatcagggtgactttgagtcacagtctcaaatagaccctgcacagaggtgttacctgttttagtaaggtgacttcagttgcttagagaacctcgcataaatctttcacatcacagttggcagtacagaagatatcctgatttatccaggaatgctactcccatggcagatcccaaggcaaaaacttcag

SEQ ID NO: 74943 - DNA, 599 bp, Chicken  19866894358120_1
  misc_feature (1)..(15): n is any nucleotide
nnnnnnnnnnnnnnnacaggattaatatcagtgcagctgtatttttgtcactttagctaaccacaaatattctgcttctacatgacattaccttaatgctagctaagtataacttgccatgctctggggttatttgctgttgcaattttagcttgcgttcatactttgtcccaagaaataaaaaaaccctaccctacctgtctaaaataacttttgccagagccctgctcatctgtccctactttcaatttctgctatctttgcagtttttgttattaatatatataaccccgattaagmaacagagttaggccacaggctttctgctctattaggccttatgatctgttagaccacagtctttatgcttaagttatagacgtgacctggatttttccatctttcagagcatctatatagtagcagttagttaatctgaagagaaaaaaaagagcaacgtctaatgcctgaatcttaaccatgagacataaaaaacgtgtttagaactctgtctgaaccagcacaggttaaattaacactgagaagcaaggtagcaaagaacaaataacttggaagagactgtacgcccaacagggagg

SEQ ID NO: 74944 - DNA, 600 bp, Chicken  19866894358120_2
attttagcttgcgttcatactttgtcccaagaaataaaaaaaccctaccctacctgtctaaaataacttttgccagagccctgctcatctgtccctactttcaatttctgctatctttgcagtttttgttattaatatatataaccccgattaagmaacagagttaggccacaggctttctgctctattaggccttatgatctgttagaccacagtctttatgcttaagttatagacgtgacctggatttttccatctttcagagcatctatatagtagcagttagttaatctgaagagmaaaaaaagagcaacgtctaatgcctgaatcttaaccatgagacataaaaaacgtgtttagaactctgtctgaaccagcacaggttaaattaacactgagaagcaaggtagcaaagaacaaataacttggaagagactgtacgcccaacagggaggctatagtgacacaaactggaaatgatatgacaataaagaaaaaactaataaactgtcagaggtcctgttcaaaatacactcattgattgatgcttctaaaaacagaaaagtctaagtccaaacagaaagatcatgggctgcaaag

SEQ ID NO: 74945 - DNA, 599 bp, Chicken  19866894358123_1
  misc_feature (1)..(62): n is any nucleotide
nnnnnnnnnnnnnnnnnnnnnnnnnnnnnnnnnnnnnnnnnnnnnnnnnnnnnnnnnnnnnncccctctgcaaggctactctcaaggactgctcctcctagtctatgtatatgcctgggattcctccagaccaagtgcaaaaccttgcactttgctatgttgtacctcattagattcatccaggcccaccttttgagtctgttgaggtccctctgaatggcttcccttcattccattgtgtcaactgcaccactcagcttgctgtcatcagcaaaactgttgagggtgcgctcaattccrtcatcgatgtcactgataaagatgttaaagagcaccagtcccaagacggtcccctgggggacaccactcgttactggcttccacctgaacgtagaaccactgatcaccaccctttgtctgcagcctttcaaccaattccttatccacctggtagttcatctgtcaaatatacatccctccaatttggagataaggatgtggtgggggaccttgtcaaaggccttgccctaaatgacactggtggccttcagaatcagttgtctgcagaatcagtttttgatatcatattttttatttac

SEQ ID NO: 74946 - DNA, 600 bp, Chicken  19866894358126_1
gctaaggaagaatcaggggggaaaaaaatgcagaattcagcttctttaggttccatcagcttcagtcaaacatagtactccctacgtaagcatttttagaacacttaaggacttcatataaagttaagactaaactaaaagactactcaatgtttaagttcagcatacattatgatgacaactagagaaataacagataatgtctttcacaaaaagatgaagttcctttcttgtttaaataatttattcagaaacactgcaaatgattcaagtacattctgtgaaataggaaaagtcaamaggaattagctttcacgcatagatctggggaggagagccagggtgggggaaggaagcagttctgtttcaaaatgaaccagcagatatcagcacaagcgacaatatgatccaacaacaatctacatagggctgctgtgttctgaggtagtactcaaacaaatggattaacaaaagctactaacaaaacaacaataraagtgcctgcaggaacaagcaggaagtacagacttccaggcttaaccactgtatgcatagaagattctaaattctcttgtagcccagagccctaatggctactat

SEQ ID NO: 74947 - DNA, 584 bp, Chicken  19866894358126_2
gataatgtctttcacaaaaagatgaagttcctttcttgtttaaataatttattcagaaacactgcaaatgattcaagtacattctgtgaaataggaaaagtcaamaggaattagctttcacgcatagatctggggaggagagccagggtgggggaaggaagcagttctgtttcaaaatgaaccagcagatatcagcacaagcgacaatatgatccaacaacaatctacatagggctgctgtgttctgaggtagtactcaaacaaatggattaacaaaagctactaacaaaacaacaataraagtgcctgcaggaacaagcaggaagtacagacttccaggcttaaccactgtatgcatagaagattctaaattctcttgtagcccagagccctaatggctactatactggcagcaaacagccatttgcttctgctattaagccctacaaccagtttctaacagtttgatgacttcataccccagagcaagtactacacttaccagatggcgagaaaccaaagaaacagaagtaaccagacaaattgagaagactgagtaaattatgcccagctacatgcaacca

SEQ ID NO: 74948 - DNA, 600 bp, Chicken  19866894358127_1
tttaaattcaaaatgacacacatgtttcaggggaaaatagttatagtaagactaaaaggctaagggagaaagcctcagcaaagcgtctcctcccacatacatgcttttcccattaaacacagtgtgtggattgtgataagacccatttgtaaatgatttactcatgctgattgctcctattcccccccacatgttatcctcagatacagccatctcagctacctatgaccaccggggaccttgagagaagccagcttgtgaaaacgtcttcatccaaacaacagcaagtataatactttmacagcagatgcaacaggaaaagcacagttgatggctgcatggaggtttatctacactggatatccatcctgcatggaaaagatattttgctgtcagtattttataatactcttctgaaatgtggggtacatattctggtgttcagatagcaactggttcaaagctgacacagttactacaacatggtcatatccaagggacttccgctacttgacttctgcttgagcatcaacctcttggaaggctgagaaatgccccatgggaatcccattccctacagtatctttcttctccttgcac

SEQ ID NO: 74949 - DNA, 599 bp, Chicken  19866894358128_1
  misc_feature (1)..(225): n is any nucleotide
nnnnnnnnnnnnnnnnnnnnnnnnnnnnnnnnnnnnnnnnnnnnnnnnnnnnnnnnnnnnnnnnnnnnnnnnnnnnnnnnnnnnnnnnnnnnnnnnnnnnnnnnnnnnnnnnnnnnnnnnnnnnnnnnnnnnnnnnnnnnnnnnnnnnnnnnnnnnnnnnnnnnnnnnnnnnnnnnnnnnnnnnnnnnnnnnnnnnnnnnnnnnnnnnnnnnnnnnnnnnnnnnnctccacctgaacttcttttagttgtaggtgatagaaagcaagaggcaacgcctggcagcagcgtgggtggaacayygagctgacttcagcactcggctgtctttagggtgaaataacagcacattaaagagcgtagtaaaggactgcctgaagaaggtgatccaaacagtgacaacaaagctaggccactagaaaacagcaggaaaactacaagcagtctgtcacttgtggataaagaatcctgtttgtttcagttctgaaaakctcaggtctacatcagaaggttatcaccccattcatttcgtcccgttcctgcaactcttcccaatgctccatatgtaactacaactgaaagcactcttctggcagctgca

SEQ ID NO: 74950 - DNA, 599 bp, Chicken  19866894358128_2
  misc_feature (1)..(224): n is any nucleotide
nnnnnnnnnnnnnnnnnnnnnnnnnnnnnnnnnnnnnnnnnnnnnnnnnnnnnnnnnnnnnnnnnnnnnnnnnnnnnnnnnnnnnnnnnnnnnnnnnnnnnnnnnnnnnnnnnnnnnnnnnnnnnnnnnnnnnnnnnnnnnnnnnnnnnnnnnnnnnnnnnnnnnnnnnnnnnnnnnnnnnnnnnnnnnnnnnnnnnnnnnnnnnnnnnnnnnnnnnnnnnnnnctccacctgaacttcttttagttgtaggtgatagaaagcaagaggcaacgcctggcagcagcgtgggtggaacayygagctgacttcagcactcggctgtctttagggtgaaataacagcacattaaagagcgtagtaaaggactgcctgaagaaggtgatccaaacagtgacaacaaagctaggccactagaaaacagcaggaaaactacaagcagtctgtcacttgtggataaagaatcctgtttgtttcagttctgaaaakctcaggtctacatcagaaggttatcaccccattcatttcgtcccgttcctgcaactcttcccaatgctccatatgtaactacaactgaaagcactcttctggcagctgcag

SEQ ID NO: 74951 - DNA, 599 bp, Chicken  19866894358128_3
  misc_feature (1)..(36): n is any nucleotide
nnnnnnnnnnnnnnnnnnnnnnnnnnnnnnnnnnnnctccacctgaacttcttttagttgtaggtgatagaaagcaagaggcaacgcctggcagcagcgtgggtggaacayygagctgacttcagcactcggctgtctttagggtgaaataacagcacattaaagagcgtagtaaaggactgcctgaagaaggtgatccaaacagtgacaacaaagctaggccactagaaaacagcaggaaaactacaagcagtctgtcacttgtggataaagaatcctgtttgtttcagttctgaaaakctcaggtctacatcagaaggttatcaccccattcatttcgtcccgttcctgcaactcttcccaatgctccatatgtaactacaactgaaagcactcttctggcagctgcagttctctgcagctctccactagacctaattcctctattctgacttttaaacaccttcaaacggcattgcagagaacagtacaatatgctgataaagcatctttccccccttctgttttagcaatgtgcctgaacttctttgcccacttttgtttaacactcatctattcagtctgccactcagctatgc

SEQ ID NO: 74952 - DNA, 600 bp, Chicken  19866894358130_1
agggacaattttcctgcatgccagaggagaagggcagcttttgatggcaggtcattcagctatagggtgccactggacttaactgtatcttatgcaagagatagctccctctggtcttaactgaaagcttcctgcccagggggtctggcaggaatctccacagcatttccattttgttcagcagtctgtatttggttgaccagttcaaatgcacctgttttcatagaaactgctccctttgttcgatgtacattccagcacagtgttaaaacccaccaaacatggtcaaaaggtcactgyttgtgcctcagctcagctcagctctgtygactgcaccattcggactgagagccgctacttctggagcaccctgtatggcaaggaagctgcacgtgcctgtccggggaggagcagctgctcagctttgccatctcaccagatgcaggctgctggggataaccaagccttagccagtcatttatcatcgtgctgtttttcctcacgtggctttcagctatctgttggggaggcccctgtgcttaggttttcccagctggtctgatttcatgccaagggctgaccaggcttgtttcctcacat

SEQ ID NO: 74953 - DNA, 600 bp, Chicken  19866894358130_2
gaagggcagcttttgatggcaggtcattcagctatagggtgccactggacttaactgtatcttatgcaagagatagctccctctggtcttaactgaaagcttcctgcccagggggtctggcaggaatctccacagcatttccattttgttcagcagtctgtatttggttgaccagttcaaatgcacctgttttcatagaaactgctccctttgttcgatgtacattccagcacagtgttaaaacccaccaaacatggtcaaaaggtcactgyttgtgcctcagctcagctcagctctgtygactgcaccattcggactgagagccgctacttctggagcaccctgtatggcaaggaagctgcacgtgcctgtccggggaggagcagctgctcagctttgccatctcaccagatgcaggctgctggggataaccaagccttagccagtcatttatcatcgtgctgtttttcctcacgtggctttcagctatctgttggggaggcccctgtgcttaggttttcccagctggtctgatttcatgccaagggctgaccaggcttgtttcctcacatgcacacttccccatgtctggacaagcct

SEQ ID NO: 74954 - DNA, 600 bp, Chicken  19866894358130_3
ttctggagcaccctgtatggcaaggaagctgcacgtgcctgtccggggaggagcagctgctcagctttgccatctcaccagatgcaggctgctggggataaccaagccttagccagtcatttatcatcgtgctgtttttcctcacgtggctttcagctatctgttggggaggcccctgtgcttaggttttcccagctggtctgatttcatgccaagggctgaccaggcttgtttcctcacatgcacacttccccatgtctggacaagcctacttgttttttcactgcaagctgttagctygccttttcccatttcagtgctccattctacactggctaagtatgtggtgcttcagtcatgtaggcagcaagggtgggtgcaactcctgcaaagcacaaaactgtacacagattttagatgagcgctatccatctcttcctgtgctctacagctatgggtaactcctcaaaaggcaaatgtcttcgcacctaacctggatgctcactgagacggcagagttcagagaggctggagtgacattcaaagagaaagacctagtaaaaataatgacagcaaataaactgctgtgcattatcagca

SEQ ID NO: 74955 - DNA, 600 bp, Chicken  19866894358142_1
tgactgctttgctcttgctcacctccacaagctcggaatttactctggtgcaggtgctgcaggcaggagctccttacacatctctgttaacatgctctgatgctttaccccctttttctattcccaagaaaagagatgctggctgaagccaagcatatgtcgaagcagaggtcctgagctgagctgtttttttcactttatgttgcagacagcacagaggctcaacacttgtatccacaccatgggtctacgccagccctgtgcatgtctgcttgggtttgctgggcttttggtttcctytgttccaggctttggcagttttcattgcatgctgagagcagggagagggcaaacagattgtatcaaatgctgacttgctcctggttttgtctctcattctccattatctgactcttttgatggtccagcgtgactttctggcagctggcaatgtggatgaggcttcatcagcaacaagcaaagtccacagaagaggatctagatgagactgaacatcccagtgggatccatgtgaatttttattttgcaatgagtctgagacttgtcattagctgacttatttaattacagttttaaaaa

SEQ ID NO: 74956 - DNA, 599 bp, Chicken  19866894358144_1
  misc_feature (1)..(28): n is any nucleotide
nnnnnnnnnnnnnnnnnnnnnnnnnnnncgcgcagctgctgcccacccgcatggacatgagttaagtaatgcagagagggacgcagctctgtggggccgggtgagacctgaggtgtccccacatccccacaccccccatggccggagccgtccccgcggccccatcccaccactcagtccatgttggcgctgcccgacctggagatgctcagcgtctgggctgacgccgacacgtcctcgtgctccacggggctgtgataatccgaggtgatgtcgggctcacggggcagcggcacggcygccagactgaaggagttggctgagcccttgcgcaggcactgcgagtagaggccaagcagcaggtccagcttgtgctcgatggactgcacctgtgggcatgggatgagcgggtccccatgggacggtgacacggccccggtggccgtcccctccgtacctgtctctccaccttgaccacacggcccatcatgctcagctcatccaccagctctgcatccagcaccgccttctcccccttctctcggatcttcttgtcagcagcagggccccccctgcccacaatctggtccacgctgcgg

SEQ ID NO: 74957 - DNA, 364 bp, Chicken  19866894358144_2
gttggctgagcccttgcgcaggcactgcgagtagaggccaagcagcaggtccagcttgtgctcgatggactgcacctgtgggcatgggatgagcgggtccccatgggacggtgacacggccccggtggccgtcccctccgtacctgtctctccaccttgaccacacggcccatcatgctcagctcatccaccagctctgcatccagcaccgccttctcccccttctctcggatcttcttgtcagcagcagggccccccctgcccacaatctggtccacgctgcggggagggggcacggcrcatcgttcccaatggagcggggtcacggagggccccattgatggccatggggccatcaggatgt

SEQ ID NO: 74958 - DNA, 599 bp, Chicken  19866894358153_1
  misc_feature (1)..(124): n is any nucleotide
nnnnnnnnnnnnnnnnnnnnnnnnnnnnnnnnnnnnnnnnnnnnnnnnnnnnnnnnnnnnnnnnnnnnnnnnnnnnnnnnnnnnnnnnnnnnnnnnnnnnnnnnnnnnnnnnnnnnnnnnnnnnactctgaggagcagtgaaatcctgtaatgggatctgacagctctgggcttctgggaagttcccaaacctgaaataaactgaatgcttttaacattcaacagagttggtttcaacagctgtagaaactcttgaacttgctccatgtaacatttttgtgtgcaaacaaatgtcagccrgtgctatagggcatattttagaggagctcaggaccagatttccaggcagtaaaagtaattatggctgatcaagttttggaatatacagggaaaataaaaatatttatttaagaaactgaaaatattttaaatctctgctcagctcttgcttgccataggcactttatttcaaacaatcttttctactgttttgcatcccacagcaataggctggcttttctagtctccttcaggaaaaaagaaaagaaaagaaaacaaaataaaacaagtgaatcagagcacagcttctaccatcaaac

SEQ ID NO: 74959 - DNA, 538 bp, Chicken  19866894358153_2
tatttaagaaactgaaaatattttaaatctctgctcagctcttgcttgccataggcactttatttcaaacaatcttttctactgttttgcatcccacagcaataggctggcttttctagtctccttcaggaaaaaagaaaagaaaagaaaacaaaataaaacaagtgaatcagagcacagcttctaccatcaaactcaaatttacacacacacttttcctcgtgtctagaaacatgtatcgtatgactaaatctcttatgtacatgtatttaaatgcagataaattgtcatgtcatttgwgtcagggtatacatacagtgtgtctgtatwccttttcttaaccacatggatttgctttatttagaagaattcttccatagaagtatctccatcaaatgttaagctgtctgtgaaagactgggctaaaaaaaaaaaagatacagggtgctcaaaagtacagcttgtcacgcacatcttgtaattcttatttaagactggatagtgaaatatcaacatctatttacagtaactcgctatg

SEQ ID NO: 74960 - DNA, 508 bp, Chicken  19866894358153_3
ctgctcagctcttgcttgccataggcactttatttcaaacaatcttttctactgttttgcatcccacagcaataggctggcttttctagtctccttcaggaaaaaagaaaagaaaagaaaacaaaataaaacaagtgaatcagagcacagcttctaccatcaaactcaaatttacacacacacttttcctcgtgtctagaaacatgtatcgtatgactaaatctcttatgtacatgtatttaaatgcagataaattgtcatgtcatttgwgtcagggtatacatacagtgtgtctgtatwccttttcttaaccacatggatttgctttatttagaagaattcttccatagaagtatctccatcaaatgttaagctgtctgtgaaagactgggctaaaaaaaaaaaagatacagggtgctcaaaagtacagcttgtcacgcacatcttgtaattcttatttaagactggatagtgaaatatcaacatctatttacagtaactcgctatg

SEQ ID NO: 74961 - DNA, 488 bp, Chicken  19866894358154_1
gctgcccagaaatgctggcgccaggactgggagggatgaaggattccttcgacccctgtttacatcactctgtccccagtgctttcacctagcataggatggagcagcggtgtctgtgggtctgtctgtcaccctgctgctgcccatctctcagctttactgtgttgggatctgtcctgttggcagacacaagttggattccctcctgagcagcgagctcctaaccttaatgactctatgagcgtatgatctgtgatgcttgtttggttggcagctcctggcccgcatgcaccgcgccgkgggcagctgggatgggggctttgagagtccctatttaaataagatcaacctaaagccaaagctgcccgtttgttctccaacgcggcgatgcgggaacacatctgtgagccacatggtgatgggttcagggccaggtggggactgggcagcatgcacagagcctggacgtggggatgggatgggatggg

SEQ ID NO: 74962 - DNA, 600 bp, Chicken  19866894358155_1
ccactgtccatgtcaatatcaatatgttgacaagatgttgaagaaaccggtcccagaacagacccctggggggcaacattcatcaccaacctccgcctggacatacagctgctgacacaaaactctgactgcaaccatccaaccattcaacagaccacccttcaaatccatatttttgcaatttagggatcagaatgtgacgtgggaccataccaaaggccttgcagaaggccaggtaaatgaaatcagttggtcttcctttgtctactaatgcaatcacgccatcacagaaggccaccrgattagtcaggcacaaactgctgtcggtgaagccatgttggttgtcaccagcatcacctcctcatattgcatgtgccttaacagaaggatcagttccatgatctttgcagccacagaggcttactggcctgctgtttcccacatcttcctttctgactttctcaaaaatgggagtgatgtttcccttttttctcatcacctgacagatatgacttccaaatataatggagagtggcttgacaaccacattaggcagttcttccaggaccccatgatgtgtatcatcccatcccatagact

SEQ ID NO: 74963 - DNA, 600 bp, Chicken  19866894358163_1
ttggcgaggcgatgctagtgaggacctttgctctccagccctccaaaagtcatgcagggcaagcggaagggggctgccagaggtgacatgcaggaaggaggctttcaattttaatggagattcttacgatgacagtctatgcaaataggtacatgaaagaggagaggaaacagactgggggaagggggagagaaattaaccctggttcggatttcaaagcaaggcaggaataatttttgtagctaagaatagttgcaatgcaccttgttccccttggtctctgccctgcataatccttaygttcagggtctgaaattacagctggggggagggaggccagtgttcacagtccaggaaacaccgctgccaggcctcggctccatcacctttatggctcctttgtgtcaccaaagccagctccaaacaaaggactgggccctctgctttgcagggctcttgcagttgttttgcaaatgagattgcttgattggtgagcaaaatcagagatcttttgaagatgttgcccaggaaagggggaggagggtctcagccatcccccacagcaagcagtaggatctgcctgattgagaatgaactgaa

SEQ ID NO: 74964 - DNA, 600 bp, Chicken  19866894358169_1
tgacaacttgtgtgggctggtgagcggggaggccgtgccggtggtgacgtactgtatcagcatattccttgcttagagagctgctgagatagaaatccaaggctgaaatgctacttgtcagcttggactgtagagagcagcagtttagtatttaatcttagagttggaaataagacaacctgaaaggatatctgactttgtttttaatgctcgatacaaggaggattaaggaaaggaaggtaatggtgaggctaacagatgttcaaaaaacgctctgataaggctgagatggcattgcgygtaggtgagagactggtaagtttcagggatgcatcttaatgagtagttggggtgtgctggttttcagaaycttgtacctatgtattactggataggagagcatctctcaagtccagaaatccggtgttcctggtaacccgagtcttttagtttcatatttgmatgtatggtgtttatatgggatcagaaatagctccgtaactctggytattaggttgaagcaaggtgttagmtgatgttctgatggaccgccttcacacatctaggtgcaagtcctgtggctttttgaggctgtgctct

SEQ ID NO: 74965 - DNA, 600 bp, Chicken  19866894358169_2
gcttagagagctgctgagatagaaatccaaggctgaaatgctacttgtcagcttggactgtagagagcagcagtttagtatttaatcttagagttggaaataagacaacctgaaaggatatctgactttgtttttaatgctcgatacaaggaggattaaggaaaggaaggtaatggtgaggctaacagatgttcaaaaaacgctctgataaggctgagatggcattgcgygtaggtgagagactggtaagtttcagggatgcatcttaatgagtagttggggtgtgctggttttcagaaycttgtacctatgtattactggataggagagcatctctcaagtccagaaatccggtgttcctggtaacccgagtcttttagtttcatatttgmatgtatggtgtttatatgggatcagaaatagctccgtaactctggytattaggttgaagcaaggtgttagmtgatgttctgatggaccgccttcacacatctaggtgcaagtcctgtggctttttgaggctgtgctctgagttctgttaccttgggtctgcagcagctgcttgttgatgctgctgtttgctgccaggcagaaggcaga

SEQ ID NO: 74966 - DNA, 600 bp, Chicken  19866894358169_3
gttggaaataagacaacctgaaaggatatctgactttgtttttaatgctcgatacaaggaggattaaggaaaggaaggtaatggtgaggctaacagatgttcaaaaaacgctctgataaggctgagatggcattgcgygtaggtgagagactggtaagtttcagggatgcatcttaatgagtagttggggtgtgctggttttcagaaycttgtacctatgtattactggataggagagcatctctcaagtccagaaatccggtgttcctggtaacccgagtcttttagtttcatatttgmatgtatggtgtttatatgggatcagaaatagctccgtaactctggytattaggttgaagcaaggtgttagmtgatgttctgatggaccgccttcacacatctaggtgcaagtcctgtggctttttgaggctgtgctctgagttctgttaccttgggtctgcagcagctgcttgttgatgctgctgtttgctgccaggcagaaggcagacaggtccttgtctctggttgtagacttgggaggtgcttgggctgtgctgcgagctcctgggaacagttcaggtccagatttctggtagaggt

SEQ ID NO: 74967 - DNA, 600 bp, Chicken  19866894358169_4
gctcgatacaaggaggattaaggaaaggaaggtaatggtgaggctaacagatgttcaaaaaacgctctgataaggctgagatggcattgcgygtaggtgagagactggtaagtttcagggatgcatcttaatgagtagttggggtgtgctggttttcagaaycttgtacctatgtattactggataggagagcatctctcaagtccagaaatccggtgttcctggtaacccgagtcttttagtttcatatttgmatgtatggtgtttatatgggatcagaaatagctccgtaactctggytattaggttgaagcaaggtgttagmtgatgttctgatggaccgccttcacacatctaggtgcaagtcctgtggctttttgaggctgtgctctgagttctgttaccttgggtctgcagcagctgcttgttgatgctgctgtttgctgccaggcagaaggcagacaggtccttgtctctggttgtagacttgggaggtgcttgggctgtgctgcgagctcctgggaacagttcaggtccagatttctggtagaggtcacagggaggtatgacaggatggcctcagcgcaggccgtgccattt

SEQ ID NO: 74968 - DNA, 600 bp, Chicken  19866894358169_5
aggaaggtaatggtgaggctaacagatgttcaaaaaacgctctgataaggctgagatggcattgcgygtaggtgagagactggtaagtttcagggatgcatcttaatgagtagttggggtgtgctggttttcagaaycttgtacctatgtattactggataggagagcatctctcaagtccagaaatccggtgttcctggtaacccgagtcttttagtttcatatttgmatgtatggtgtttatatgggatcagaaatagctccgtaactctggytattaggttgaagcaaggtgttagmtgatgttctgatggaccgccttcacacatctaggtgcaagtcctgtggctttttgaggctgtgctctgagttctgttaccttgggtctgcagcagctgcttgttgatgctgctgtttgctgccaggcagaaggcagacaggtccttgtctctggttgtagacttgggaggtgcttgggctgtgctgcgagctcctgggaacagttcaggtccagatttctggtagaggtcacagggaggtatgacaggatggcctcagcgcaggccgtgccatttgagccaccacttacctgagcgcaga

SEQ ID NO: 74969 - DNA, 600 bp, Chicken  19866894358170_1
tccaaagcaactgacaggcaaaaaccctggactgtgacgcatgtttcaagtcttagaggagaaataagtctcagctttcagtgctgccatctgtactaagcaagcaggttttataatgaagttcacaccaagctcagctgtctgtactgctttgtttctctccttctgttgtttctctcagcttatgtagagatggggctaaagtgtaaagtgagctgccagctgtgatgtttacagctctgcaggaggatgctgagagggaagtgtgaggtcagggtggggaagggccattcctagggrctggttcctgaactgctgctcatgcccagtacctttgtagtgctgcctgggaggagaaccggccgtcagcactgagctgcaccgaggcacctgattgtgcaggctctggcaggagatgaaccgttctgcaccatgaggtgcaggtgggttaacagcctggaccctgcagccacggtgccagatgcataccttccagttctgttacccgtcttccagaagtgttaaagtgaggcctgacaaatgatrcctctccagtctattttcttcctgataatgttggtgatttctctagttctgctg

SEQ ID NO: 74970 - DNA, 600 bp, Chicken  19866894358170_2
aggatgctgagagggaagtgtgaggtcagggtggggaagggccattcctagggrctggttcctgaactgctgctcatgcccagtacctttgtagtgctgcctgggaggagaaccggccgtcagcactgagctgcaccgaggcacctgattgtgcaggctctggcaggagatgaaccgttctgcaccatgaggtgcaggtgggttaacagcctggaccctgcagccacggtgccagatgcataccttccagttctgttacccgtcttccagaagtgttaaagtgaggcctgacaaatgatrcctctccagtctattttcttcctgataatgttggtgatttctctagttctgctgctatgtaatgtctaagaaatgrtaaaccatatgactgattctggagaacatgtgctttcttgaagagcttaaaaccmaaatctttgcttttataaggactctctttacatgtttggttgggtctgctgaagtcagcgggactgcgtgggtgttaatattaaacagttctgtattgtttcattgtggctgggaatatagcaatctgcactgcaagtagggacagcaaggtgctctattcttgaagct

SEQ ID NO: 74971 - DNA, 600 bp, Chicken  19866894358170_3
tgcccagtacctttgtagtgctgcctgggaggagaaccggccgtcagcactgagctgcaccgaggcacctgattgtgcaggctctggcaggagatgaaccgttctgcaccatgaggtgcaggtgggttaacagcctggaccctgcagccacggtgccagatgcataccttccagttctgttacccgtcttccagaagtgttaaagtgaggcctgacaaatgatrcctctccagtctattttcttcctgataatgttggtgatttctctagttctgctgctatgtaatgtctaagaaatgrtaaaccatatgactgattctggagaacatgtgctttcttgaagagcttaaaaccmaaatctttgcttttataaggactctctttacatgtttggttgggtctgctgaagtcagcgggactgcgtgggtgttaatattaaacagttctgtattgtttcattgtggctgggaatatagcaatctgcactgcaagtagggacagcaaggtgctctattcttgaagctgtggaagaagctctgttctgcgtggcttcaccatttacttggtggcccaggggcttctcagagctgcagagatcct

SEQ ID NO: 74972 - DNA, 600 bp, Chicken  19866894358170_4
tgcaccgaggcacctgattgtgcaggctctggcaggagatgaaccgttctgcaccatgaggtgcaggtgggttaacagcctggaccctgcagccacggtgccagatgcataccttccagttctgttacccgtcttccagaagtgttaaagtgaggcctgacaaatgatrcctctccagtctattttcttcctgataatgttggtgatttctctagttctgctgctatgtaatgtctaagaaatgrtaaaccatatgactgattctggagaacatgtgctttcttgaagagcttaaaaccmaaatctttgcttttataaggactctctttacatgtttggttgggtctgctgaagtcagcgggactgcgtgggtgttaatattaaacagttctgtattgtttcattgtggctgggaatatagcaatctgcactgcaagtagggacagcaaggtgctctattcttgaagctgtggaagaagctctgttctgcgtggcttcaccatttacttggtggcccaggggcttctcagagctgcagagatccttgcagaaggaacgaggcagtgaggaactgcctttatcagggatatttgaagagca

SEQ ID NO: 74973 - DNA, 600 bp, Chicken  19866894358174_1
tttttagagcctctcagggcagatggaaggagaacgcctccgctgtggtcagtccctgaagacaaagtggatgctgctggcacactggaatgacggcacgggtttgctgacggttttgcatgggagcatcggttgggtttacacctacaagtgcttggctatggcagcggggcatcccatggaaaggccaaaaagcagcagagagatccagggaaggaggagatggcacacgctgcaagcctgttctctgtcagcgacgctgctgggagcacggacacccatagtggagccagcagctgrggacagctcacaggagaggaaaaaaatggagccaaggatggcactgtctctttaaaaataaataaatagataaagactaaaaaaaaaaaaaagaaagaaaaaatgcaataagtatatgcaaatgtgttgagccgaacatcgctgtctgtgaaacagatgagggagaaagtgcttgaagctagagaggaatgaggcagccagygctgaccccggggttaataatttttacttctccatctcattccctccataaaaaaggataggagggggagggagagggtgggagctgcggcccggggc

SEQ ID NO: 74974 - DNA, 600 bp, Chicken  19866894358174_2
gagatccagggaaggaggagatggcacacgctgcaagcctgttctctgtcagcgacgctgctgggagcacggacacccatagtggagccagcagctgrggacagctcacaggagaggaaaaaaatggagccaaggatggcactgtctctttaaaaataaataaatagataaagactaaaaaaaaaaaaaagaaagaaaaaatgcaataagtatatgcaaatgtgttgagccgaacatcgctgtctgtgaaacagatgagggagaaagtgcttgaagctagagaggaatgaggcagccagygctgaccccggggttaataatttttacttctccatctcattccctccataaaaaaggataggagggggagggagagggtgggagctgcggcccggggcacagcactgcaggtcgaggggatgcaggggccctcccagagtggaagcacccagtgcaagaaccacattattctgcctctgtcacatctgctgcatcccatgtgtgttatctcctcatttcacagcatatgatggtggcggcaaaatgttccgacgtcccccatcgccacccctccaaacatcaccatctctcccaaatgct

SEQ ID NO: 74975 - DNA, 600 bp, Chicken  19866894358175_1
tggcatgcagaaaggaaagcaacagcaagtccatttcttcttctgtgcagtcacatgcagaagctctgactgcctgcaggtcaggctatgcttataaggcatgccacagcccaaaattagcaatgaaccattctgcaggataaatgcattttccagctgtctaagtttagttaaccagcagtttaaggagctcagagtcagttacacacaagaataaaatgaactttatttacgtctctcatgcactgggcaatttagtttttagattaacacaaaagcaaaaagggcactgcttcaagwgaagaataactgcaaaacactgttgggtaaaagcaactaaattgctatgagaattaaatatagatcaacagaatcaatatttaattgtataactcacggtctttcattttatgtctgatctctaataggaagtacaaattatcttcgcttttcatttttttgttcttgtttaaaattttattgtcagtgacaacaaatytctgaatttttacctttttmaaagttctgtttgttattttgtccacttacaytcaaggcaaacgtgatcgcacggtgccactgcttattactttacattca

SEQ ID NO: 74976 - DNA, 557 bp, Chicken  19866894358175_2
agttacacacaagaataaaatgaactttatttacgtctctcatgcactgggcaatttagtttttagattaacacaaaagcaaaaagggcactgcttcaagwgaagaataactgcaaaacactgttgggtaaaagcaactaaattgctatgagaattaaatatagatcaacagaatcaatatttaattgtataactcacggtctttcattttatgtctgatctctaataggaagtacaaattatcttcgcttttcatttttttgttcttgtttaaaattttattgtcagtgacaacaaatytctgaatttttacctttttmaaagttctgtttgttattttgtccacttacaytcaaggcaaacgtgatcgcacggtgccactgcttattactttacattcagttttaccagtttagatatcctgcagtcctgtaatttctatttatgacactcaggtctaagtgggatatgcagttatagcattacagagtgctcatatataacatgttcagtaaggtgtaccgaggtgcagagcactattctgatcaggtatatat

SEQ ID NO: 74977 - DNA, 537 bp, Chicken  19866894358175_3
tgaactttatttacgtctctcatgcactgggcaatttagtttttagattaacacaaaagcaaaaagggcactgcttcaagwgaagaataactgcaaaacactgttgggtaaaagcaactaaattgctatgagaattaaatatagatcaacagaatcaatatttaattgtataactcacggtctttcattttatgtctgatctctaataggaagtacaaattatcttcgcttttcatttttttgttcttgtttaaaattttattgtcagtgacaacaaatytctgaatttttacctttttmaaagttctgtttgttattttgtccacttacaytcaaggcaaacgtgatcgcacggtgccactgcttattactttacattcagttttaccagtttagatatcctgcagtcctgtaatttctatttatgacactcaggtctaagtgggatatgcagttatagcattacagagtgctcatatataacatgttcagtaaggtgtaccgaggtgcagagcactattctgatcaggtatatat

SEQ ID NO: 74978 - DNA, 505 bp, Chicken  19866894358175_4
aatttagtttttagattaacacaaaagcaaaaagggcactgcttcaagwgaagaataactgcaaaacactgttgggtaaaagcaactaaattgctatgagaattaaatatagatcaacagaatcaatatttaattgtataactcacggtctttcattttatgtctgatctctaataggaagtacaaattatcttcgcttttcatttttttgttcttgtttaaaattttattgtcagtgacaacaaatytctgaatttttacctttttmaaagttctgtttgttattttgtccacttacaytcaaggcaaacgtgatcgcacggtgccactgcttattactttacattcagttttaccagtttagatatcctgcagtcctgtaatttctatttatgacactcaggtctaagtgggatatgcagttatagcattacagagtgctcatatataacatgttcagtaaggtgtaccgaggtgcagagcactattctgatcaggtatatat

SEQ ID NO: 74979 - DNA, 600 bp, Chicken  19866894358177_1
gacaaagctaatttcaccagcgggtggggggaggcacatccctagctctgcatctggcctgggatctctaaatctggcctgggaactcacttctaggggtgtttgagccaaagatatgggggaagtggtaccattctgggggaaagaatgaggctgcaccccagtatggggtggggaagaggagcaggtgactgggatgcgggtcaagcatctcaaggatgagcaccctttactgtctgggtgcaggtgcagcggtggggagtgcccccagtgtctcacctgaaggaccaagggagggaygtgagctcagggttggacttgtgcaaggagtagaggagttctgcagacaaacgtctgcccagtgctgggagcagtcatggggcactcctcagcccagtcagaatcctttaacatggcctctgctcttctttcaaccctcatccccatcttctgccttctcatccccctgccaaataaatctcctcagagttaaaataaatgctgtagtgtcctaaaagtcttgctgccccggagatgaaaaaaaaaaaaaaaaaagaaaggaattaaactgaaagagaaatagtagatgtgcatcttcct

SEQ ID NO: 74980 - DNA, 600 bp, Chicken  19866894358184_1
cagtttatacagagcacgaggcagggcaccatggcaaagacctcctcatctgccctcctccatctgctgcttggtgcctgcttacccatgttcctctgaggtcttcgggcaggggaaaaattatcttggaaagatctcagagatgcctcagaaaaataaaaccatgtgctggtgttgctttagacaggcagagtcgtttttatcagatgctctggtggagagggtctcagtttttaggttggatattagggaaaacttcttctcagaaagagaggcaaagccttggaacaggctgtccarggaagtggtatattttaccttgccttccccagaggtgttcaagcaaaaggtagatgtggcatttggggggagggactacttggcatggtggggatgcggggagagttggactagatgctcttagaggccttttccaacattaataattctacgattgtaagatccagttcctgcaggattttactgctggcctcagttctacccactcagcttcctccatctgcacctcaaccatgaagcacaaagcagtattctggaacccaaatgaaagtgcttcgcatttcactgctcggcacagtc

SEQ ID NO: 74981 - DNA, 599 bp, Chicken  19866894358186_1
  misc_feature (1)..(15): n is any nucleotide
nnnnnnnnnnnnnnnttttgactttttgggggacattcatgtctgccacactgaagaagtaacaagattacagtacccgtattgctcaaccccaacacttgaaatgtctaaaccttgtgtcaaattattttctgcttatctagcgtgcttgcacatactcatgctgacatttcagtgttcatttcagattagctttttaaaggcacaaagactatcagtgcatgtttccacatgctctgtaacctatttctacccaatttagggtttaacttctgacaccatacacatagcctttgctcrctggaagcaaacacwaatacccacgcaaatacaaaggaagaaagaatttgaaagtaaaaataataatttgcaattccaaaacaacagctgaaaaaattgataaattttctatctaggaggagacctattatatttatgtgtaatcaaattccaaagtcagaagttggcaacaacaaactcctctccccactaatacaggtgtatccagagctgatcgatgaagctcataggtaagttcagtggagcagaggtaactctacccttgttttgttcagctcctgtgctttaaaactccttgt

SEQ ID NO: 74982 - DNA, 600 bp, Chicken  19866894358186_2
ttttgactttttgggggacattcatgtctgccacactgaagaagtaacaagattacagtacccgtattgctcaaccccaacacttgaaatgtctaaaccttgtgtcaaattattttctgcttatctagcgtgcttgcacatactcatgctgacatttcagtgttcatttcagattagctttttaaaggcacaaagactatcagtgcatgtttccacatgctctgtaacctatttctacccaatttagggtttaacttctgacaccatacacatagcctttgctcrctggaagcaaacacwaatacccacgcaaatacaaaggaagaaagaatttgaaagtaaaaataataatttgcaattccaaaacaacagctgaaaaaattgataaattttctatctaggaggagacctattatatttatgtgtaatcaaattccaaagtcagaagttggcaacaacaaactcctctccccactaatacaggtgtatccagagctgatcgatgaagctcataggtaagttcagtggagcagaggtaactctacccttgttttgttcagctcctgtgctttaaaactccttgtactatgtcacagctat

SEQ ID NO: 74983 - DNA, 600 bp, Chicken  19866894358186_3
aacaaactcctctccccactaatacaggtgtatccagagctgatcgatgaagctcataggtaagttcagtggagcagaggtaactctacccttgttttgttcagctcctgtgctttaaaactccttgtactatgtcacagctatctgtgcttgattttgatccttgctgctttataatgaggtatgtcttttttatgagttagtgcttaactttggaaaatgagatgtgaaaacttgttacatagcatacctttcactcagaaatgtgagtttctcactgcttgctaatgtgcagactgygtgccacaaacccaccctctctagaaatccaacctaagtgagggaatggattccttcaaaaggagtgggtgtgaacaacatagggcattaattttaaataccaaaatgcatcagtaagtaccaatactcaaattaatgttatcttcctcatccgtgattcagaacctctaggtgatctcagagctcatcaatggtgaatgattctgaaaatcaarggaataatctttatatccatgctttagttatttgtgttaagagcttactcwtgagcaaagatcagtggaaatacatgccacaatt

SEQ ID NO: 74984 - DNA, 600 bp, Chicken  19866894358186_4
gaaaatgagatgtgaaaacttgttacatagcatacctttcactcagaaatgtgagtttctcactgcttgctaatgtgcagactgygtgccacaaacccaccctctctagaaatccaacctaagtgagggaatggattccttcaaaaggagtgggtgtgaacaacatagggcattaattttaaataccaaaatgcatcagtaagtaccaatactcaaattaatgttatcttcctcatccgtgattcagaacctctaggtgatctcagagctcatcaatggtgaatgattctgaaaatcaarggaataatctttatatccatgctttagttatttgtgttaagagcttactcwtgagcaaagatcagtggaaatacatgccacaattacaaagyagtgtaagtgggaaaggaatatacagtctagcataaatcacayagctcatagtacatacagaacagagaagcatactacratctttttcataatgtgtttttcttgaattaaggagtttctaaataatgcagtattacgcatgaattacttaaataaactggaatggcaatatcattttatgtaaaaatagaaaaatggttctccata

SEQ ID NO: 74985 - DNA, 600 bp, Chicken  19866894358186_5
tgagtttctcactgcttgctaatgtgcagactgygtgccacaaacccaccctctctagaaatccaacctaagtgagggaatggattccttcaaaaggagtgggtgtgaacaacatagggcattaattttaaataccaaaatgcatcagtaagtaccaatactcaaattaatgttatcttcctcatccgtgattcagaacctctaggtgatctcagagctcatcaatggtgaatgattctgaaaatcaarggaataatctttatatccatgctttagttatttgtgttaagagcttactcwtgagcaaagatcagtggaaatacatgccacaattacaaagyagtgtaagtgggaaaggaatatacagtctagcataaatcacayagctcatagtacatacagaacagagaagcatactacratctttttcataatgtgtttttcttgaattaaggagtttctaaataatgcagtattacgcatgaattacttaaataaactggaatggcaatatcattttatgtaaaaatagaaaaatggttctccatagaaataccctgaagattataactgtgatttcacaatcagcttaagccaatc

SEQ ID NO: 74986 - DNA, 600 bp, Chicken  19866894358186_6
aaacccaccctctctagaaatccaacctaagtgagggaatggattccttcaaaaggagtgggtgtgaacaacatagggcattaattttaaataccaaaatgcatcagtaagtaccaatactcaaattaatgttatcttcctcatccgtgattcagaacctctaggtgatctcagagctcatcaatggtgaatgattctgaaaatcaarggaataatctttatatccatgctttagttatttgtgttaagagcttactcwtgagcaaagatcagtggaaatacatgccacaattacaaagyagtgtaagtgggaaaggaatatacagtctagcataaatcacayagctcatagtacatacagaacagagaagcatactacratctttttcataatgtgtttttcttgaattaaggagtttctaaataatgcagtattacgcatgaattacttaaataaactggaatggcaatatcattttatgtaaaaatagaaaaatggttctccatagaaataccctgaagattataactgtgatttcacaatcagcttaagccaatctgtttgcacagttgtggaaagcagctattccgttctccatc

SEQ ID NO: 74987 - DNA, 593 bp, Chicken  19866894358186_7
ttccttcaaaaggagtgggtgtgaacaacatagggcattaattttaaataccaaaatgcatcagtaagtaccaatactcaaattaatgttatcttcctcatccgtgattcagaacctctaggtgatctcagagctcatcaatggtgaatgattctgaaaatcaarggaataatctttatatccatgctttagttatttgtgttaagagcttactcwtgagcaaagatcagtggaaatacatgccacaattacaaagyagtgtaagtgggaaaggaatatacagtctagcataaatcacayagctcatagtacatacagaacagagaagcatactacratctttttcataatgtgtttttcttgaattaaggagtttctaaataatgcagtattacgcatgaattacttaaataaactggaatggcaatatcattttatgtaaaaatagaaaaatggttctccatagaaataccctgaagattataactgtgatttcacaatcagcttaagccaatctgtttgcacagttgtggaaagcagctattccgttctccatctctggctgtaagcttatgcatttcccttgccagggg

SEQ ID NO: 74988 - DNA, 556 bp, Chicken  19866894358186_8
ttaattttaaataccaaaatgcatcagtaagtaccaatactcaaattaatgttatcttcctcatccgtgattcagaacctctaggtgatctcagagctcatcaatggtgaatgattctgaaaatcaarggaataatctttatatccatgctttagttatttgtgttaagagcttactcwtgagcaaagatcagtggaaatacatgccacaattacaaagyagtgtaagtgggaaaggaatatacagtctagcataaatcacayagctcatagtacatacagaacagagaagcatactacratctttttcataatgtgtttttcttgaattaaggagtttctaaataatgcagtattacgcatgaattacttaaataaactggaatggcaatatcattttatgtaaaaatagaaaaatggttctccatagaaataccctgaagattataactgtgatttcacaatcagcttaagccaatctgtttgcacagttgtggaaagcagctattccgttctccatctctggctgtaagcttatgcatttcccttgccagggg

SEQ ID NO: 74989 - DNA, 600 bp, Chicken  19866894358190_1
tgtcttcaagactgaggagagtgtcagatctaatctcagtaaagggaaatgtgttattcctgtgctgatatgaaaaacctgtctgcagtgtttgcgctgaattttttttttggttaagaactgcttgtcttcctccctgtatcttcactgtgcactcacggtgcatgtgacagcagcagtgctcctcgtagggctccatcacgtgtccgttaccattccttcattaatacccagtaaacaaacaaacagcaaccttttcttttctgaatgcatgcatgcctttgcaaaacagagcagaaygaaagagcagcttcctaagtgtgtaaggtcactgggagaggggcagggggaaggctgggtgagagtcttacagtgctgtgtttctgtttgtctgcctttaagacttagagattgaaatgtgtttgtgtgggcaaagcctgtttgaaagcttgcatagcttctgcccaaaagtgagctttaatattaaagtcagaactcttaaaggcacttaggagtgggaaactgcatgcatgtgcctctgtaaagcataggagcgtggtgtttttgacataactggttgatgcgattcttatacttgac

SEQ ID NO: 74990 - DNA, 559 bp, Chicken  19866894358193_1
ttggaataggacacgctgaaaatacactgtctttaaccagtggaaagcttgcagcaatataaacatgcagtaactctactgcttgctccaggcttgtgctagggcaatttctgcaccgagtttggtcctaaattatgtcttttacataccttttgattcccacaattaatcactgcacagcactatggggaaggaggaattccatatgctgcagtaatgagaagcctctaagaaatgtgactaataaaggaaatgtgcagcttaagctgtgaattaataatttatgtgaattgcaaacargactttgcatatggtgcttgtatgattacagatgaagctgtacatgcaaataaaaggctctgtaaaacagttgcacaactcaggacccagctctattcaaggacgtgcccttatgacatggaaaagacaggggctcagtgcaccacttcatctggacttctgacttttggttttagagaatgattatgatatacagagatgcttccaataaacttgcattcttattttccaactctgcaagcagaatcatacctgctaa

SEQ ID NO: 74991 - DNA, 600 bp, Chicken  19866894358195_1
tcatactacaaagttgctcgtcattcctgttagacctgaaagtaagctgtttcctggtattgtgaaagagtttcattggttctccaactggagtagacagaatgcttattcttaccaagggaaacgagatatgaagtactagaattggtgatatttccccaaaggtctatatgtaaagtgacttccaacattctgcaaaggagtttgcagtaggtattattaatggtgcacagaagcaacagttttcatttaagtttcttttcacaataaagatgtaacaaattccaatgtatattctgraataaatgtgctgagaattttttttttcaggagccagattgctctgcttctttattttcaatatctaattgaaatggtgttctcctaccttagttcattttattgcctctcaaatactccgtattgattcatgtttttgccactaacttcctagccaaatttaatcattaaatttaagccagagtaaaatatttctctgcataaataacaggaactaaaattaaataattttagtagcagctatatagtgcatgactgcactttgttatatgtataatgtctgtgttcagataggtggaa

SEQ ID NO: 74992 - DNA, 599 bp, Chicken  19866894358200_1
  misc_feature (1)..(175): n is any nucleotide
nnnnnnnnnnnnnnnnnnnnnnnnnnnnnnnnnnnnnnnnnnnnnnnnnnnnnnnnnnnnnnnnnnnnnnnnnnnnnnnnnnnnnnnnnnnnnnnnnnnnnnnnnnnnnnnnnnnnnnnnnnnnnnnnnnnnnnnnnnnnnnnnnnnnnnnnnnnnnnnnnnnnnnnnnnnnnnnttatcccatttggacatgtgagtatgcagttggctccccggtctgctattctgagggatttttttccctatgggctacaaactgtagcagtccttctgcatatatatatgcaggcttctagctcragcagcactttgtgaccttgtgtggttggtctcttctgmgacctgaggaacttcttgcttttcacaggcccaccttggaactggagacccttacaccccaggcttcccttcgttcaaccacacccagtttccaccagttgaatcttcaggactaccccacattgctgttcagaccatctctagcagtgcagcagccaggctgttcaggtaatggtgccttctggcttgtgtgctggcggctctgttgcaggagttaagggtggtgttgaggtattatgagcccagggagctccctgctg

SEQ ID NO: 74993 - DNA, 599 bp, Chicken  19866894358200_2
  misc_feature (1)..(136): n is any nucleotide
nnnnnnnnnnnnnnnnnnnnnnnnnnnnnnnnnnnnnnnnnnnnnnnnnnnnnnnnnnnnnnnnnnnnnnnnnnnnnnnnnnnnnnnnnnnnnnnnnnnnnnnnnnnnnnnnnnnnnnnnnnnnnnnnnnnnnnnnttatcccatttggacatgtgagtatgcagttggctccccggtctgctattctgagggatttttttccctatgggctacaaactgtagcagtccttctgcatatatatatgcaggcttctagctcragcagcactttgtgaccttgtgtggttggtctcttctgmgacctgaggaacttcttgcttttcacaggcccaccttggaactggagacccttacaccccaggcttcccttcgttcaaccacacccagtttccaccagttgaatcttcaggactaccccacattgctgttcagaccatctctagcagtgcagcagccaggctgttcaggtaatggtgccttctggcttgtgtgctggcggctctgttgcaggagttaagggtggtgttgaggtattatgagcccagggagctccctgctggtctctgctgtgtatggcaggaagcacttaacagactgg

SEQ ID NO: 74994 - DNA, 600 bp, Chicken  19866894358200_3
ccattcctgtaaggtgacaacaaagcacgagagccagataatggtgaaactagatgtgaacaattccatgaaagacaggaagattctgaacatcttcggtgctatccagggatttgaagaaccaggtaagagcaactaccttgtggctcaggcttgaggggtacttcttcagttagaaccaaggcccttcattaagaattaagagtaaaactgaactgtgctgccagggaaaggctaaatgaagcagtgcacctaatgcagaggttaggcactctacgtagctcctggcacaggaactcraagctgcctctctgatagacagtgtttgcaaagtgaagcttgtacctcagatcttcatgtctcttttatagatcggtatgttgtgattggagcccagagagactcctggggcccaggagtggctaaagctggcactggaactgctatattgttggaacttgcccgtgtgatctcagacatagtgaaaaacggtaaatacttgtgtactaaagcatgatactggcttagctctgtgtttgttaatactggagagccctgttacaaaataatccttggagaatgtgtagggaatctggaagg

SEQ ID NO: 74995 - DNA, 600 bp, Chicken  19866894358208_1
ataatgtaagtgcagtgcagtaagtgctaaatgtaatgggggcttagcatagctgaagcaaaagcaataataataaaagaagcattgtaaataggtagtgctgggtttaacaccggggccgagtgttactcagcccgctgctgagcagcacacacgtggtgtgacatcctgtgcgtggtgtacctccagagccacaccgacctacctctgcacagactgcatctgggtcagccttgagattgtgcagtccttcagacagtggcacttacctcacagtctgcacggcagctcagcgtcgcmgcagcattctgatagtgctgggaattgctgcaagcactgtgaaatcaggtgcacgtgaatggccaggtagccagacaggacagggtgggctttgactgaagctatttgttggctctcctgactaagccgagtgaaggaaccarcaccaattytgaaataaaaagtatttatgtttacaatcacaattatttttagtatctccctaaattacattgtttcatttttaacatgaactgctacctcagaaagcattgcttgtatataatcttgctgttgacagtcaagctggtgtgatgattt

SEQ ID NO: 74996 - DNA, 597 bp, Chicken  19866894358208_2
agcagcacacacgtggtgtgacatcctgtgcgtggtgtacctccagagccacaccgacctacctctgcacagactgcatctgggtcagccttgagattgtgcagtccttcagacagtggcacttacctcacagtctgcacggcagctcagcgtcgcmgcagcattctgatagtgctgggaattgctgcaagcactgtgaaatcaggtgcacgtgaatggccaggtagccagacaggacagggtgggctttgactgaagctatttgttggctctcctgactaagccgagtgaaggaaccarcaccaattytgaaataaaaagtatttatgtttacaatcacaattatttttagtatctccctaaattacattgtttcatttttaacatgaactgctacctcagaaagcattgcttgtatataatcttgctgttgacagtcaagctggtgtgatgatttcatagatatattttraagctctaatttactattccaggaagttattttaatgattgtttgccctttctgttgctgtttggtttctggtgggtttttttccctcattcactgtgccaggatttaagacgtatctgatagac

SEQ ID NO: 74997 - DNA, 588 bp, Chicken  19866894358208_3
cacgtggtgtgacatcctgtgcgtggtgtacctccagagccacaccgacctacctctgcacagactgcatctgggtcagccttgagattgtgcagtccttcagacagtggcacttacctcacagtctgcacggcagctcagcgtcgcmgcagcattctgatagtgctgggaattgctgcaagcactgtgaaatcaggtgcacgtgaatggccaggtagccagacaggacagggtgggctttgactgaagctatttgttggctctcctgactaagccgagtgaaggaaccarcaccaattytgaaataaaaagtatttatgtttacaatcacaattatttttagtatctccctaaattacattgtttcatttttaacatgaactgctacctcagaaagcattgcttgtatataatcttgctgttgacagtcaagctggtgtgatgatttcatagatatattttraagctctaatttactattccaggaagttattttaatgattgtttgccctttctgttgctgtttggtttctggtgggtttttttccctcattcactgtgccaggatttaagacgtatctgatagac

SEQ ID NO: 74998 - DNA, 425 bp, Chicken  19866894358208_4
tgctgggaattgctgcaagcactgtgaaatcaggtgcacgtgaatggccaggtagccagacaggacagggtgggctttgactgaagctatttgttggctctcctgactaagccgagtgaaggaaccarcaccaattytgaaataaaaagtatttatgtttacaatcacaattatttttagtatctccctaaattacattgtttcatttttaacatgaactgctacctcagaaagcattgcttgtatataatcttgctgttgacagtcaagctggtgtgatgatttcatagatatattttraagctctaatttactattccaggaagttattttaatgattgtttgccctttctgttgctgtttggtttctggtgggtttttttccctcattcactgtgccaggatttaagacgtatctgatagac

SEQ ID NO: 74999 - DNA, 597 bp, Chicken  19866894358220_1
cctttcacaccttctttaacaccttttgcttgcaggtgagaaacctcacaagtgtcaggtgtgtggaaaagcctttagtcagagctccaacctcatcactcacagtcggaagcacacaggattcaagccctttggctgtgatctgtgtggcaaaggcttccaaagaaaggtggatttacggagacaccgggagacacagcatggcctcaagtgagccctgcaatgcagaaagcacctacaacactaggagaacagactcccttggcttttccgctggacctgagccctgtctgtagaacrgaccctggcattaccttcctgaccaggaacttggaaagaagaggacagggccgtgcattggcagctcaaccaacgtgactgtgagagtggaaattaaaggttggggtttctatctcttgtcctctgtttctgaaataacactggaaaataagccttttagatacaacacctgttactctgaagatggataagctaccaaatacctgtaagctggaaagtatttctcccatggccaagataaaaatcctaatgttttcaatagcttaattattttgcacggatatgtgggtataacag

SEQ ID NO: 75000 - DNA, 485 bp, Chicken  19866894358225_1
tttcttgtaccgtagcaatcaatagagatacgagattatagcaacgatgaaatttgttttaccttagagtaatattaaactacaggcaactgttaagcagagaatcattccatataaaatgaacatctttcaacctcaataaaattccaaataatcaagaagactgatccgtgttttttcccttccacacaactctgagttctcctatcccaccaaaactgcttttaagtagaaaagtaggagggtatttttattcacacacagactgagatcagaaaatttaagagtaagacatgaagyaagtaaagggaatagctgtgatctacctcctacaaactaacaaaaagatgttgcctgagacagaaatgataggaggataaattaattaatttctgaaagacatttaaatagcagattgatagatgacataaatttatcaaaagaagtgttttggtcagttattaataacgttgagttcccatcat

SEQ ID NO: 75001 - DNA, 600 bp, Chicken  19866894358226_1
cagggatttttctcccatataagttctcagtgggaatctggaggacaaagcttctgagattctctctacattttttattggcttaatcctgaaaatgcttagaaagcagctcacttgctgcatctttgtgacaagtgctgacagactgaagaacaacagtcagagaacctaccctaagggaggagatgtgaatgcagacagcagcagcagattgttctattcttactggttgactcgcgtccattgagaataggacttggagaggcctccaggaattttgcttgccgtagcatttcagaygctatgatgggaaacatgaaatggaatagtgtaggacactcaaaatggcatccccacttcagctgtcagtttgcaggctgagtggtcaaggtttaatgattcctgatccaaagaaaattgataaaacaattgccttcaccacagagcagttgttcctgttgaacatttggatttcttcatgcagttcagcactcctgtttcctaagatgcttaagcatgacagtgtttttcttcaccagatattatcttctatcttcctgagcccaggctttccttgtacatgtaaagttcataaataaa

SEQ ID NO: 75002 - DNA, 600 bp, Chicken  19866894358226_2
gacactcaaaatggcatccccacttcagctgtcagtttgcaggctgagtggtcaaggtttaatgattcctgatccaaagaaaattgataaaacaattgccttcaccacagagcagttgttcctgttgaacatttggatttcttcatgcagttcagcactcctgtttcctaagatgcttaagcatgacagtgtttttcttcaccagatattatcttctatcttcctgagcccaggctttccttgtacatgtaaagttcataaataaatgcattcagctcctagcttaatttttagccatartttttccatatttgtgtcttttactaatttatatgaccattgcacacatccacaaaaatttgaagtgattttaaatcaatgccagttactgaaggtgctgtttcgaaatactggttagtgaaatgagagaggctaagcatatcagggcagggaaagcaggtacttgaggtgggtgagcaggtacttgaggtacagtcacctgaacaacgctgggcaaacaccagtggtgaggttttgaaactacaaggtgatccaagtcgaagttcaggctaaatcgggtggttaatgcaagccgtaatt

SEQ ID NO: 75003 - DNA, 600 bp, Chicken  19866894358226_3
tgaggtgggtgagcaggtacttgaggtacagtcacctgaacaacgctgggcaaacaccagtggtgaggttttgaaactacaaggtgatccaagtcgaagttcaggctaaatcgggtggttaatgcaagccgtaatttatggtttgagttagagtagatgtgtgagaactaactctgttggtaagtcacggtatttttcccatcaggaattttcactgtgagaaggaacttgtaattaaatgctagcatgttatataactccatagatgtgctttcataacaccaagatacagaattaaayggattgccgccataataactgtgctctgttgtgggacagtggttatctgggtccgtatcttctgcttgttagggtttcctttgacttttgtagtctgaaagccgcagggatcagcgtcgctcagcttgtaggtccaaggaatttctcagggttgttcctctttgtttgggttgggtggtttttttgtgtgtgtttttcctgttgacaataagaagattcttctccttggcggacaaaatcctgctctgactcatttccagtccttaagcacagaacggtttataagacagacaagaatgg

SEQ ID NO: 75004 - DNA, 600 bp, Chicken  19866894358226_4
ttcaatctgtgttcatgaaagctattttcaaacaaacagccccaacccttcgccaggtctctgcagcagaacatcttgccaacgagtgctgtattagccaggggtgtggaaaaaagtcatgcatcctcactgacatcgctgtgctggcatcagcccaggcggggatgcagctgtggtggaggaggcgagctctatcgactcagcttgtgccattgggaggtgatgcaactgcgcctgcagagctgctctgctgtcacagtgagcctcactgcagctgggtgaggagacacaaactgcccyaaaccgagaggggcctctggttgtcagggtgtccttcaggaacagagcaggaacagtggtttggattttaagataaagtttcagcaaaaaaaggatgtgtgagctgtgtggctttcaggagtcgctggccttttggtagctgtctgtgctcgttgggctgcagggttccgcaagctgcaaaaatgtgccaagcatctgtattttgtgaagcctttttagggctggtaaaggtatgggtttgtgtggaagtagtcagaaaccttctgtctgtaaactttggaagacaactgtaatcacatt

SEQ ID NO: 75005 - DNA, 599 bp, Chicken  19866894358228_1
  misc_feature (1)..(93): n is any nucleotide
nnnnnnnnnnnnnnnnnnnnnnnnnnnnnnnnnnnnnnnnnnnnnnnnnnnnnnnnnnnnnnnnnnnnnnnnnnnnnnnnnnnnnnnnnnnnntgtttttgtgtgatttaagcatgaatgcctgtgcattaaagagatcttctcttccatctgaagagtcatttctacagattataaagtagtcttatgtaaaaggaattccactttttatctgtagttcactgatctttcagaaaaagagtaatcttaaaatccacttaagatgccagagatatcatagactaattgaatgcttatttygtgttaatatcttggaatgttatgtttatacaagcacacttaaatgcaactaatcatattaaatattatgtagacctktggtgtctttgcttagcaagttattaccagaacttgtttcaggttgactgattttttacaccagaactattgcgctgactgcagctgaaggctgaacatacagaatcatagaatttcctgaggtggaagagacccacaaggatcatcaagtccaactctcagctccacactacaccacccaaaatccaaaccctatgtstgagagatttgtccaaacaccc

SEQ ID NO: 75006 - DNA, 599 bp, Chicken  19866894358228_2
  misc_feature (1)..(15): n is any nucleotide
nnnnnnnnnnnnnnntgtttttgtgtgatttaagcatgaatgcctgtgcattaaagagatcttctcttccatctgaagagtcatttctacagattataaagtagtcttatgtaaaaggaattccactttttatctgtagttcactgatctttcagaaaaagagtaatcttaaaatccacttaagatgccagagatatcatagactaattgaatgcttatttygtgttaatatcttggaatgttatgtttatacaagcacacttaaatgcaactaatcatattaaatattatgtagacctktggtgtctttgcttagcaagttattaccagaacttgtttcaggttgactgattttttacaccagaactattgcgctgactgcagctgaaggctgaacatacagaatcatagaatttcctgaggtggaagagacccacaaggatcatcaagtccaactctcagctccacactacaccacccaaaatccaaaccctatgtstgagagatttgtccaaacaccccttgaactctggcagcttggggccatgcccactgccctgggcaagcctgttccatgccctctggggcagagcctttcc

SEQ ID NO: 75007 - DNA, 600 bp, Chicken  19866894358228_3
tagactaattgaatgcttatttygtgttaatatcttggaatgttatgtttatacaagcacacttaaatgcaactaatcatattaaatattatgtagacctktggtgtctttgcttagcaagttattaccagaacttgtttcaggttgactgattttttacaccagaactattgcgctgactgcagctgaaggctgaacatacagaatcatagaatttcctgaggtggaagagacccacaaggatcatcaagtccaactctcagctccacactacaccacccaaaatccaaaccctatgtstgagagatttgtccaaacaccccttgaactctggcagcttggggccatgcccactgccctgggcaagcctgttccatgccctctggggcagagcctttccctaaacccctggctctccctygactcagctccatgccagtmccttctgtcaccagagaaaatgtatttttttttttcctaaggacttgcatcataaagcagttattttgttttcaagaacatgaaaactgagtggatgtcaaaaattaaataacaaaaacatgatttacagtgacgtctattgcctaatgtactcaaaaa

SEQ ID NO: 75008 - DNA, 600 bp, Chicken  19866894358228_4
ttattaccagaacttgtttcaggttgactgattttttacaccagaactattgcgctgactgcagctgaaggctgaacatacagaatcatagaatttcctgaggtggaagagacccacaaggatcatcaagtccaactctcagctccacactacaccacccaaaatccaaaccctatgtstgagagatttgtccaaacaccccttgaactctggcagcttggggccatgcccactgccctgggcaagcctgttccatgccctctggggcagagcctttccctaaacccctggctctccctygactcagctccatgccagtmccttctgtcaccagagaaaatgtatttttttttttcctaaggacttgcatcataaagcagttattttgttttcaagaacatgaaaactgagtggatgtcaaaaattaaataacaaaaacatgatttacagtgacgtctattgcctaatgtactcaaaaataaattgttgcaaaggtgcacctcttacataagcaacaaaataagcaaattaatgttttaagctatagttcctagaaaatgtttgcctgagattccatattactaatgtcatgattgcttt

SEQ ID NO: 75009 - DNA, 600 bp, Chicken  19866894358228_5
aggttgactgattttttacaccagaactattgcgctgactgcagctgaaggctgaacatacagaatcatagaatttcctgaggtggaagagacccacaaggatcatcaagtccaactctcagctccacactacaccacccaaaatccaaaccctatgtstgagagatttgtccaaacaccccttgaactctggcagcttggggccatgcccactgccctgggcaagcctgttccatgccctctggggcagagcctttccctaaacccctggctctccctygactcagctccatgccagtmccttctgtcaccagagaaaatgtatttttttttttcctaaggacttgcatcataaagcagttattttgttttcaagaacatgaaaactgagtggatgtcaaaaattaaataacaaaaacatgatttacagtgacgtctattgcctaatgtactcaaaaataaattgttgcaaaggtgcacctcttacataagcaacaaaataagcaaattaatgttttaagctatagttcctagaaaatgtttgcctgagattccatattactaatgtcatgattgcttttgacagttaaatgcgcaggg

SEQ ID NO: 75010 - DNA, 599 bp, Chicken  19866894358240_1
  misc_feature (1)..(13): n is any nucleotide
nnnnnnnnnnnnncagtaattgtggcagagaggtgagggatgtgaaggtaaaagtgggaagaatctgacctgtccagctggagcaccatgtgtgttccctcagctttcctgagatgttgatcctctgtgctgatctctacatgggagtaaattcgatgatgttttccacatctgagagcttctgattaaatgtaaaggaattattttaagccttacttgtgcagtgaggtcactgcttactcagggagggtgtgaaatgatgatagattaaccgtagtatattaattcccttcatggccrttctttagggacctgtttaggggcatctttagaagaggatggctatgctgaaggctcagggaacttgaggtcccactcaccatgttagaacagtactgtgagcgttctcaatttgctgaaggcagtctcagggaaatacacccagcttggctgcggatgcttccagtggtggtacctgttgtgtatggctaagttagacattgctgtagctggtgagaggaactaaggggaactgggtttgcccatggaaataacccttttgttttcctggcactaattgctggtgtagctttctgttt

SEQ ID NO: 75011 - DNA, 501 bp, Chicken  19866894358246_1
ttccatctcctattgcatgtaggcttttggtgctgcaatcagccagtgactgttagcattgttctgactgttctgttgggcctgctaatattatctaggagttttcattcaaccaacactattgattatcaatggctgctgaatgcctctcatctaatgtctgctcagtgcctggcgatagcccactccaccaaaaccatgccgggccacagctgctcctgctgaaccttaggctaacacacaaaatgccccttaatccagtgcctggtcttcttgtcacatctcctctccagcaccacygactgagtgggcagaggttgggcaacacaggagtcacacaggactgtcacaccctctgctttacccggtttggtgtgatgatgtcattttctgtagtagcaggaaggcctgtggaacacccgtggctcccaaaggatgcaatctccaattttttctgctgctctgagtgcatgtctgtgtggtaatctgtgtggtaatctg

SEQ ID NO: 75012 - DNA, 599 bp, Chicken  19866894358261_1
  misc_feature (1)..(16): n is any nucleotide
nnnnnnnnnnnnnnnncctaaccacatactgttgcttctctgaaaaagtaagcagtgcaaagtgcacccacaggattactgtgtgtaacatggcttgtgaggcaagtgctaacatccagtaaattattactatgtagtggtgaaggctaagaagcagactgaataaagtataatttactaattcattttctgtttgatgtgcaggttaaagcaatctgtttgcagcctacttatctttctattacccctccactcccctatatttccattcctgtcttccacaaaatctggaaggacaartttcattttactatttaaaaaaaaataaaaacaatcaagcacatcgcatatgagtcgctttcatgtattgccagagctgaagttttcatttgtggtgcaaaggctggcagtgtcaggactaatcagttcagtgactaggcctaagaggcaaggagcatattaacaggtgtgtcaatctgctcctttctcagcattaattttacataaatattatttttatttccagtttcattcaaacattgaagcaaatgctcattatttgaaggatgctaatcaaataagcagataaaggctgttga

SEQ ID NO: 75013 - DNA, 599 bp, Chicken  19866894358264_1
  misc_feature (1)..(187): n is any nucleotide
nnnnnnnnnnnnnnnnnnnnnnnnnnnnnnnnnnnnnnnnnnnnnnnnnnnnnnnnnnnnnnnnnnnnnnnnnnnnnnnnnnnnnnnnnnnnnnnnnnnnnnnnnnnnnnnnnnnnnnnnnnnnnnnnnnnnnnnnnnnnnnnnnnnnnnnnnnnnnnnnnnnnnnnnnnnnnnnnnnnnnnnnnnncttctgttggtttcatatttttattagaacatcacctgtagaaactaaattagagtcaaccctcacgggagtaacaagggctgacttgtttgctcctgaatgcttcagttgtrtattgtcatctcttgaaaggtcacatgctcgggctgtccctcaggtttagaactaaacaggatcctttagatgcattttgtgtatgggcctaacaaataatatttggttatatacttgatgaagaagtttgcttgtagatgctttcgctctattttcagttgttatttgtgctcattgatccacgagagcagtttaattgcactaaaaatgagtgtctatagatgtagaataaaatcttttaaatctctgtagtgtattgcacttacttaactgggcttactgcctttcatagtctact

SEQ ID NO: 75014 - DNA, 600 bp, Chicken  19866894358264_2
tttcagtactcacatttaacctgtcactattattaaaatcaagagcagcgacaatgaattgatttgtggataagaattctgtaggcttcagatactgatgtgatatcttatggataaattggtttgatttgctgcaaatttatttcagtcccacttcaaacggcaagaattagtaatgaaaggagaggtaacagccttagctcttatccaaaaaagatatcagagttattgactcagattatctctgtatcttagatggctaagtggcaatgtttgactaaagtgggaaatttagactaygcttatttgcagcaaaacacaatattgtgttgtttttttctttaatgtattgttgaagcatcagaatcaccaactgtgttttctaaattgtggaatttgagatgtttatttgtattcatgagaggcagaagggtaattggtgcttaggtcagtactttgaatagcctctcaatataacatagtagtagtgtgatctgattgttgctaatcttatttcctagtctaaaacgtgtttgagatttttggctgcattttttggcagtctactgaattgctgggagaaaatacagtaatttagaa

SEQ ID NO: 75015 - DNA, 516 bp, Chicken  19866894358264_3
gctgggagaaaatacagtaatttagaacaactcacatttctttaactgtgtaagtgaatttctcagaaggcttgataaagtatttaattacagagtagctctgaaataagtatccacaggacaatgcagataccatttaaatctcagctatatcacctttatggcaatcacacttaatgtcaacaaaagagtgtggtgttgaggagagagtagatattggcaggataacacggctgtagctgcaactataaaaggtcattggatttttaagctttcagttagcaaacagctacttaaatygaygggaactggaactgatgttttagccatccaaaccaagaacaaacccttctattaaaaagtaatcaaatcatttttagagttgrtttttggccgtctctataaatgcattatggtgttcatttttgaagctgagacagaagaggctggcctgaagtcacacaggagctgattggagagctgcaatttcttcttgggtctcttggcacccattgg

SEQ ID NO: 75016 - DNA, 513 bp, Chicken  19866894358264_4
gggagaaaatacagtaatttagaacaactcacatttctttaactgtgtaagtgaatttctcagaaggcttgataaagtatttaattacagagtagctctgaaataagtatccacaggacaatgcagataccatttaaatctcagctatatcacctttatggcaatcacacttaatgtcaacaaaagagtgtggtgttgaggagagagtagatattggcaggataacacggctgtagctgcaactataaaaggtcattggatttttaagctttcagttagcaaacagctacttaaatygaygggaactggaactgatgttttagccatccaaaccaagaacaaacccttctattaaaaagtaatcaaatcatttttagagttgrtttttggccgtctctataaatgcattatggtgttcatttttgaagctgagacagaagaggctggcctgaagtcacacaggagctgattggagagctgcaatttcttcttgggtctcttggcacccattgg

SEQ ID NO: 75017 - DNA, 430 bp, Chicken  19866894358264_5
attacagagtagctctgaaataagtatccacaggacaatgcagataccatttaaatctcagctatatcacctttatggcaatcacacttaatgtcaacaaaagagtgtggtgttgaggagagagtagatattggcaggataacacggctgtagctgcaactataaaaggtcattggatttttaagctttcagttagcaaacagctacttaaatygaygggaactggaactgatgttttagccatccaaaccaagaacaaacccttctattaaaaagtaatcaaatcatttttagagttgrtttttggccgtctctataaatgcattatggtgttcatttttgaagctgagacagaagaggctggcctgaagtcacacaggagctgattggagagctgcaatttcttcttgggtctcttggcacccattgg

SEQ ID NO: 75018 - DNA, 600 bp, Chicken  19866894358266_1
ccagctttgatgatagattctctttgtgttcttggatcacatttgatgtgaagaggatgagtttttaaagctgatgatttttgttacatggagaacaaggagtcggatggacttaaaatggaacagaagaaggtgaagtgaagggtattgattactttctggagccctgactgttgtcttcctctttaatccaggagttgtatggctgtgaagagttggattactggtacaagtgtcatcctaccacaggcaatatggttagattttggtctggggcgtataattatgcactgtcatgaratgttctggttacaatcagttcatcaaaatatttggcataaatcggagtgagcaccatgaattcatactgaatgcacaaaswgttcttctggctgtaaggactggaataatgcattcttgaaccttttaacctcgttaggttgactcaggagtcaacgtaagaggctgactcctacctttggtcttcaatgctgcagtgggtctggatgagatggagttcattttcctcatagcagcatgtgtggtggggggttaaaactgtgactaaaatagtgttgataacacaccagcgtactgact

SEQ ID NO: 75019 - DNA, 600 bp, Chicken  19866894358266_2
tgttacatggagaacaaggagtcggatggacttaaaatggaacagaagaaggtgaagtgaagggtattgattactttctggagccctgactgttgtcttcctctttaatccaggagttgtatggctgtgaagagttggattactggtacaagtgtcatcctaccacaggcaatatggttagattttggtctggggcgtataattatgcactgtcatgaratgttctggttacaatcagttcatcaaaatatttggcataaatcggagtgagcaccatgaattcatactgaatgcacaaaswgttcttctggctgtaaggactggaataatgcattcttgaaccttttaacctcgttaggttgactcaggagtcaacgtaagaggctgactcctacctttggtcttcaatgctgcagtgggtctggatgagatggagttcattttcctcatagcagcatgtgtggtggggggttaaaactgtgactaaaatagtgttgataacacaccagcgtactgactttttcttactttgcccccacagtgagaaggctgagggtgggcaagaagctgggaggggtcacagcagggacagctgagcca

SEQ ID NO: 75020 - DNA, 600 bp, Chicken  19866894358266_3
gttacatggagaacaaggagtcggatggacttaaaatggaacagaagaaggtgaagtgaagggtattgattactttctggagccctgactgttgtcttcctctttaatccaggagttgtatggctgtgaagagttggattactggtacaagtgtcatcctaccacaggcaatatggttagattttggtctggggcgtataattatgcactgtcatgaratgttctggttacaatcagttcatcaaaatatttggcataaatcggagtgagcaccatgaattcatactgaatgcacaaaswgttcttctggctgtaaggactggaataatgcattcttgaaccttttaacctcgttaggttgactcaggagtcaacgtaagaggctgactcctacctttggtcttcaatgctgcagtgggtctggatgagatggagttcattttcctcatagcagcatgtgtggtggggggttaaaactgtgactaaaatagtgttgataacacaccagcgtactgactttttcttactttgcccccacagtgagaaggctgagggtgggcaagaagctgggaggggtcacagcagggacagctgagccag

SEQ ID NO: 75021 - DNA, 599 bp, Chicken  19866894358268_1
  misc_feature (1)..(9): n is any nucleotide
nnnnnnnnncaccaaaaaattgaaactgggacctcttcttgttgtaaaaattgggctttctctgtcatctcagtacaggaacacaggacaaaatgccctccttatccttctctacgcagctctcaccactgccagtgcccacctagtatcctccataagatttccctgcagaccagaccctctcccagtcatggcagggctgatttctctcactgaaggccgctatgcaactgaaacagttaagaaaaagggagttgtttcctttctgagcttcacactcggttaccagcactcataacrgggaaggacagaatcccttcagagttgaactgagtcacaaaggatcacatttcttttcctggtacagggaaygaaggagcrcagcragcctttgaagagaatggaactggatgggggctctgccttggaaacctctctccgcatcaggtgccacctctgtcatcctcacccacatcagagccaccagaccagcacgccgtgcccaccactgtcaagaccttgcagaactgcctccaatgccccaygtaccacttagtgactggtggtcccaagcgtgaggacgggagggtgttcacctc

SEQ ID NO: 75022 - DNA, 600 bp, Chicken  19866894358268_2
gtacaggaacacaggacaaaatgccctccttatccttctctacgcagctctcaccactgccagtgcccacctagtatcctccataagatttccctgcagaccagaccctctcccagtcatggcagggctgatttctctcactgaaggccgctatgcaactgaaacagttaagaaaaagggagttgtttcctttctgagcttcacactcggttaccagcactcataacrgggaaggacagaatcccttcagagttgaactgagtcacaaaggatcacatttcttttcctggtacagggaaygaaggagcrcagcragcctttgaagagaatggaactggatgggggctctgccttggaaacctctctccgcatcaggtgccacctctgtcatcctcacccacatcagagccaccagaccagcacgccgtgcccaccactgtcaagaccttgcagaactgcctccaatgccccaygtaccacttagtgactggtggtcccaagcgtgaggacgggagggtgttcacctctctggttttccatgagcgtgacactatttctgttcccactcactttttctgttcccactcacttttcactgct

SEQ ID NO: 75023 - DNA, 600 bp, Chicken  19866894358268_3
cacaggacaaaatgccctccttatccttctctacgcagctctcaccactgccagtgcccacctagtatcctccataagatttccctgcagaccagaccctctcccagtcatggcagggctgatttctctcactgaaggccgctatgcaactgaaacagttaagaaaaagggagttgtttcctttctgagcttcacactcggttaccagcactcataacrgggaaggacagaatcccttcagagttgaactgagtcacaaaggatcacatttcttttcctggtacagggaaygaaggagcrcagcragcctttgaagagaatggaactggatgggggctctgccttggaaacctctctccgcatcaggtgccacctctgtcatcctcacccacatcagagccaccagaccagcacgccgtgcccaccactgtcaagaccttgcagaactgcctccaatgccccaygtaccacttagtgactggtggtcccaagcgtgaggacgggagggtgttcacctctctggttttccatgagcgtgacactatttctgttcccactcactttttctgttcccactcacttttcactgctttttttttt

SEQ ID NO: 75024 - DNA, 600 bp, Chicken  19866894358268_4
gacaaaatgccctccttatccttctctacgcagctctcaccactgccagtgcccacctagtatcctccataagatttccctgcagaccagaccctctcccagtcatggcagggctgatttctctcactgaaggccgctatgcaactgaaacagttaagaaaaagggagttgtttcctttctgagcttcacactcggttaccagcactcataacrgggaaggacagaatcccttcagagttgaactgagtcacaaaggatcacatttcttttcctggtacagggaaygaaggagcrcagcragcctttgaagagaatggaactggatgggggctctgccttggaaacctctctccgcatcaggtgccacctctgtcatcctcacccacatcagagccaccagaccagcacgccgtgcccaccactgtcaagaccttgcagaactgcctccaatgccccaygtaccacttagtgactggtggtcccaagcgtgaggacgggagggtgttcacctctctggttttccatgagcgtgacactatttctgttcccactcactttttctgttcccactcacttttcactgcttttttttttttttt

SEQ ID NO: 75025 - DNA, 600 bp, Chicken  19866894358268_5
aaaagggagttgtttcctttctgagcttcacactcggttaccagcactcataacrgggaaggacagaatcccttcagagttgaactgagtcacaaaggatcacatttcttttcctggtacagggaaygaaggagcrcagcragcctttgaagagaatggaactggatgggggctctgccttggaaacctctctccgcatcaggtgccacctctgtcatcctcacccacatcagagccaccagaccagcacgccgtgcccaccactgtcaagaccttgcagaactgcctccaatgccccaygtaccacttagtgactggtggtcccaagcgtgaggacgggagggtgttcacctctctggttttccatgagcgtgacactatttctgttcccactcactttttctgttcccactcacttttcactgcttttttttttttttttttttttttttttagccccggtttttcagcccaggctgtccctggtgcgagaggacccatgggcacggggatccatctccaccagcaccgactctcatacagccacacagtcgagcgcagcctttggagtagcatgagcgcggggctggagctgctttc

SEQ ID NO: 75026 - DNA, 599 bp, Chicken  19866894358276_1
  misc_feature (1)..(46): n is any nucleotide
nnnnnnnnnnnnnnnnnnnnnnnnnnnnnnnnnnnnnnnnnnnnnntttgtttttctaccctaaggcactaagagttttgatttgacacagaggtatccagactccaactatagtctttcaaatttgtcatcttaaaaaaaaaaaaaaaaaaatgtaagatacatggcaatagtaataccagataagaataaatacattatcctttgttaagaatgggtatttgtctgttaaagggcagtggttacttaataaccaaaataacttgttgtatggaggggtgacttatgcttgataagccktagttgcttgactagttyggtgaagcctgcaggctttttgaggcagaaatcctcaaagtcaaactcataaatggtatttaataaagtcagaatgttgggtaagaacagaaggcagtgactacttcgagccgttgtcatttctaaattaatttagtgaaggtaggcagaatggcactgatacgttaagagtacaggacattgcctataactggttcagtcagcaaaacctgacgtgtaccaaaagtgttctgctgtaactttttctcttcttatgccagaaggaaaatgaagtacaatgg

SEQ ID NO: 75027 - DNA, 599 bp, Chicken  19866894358276_2
  misc_feature (1)..(28): n is any nucleotide
nnnnnnnnnnnnnnnnnnnnnnnnnnnntttgtttttctaccctaaggcactaagagttttgatttgacacagaggtatccagactccaactatagtctttcaaatttgtcatcttaaaaaaaaaaaaaaaaaaatgtaagatacatggcaatagtaataccagataagaataaatacattatcctttgttaagaatgggtatttgtctgttaaagggcagtggttacttaataaccaaaataacttgttgtatggaggggtgacttatgcttgataagccktagttgcttgactagttyggtgaagcctgcaggctttttgaggcagaaatcctcaaagtcaaactcataaatggtatttaataaagtcagaatgttgggtaagaacagaaggcagtgactacttcgagccgttgtcatttctaaattaatttagtgaaggtaggcagaatggcactgatacgttaagagtacaggacattgcctataactggttcagtcagcaaaacctgacgtgtaccaaaagtgttctgctgtaactttttctcttcttatgccagaaggaaaatgaagtacaatggtggcatgctccagtgttt

SEQ ID NO: 75028 - DNA, 600 bp, Chicken  19866894358276_3
tggggcagggtttcacctggttctgcgcacagactaaaactggctttgttcttgcaaagttaagtctttaaaacttctgctagaagctgctactaaagagagggctcaagagactttttagtcagagactttggaaacaaccccgctgaaagactggtaccaataccttgagctcttagccatgtatcttccttgaaaataccttgttgccagcaaaactgttgatgtgtcactcaagatttctgtggaattcatggtaaatggacatgtcgcttcaagtggtagaaatgtgaaatcttyaaaacacttttcctgattctctaaagcgatygaagtcgccaatgcacatgaatcaagttctgatctcctgtacgaagggtagatgagactgtccattgtaccgtctttgagtttttgggcatgacttctggcggtttaagaaaccctgtaacagcttaaaatgaaataaaatggaaatatacatggattctggagtgtaatgaatctttaccttcagttctagcttataaccctgcgacagcttagcaagcgtgttgtatttggggctcttaaggggcaaactgtggagtgggtagtcag

SEQ ID NO: 75029 - DNA, 600 bp, Chicken  19866894358276_4
gactaaaactggctttgttcttgcaaagttaagtctttaaaacttctgctagaagctgctactaaagagagggctcaagagactttttagtcagagactttggaaacaaccccgctgaaagactggtaccaataccttgagctcttagccatgtatcttccttgaaaataccttgttgccagcaaaactgttgatgtgtcactcaagatttctgtggaattcatggtaaatggacatgtcgcttcaagtggtagaaatgtgaaatcttaaaaacacttttcctgattctctaaagcgatygaagtcgccaatgcacatgaatcaagttctgatctcctgtacgaagggtagatgagactgtccattgtaccgtctttgagtttttgggcatgacttctggcggtttaagaaaccctgtaacagcttaaaatgaaataaaatggaaatatacatggattctggagtgtaatgaatctttaccttcagttctagcttataaccctgcgacagcttagcaagcgtgttgtatttggggctcttaaggggcaaactgtggagtgggtagtcagctcaggtgggccatgtccagcagcttacagc

SEQ ID NO: 75030 - DNA, 600 bp, Chicken  19866894358276_5
tgagtttttgggcatgacttctggcggtttaagaaaccctgtaacagcttaaaatgaaataaaatggaaatatacatggattctggagtgtaatgaatctttaccttcagttctagcttataaccctgcgacagcttagcaagcgtgttgtatttggggctcttaaggggcaaactgtggagtgggtagtcagctcaggtgggccatgtccagcagcttacagcagtgcacatcaaggtgaattctaacacagcagcttagatggccactctgacaagagtgtcttctgactgccactgygtagtgctgttctgagactgaattgaatgtgaatgatggtttgtgcttttcacttaagctagctttgctaaactaaggaatgaaaaatcctcgttttgctgctgttcaacagcctcacaggagcccatctgctactgagaactattttgggggtcttttcttaagcatatcattccagattctttctggaggcataaaaaagaggaggaagaaaaaaaagcacagcagatttctgcagtacagaatattaggctcctttagtgtttcttgtgttaaatatcatcactagcaacgatgaaa

SEQ ID NO: 75031 - DNA, 600 bp, Chicken  19866894358284_1
agcttacgtgggtgttaaacatagcccaacttggggttaaatccaatccatttttgtagctctatatcaaaagcaccctgaacgatgacaccttcaaatgagcaattggagaagcatgtataagaatcagagacagtgacacaaagctttctcacatcaccaagggatcgtgatgaagtaacagacacatctgtagctaccatatattgcacaaagatctcattcattcattcaaatatttgccatctctttgctaatgaaaaaagatagcagaggaacacagtattgttggttggttgytttttttttcttaaatagtgcttgcaaggtataacaaacagtatcacttgtgtataattgtgtcattaaagatatacaccacacacgcaaacacatatgtatacatacacacacgcatggcacgctagccctacaggttgccacttctgccaacagttactttacaggacagattcaccagataatacttcttcagtcagacagttggaaaacacagtacagccaggtccatatttcagctactgtttgtacattcattttaatgctcaggaaaatataattttattttattaagttctg

SEQ ID NO: 75032 - DNA, 600 bp, Chicken  19866894358285_1
cactgacgtctgcctctgagtttgtgggccaacataataacataagaggcattatttttggagcatccctgttaaaatatcactgcaattatttaatctgttgcttggaagatgtgctgaaaaattgatataatgacagaaaattatcaatattagaacctggatgtgaggaggcaatcctctagtcttttctttaggagcattataggagaattctccatgtcaacatgaagacaggcagcttatcagtgatgtgacctctgtggttcccatgtgacccagtctgtgttgagacccatwcaagtggcatctgtgacttcagaaagcagaagcsaagccagtgtccttcctatgctataggcatctgtgcatacagccacctctgtaggacgctggctatgcctgtaagcaccaaaaaaaaaggtgaagttctgcatgtgcaggactgagcataccttttcattgaagaaggtaataataattgtaaaatgaaggtagaaaaagtaaaaaccacagttccagattcttattttctcagcaaataaatatgtcccttcttctttttattgtaattataacgagtatgtcttttaataattg

SEQ ID NO: 75033 - DNA, 600 bp, Chicken  19866894358285_2
taataacataagaggcattatttttggagcatccctgttaaaatatcactgcaattatttaatctgttgcttggaagatgtgctgaaaaattgatataatgacagaaaattatcaatattagaacctggatgtgaggaggcaatcctctagtcttttctttaggagcattataggagaattctccatgtcaacatgaagacaggcagcttatcagtgatgtgacctctgtggttcccatgtgacccagtctgtgttgagacccatwcaagtggcatctgtgacttcagaaagcagaagcsaagccagtgtccttcctatgctataggcatctgtgcatacagccacctctgtaggacgctggctatgcctgtaagcaccaaaaaaaaaggtgaagttctgcatgtgcaggactgagcataccttttcattgaagaaggtaataataattgtaaaatgaaggtagaaaaagtaaaaaccacagttccagattcttattttctcagcaaataaatatgtcccttcttctttttattgtaattataacgagtatgtcttttaataattgatttttccagtgatctgtaataaagtataatgct

SEQ ID NO: 75034 - DNA, 600 bp, Chicken  19866894358287_1
cagcatgaatatgacttctttttccttgtctattctgtgaattccttacactttttgagtagctcaggatctgctagtatagagatgagctttgtaaatgcatttgcttctgttccagctgcttgatgctgtaacgaacaaagttctatctgggacttgaagaaacctcactctttcctattgatttcagttctgtagaatgtggttatggactgcttttcttcatatgtgtatctgctttttcaaacaactttgctttttttctgatttacagggacatatcttattgtaataacaaaraagaaaaaagtaggtgagattttcagtcatgcaatctggaaagcgacagactttgacatcctctcctacaaaaagaccatgctgcacttaactgatattcaggtagaagtggattgaccgggggagtggggaggaaattcttctgttgatggccattaccacagaactgaacttgatggaactaggaaagttagtggatcagagtgtgttgggttttaccttgtgtggttttatttttttatgaatacttttttcactgattggttcagactacagtaattgttggagtctttgagttga

SEQ ID NO: 75035 - DNA, 600 bp, Chicken  19866894358290_1
gtgcccatcttcccttcagatgaattaaggcagagcctcagtgaaaggccattggtgcactaggagccacagtcccaggctgtgactgaggtgactcccctcatttacagctgatggggaacactggatgtagtttgctggaggaaaaggtctgtgagctaatgcaggaccctgaggcaggcaagaacattgaagtaaaaccatggaaatgactgaagaccttactgctccctacagctgcctaaaaggaggttgtagagagttggggtcacagacttttctcccagataacagtgacargacaagagatgatggccttaagttgtgctagggtatgttcaggttggatattaaggaaagtttagtctcaggagtggygaggcattggaacagggaagcagtggagtcacaccaaaaagtagaccaaagtcactactgcgctgaattctttgttccaatgtctgatctacatattacttaaatgttgtgttgtcagctgtaaagcactggctaaggacatcttcatatagacatctgttcatgaagatattcagaatatatcatatacaaacctgtcttatctataaaacgtgtgtgcac

SEQ ID NO: 75036 - DNA, 600 bp, Chicken  19866894358290_2
gctgtgactgaggtgactcccctcatttacagctgatggggaacactggatgtagtttgctggaggaaaaggtctgtgagctaatgcaggaccctgaggcaggcaagaacattgaagtaaaaccatggaaatgactgaagaccttactgctccctacagctgcctaaaaggaggttgtagagagttggggtcacagacttttctcccagataacagtgacargacaagagatgatggccttaagttgtgctagggtatgttcaggttggatattaaggaaagtttagtctcaggagtggygaggcattggaacagggaagcagtggagtcacaccaaaaagtagaccaaagtcactactgcgctgaattctttgttccaatgtctgatctacatattacttaaatgttgtgttgtcagctgtaaagcactggctaaggacatcttcatatagacatctgttcatgaagatattcagaatatatcatatacaaacctgtcttatctataaaacgtgtgtgcactggttacatcatacccagagccaagggctctcattgcccccacacttccccaccactttgcagaagacaagctcatat

SEQ ID NO: 75037 - DNA, 600 bp, Chicken  19866894358290_3
catgtctgtcaggaaaacaaattgcaatagcaaagaatttgataataactgcagtgtcatagcctccagccttaaaaatgaagtcatgtgctgtaacatttacctagaagtgatgtgctacagctccctccatgctgtaaatagtaagaataaatcaagtcacatacaaggaaaggacacagcatcacctctgtgagctgttctgccccctgtagctgacacacctttcgcccatttctataaaagggtaagattttagggcagacagactgtctctaaggtaacaacagcagctcaacrcaagcagtgttcatctccacatgtgaatggtaaacaggaaacaaagaatacccaagtttagtgcttggccggacaccaagtgttgtgctrggaagctgtattctcccagcatcaaactagaagctggaaaggcaatgaattatyggatacatctctttgtctttaatttacattgcacctcacactaaggtctctgtagcagcctgataacgatgaaaccaaaacctattggtagctgacagtagaactgtgataacataaacaatgtctgtattgcccagcactgtttgtcaacaggct

SEQ ID NO: 75038 - DNA, 600 bp, Chicken  19866894358290_4
ctgtaacatttacctagaagtgatgtgctacagctccctccatgctgtaaatagtaagaataaatcaagtcacatacaaggaaaggacacagcatcacctctgtgagctgttctgccccctgtagctgacacacctttcgcccatttctataaaagggtaagattttagggcagacagactgtctctaaggtaacaacagcagctcaacrcaagcagtgttcatctccacatgtgaatggtaaacaggaaacaaagaatacccaagtttagtgcttggccggacaccaagtgttgtgctrggaagctgtattctcccagcatcaaactagaagctggaaaggcaatgaattatyggatacatctctttgtctttaatttacattgcacctcacactaaggtctctgtagcagcctgataacgatgaaaccaaaacctattggtagctgacagtagaactgtgataacataaacaatgtctgtattgcccagcactgtttgtcaacaggctgttatcagcctgagatctgctgtgagtgcaatccccaactctgctttttggtaacagcagaatgaagaagagaaggcagcagagtcaaag

SEQ ID NO: 75039 - DNA, 600 bp, Chicken  19866894358290_5
taagaataaatcaagtcacatacaaggaaaggacacagcatcacctctgtgagctgttctgccccctgtagctgacacacctttcgcccatttctataaaagggtaagattttagggcagacagactgtctctaaggtaacaacagcagctcaacrcaagcagtgttcatctccacatgtgaatggtaaacaggaaacaaagaatacccaagtttagtgcttggccggacaccaagtgttgtgctrggaagctgtattctcccagcatcaaactagaagctggaaaggcaatgaattatyggatacatctctttgtctttaatttacattgcacctcacactaaggtctctgtagcagcctgataacgatgaaaccaaaacctattggtagctgacagtagaactgtgataacataaacaatgtctgtattgcccagcactgtttgtcaacaggctgttatcagcctgagatctgctgtgagtgcaatccccaactctgctttttggtaacagcagaatgaagaagagaaggcagcagagtcaaagtcacgcagtctcaaaacagggcctcatagctttggcttttcccatctctctgag

SEQ ID NO: 75040 - DNA, 460 bp, Chicken  19866894358290_6
tgtttgtcaacaggctgttatcagcctgagatctgctgtgagtgcaatccccaactctgctttttggtaacagcagaatgaagaagagaaggcagcagagtcaaagtcacgcagtctcaaaacagggcctcatagctttggcttttcccatctctctgagcaattcagtgccaggctgggcagtagccttgcaagcccttctttcaggtaacaccaggatgcactgacagccaaaacttcaattgaaaataagagtcttgtgttttctgttaacacaactctcctgataaacgtggcagrtagatgggatgcrgtgaggagagaggcccmagtgccctctcaggtacacagatgcacacagctaagagggggttgggtccctttaacagtaggcaaaagtgagacaaaaataatccatctgactgatgaaggagggagcagcatccatgtgctcattgag

SEQ ID NO: 75041 - DNA, 447 bp, Chicken  19866894358290_7
gctgttatcagcctgagatctgctgtgagtgcaatccccaactctgctttttggtaacagcagaatgaagaagagaaggcagcagagtcaaagtcacgcagtctcaaaacagggcctcatagctttggcttttcccatctctctgagcaattcagtgccaggctgggcagtagccttgcaagcccttctttcaggtaacaccaggatgcactgacagccaaaacttcaattgaaaataagagtcttgtgttttctgttaacacaactctcctgataaacgtggcagrtagatgggatgcrgtgaggagagaggcccmagtgccctctcaggtacacagatgcacacagctaagagggggttgggtccctttaacagtaggcaaaagtgagacaaaaataatccatctgactgatgaaggagggagcagcatccatgtgctcattgag

SEQ ID NO: 75042 - DNA, 430 bp, Chicken  19866894358290_8
atctgctgtgagtgcaatccccaactctgctttttggtaacagcagaatgaagaagagaaggcagcagagtcaaagtcacgcagtctcaaaacagggcctcatagctttggcttttcccatctctctgagcaattcagtgccaggctgggcagtagccttgcaagcccttctttcaggtaacaccaggatgcactgacagccaaaacttcaattgaaaataagagtcttgtgttttctgttaacacaactctcctgataaacgtggcagrtagatgggatgcrgtgaggagagaggcccmagtgccctctcaggtacacagatgcacacagctaagagggggttgggtccctttaacagtaggcaaaagtgagacaaaaataatccatctgactgatgaaggagggagcagcatccatgtgctcattgag

SEQ ID NO: 75043 - DNA, 586 bp, Chicken  19866894358304_1
gaaggagaggttgatttctgtgcccacgtcaaaggagacaggtggcatttccacaaagccttgcttggggaagctaactgtataaatattctgtagaagagaacagaaaagtaggattaaaagcagtgaatgaacacagagaaagccttactaactaaaatttaactaaaactatggaaatataacttggttgaagagatggaaagtaaaaaatttaagcaatttacttttcaaaacattgtgcaaacattactttatctgtttacatctgccacatgaggatagttctgaagtttgttsttacaggaatgcaaagttctaatctragcttggaataccctcccacattaaaaatatttggttagaggtgtttggggttggttttttttttttgtaatatgaatgttttccatacaggtaatacagtaagttctgctttcaaatcagtactgttgatagcaacatctaatatgaacacaaaatagattctattattcttcaaacttgcttggaaaatactttccattactcagtcattagtacttcactgtaatcgcttcactaagcagcactgacttctcgatga

SEQ ID NO: 75044 - DNA, 560 bp, Chicken  19866894358304_2
cgtcaaaggagacaggtggcatttccacaaagccttgcttggggaagctaactgtataaatattctgtagaagagaacagaaaagtaggattaaaagcagtgaatgaacacagagaaagccttactaactaaaatttaactaaaactatggaaatataacttggttgaagagatggaaagtaaaaaatttaagcaatttacttttcaaaacattgtgcaaacattactttatctgtttacatctgccacatgaggatagttctgaagtttgttsttacaggaatgcaaagttctaatctragcttggaataccctcccacattaaaaatatttggttagaggtgtttggggttggttttttttttttgtaatatgaatgttttccatacaggtaatacagtaagttctgctttcaaatcagtactgttgatagcaacatctaatatgaacacaaaatagattctattattcttcaaacttgcttggaaaatactttccattactcagtcattagtacttcactgtaatcgcttcactaagcagcactgacttctcgatga

SEQ ID NO: 75045 - DNA, 600 bp, Chicken  19866894358307_1
gtgaccactgcacatccagccttctcaggtctccacggcagggagcacagcctgtgtggcagtgctacatacacatcactcagggatgtatcagacttactggtgaggctggaataattactgtctcaggaacaataaagctagtaacacagaatgaagtgaagccaaccagttgttatccattacagagtagataaagggaatatccgtccagaacattccaagttattgtggcagtcacatatattccatataatacaaattatgtagattaaggaggctttataaattacagagggraacattcctttagaccctccagacacaacataagagaaaaaaagtaataatttctgttgtaaaaggtcaacaccatttcactgttctgcaacagtccaacaactggtctgttcagtaatataacgcaataaaaagatttgaatcattatatcatcrtttgaattgtattattattataatctttttgtttaaatagactttcttaggaaaaaatgatwctttttcaccctagaaaactgaaatatcataatgtttacttgttcaacaggattaaatccaagcacagtatactagtagctg

SEQ ID NO: 75046 - DNA, 600 bp, Chicken  19866894358307_2
aagtgaagccaaccagttgttatccattacagagtagataaagggaatatccgtccagaacattccaagttattgtggcagtcacatatattccatataatacaaattatgtagattaaggaggctttataaattacagagggraacattcctttagaccctccagacacaacataagagaaaaaaagtaataatttctgttgtaaaaggtcaacaccatttcactgttctgcaacagtccaacaactggtctgttcagtaatataacgcaataaaaagatttgaatcattatatcatcrtttgaattgtattattattataatctttttgtttaaatagactttcttaggaaaaaatgatwctttttcaccctagaaaactgaaatatcataatgtttacttgttcaacaggattaaatccaagcacagtatactagtagctggaaaaatkaccttcaccatcctttctgcattcgtgtttagagtagagctgtgaatgccaggagcgtctgataacatgctgcctttttagagcaggcaaattatttagtattacctttcaaatatgttgaattttttcgtggctatctgtgccctta

SEQ ID NO: 75047 - DNA, 600 bp, Chicken  19866894358307_3
ttccaagttattgtggcagtcacatatattccatataatacaaattatgtagattaaggaggctttataaattacagagggraacattcctttagaccctccagacacaacataagagaaaaaaagtaataatttctgttgtaaaaggtcaacaccatttcactgttctgcaacagtccaacaactggtctgttcagtaatataacgcaataaaaagatttgaatcattatatcatcrtttgaattgtattattattataatctttttgtttaaatagactttcttaggaaaaaatgatwctttttcaccctagaaaactgaaatatcataatgtttacttgttcaacaggattaaatccaagcacagtatactagtagctggaaaaatkaccttcaccatcctttctgcattcgtgtttagagtagagctgtgaatgccaggagcgtctgataacatgctgcctttttagagcaggcaaattatttagtattacctttcaaatatgttgaattttttcgtggctatctgtgcccttaaatattttattggccctttccagctggaagttctgttttcaaagacatagatttgattagta

SEQ ID NO: 75048 - DNA, 554 bp, Chicken  19866894358307_4
tttagaccctccagacacaacataagagaaaaaaagtaataatttctgttgtaaaaggtcaacaccatttcactgttctgcaacagtccaacaactggtctgttcagtaatataacgcaataaaaagatttgaatcattatatcatcrtttgaattgtattattattataatctttttgtttaaatagactttcttaggaaaaaatgatwctttttcaccctagaaaactgaaatatcataatgtttacttgttcaacaggattaaatccaagcacagtatactagtagctggaaaaatkaccttcaccatcctttctgcattcgtgtttagagtagagctgtgaatgccaggagcgtctgataacatgctgcctttttagagcaggcaaattatttagtattacctttcaaatatgttgaattttttcgtggctatctgtgcccttaaatattttattggccctttccagctggaagttctgttttcaaagacatagatttgattagtagttgcatacagtgacattgcttgttggtggtgcttcacatccag

SEQ ID NO: 75049 - DNA, 600 bp, Chicken  19866894358311_1
tcagcttggtctagtcagttaggtgacttgatgagctgaaggcgcacacactgttttgacagaaaggtgaatagatacatcagtttaaatttaacaaccccctcaactcgagttgtcattccaaagcttttttatgccaataacctgacattagatcaataacattatgacattttaaggcacatcagtgacatatcaaaaaaatattgagtaaaacccctttggataatgccaaagagcacacattacatgattttttctttctccccaccccgctccctcctttttttgagtgacggyttcttgcaaattaaagatcctaacttgcttcctatttgccatgtcacttcatttagagagacctgaatgaactggacagagtccagcagagggccaacaatgtgctaaagtgactggaacctctctactgtgagaagagactgagagagctggggctgctcagcctgaagcagaaggagcttggggggatctcacccatgtcaataaatccctgcaggaaggtgtaagaggacagagccaggttctgctcagtggtgttcagagccaggcatagagattctgggcacagcctggagccca

SEQ ID NO: 75050 - DNA, 600 bp, Chicken  19866894358314_1
tttggtactctcgcattatccactgatcaaaaaatacacagcatgtccattttcctgcagttacttacaacccccacagaaatacgtgagatgtgtgtatatatctgtgactgatttcaaaacagacgttacttgatgtttcaactcgctgagcttatgccatagagaggtgggtgaacacattcagaataactttagtaaatgtaaaacaaatgtacttgaagacagccggttatgcatgactttgtcatcctgtgatggtgctttggctagataagggttttgttgtctgcagaggaraagacaaagatgagaaatgtgagtttgtacactrgagattaaaaaaactatagatgaggtaatgctctgcaagagttagaaaaacaaagggacatggggaaataaaaagctttagcagcatgttatatctgacgttgttgtctttctctcacccacgctgcagatcatttcttaattcctccatatgtttcctctattttttttcattaattgtcatattttgcataatcaatttcattcatctagatttgctcctctactgaaatgttctgactgattagtctctgcagccttctactt

SEQ ID NO: 75051 - DNA, 600 bp, Chicken  19866894358314_2
tacacagcatgtccattttcctgcagttacttacaacccccacagaaatacgtgagatgtgtgtatatatctgtgactgatttcaaaacagacgttacttgatgtttcaactcgctgagcttatgccatagagaggtgggtgaacacattcagaataactttagtaaatgtaaaacaaatgtacttgaagacagccggttatgcatgactttgtcatcctgtgatggtgctttggctagataagggttttgttgtctgcagaggaraagacaaagatgagaaatgtgagtttgtacactrgagattaaaaaaactatagatgaggtaatgctctgcaagagttagaaaaacaaagggacatggggaaataaaaagctttagcagcatgttatatctgacgttgttgtctttctctcacccacgctgcagatcatttcttaattcctccatatgtttcctctattttttttcattaattgtcatattttgcataatcaatttcattcatctagatttgctcctctactgaaatgttctgactgattagtctctgcagccttctacttcaactacttaatggtaactatcattccccctaaa

SEQ ID NO: 75052 - DNA, 600 bp, Chicken  19866894358319_1
cgatgagggtggtgaggtgctggcactgctgcccagagaagctgtgcccaggttggatgggccctgggcagatgagctggtgggtggtgtctctgcccatgtcaggggttggagctaggtgatatttaaggtcctttccaacccaaaccactctatgatgatactatgaaatttcccattgagttatgtatgtacttacatcaattttcatttgacaaaaaatgcttatctagttcattcctgtttagtaaaggataactttagtgaagcacatcgtgattgtgttaagcctctcctgaktattctttataaaacaggctcagaagttactgtggaagcttaaaaacaattgaacaattcaagagaaaacttaaattcaaggaaaatccctccctgattatttgtgtrtgctgctatcactaaatcagttgaagtacaggaaaaagagagaagttatctgtactttatagataataggtcaaactcaggacaagcacaactccagtgaagttgttagccaagatattctaggagagactaggtccttgttctatagctgtgctaacccatcttttatgttacgctttacagacactgagg

SEQ ID NO: 75053 - DNA, 600 bp, Chicken  19866894358319_2
ttggagctaggtgatatttaaggtcctttccaacccaaaccactctatgatgatactatgaaatttcccattgagttatgtatgtacttacatcaattttcatttgacaaaaaatgcttatctagttcattcctgtttagtaaaggataactttagtgaagcacatcgtgattgtgttaagcctctcctgaktattctttataaaacaggctcagaagttactgtggaagcttaaaaacaattgaacaattcaagagaaaacttaaattcaaggaaaatccctccctgattatttgtgtrtgctgctatcactaaatcagttgaagtacaggaaaaagagagaagttatctgtactttatagataataggtcaaactcaggacaagcacaactccagtgaagttgttagccaagatattctaggagagactaggtccttgttctatagctgtgctaacccatcttttatgttacgctttacagacactgaggcaaatgtactttgtgccatcaccaacacatttacaaatcagcctgaaggctgtgtaattgcacggctgtaacctggagtttgaagcagccctcaaatctctattattt

SEQ ID NO: 75054 - DNA, 552 bp, Chicken  19866894358319_3
ctaattagcctcgaagacagactaactacaaagactgtctaaccacagtacttttaaaaactaaacaaaatgcaaatttatatggaatttgaggtcacttgttaaaaactaatctcaagaattaagggacatattgttaagtttaatatgtaatcctgggatgcaaaggattactgttcattttcttgaaaacaccgagcaaaattatcctgggaattttgccaaagtagaattcagcccattaacactgacattcgtactccaagattaaagcaacgcaagtcccaaaaatacacgttsataatgacatttaccttgccactcttccacggagatctcctaaaccagaaagctgccgcatttccaggctctttagggtagaatttgttccatagctgagattgtctctgacacgtatctgttcttgcagcatctacaaagtattcatatgcaaatacaaattcagtgtgctacgtttaatgtacgttttaaatgtcactcataatttttcagtatttcagtaaaatcaggtatcattttattatgacttta

SEQ ID NO: 75055 - DNA, 600 bp, Chicken  19866894358320_1
gaagtctctgctgccattcagcaagccatggacaggcttgagagttgggcagcaactcagatttgggctgtctcctggagtgcattaaaaagagcatggtcagaaggctgagggaggtgctcctccccccctctactttgccctgatgagaccacatttagaatactgtgcccagggaatccagcagtgggccacagatacaataaaggtcctggaacatctcccatatgaggaaaggctgagtatcctggatctattcagcatggggaaaagaagactgtgaggggatctgataaatgyttgtaaatatctaaagggagatgggaggcaaatggatgaggccaggctcttctcagtgtgcatagtgataggacaaagaataatggcctaaaacctgaacataggaagttccgtattaacatgcagaataacatctttacagtaaggatgacggagtactggaacaggttgcccagagaggttgtggagtctctttctaaggagatattcaagatctgtctggacactgacctgtgtgacctatggtaggctacctgatttagcaaggtggttggacttgatgatctcttgaggtccctt

SEQ ID NO: 75056 - DNA, 600 bp, Chicken  19866894358320_2
cattactccagcataggtccccacgggtggcagctcccctagccctcctgccccactatgggctcctctccatgggctgcagctccagctcagggtctgctcttgcaggggcttcttagggtctgaagcctccttcagccacaagcgtggctgcaccgtgggctcctctgtggctgcacgtgaagttctgctctgcgtggtgccaatgggctgcaggaggacagcttgctccaccatgagagtctcctgggctgcagggaacttctgctccacacctggaataccttctgctctctgcaytgaccatggtggttgcagggctgttgtctcccatttctcgctcctctctcccatctgctgttgcccagcagtgtacaaccagagcacaaccagtgttgctcaaggctcagatctggcattgacaagcccatttcggaacagctggagctggctctgatctgataaggggatgtgctgggttctgcttatagaagctgcgctggctacccaaaccttgccatgtaaacacagtacagaacagtgagctgcttttctagaggcatgcttgaactgcatgtgcagaagcaccattgctcagct

SEQ ID NO: 75057 - DNA, 498 bp, Chicken  19866894358321_1
aattctatcatgaccagaaacactgcccataaattcctgttagaatttcagctggtaacatcatagcagggcccagcccaaccccagtgacagcagcgagacatttatcattcactttcctggaatcagaagtaaggccaagaattgggcaaaatcagataaggttgtaagacgtcttgtcagtcaaatcttgatggctggcttccagtctttagcttagttgaaatcccagtgacttaaaggacatgtatatcaactaaatgtttctagttcagtattactttctattccaaagcacasagcaagccaccacagatgttaaaaatttccagtgtttcatgcagttcatgctcctctgaattctttcttgtggaagatcatagacacagtatttagtatttttggttttgctctgcaggaaatacagacattaaatggaaagaagatttttaaacatctgtagctctccagagagtttacattttatttactgatttc

SEQ ID NO: 75058 - DNA, 600 bp, Chicken  19866894358326_1
cttcctagtttgagtatggtagtaacattttagactgtgtttcataattatttgtccttcggtagcacttggcatacacagggcaccccaaaacttccagctgtgcaaacaacacaacacccctgtcctaggccctttcttagaagtgctaagctcttaaaacaaagagaaagaggtcgggaatgagaaaggcaatgtgatttcatggtatcagacaccctgcaaagatccagcattggtacagttctctcactcttgtaaaccttgcaacactttggatgataaaagtttgagaactcyctaaaactgaataaaataaataaataaataaaatgtcagaatgtattacttattaaataatcttgtttttaaagcctgtctgactgtaaccagcttctgatttctcaatacttgctataacaacatcagaacacgttgtttgagagcaccacagcctggtgtataaaatatcccctgtagcaggcacatgctctctgccgaggaaccctgttgtggtcaaaaaagagtaaaaaatagtgacaacctataatggcattatttagtagaggctggcaacctcaccctctcccagtgccttca

SEQ ID NO: 75059 - DNA, 600 bp, Chicken  19866894358329_1
attatcccggtcattcgaaaataatatacttagaacaaaaattgagagtgtccaaagtcagcagtgtcacaaggaaaacagaccaataaaaacaaaaatgcagaggaagaaaagtgggaatttatctataattcttttaacttgagaactgagagaagctctagaagccgctaaattcagagagtttatgggaaattattgaattttggatgtcttatgtgtatgtttaataacactgctcacagcctagaccttatgcattgctcgttgtgcagagtcaggaaaaatcagtgagagtayttgtggacctcaagamatttttcagtctttcctgaagtccatcatattttcaagaactgaagaggaaaatagttaattgtcaggctagaggtaaatctcgtctgtcaataaaactcatcaattgaccagtgggcttgtaggcccgccataactttttcagttctcctgaaggactgacacaaaattattccttgaggctactgagtttaggggttacttctctcctacttgaaaagaatagtgtaattcttattttaagacaccttattctatttctattctactagccataaaaagtga

SEQ ID NO: 75060 - DNA, 600 bp, Chicken  19866894358329_2
gaaaataatatacttagaacaaaaattgagagtgtccaaagtcagcagtgtcacaaggaaaacagaccaataaaaacaaaaatgcagaggaagaaaagtgggaatttatctataattcttttaacttgagaactgagagaagctctagaagccgctaaattcagagagtttatgggaaattattgaattttggatgtcttatgtgtatgtttaataacactgctcacagcctagaccttatgcattgctcgttgtgcagagtcaggaaaaatcagtgagagtayttgtggacctcaagamatttttcagtctttcctgaagtccatcatattttcaagaactgaagaggaaaatagttaattgtcaggctagaggtaaatctcgtctgtcaataaaactcatcaattgaccagtgggcttgtaggcccgccataactttttcagttctcctgaaggactgacacaaaattattccttgaggctactgagtttaggggttacttctctcctacttgaaaagaatagtgtaattcttattttaagacaccttattctatttctattctactagccataaaaagtgaattcctaagtgccttt

SEQ ID NO: 75061 - DNA, 600 bp, Chicken  19866894358334_1
tcgtcactggtaatatctaataaaggaaatgagagaatacggtcttggtaatcttggtgccaatgaagactgctgtcattgtatattcagcccgcttttaaagtgtatatacaactagcatggctacatggatgtccctgtttagatacacatagctgcttcttggaaatgcagcagcaagttttgggaattcacactgctgttgtgatgatctaacaggtgacaattctgactatagaattgcagtttatattcttggcaaaagctgaagtgctgcatctgaagaacttgtttctcatwttcctccattctgactggcttcactgtacagcactgaagtttgttcacaagatattcttctctgttcagttacttacaaaaaataaatgtccataatttttccttgtatgatcattcattgtcctcataatcaaagaattgagacaattgtgtccagtgagaaaaacaaatgtgaccattcctttttagaattgctagtagtgaaattgggtcaatttcacaaatttttgttcttgcaaattgcagaggaaaaaatattcctccatgggatcagcgtagaaagctacgtatatatgtcta

SEQ ID NO: 75062 - DNA, 365 bp, Chicken  19866894358334_2
gtccagtgagaaaaacaaatgtgaccattcctttttagaattgctagtagtgaaattgggtcaatttcacaaatttttgttcttgcaaattgcagaggaaaaaatattcctccatgggatcagcgtagaaagctacgtatatatgtctaattttctcccttgtgctttattccatctgaccaactatgatgtgaaactacatggaaaaggagaaggtagattgtccctttgccaagggaattgacagaaaaaggcacagaggccaggaaggttgtcacggttatttttcttctcacctcrttttttcaagaaaccaaggatcttggtagtcatccctaactgagttcaaagttaaggagacagat

SEQ ID NO: 75063 - DNA, 578 bp, Chicken  19866894358337_1
aaattttcttgagcttactgtttttaattatttcatattttcgtatatattattacattagtcactatatatgaagacatgcagtttaaaaatatcaatttctgaacaaagtatatcaattgcactttgtttcccactttccactctccaaaacagtgaaattattagttgtgtttctctaaagatggtatttgtagtggatagcactgatgtgtagagggtcattaatttaggttaattctacgtttgttgagattacataaatgagatatagccaatatgtgcagactttataaaatktttaagcaatactttgaagcttttctacaatcaaggaggaggaattctccagttagagatttatatggattgaaactttgatataacccaatggtaaactacacattcttcagcacttgaggtgccagtactttttgatttctaagcagcttatggtgtttcagaattacttccatgacagaggtaggtaaagcttaagagaagtgaaattaatatgttaacagataatgttattattattacggcagatgaatcaagtgccagttctggagagtagg

SEQ ID NO: 75064 - DNA, 599 bp, Chicken  19866894358349_1
  misc_feature (1)..(66): n is any nucleotide
nnnnnnnnnnnnnnnnnnnnnnnnnnnnnnnnnnnnnnnnnnnnnnnnnnnnnnnnnnnnnnnnnntgacctcagagctcaatccaccctatcacaccaggtgagtttgtttaattattactaaggaactctgaggagaaggacctgggtgtcctggtggacaacagggttgaccatgagccaagaaagccaatggtatcctggggtgtattaaatagagcgtggtcagcaggtcgagggaggtaatcctcccccttgactctgacctggtgaggccacatctggagtaccgtgcccagytctgggctcctcagtcccagaaagacaggatattttatgagagagtccagtggagcgctacaaagatgatgaggggtctggagcatctcccttataaggaaaggctgagagacctggggctgttcggcctggaggagagaaggctgagaggggatctcatcactgtttataaatacctaaagtacgggagccaaatggatgagaccaggctcttttcagtgctgtgcagcgacaggaccaggatcagcaggcaaaagctgcaacacaggaarttccatacaaatatgagaaagaacttc

SEQ ID NO: 75065 - DNA, 582 bp, Chicken  19866894358349_2
aggccacatctggagtaccgtgcccagytctgggctcctcagtcccagaaagacaggatattttatgagagagtccagtggagcgctacaaagatgatgaggggtctggagcatctcccttataaggaaaggctgagagacctggggctgttcggcctggaggagagaaggctgagaggggatctcatcactgtttataaatacctaaagtacgggagccaaatggatgagaccaggctcttttcagtgctgtgcagcgacaggaccaggatcagcaggcaaaagctgcaacacaggaarttccatacaaatatgagaaagaacttctttgctttgagggtgacagagcactggaacaggctgcccagagaggccgtggggtcttttctagaggtattcaagactcgcgtggatgtcttcctgtgtgacctactgtagggaacctgcttcagccagggtttggactggatgatctccataggtcccttccacctcccatgactgtgtgacatgacaccattgcacttacaagatatctatgtaaaaacacagcattaaaaagctttatattacaataagatg

SEQ ID NO: 75066 - DNA, 599 bp, Chicken  19866894358354_1
  misc_feature (1)..(17): n is any nucleotide
nnnnnnnnnnnnnnnnnccagtccgtagtgaaggccatgtcacacatccagtgcaaacaagcttgcattacgtggcctttcttcactgcagcagcagtatgatttggtaccagtgggaaaaaaagccagtattgcacggatctgtgggactcagtaaccaacagtgcgaaccacagctcctcagtgtttcctccccactaagaggagtaccatgcacctcttcttctggggtaaaaaacactgcagaagtgtggttacaggccgcaagactgtacagactcatgctgctacccaatacaraggccaagggcaggctgggctagttgctccaggggaaggaaatattccttgccaaggcagtagaagggaccaggaaagccgtcacctcaaggagaaaccagtggagagagacagaaatctggctcagccttaggtgaaatatacttatgagaaataacatttaatctttcatagaagtaaaagcccacaccaataaaatgagaaatgaaggagggagggagtgttcaactctgagctcttaaatactaggactgctccaaaagtaatgcctcctattttattatgttggcctattacat

SEQ ID NO: 75067 - DNA, 467 bp, Chicken  19866894358354_2
ctcaaggagaaaccagtggagagagacagaaatctggctcagccttaggtgaaatatacttatgagaaataacatttaatctttcatagaagtaaaagcccacaccaataaaatgagaaatgaaggagggagggagtgttcaactctgagctcttaaatactaggactgctccaaaagtaatgcctcctattttattatgttggcctattacatcagaggctgatgttggtggtatgtcggtagaggttgaaccctcctgtaacctgatgatattcagtggcattgtgttcctgtctgamaaaatgatgtctgacatgggagtgcagatgaagcaaaggtgtgacgttgaatttcttatgtggaaaaaaaggcaaccattgacatttgctgacacttgctgaatgtttatggagatcaggcagtggatgtgagcaccgtgaggcagtgagtggtgcatttcagcagt

SEQ ID NO: 75068 - DNA, 599 bp, Chicken  19866894358356_1
  misc_feature (1)..(81): n is any nucleotide
nnnnnnnnnnnnnnnnnnnnnnnnnnnnnnnnnnnnnnnnnnnnnnnnnnnnnnnnnnnnnnnnnnnnnnnnnnnnnnnnncgagctgcttttgaaggatgtgacctaattaaggctcagctcttctcaatatattttcatagtcccacgggttccttttccccgtgcgaccggccggcccggctgggcctcctgggacgtctgggagcaggaggagagaacatcagagcgcagccccatgcggtgcggtgcaaaggccgtgcacggcccccactttgcctccttgctgcagtgctgatrgcgcagagctgagggctccctgcagcccccctggccgtgccattgagctgagtttgccaagctgaggcagttgccatcaagccccaggggtgggtgtcagggctgagcctcagcgccacagggccgtccccatttcctttgggtagggaccccttcccacggggaaggcccattcgcccgtttttggctaaaaacagaataaatggttcaactctgaccccaaacccggcccagtcccaaccttcaccacccacagcagccagacaccgagcctgggggctgttggacggggaaagagg

SEQ ID NO: 75069 - DNA, 600 bp, Chicken  19866894358357_1
ttggctggaatggtgttcccgtgcaccaggagcaggtgagcagctcggccaggccagggcggctgtagggtgcatcacacagacaccccctgcaggaggagacgtcccaactcccagcactcccagtgctcccggtgtgctgctgcctgcatctgctccggggcatcgccttccccacgctgccagcctgcagcaaaatggcatttcagagcgtcgtggcaaaacggcatcccgacatcatacaaccacacaaccgtatcacttcttggcattaaaaccagagcaccccaaggggcaccygctgcttctctctgacccttgcgggctcccccgcctcctcccaccgtgcccaaatcccgtgtgctgcacccgcccatcctgctccatggtgggtgtgccgggcgtcacctgccctgcactgccccaacctgcccggccacccccagcagctccccccccccccccccgggctggctgggctttccgtgcactccctgctgctcctcctggccctgggcagcccccgggattcccccctggctgctgcaacacatgcatgatagggagagctgtgtgaatggtgatggggcactgaagtgc

SEQ ID NO: 75070 - DNA, 600 bp, Chicken  19866894358361_1
atggactccggtggggatccagggaagggtttgtttgtgtttttaatttcaccgtatggccagctgccactgttgtaggctgctgaggctgtattgctggcagttaatcaggcagccagcagcttgaatgttttaacgctggcttgcagccagttgccaatattctagccctgtgcagtcaccagctgtgacaggagctggagcaggacctctacatcaaacttactttcatgctactgctgcaaaatgagtgcaaaaccagagcaagcacatgcagctgaggaggtgcatcatcccacmtgagtgagaagtcaggtgtatttctcccagccgccagtgggactgcaactgccaggtttacagctgaacatcatgaccagagcagaaaggccaaacctccttcgaacatctcagtcaggtaaaagttctgcccctcacctgcctaaataaatgattagataacaaataatttcctcttcgtcggtgttagagggtcagtaagtttagagaaattgcacagcatttggagacactttgttcctgagctggtaaataagtgtcactgcgggtctgaaggctcataggccattcttgtccaaa

SEQ ID NO: 75071 - DNA, 600 bp, Chicken  19866894358362_1
cagactgacattgctgctgcccatgctgcagctcaggctttgtccagcagcaccagtgggatgcaacaagagtgggtgtttgcatcaccacccatttaagctctttgaattttaactacaaaggaatccaccccaaaaccatcagctccaagtagcacattgagcttgttcggttggttcagacccactggaggacatagagactctctcaacagcccaaatgcttctcatagcagcactgagaccttttttccatgacccccaggtataacagctgtgacccatttgcttggaggaagytggaagattaggaaaaacaagctgttcttaattttcctcccaaataagccgttgttgttgctctctgagctccctactcgttatgatattttgcaaagttaacagtctcaaggcacacaccatccaagggatggcagcttgtgtctctgctttgattttttcatctgggaagatgctgagagccctcagcgtggctttatggagacactgagaaccggggcktccccatggtgcagggttcagcttcccagcgggatgtcacaggcagagctgtaggtccaggggacaccttcaaagcca

SEQ ID NO: 75072 - DNA, 600 bp, Chicken  19866894358362_2
gcttctcatagcagcactgagaccttttttccatgacccccaggtataacagctgtgacccatttgcttggaggaagytggaagattaggaaaaacaagctgttcttaattttcctcccaaataagccgttgttgttgctctctgagctccctactcgttatgatattttgcaaagttaacagtctcaaggcacacaccatccaagggatggcagcttgtgtctctgctttgattttttcatctgggaagatgctgagagccctcagcgtggctttatggagacactgagaaccggggcktccccatggtgcagggttcagcttcccagcgggatgtcacaggcagagctgtaggtccaggggacaccttcaaagccaaaccwagagctgctgtccccacataatcctggggccctgctcacctcctggaagcgcttccttttgctttgttttgatgattatcagggaagcatcctgacyaccctatgcctttgctgctacagatgtaaagcatcaacccatgactatgttaagtgccrtcgcttcttaggcaaaacccagctgatcatttgctgcctgttgtgatgggaggtgaaaaaa

SEQ ID NO: 75073 - DNA, 600 bp, Chicken  19866894358362_3
gattaggaaaaacaagctgttcttaattttcctcccaaataagccgttgttgttgctctctgagctccctactcgttatgatattttgcaaagttaacagtctcaaggcacacaccatccaagggatggcagcttgtgtctctgctttgattttttcatctgggaagatgctgagagccctcagcgtggctttatggagacactgagaaccggggcktccccatggtgcagggttcagcttcccagcgggatgtcacaggcagagctgtaggtccaggggacaccttcaaagccaaaccwagagctgctgtccccacataatcctggggccctgctcacctcctggaagcgcttccttttgctttgttttgatgattatcagggaagcatcctgacyaccctatgcctttgctgctacagatgtaaagcatcaacccatgactatgttaagtgccrtcgcttcttaggcaaaacccagctgatcatttgctgcctgttgtgatgggaggtgaaaaaacacaagcacacagaacaaggaaccaaaagcctggttcgtgcacctgggaggttacaagtgtgataatggggttttgatgtgtt

SEQ ID NO: 75074 - DNA, 600 bp, Chicken  19866894358362_4
cagtctcaaggcacacaccatccaagggatggcagcttgtgtctctgctttgattttttcatctgggaagatgctgagagccctcagcgtggctttatggagacactgagaaccggggcktccccatggtgcagggttcagcttcccagcgggatgtcacaggcagagctgtaggtccaggggacaccttcaaagccaaaccwagagctgctgtccccacataatcctggggccctgctcacctcctggaagcgcttccttttgctttgttttgatgattatcagggaagcatcctgacyaccctatgcctttgctgctacagatgtaaagcatcaacccatgactatgttaagtgccrtcgcttcttaggcaaaacccagctgatcatttgctgcctgttgtgatgggaggtgaaaaaacacaagcacacagaacaaggaaccaaaagcctggttcgtgcacctgggaggttacaagtgtgataatggggttttgatgtgttgtatgaaagggctgctgcagcctcagcactggctgctgtggtttcactgggtctcagctttgatgttcagctgaaagctttcttctgtgctctggca

SEQ ID NO: 75075 - DNA, 600 bp, Chicken  19866894358362_5
catctgggaagatgctgagagccctcagcgtggctttatggagacactgagaaccggggcktccccatggtgcagggttcagcttcccagcgggatgtcacaggcagagctgtaggtccaggggacaccttcaaagccaaaccwagagctgctgtccccacataatcctggggccctgctcacctcctggaagcgcttccttttgctttgttttgatgattatcagggaagcatcctgacyaccctatgcctttgctgctacagatgtaaagcatcaacccatgactatgttaagtgccrtcgcttcttaggcaaaacccagctgatcatttgctgcctgttgtgatgggaggtgaaaaaacacaagcacacagaacaaggaaccaaaagcctggttcgtgcacctgggaggttacaagtgtgataatggggttttgatgtgttgtatgaaagggctgctgcagcctcagcactggctgctgtggtttcactgggtctcagctttgatgttcagctgaaagctttcttctgtgctctggcagagggctgcaaaccagctcaggtctgagccaccggctctgcaatgttgggatggaagga

SEQ ID NO: 75076 - DNA, 600 bp, Chicken  19866894358365_1
atgttatacttaagtatgctttaaaaaaagaaaaagggcaagaagtttctttagtttggcatcttctatcagaggcaagataatagaatttctaaacccattgattttatggcattaagaatctgcttgataagtcagtctctgtacactggtgatcactatctccagctgtataagcagtactgtcccgatttcattttcaataagaaattgagggagacttagctttgctgaaaactatggagaaaataagtagcataaaatctctttgcagttgggctatggcacagctatttattrttaaatactgtaggggtcagagagaaatagcgttggaggaagcatgagcaaagaattcttaatggagccccaggcagtgctggggccctggggcaggaacagtgctggtggtgcttcagcagcacctttctagtggcaacctcccagggatggggaagggatttttgtatgaaggtgtagcagggaaaggggcaggaactaggggtgtggggatgtccctacagtcctgcagatgtgaagcttctacagtactgaagccccggggaaaaaggactgtgctccccaccccccttgctaaga

SEQ ID NO: 75077 - DNA, 600 bp, Chicken  19866894358372_1
aaaacctttgcaactcaccataaaaatttcatttccaaaaagagacagtaaagctgtcaaagaaaaaaaaatcatgtctatggcatataccattagaccgtacataaaagaaactgcacatacatcaagacctaaataactatacaaatgcatcctaaatttcccgagacagatggtgggtcctatgcagacaagctatgcattccaacaagatttttctttaagaagaaaaagaaaagggagctgaaagaacagttgggaaatgtctaaaattccgttaaattaaaacaaatcccacargcttatgcggctatattaacctatgcaaagcaagtgaatcagagaatcattaaggctgggaaagaccactaagatcatctagtccaaccgccaacccatcaccaccatacccactaaccatgtccctctaaaaagcaagagttggcgtctcatcttgaccctgattcaggaaatcactaaaacacacttgcaataaattcttaaatcaggaaagaaaagaagtatcagcttacatttaagtacgatgagattttcaccttcgctctggccgtgcgtgtcagtaggagggcgtcccatcga

SEQ ID NO: 75078 - DNA, 600 bp, Chicken  19866894358381_1
aaaaatcctgcatggacagagggcttcagctctatggagagtagcagcagttttattgctgatatggaggggacttactgcttttgaaaatgggactgtgaggactggacaaccaaaagttggccagctagtttgactgatgaaccttttttgcttctttgtgtccagaagcaatatcaaaccagattccaagcagatacagggagaaagactatttctgctaaatatccagtatatcccaccatcattacagcttgcttagagcaggaccccactctttggcatgaactttggtgcaaytcagctactttatgtgcaacatgcaccaaggatgtctgtatattacctgagaaaggattaaggtgtatatacctaccttaagaagtaatatttgcactgagaccrtaagcatagattttcattcttatgcagttctcttcttatactgcttcttatgttgtccccatcactggaaaaaattgtttgttctttgcttctttccctttcactggtgtttgttggattggttgggttcttttgagaaagggagttcatacactgcgtgattaagatacaaaagaaggtgagcttgaagaaagg

SEQ ID NO: 75079 - DNA, 551 bp, Chicken  19866894358381_2
tggacaaccaaaagttggccagctagtttgactgatgaaccttttttgcttctttgtgtccagaagcaatatcaaaccagattccaagcagatacagggagaaagactatttctgctaaatatccagtatatcccaccatcattacagcttgcttagagcaggaccccactctttggcatgaactttggtgcaaytcagctactttatgtgcaacatgcaccaaggatgtctgtatattacctgagaaaggattaaggtgtatatacctaccttaagaagtaatatttgcactgagaccrtaagcatagattttcattcttatgcagttctcttcttatactgcttcttatgttgtccccatcactggaaaaaattgtttgttctttgcttctttccctttcactggtgtttgttggattggttgggttcttttgagaaagggagttcatacactgcgtgattaagatacaaaagaaggtgagcttgaagaaaggactcggagtagatggaagtgagttttgtggatgtaatttcttactcaagggctcat

SEQ ID NO: 75080 - DNA, 600 bp, Chicken  19866894358384_1
tttccgtgaacctttgactttgagatcacaacacaggatacacacttagcattcaagatgagaagggactaataaagagtatgattcagaggttctcaagaaaaaggagcacagatcaaagaattacatcctcttaccatacaaagtccctgagcactgaggtacataggtaagttactgcaactgaaaggcagggcagatatcctcactgtgcctgtgtaacgttgaccacagcaggacttgggcatctatgttcgactgcaaggtatcactgacaacagcagctgtgtttaaagctcwatttaaaaataaagcaggtgaacacattcatattgtggcagcacagtatgtccaggaagactgccgaatataaagatatcctttaggaaaaagtcycccaaacaaaaagaaatgaagaaagtgagcagtcaagtcacacacttataactgacatcttttgaaattactgtctgaactcacacttggccaagaccctggaaaaatcctccttttgattgctacaagctgccctaaaagcattcctctttggcttgtcagtgaagccttctaactactgtatcagtccatgtcactaaaaca

SEQ ID NO: 75081 - DNA, 600 bp, Chicken  19866894358384_2
caagaaaaaggagcacagatcaaagaattacatcctcttaccatacaaagtccctgagcactgaggtacataggtaagttactgcaactgaaaggcagggcagatatcctcactgtgcctgtgtaacgttgaccacagcaggacttgggcatctatgttcgactgcaaggtatcactgacaacagcagctgtgtttaaagctcwatttaaaaataaagcaggtgaacacattcatattgtggcagcacagtatgtccaggaagactgccgaatataaagatatcctttaggaaaaagtcycccaaacaaaaagaaatgaagaaagtgagcagtcaagtcacacacttataactgacatcttttgaaattactgtctgaactcacacttggccaagaccctggaaaaatcctccttttgattgctacaagctgccctaaaagcattcctctttggcttgtcagtgaagccttctaactactgtatcagtccatgtcactaaaacaatgctcatttatcataatttaactcaaccggtagcctttgccccaaacctactgagtgaaataacaagcacaaggaagaaataactgtgagttcaa

SEQ ID NO: 75082 - DNA, 599 bp, Chicken  19866894358386_1
  misc_feature (1)..(168): n is any nucleotide
nnnnnnnnnnnnnnnnnnnnnnnnnnnnnnnnnnnnnnnnnnnnnnnnnnnnnnnnnnnnnnnnnnnnnnnnnnnnnnnnnnnnnnnnnnnnnnnnnnnnnnnnnnnnnnnnnnnnnnnnnnnnnnnnnnnnnnnnnnnnnnnnnnnnnnnnnnnnnnnnnnnnnnnnttgttgcctttttcggggtcctgtgtatgatatacccataatgaatttccacttgagtgtagagctttaagggcattttccaccttaaaactgatcctagatgttttggttttttaaaaacagaaccactcygtgacactgtgggtggctggatatgttgtaatcctgtcatgcacttgggtgcccagactgcaaagaatctcttaatttttaagcaggcaggggaattactttacctgaatggaaatcaggctgcctcactggctttggatgatgccacccaagttggctgggaggaaaaggccagtaagacwcacctcttaactcaaaattgcctcttgacacaccatatgattttaacgtgtatcatactgttgtggtatttctattccagaacatagaatactgtactgttattaaaaacatgctag

SEQ ID NO: 75083 - DNA, 600 bp, Chicken  19866894358386_2
ggggtcctgtgtatgatatacccataatgaatttccacttgagtgtagagctttaagggcattttccaccttaaaactgatcctagatgttttggttttttaaaaacagaaccactcygtgacactgtgggtggctggatatgttgtaatcctgtcatgcacttgggtgcccagactgcaaagaatctcttaatttttaagcaggcaggggaattactttacctgaatggaaatcaggctgcctcactggctttggatgatgccacccaagttggctgggaggaaaaggccagtaagacwcacctcttaactcaaaattgcctcttgacacaccatatgattttaacgtgtatcatactgttgtggtatttctattccagaacatagaatactgtactgttattaaaaacatgctagcaaaattcagcagttgttggtacaggggaagctgtgagcagagcaggctatcaaagttcactctgaaagttaaaatgtgcaatggaaagtagacgtgtttgagtatgtgatcctagggagtcatctgggctgccagataatatggggagcaagaaatgctggatgggttgatagaatacagac

SEQ ID NO: 75084 - DNA, 599 bp, Chicken  19866894358388_1
  misc_feature (1)..(16): n is any nucleotide
nnnnnnnnnnnnnnnnttttctttagttacctcgatgcctggtagactgaaagcaaccagaataagccccttgaaatgacaaatatgttcttttaaatattcaaggtaatgcatacggagatttcaagaaagtaaggattatcattcaggtagttaacatttttgctatacttgctttttccaaagaatataaattataatacagaaaaaaaaaaagctttgaattgcttttgtatgcacacacaaataaccttatagatacataatcttatagatacataaacagaaatataaaactgstttgtaagtgatgatattcaggttgatttaagttcagtatttacatataagatgtgctatgcgtggaagtgcacgcaaattgaaggtgaaaatttgaacgtgtaattagaaaagcatgctatggatttgcagctggtaagactttagttatgggagttgttaggctggcagcatctgtatttctagatgtttgtatctacactcatggtatgtcttgctgattaaaaggtttttgacatggtatgtcattcttttgagatccctatatgtcataaaattaaggttctgagagtgtgttg

SEQ ID NO: 75085 - DNA, 600 bp, Chicken  19866894358394_1
atttatacggtttacctttttcatttctcctcctgaagtctgacatttaaaaatgtgtaattgtgtttatccctggcaagctgtgaatggctccccgggctgcctgtgcctcctgctccgctgtataaattacactgacaaccccttattacaaagggaaaaataagttaatggaaaagcaaagcagaaatagatgcataaaaatcccaaagtgcctaagtcagcagaattgcccccacgtgacagtcattgccggtatttaattaaacagggatcgatcgtgtgggtgagtgtgagttsgtgtgtgcacacgcggggagaaatcggtacatttatcctgcatttatttatttatttattttaatagtaaagtgttattgatattgcactggcagcgactccgcagcaaggctggaaatgstggagcagccagcgccgcgctggggatgtggctttggggatggaggctcggggagatgagccgcgargctcagccatccccaggtcatccctgcaggacgctgagctgcatttggggagaaacatcgagcccaaggcgccacaaacaaatgggaaccacagcagcaaaccagggtacaa

SEQ ID NO: 75086 - DNA, 600 bp, Chicken  19866894358394_2
tttatacggtttacctttttcatttctcctcctgaagtctgacatttaaaaatgtgtaattgtgtttatccctggcaagctgtgaatggctccccgggctgcctgtgcctcctgctccgctgtataaattacactgacaaccccttattacaaagggaaaaataagttaatggaaaagcaaagcagaaatagatgcataaaaatcccaaagtgcctaagtcagcagaattgcccccacgtgacagtcattgccggtatttaattaaacagggatcgatcgtgtgggtgagtgtgagtttstgtgtgcacacgcggggagaaatcggtacatttatcctgcatttatttatttatttattttaatagtaaagtgttattgatattgcactggcagcgactccgcagcaaggctggaaatgstggagcagccagcgccgcgctggggatgtggctttggggatggaggctcggggagatgagccgcgargctcagccatccccaggtcatccctgcaggacgctgagctgcatttggggagaaacatcgagcccaaggcgccacaaacaaatgggaaccacagcagcaaaccagggtacaag

SEQ ID NO: 75087 - DNA, 600 bp, Chicken  19866894358394_3
tgtataaattacactgacaaccccttattacaaagggaaaaataagttaatggaaaagcaaagcagaaatagatgcataaaaatcccaaagtgcctaagtcagcagaattgcccccacgtgacagtcattgccggtatttaattaaacagggatcgatcgtgtgggtgagtgtgagtttgtgtgtgcacacgcggggagaaatcggtacatttatcctgcatttatttatttatttattttaatagtaaagtgttattgatattgcactggcagcgactccgcagcaaggctggaaatgstggagcagccagcgccgcgctggggatgtggctttggggatggaggctcggggagatgagccgcgargctcagccatccccaggtcatccctgcaggacgctgagctgcatttggggagaaacatcgagcccaaggcgccacaaacaaatgggaaccacagcagcaaaccagggtacaagcacaacccatcgctrgtaatggtgggtgacacaggcagggctggattgtggagggaccccaaaccctgcaggatggctgtaggagtagagagggttgggaaaatgggaaagctgcctggc

SEQ ID NO: 75088 - DNA, 600 bp, Chicken  19866894358394_4
aatagatgcataaaaatcccaaagtgcctaagtcagcagaattgcccccacgtgacagtcattgccggtatttaattaaacagggatcgatcgtgtgggtgagtgtgagtttgtgtgtgcacacgcggggagaaatcggtacatttatcctgcatttatttatttatttattttaatagtaaagtgttattgatattgcactggcagcgactccgcagcaaggctggaaatgstggagcagccagcgccgcgctggggatgtggctttggggatggaggctcggggagatgagccgcgargctcagccatccccaggtcatccctgcaggacgctgagctgcatttggggagaaacatcgagcccaaggcgccacaaacaaatgggaaccacagcagcaaaccagggtacaagcacaacccatcgctrgtaatggtgggtgacacaggcagggctggattgtggagggaccccaaaccctgcaggatggctgtaggagtagagagggttgggaaaatgggaaagctgcctggctctgccatcatgcaggtgagaaggaaatacccgggatctcagaacttctggaaatgggagtggacat

SEQ ID NO: 75089 - DNA, 600 bp, Chicken  19866894358394_5
ggagaaatcggtacatttatcctgcatttatttatttatttattttaatagtaaagtgttattgatattgcactggcagcgactccgcagcaaggctggaaatgstggagcagccagcgccgcgctggggatgtggctttggggatggaggctcggggagatgagccgcgargctcagccatccccaggtcatccctgcaggacgctgagctgcatttggggagaaacatcgagcccaaggcgccacaaacaaatgggaaccacagcagcaaaccagggtacaagcacaacccatcgctrgtaatggtgggtgacacaggcagggctggattgtggagggaccccaaaccctgcaggatggctgtaggagtagagagggttgggaaaatgggaaagctgcctggctctgccatcatgcaggtgagaaggaaatacccgggatctcagaacttctggaaatgggagtggacattccctgttccttgtggctatttgggggctcttttgaagatcaggaccccatcacggggctctgcttccctatttccagctcagccactcaaaacataattaacatctaggatgaaacgcaacacctga

SEQ ID NO: 75090 - DNA, 600 bp, Chicken  19866894358399_1
acttgtctgaaagcataccctaggtagctggtaaatttttcttctttcttgtgtttatgcttttcagtcaataatacaacttaactgatggaattttatctctattgctatttcatctgcttcattccttaaggaaacactgtacatttatcaccaatgaaagaaaaggaaaaatatttcactgttcaagttcttacaagtgtttggtgatagctgtgcttgtggcaagccttcaactatacttcttgctttcctacttgacaacttcctagggtagcctttcagtcaatcatctgaatyccatttaaattcttcccccacataaaaataatgtttacctttttttttttttttttttcctgaaactcaggcagcaggccagtcagaaatcatgttgaataaacatagtggatctgagatccaaaatgagcattagattttagaccaaagctattgaattttctaatacatataaagttatatattaatgcatcaatctataaaggtgccctaatgtaaaacacatgcaaagctcattcgagtttaccatggaaagaaataaaaagatgatttctgtactgtacaactgaaatgtgatgg

SEQ ID NO: 75091 - DNA, 600 bp, Chicken  19866894358404_1
ggcatttggttattgcatttgtactgtattgcatggctgactgttttttcacccaacagttcttttacatatgttggtatttggtatttgtctttggtttgcaagtttgttggggtgttttatgagtgctttcaatgtatattaatgccagtgggctcctgaggctgtcctgagctttcaattgcattgcacctcctgtaggtagaaattagctggttatttttcatatggacagccaatatggtactggagtggtgctctatcctttagagaaaagagaagtgtgtttgtatgtctacygargagaagcaaggttggaggcccgatggatgtgttcatgggctctcttctcattgtgtattgatttacctagtggcttarcagagatgcgtccctggagctctgtctgacccacatcatttcaaatgaaaactaactggccacaaaaaggaatgtacacaacatgctaccaaatgcacaaaggtctatatgtgcctctgttgtgggcaccaaaacaggatctattcactgcttaagtcccacttaacctttcaaaatagagcttacacagtgcaaygatcacactcagtggcttaaaga

SEQ ID NO: 75092 - DNA, 600 bp, Chicken  19866894358404_2
atttggttattgcatttgtactgtattgcatggctgactgttttttcacccaacagttcttttacatatgttggtatttggtatttgtctttggtttgcaagtttgttggggtgttttatgagtgctttcaatgtatattaatgccagtgggctcctgaggctgtcctgagctttcaattgcattgcacctcctgtaggtagaaattagctggttatttttcatatggacagccaatatggtactggagtggtgctctatcctttagagaaaagagaagtgtgtttgtatgtctacygargagaagcaaggttggaggcccgatggatgtgttcatgggctctcttctcattgtgtattgatttacctagtggcttarcagagatgcgtccctggagctctgtctgacccacatcatttcaaatgaaaactaactggccacaaaaaggaatgtacacaacatgctaccaaatgcacaaaggtctatatgtgcctctgttgtgggcaccaaaacaggatctattcactgcttaagtcccacttaacctttcaaaatagagcttacacagtgcaaygatcacactcagtggcttaaagactc

SEQ ID NO: 75093 - DNA, 600 bp, Chicken  19866894358404_3
tggtatttgtctttggtttgcaagtttgttggggtgttttatgagtgctttcaatgtatattaatgccagtgggctcctgaggctgtcctgagctttcaattgcattgcacctcctgtaggtagaaattagctggttatttttcatatggacagccaatatggtactggagtggtgctctatcctttagagaaaagagaagtgtgtttgtatgtctacygargagaagcaaggttggaggcccgatggatgtgttcatgggctctcttctcattgtgtattgatttacctagtggcttarcagagatgcgtccctggagctctgtctgacccacatcatttcaaatgaaaactaactggccacaaaaaggaatgtacacaacatgctaccaaatgcacaaaggtctatatgtgcctctgttgtgggcaccaaaacaggatctattcactgcttaagtcccacttaacctttcaaaatagagcttacacagtgcaaygatcacactcagtggcttaaagactctgacttctgtctgactcttttagacaagacagaagtgatctcttacagatgcaggcagtcttgaaaagcccataatcc

SEQ ID NO: 75094 - DNA, 600 bp, Chicken  19866894358404_4
agaagtgtgtttgtatgtctacygargagaagcaaggttggaggcccgatggatgtgttcatgggctctcttctcattgtgtattgatttacctagtggcttarcagagatgcgtccctggagctctgtctgacccacatcatttcaaatgaaaactaactggccacaaaaaggaatgtacacaacatgctaccaaatgcacaaaggtctatatgtgcctctgttgtgggcaccaaaacaggatctattcactgcttaagtcccacttaacctttcaaaatagagcttacacagtgcaaygatcacactcagtggcttaaagactctgacttctgtctgactcttttagacaagacagaagtgatctcttacagatgcaggcagtcttgaaaagcccataatccagcagaagcttgtttttgtaaggacatgatccagagactggaacagttcttcctcatgttcttggcgagatttcatctgcatccaaagctgaattcaaactctgcagtagtttgggtcatcacactagcatctatctctggggaatgattatagatgatgagttattacctttaaacaaagggtaattaatgcttc

SEQ ID NO: 75095 - DNA, 599 bp, Chicken  19866894358406_1
  misc_feature (1)..(5): n is any nucleotide
nnnnnacttacacttttgcagacgtcattttgacacactttttgaacaggctggaagcccttgtttacttcagctttccccttgggcacttcgagaagttattctcctgtaattccagttctgctttgcctaggtacacctttaacagtccttgttttgttattaactcaatgattggctgacagaggcaactaggttttgaatccctgccatcagagccactctgtcaacacagtgatgacatagagttcatataaaggaagtttaaagggaacaaaaaacttttcaagcaagaaaagrtatatgctactgggaccatcaaaataacttcttgccaaacaaaacaaaacataaagaaagtatagatgggctaccaaaagatttagcaacatcctgggctcatacagcatccataacttttctgtctctgatgctccttcacatagaatagcaatgctgtaggacagacctgtagtcagaccattatgaagaacccatagtcctcagccagaaaaracttcatactgtacacaatattgatcattatgctcaggacgcagtgttgtcagtaatagtttaggtagayttactgtgacaac

SEQ ID NO: 75096 - DNA, 478 bp, Chicken  19866894358406_2
agccactctgtcaacacagtgatgacatagagttcatataaaggaagtttaaagggaacaaaaaacttttcaagcaagaaaagrtatatgctactgggaccatcaaaataacttcttgccaaacaaaacaaaacataaagaaagtatagatgggctaccaaaagatttagcaacatcctgggctcatacagcatccataacttttctgtctctgatgctccttcacatagaatagcaatgctgtaggacagacctgtagtcagaccattatgaagaacccatagtcctcagccagaaaaracttcatactgtacacaatattgatcattatgctcaggacgcagtgttgtcagtaatagtttaggtagayttactgtgacaactggccatctgggatagacatagacaaaatagcaaggtgtcattcaaggttacatgggattaactaatttcagcatttattctcaagaaaaagttt

SEQ ID NO: 75097 - DNA, 408 bp, Chicken  19866894358406_3
caagcaagaaaagrtatatgctactgggaccatcaaaataacttcttgccaaacaaaacaaaacataaagaaagtatagatgggctaccaaaagatttagcaacatcctgggctcatacagcatccataacttttctgtctctgatgctccttcacatagaatagcaatgctgtaggacagacctgtagtcagaccattatgaagaacccatagtcctcagccagaaaaracttcatactgtacacaatattgatcattatgctcaggacgcagtgttgtcagtaatagtttaggtagayttactgtgacaactggccatctgggatagacatagacaaaatagcaaggtgtcattcaaggttacatgggattaactaatttcagcatttattctcaagaaaaagttt

SEQ ID NO: 75098 - DNA, 600 bp, Chicken  19866894358412_1
agcatctaaaatattaagaaaataagtgtcactgaccagccatttgtgatcttaagtcctcctctaatgtatttgatcatcttcccattcctactcagctgtaattactccacatggaaaataaatctttgcatttgcagagcaagcatttatttctaaacctctaaagctccttccaaaattaagcataaacattattagcttgattttatagatcgtctaagtggaaagatagggacagtttaaaaatgaggtagaatcaaggatgtcggcataaactatggtgctactcctctgtcygtggcactgaagcaggcttctctaatgacttctggcaagatgcttacttacctcagtggaaaatggggataatgaaatgggtctgaccttttggaaatggtacgaaygcagtccttatacagcctacagaggatggagatttcactggaagagctcagacacaagtcctcagcctggccctatatctcacgagcattgtggaagagaatagatcttagaggtctctctcaattttcacaggtatttttaagacaattctttaggggaaaagggatcaactgagttcaaaatctcaattaa

SEQ ID NO: 75099 - DNA, 600 bp, Chicken  19866894358412_2
ctccacatggaaaataaatctttgcatttgcagagcaagcatttatttctaaacctctaaagctccttccaaaattaagcataaacattattagcttgattttatagatcgtctaagtggaaagatagggacagtttaaaaatgaggtagaatcaaggatgtcggcataaactatggtgctactcctctgtcygtggcactgaagcaggcttctctaatgacttctggcaagatgcttacttacctcagtggaaaatggggataatgaaatgggtctgaccttttggaaatggtacgaaygcagtccttatacagcctacagaggatggagatttcactggaagagctcagacacaagtcctcagcctggccctatatctcacgagcattgtggaagagaatagatcttagaggtctctctcaattttcacaggtatttttaagacaattctttaggggaaaagggatcaactgagttcaaaatctcaattaaaagaactaccttttctccccctgattagattgcacaactgaaagaacagctaactatgaaaataactaccatttcttaaaaaattgctactcttgccctttatagat

SEQ ID NO: 75100 - DNA, 600 bp, Chicken  19866894358416_1
gtttaattcagctccttccatatatcgcttagagcagtaggttttcagatcagggccaggaagtcattgcatcttctgaagacaacagaaggatttgcttcttttcagcttttagcaagaatctaccagactttggtatagttgcaagagcaggcaagcaagtaacctaggcaaatgaatactgtacatgtgagccatttgtaagggaactgttatgtcatggcctgaactgatgattgagcatctggtgaagaaggtgtctggaccaggaagcagaggtacaagtaattcacttgtgcwtcccaygtgaccagaaggggcagactctgggtccacctctccctggggttctttaagggctagcttggatgaaggctactcctggggaaggtgttttccatagctggagaccttctgtcaggtgggtgagttgactttttcctacatataattttwatcattttttatgatgctttgcctggtattgcaaagaacttatcagaagcaattkccttgcttctgaggaccagtaccaattcattcagttctgccagtgccaaaagtctgaagatgttgatttcgatccatgaatattggtag

SEQ ID NO: 75101 - DNA, 600 bp, Chicken  19866894358416_2
ttcagctccttccatatatcgcttagagcagtaggttttcagatcagggccaggaagtcattgcatcttctgaagacaacagaaggatttgcttcttttcagcttttagcaagaatctaccagactttggtatagttgcaagagcaggcaagcaagtaacctaggcaaatgaatactgtacatgtgagccatttgtaagggaactgttatgtcatggcctgaactgatgattgagcatctggtgaagaaggtgtctggaccaggaagcagaggtacaagtaattcacttgtgcwtcccaygtgaccagaaggggcagactctgggtccacctctccctggggttctttaagggctagcttggatgaaggctactcctggggaaggtgttttccatagctggagaccttctgtcaggtgggtgagttgactttttcctacatataattttwatcattttttatgatgctttgcctggtattgcaaagaacttatcagaagcaattkccttgcttctgaggaccagtaccaattcattcagttctgccagtgccaaaagtctgaagatgttgatttcgatccatgaatattggtagatagaa

SEQ ID NO: 75102 - DNA, 600 bp, Chicken  19866894358416_3
agcaagtaacctaggcaaatgaatactgtacatgtgagccatttgtaagggaactgttatgtcatggcctgaactgatgattgagcatctggtgaagaaggtgtctggaccaggaagcagaggtacaagtaattcacttgtgcwtcccaygtgaccagaaggggcagactctgggtccacctctccctggggttctttaagggctagcttggatgaaggctactcctggggaaggtgttttccatagctggagaccttctgtcaggtgggtgagttgactttttcctacatataattttwatcattttttatgatgctttgcctggtattgcaaagaacttatcagaagcaattkccttgcttctgaggaccagtaccaattcattcagttctgccagtgccaaaagtctgaagatgttgatttcgatccatgaatattggtagatagaattcatgtgttaggtatccttggttactccacagttagtatcactgagatatcctcattaaactcttatttaataaattctttgaaaaatctccatgataaattaaagatcagcctggaatctcctgtgaaattaatagaaaatggtgata

SEQ ID NO: 75103 - DNA, 600 bp, Chicken  19866894358416_4
gttatgtcatggcctgaactgatgattgagcatctggtgaagaaggtgtctggaccaggaagcagaggtacaagtaattcacttgtgcwtcccaygtgaccagaaggggcagactctgggtccacctctccctggggttctttaagggctagcttggatgaaggctactcctggggaaggtgttttccatagctggagaccttctgtcaggtgggtgagttgactttttcctacatataattttwatcattttttatgatgctttgcctggtattgcaaagaacttatcagaagcaattkccttgcttctgaggaccagtaccaattcattcagttctgccagtgccaaaagtctgaagatgttgatttcgatccatgaatattggtagatagaattcatgtgttaggtatccttggttactccacagttagtatcactgagatatcctcattaaactcttatttaataaattctttgaaaaatctccatgataaattaaagatcagcctggaatctcctgtgaaattaatagaaaatggtgatagagagaatacaaaatttgaaagttagtatgaaatttgaaatgttttaacagatac

SEQ ID NO: 75104 - DNA, 600 bp, Chicken  19866894358421_1
cagggcttttgaaattcaaggtggctgagacacagatatgcacccgtctctaatactcgctctgtcagaaagaactttctttcccaaagatgtggcaaattgtccacatcttagcattccacttttttcctgtgtgttttgctttgctttggtacttcatgcaatttagattgtcatagaatcatagaatcgctaaggttggaaaagatccacaggatcatccagtccaaccattcacccaacaccaatggttctcgctaaaccatgtccctcaacacaacatccaaacgctctttgaayacctccagggttggtgacttcaccgcctctctgggcaagattatcatcactaccacatgaatcaggaaattctttttaactgaaaatgttcatgtattcttacaaaatgcattttttccttcatgagatgttttatactgcctctgtcactgatactgattaaagtagttatgcagggaacagtgttaatagtaaatagaaatattactcaagagacaggatcacacagtatctcctcaagccagcaatcaagaagagatctgttgctgtactcttaacctaagtaacgtgaatagagct

SEQ ID NO: 75105 - DNA, 600 bp, Chicken  19866894358422_1
gaatctaaagggcagtgaactgaaagcagcaacttttttttaagagcaaggactccttaatgatgaggatggtctcatcgtgtatcgatgttaaatgtgttaaaggtgccttgtagatggagaaagctgttatcgtgtttcctgagaaactcagtagtgccacttcaaaatagaataatgaaagaaattgtttgggagatactttcagggatgactcagtccagcatccatctcaaagcaagattaataccataacaaagcctagtcagccatatctttacccagtcaagtcctgaaatyctcacaggatggacagaccacaaattccatggctgttcttacactgtgctgtccttctaatgaagcagctcctcctagcatccatcctgaatgtcaaagttagcagaagaagtgaacagcaaacatttccaatgtgtcacccataactcaatcccactttcctgagggatatcttcagaaaaccccttatttttctcagcaacagtctctatattcaaactaatttctggaaacagcatcagtcaagcaagaaccaaaccaaacttaaccagagatcaatctttcagtgtcactgaatac

SEQ ID NO: 75106 - DNA, 599 bp, Chicken  19866894358425_1
  misc_feature (1)..(60): n is any nucleotide
nnnnnnnnnnnnnnnnnnnnnnnnnnnnnnnnnnnnnnnnnnnnnnnnnnnnnnnnnnnngtggaagtgtgcacccacattgatgataatgctcatttgtcaggcaggagtgaatgtattaacaaatttccccttcctgaaatctcatcttaaaagatgttctcagaatcttcgtataaagacagggaatgaccattacaaacaggattcttccaggtatttcaataaagcaccaacctttaatgggacatgaacttcattatgccatatgcaaggctcaagctttacaaattgtggacrgcaaaaaatgatcatcagaattctacaaatccattatgtttatacttccgaccctaaaataataatgcctatagaaataattaagtgtgataatattaatgagtctcaatgtaaaatgctaattatttattgtttataaagcaattttaaataatgcagaactcatacagtaatgccatcatgattttccagtcattaacttaactggaatttgcattttgggactatagccagtgacttacatgcactacttaagtcatttttcaaacaccctgtcccatcttaatctattcatcatt

SEQ ID NO: 75107 - DNA, 433 bp, Chicken  19866894358425_2
tgtttataaagcaattttaaataatgcagaactcatacagtaatgccatcatgattttccagtcattaacttaactggaatttgcattttgggactatagccagtgacttacatgcactacttaagtcatttttcaaacaccctgtcccatcttaatctattcatcattaatcacatttggtcactttacatacagaacactattcagatgaaagataaaagaaatacattaataaaattaaagctagattgaatacttcaaaatataaaggtggtggaggaatatggttatcaaagcartttatacattatgcctattaaagcagacttgtctgtacaaaagttctgagagtttttgaggattttttttttccagtaaggaaagggtacttagaaagccacctttgtactctgtccttcctaatcatcttta

SEQ ID NO: 75108 - DNA, 600 bp, Chicken  19866894358427_1
caacgcggcatctgttaaaacaacttttccacttgccctaagaaacatcaaggcatgagacagatgctcctgaatccatatgcctgttagatcttgaagtaagtacaccttccttgttcttaaatgtatttgtatgccccttcccttcccttttttccttttcctaacaagtgacatgtgaatggaagaaaaagagaaaatgctaactgaggaatgtttcttctgatattcagaccagaatcagtgactaaactgaagtttcttgtacagcatggattaaatactttgcaagcgctggaraagcatggccttcagcctgccttgactatacactgggcaagaagctcagcgacagatgagaatgtattattgagaggaagaataagtattgataacatttgatgtgaatttgttgagataccttctatttcttttctycaacagggctctagcctggctcacatttctgtgaccagagggaatacatgggacaaagtatctattactggaagaaaattctgattactttggaaaccatcaaaaagaacaaaagtattcctgaaccaactgaatgtgctgcaagtttcaaagccagcagta

SEQ ID NO: 75109 - DNA, 600 bp, Chicken  19866894358427_2
ccttcccttcccttttttccttttcctaacaagtgacatgtgaatggaagaaaaagagaaaatgctaactgaggaatgtttcttctgatattcagaccagaatcagtgactaaactgaagtttcttgtacagcatggattaaatactttgcaagcgctggaraagcatggccttcagcctgccttgactatacactgggcaagaagctcagcgacagatgagaatgtattattgagaggaagaataagtattgataacatttgatgtgaatttgttgagataccttctatttcttttctycaacagggctctagcctggctcacatttctgtgaccagagggaatacatgggacaaagtatctattactggaagaaaattctgattactttggaaaccatcaaaaagaacaaaagtattcctgaaccaactgaatgtgctgcaagtttcaaagccagcagtaatactgcacaagagaaagttagattagcctttgctaaaaaggaaggccaatgggactgtaacatctgttcagtgagaaacaaacccactgcctcctaacgttttgcctgccagaatccaagcaaaactgatacaaaag

SEQ ID NO: 75110 - DNA, 599 bp, Chicken  19866894358432_1
  misc_feature (1)..(13): n is any nucleotide
nnnnnnnnnnnnnctttggttcacatttcaaggtaataggcaaagattttgatcatgggggaaaaggtgaggataggggaaaaaaggtatagaaatggaaatcagcacagtcaagacagaaggaaggtttgtagtgtgtaatgtggcacaggagggaaaacctggaaaacaagtataatccctagagggaattagaaaagaaaatttaaagtggaacatcaggtacttttaaagagtccataaagccttgatggcacacagtatttggagagcaacacgtcacacacatgtaaagaaggwggagtgtgaaaatgatgagagcaactacatgtttgctaactttagttcaataagcggctcttaaaaacacacttaaataaaaattattaaaggcatggaaatccactgctgaaagagtttttctaagacaggtcataatgaaatagttattggtcttctttgctgaaataatgaacctccagaaagaagaaaatagacatgcacagtccttctgaatatcagtaaaaacttttgatgtggtggccattgaaagattatcaccaaattcaaaaataaaatccagcagaggaagcacaaag

SEQ ID NO: 75111 - DNA, 599 bp, Chicken  19866894358438_1
  misc_feature (1)..(43): n is any nucleotide
nnnnnnnnnnnnnnnnnnnnnnnnnnnnnnnnnnnnnnnnnnntattttagtaaggagaaagaggaatactgtagatttattttgtttccttctggtggaagaagattacgaaatcaatctaatataattaataacacactggcaaaatacttacttgtccaagaattataacaatatcaacttttaacttgccaaagagagcagccatttctaccatctgactgcaaactatattctgcttctatttatacgtctgccagactctctaacctttggtaaataaccttctagcaatcaastggccatcaaatcaaatacttccacctgttgccagagactagtactaagaaacagtacctctttgcagttctctgccttatggatratttcttcttcaagatcacacagtgcacaattacagcaataccttacactcaaagttgactgtttcaatttgcacccaatttactgcataaagcaccgaaattctaagaatgtatgtggatttaagaactacttcaaacatagcataatagaatataataacggctgctctgcaagtaaagcctcatattttattatgtcagcccataatgtc

SEQ ID NO: 75112 - DNA, 600 bp, Chicken  19866894358438_2
ttccttctggtggaagaagattacgaaatcaatctaatataattaataacacactggcaaaatacttacttgtccaagaattataacaatatcaacttttaacttgccaaagagagcagccatttctaccatctgactgcaaactatattctgcttctatttatacgtctgccagactctctaacctttggtaaataaccttctagcaatcaastggccatcaaatcaaatacttccacctgttgccagagactagtactaagaaacagtacctctttgcagttctctgccttatggatratttcttcttcaagatcacacagtgcacaattacagcaataccttacactcaaagttgactgtttcaatttgcacccaatttactgcataaagcaccgaaattctaagaatgtatgtggatttaagaactacttcaaacatagcataatagaatataataacggctgctctgcaagtaaagcctcatattttattatgtcagcccataatgtcagaggcggatacttggtggtatggcagtagacgttgaatgaactcaccaaatcccattacgttttgttgccatgcgacagacagcag

SEQ ID NO: 75113 - DNA, 523 bp, Chicken  19866894358441_1
agaaataactacatgacaacagggcatctaccacctctctgggtggtctcattcagtgcctcatcatgcttatcataaagatattttttccttatatctggtaaatgtctcccctcttttagtttgaaatgatttccctttttcctgtcatagccgatcctgctaaagagtatgtcttctttcttgtagcaccccgttagatactgagaggccactatcaggtcacatcagagccttcacttctccaggctgaacagctgcagctttcagtctgctctcataagggaggtattctatccyttgggtcatttttgtttccctcctctgaatgcactccaatagatccatgtttctcctgtactggaaactctacatctggacacagttttccaggggtagtctcatctgcacagagtagaaggacaggatcatagaaccaaacataatcatagaaccaccaaggttggaaaagatctctaagatcatcttgttcaatcatccacctatcaacaatatttctcct

SEQ ID NO: 75114 - DNA, 600 bp, Chicken  19866894358445_1
agagcacataaggacagagtttctcctctttccccatcaccactgtggagtgtgatggtgcttaagcagacagggagcagctttcctggagctggtgggatggggagactgttggtatgctgaagagtatgcaagcatccttagagtgtgtggaaatacactcgtatgttttcttcccttgcagagacaaaatgtttcctgctctgggatttggtgcccagctcccgccagactggaaggtaatgtgtagcagtgatccgtgtgcttgaaacacttctgtcctgagagcttctcctgagrgcaggagcagagctggggcatggggcatgctcaggtttgtagggcgatgtgaggtgggaacggagtgcaggcagccaggctggccttaaggctccctggcactgatgccagtgttgctgattaattttgctggtgggaggcaggagcaatcgtggggccatggatgagattagattagattgcagtgagatctggctggaggatgggagctgggcagcctccggatgtgggcagcgcctgcaggttgtggcagcacattagagcagggaattgggtgttcagggggttgaagccaccaca

SEQ ID NO: 75115 - DNA, 600 bp, Chicken  19866894358448_1
gtcatcaaggaagtcaagtaggaggtgactgtgataacagatatatttttttcccttctgtagaagatgacataggtgatatatccttccttcacctgaaaaagaagaaaaaaatattttgtctacaaggaaaaggcgcttaaaaatttcatgccacatattatggattaacattaatctataataaatcctacacaacctccattttcagactgacatgctgtaagtacataaatatgatgtgcttctaaatgtaattagatatgagacaaaatacttcagaaagactccacattagaygtgacagctctaattttacaattttactgtcttttctttatcttctggcttgcttctcatggatttgaaacttaagaagctatggttacttctgttgtttttaagcttccatcatgtttagaaatgaagaggtaagtaccagctggtgcaaaaagaaaaaaaaaaaaaacaatgaaaaaagtgttttggtcttaaattcagaaccttttgggggaaagatctgtccattacatttccatactccttttcctggggagaaagaggcaatgaacattcctgtttccaagtatcttttatgaa

SEQ ID NO: 75116 - DNA, 600 bp, Chicken  19866894358449_1
attgcatgtagtgtggatgcattgtcttcttcagtgtaatgatctttttctactatctctgcattacacaagaacaacaatttagaagttttttaaaaagattaatcatattatactcagtatttttttaaaaaatagttctatattttttctgggctatgattagttaaaatacttaattgactttaaagaataattataacgcatgctcttatagtcagatcaattttaacttttgagttctgcagtttgaataacgcaaaatactttttgaagggaaatagaactggtttttgtttygtttgctggaaaaaataataatacrgtttctggtggtgtaccaaattacaatgaagatattagtttttccatcagtgtgaggaatggtagcctgtcgtaagtataatattttaaattactttaaggagatgtaaaactkctacatagtgactggggcttgtcaggtagtggagtgttctttttgttcttttttaacccaaaacaaaaaaaaattaaaaaaaatccaccactgtgaactacatgcagcatcttattcagttgcacttagaagtgcctaggcaatacagaactttatacaga

SEQ ID NO: 75117 - DNA, 600 bp, Chicken  19866894358449_2
cttcttcagtgtaatgatctttttctactatctctgcattacacaagaacaacaatttagaagttttttaaaaagattaatcatattatactcagtatttttttaaaaaatagttctatattttttctgggctatgattagttaaaatacttaattgactttaaagaataattataacgcatgctcttatagtcagatcaattttaacttttgagttctgcagtttgaataacgcaaaatactttttgaagggaaatagaactggtttttgtttygtttgctggaaaaaataataatacrgtttctggtggtgtaccaaattacaatgaagatattagtttttccatcagtgtgaggaatggtagcctgtcgtaagtataatattttaaattactttaaggagatgtaaaactkctacatagtgactggggcttgtcaggtagtggagtgttctttttgttcttttttaacccaaaacaaaaaaaaattaaaaaaaatccaccactgtgaactacatgcagcatcttattcagttgcacttagaagtgcctaggcaatacagaactttatacagaaaacgtggctttctagtagtgtcaa

SEQ ID NO: 75118 - DNA, 600 bp, Chicken  19866894358449_3
tctatattttttctgggctatgattagttaaaatacttaattgactttaaagaataattataacgcatgctcttatagtcagatcaattttaacttttgagttctgcagtttgaataacgcaaaatactttttgaagggaaatagaactggtttttgtttygtttgctggaaaaaataataatacrgtttctggtggtgtaccaaattacaatgaagatattagtttttccatcagtgtgaggaatggtagcctgtcgtaagtataatattttaaattactttaaggagatgtaaaactkctacatagtgactggggcttgtcaggtagtggagtgttctttttgttcttttttaacccaaaacaaaaaaaaattaaaaaaaatccaccactgtgaactacatgcagcatcttattcagttgcacttagaagtgcctaggcaatacagaactttatacagaaaacgtggctttctagtagtgtcaagtagcattttattttggggttggccatagcctatgttttttagctagattttagaagtggaaagctagtttccaacaatgggacagaaataagaggtaatttttgcatttcaca

SEQ ID NO: 75119 - DNA, 600 bp, Chicken  19866894358451_1
aaaaaccaacaacttgtctgctaaattaaagatcaaagacattgagtgtaaatgtcatttggctaaatgcagatgtctgtgctgaactttccatccaggcacacgtatgatcagacaaataaaggagaacactcccatagcaaattattcgtgtcctaccatagtttctaatactggtcattgtgaaccatccctatcaaataagtaattaagtgcctattcctttctactggctgctaagcaagctggtgtgactgctctgaatacagacacttacatttattcagatgaacctcactytcagagacaagggctaatacaaatacacctgagaacagtttcaattcattgaaataagtaatgtccttctcatgcaaatgtcttcccagagactaagacatcatcattctaacaagcctacaagctcaggtgtgtgatgtagctgggcatatttgtactgccagatatctaaatgatgtaatgtattttgaagaagcaaaatatagttgaacaacatccttgtgtctcacagcagaacctggtgtttaaaatacataggcctgtggccaagtaaacttaaattataattaactagaaatg

SEQ ID NO: 75120 - DNA, 600 bp, Chicken  19866894358464_1
tgaattaggaatacaagacagacaaatgacttgtgtgccgtgtgatgataaaaaaagaccatttgataatagtcaccacagagaatagccaaataacacaaattgtatgcatgagcatcacattgctcgtaatgaaaagaatcaaccaagcaatggcccaaatgcttattttctcaagtatgtgtctgaaagcaaacattcatgtgaatggagctgtcagtaacaaactgattaatcccacagccccagatgaagagtgacccaggtgcagcagtcttaatagcttcattttcagacacrggagagacaggaataatgttactgctgctatccagaaaaagctgccagcccccctaaatgtgaattaggagtcatacctgaagagcacaggtcctgcctagggatcagggcccragggatccatcaaactgtttatgtatgtatagcactctacggaatgcatgccatggagcttactaaccagacagacaggcagagcatgttattctcagtctgtcactagttcaaaggtctacaaacatctcctgatttggaacctcccctctacatctgtgctatgggagaattggagttcagatc

SEQ ID NO: 75121 - DNA, 600 bp, Chicken  19866894358464_2
gcatcacattgctcgtaatgaaaagaatcaaccaagcaatggcccaaatgcttattttctcaagtatgtgtctgaaagcaaacattcatgtgaatggagctgtcagtaacaaactgattaatcccacagccccagatgaagagtgacccaggtgcagcagtcttaatagcttcattttcagacacrggagagacaggaataatgttactgctgctatccagaaaaagctgccagcccccctaaatgtgaattaggagtcatacctgaagagcacaggtcctgcctagggatcagggcccragggatccatcaaactgtttatgtatgtatagcactctacggaatgcatgccatggagcttactaaccagacagacaggcagagcatgttattctcagtctgtcactagttcaaaggtctacaaacatctcctgatttggaacctcccctctacatctgtgctatgggagaattggagttcagatctgtatcccagcaccaaacatttataygtattgtgtagctcaagtgcagagaaaaaagagtgacttgcctctctcactgacagtcatttgaagtgagctctcagagccacagctg

SEQ ID NO: 75122 - DNA, 471 bp, Chicken  19866894358464_3
gctatccagaaaaagctgccagcccccctaaatgtgaattaggagtcatacctgaagagcacaggtcctgcctagggatcagggcccragggatccatcaaactgtttatgtatgtatagcactctacggaatgcatgccatggagcttactaaccagacagacaggcagagcatgttattctcagtctgtcactagttcaaaggtctacaaacatctcctgatttggaacctcccctctacatctgtgctatgggagaattggagttcagatctgtatcccagcaccaaacatttataygtattgtgtagctcaagtgcagagaaaaaagagtgacttgcctctctcactgacagtcatttgaagtgagctctcagagccacagctgcaggaaagcaggggggctgtttttctgacagccttcaagtaaaatagttttctattttgagactttcattacccttcctcatt

SEQ ID NO: 75123 - DNA, 600 bp, Chicken  19866894358466_1
ttctagtccttgggaagtgtctcagaacacacttggtcccccagccctgctattcctatagatgcagctccagttccattcaccatgcactgtttctcctgccaaggtgagaagcactgcttatttcagctaatacgaggagaagcagcttattttgttctaaagttaaacaacctgaaataagcgtttgccttgtagtctcagtgctgtcactttggtcttatttgtttcaaaaagctgaaagaacacgagaatatccagtgaatgttatatttacttctgtaaggacaactgacatayggcagatgggacacctatcaaaatgtgttaacaaaagaaggaggcagtcgtagccccttcactttgtcagttactgctgctcagcagccaccggggcaggaaagctcccagcccagtgggatggctggagaaggtgccacacaaaagagcagcagcttctcatgcacattggaggctgcggttcgttatagttattgtctactactcaacttgataaaaaggtagaaaaaagaactaatttactgcgcaagtaaaatgttactttgctcacagcacgcttaaataagaagaaagcagccc

SEQ ID NO: 75124 - DNA, 600 bp, Chicken  19866894358492_1
aggcaagtcctgggcaaaggcagagaaatcttttgtcttgaggacactgatggacaggtcctggctaaggattgtgaaatcctctaaggagcacagatggacaaggccaggggcaacgagagagagataagctgctgctaatggccgggaaacggtcttatctcgaggaagatggccatctcaggaggtatgcacaggactcttgctcaagcacccaggaatgtcacgtaggcaggagaaaatggaggataaaagagggtccaacaaccatggccaggtagaggcttatctgtcaccacracagacttgaggggttctctgccattgatccttcaccgcaacgtggaggctgatctctcaccgcaacacagaggctgatctctcatgacgacacgagctttctgccttcagatccttctctatggaccgtttgctgatggacttccctggccctgctacctgagacctgctgtttcctccctgacttactcggcagcttcttcctggacccacccggtacctgcaccctctcgttgcccaagaccagccttgctgctcctgcccttcggcctcggaccatcggaacgtcgtgcaacggga

SEQ ID NO: 75125 - DNA, 600 bp, Chicken  19866894358498_1
agagagtggtgatgaatggagttaaaaattcagctggttgacaggtcatgggtggtgatccccagggtaggggaactgttatgtcatggcctgaactgatgattgagaacctggtgaaggggggtgtggctggcccaggaagcacaggtgcagtttacctgtgattcccatgtgaccagaaggggaggaccctagatccacccctccttaggctcatttaaaggctaacctccaaaaggaagaatgtctcttggataaagactacttccttagaaggagtgttctatggtcagagacccwcatcaccagctgggtgagtcacttttttttatttttccctttgtatgattattggggttccctatgagactttgcttggtactgtaaagaacttgtcagaagtagtttctctgcttcttgggatgaacaattggtatggtcagcaggattctaggaaaactatctggaatcctgaactaggaatgtctttcttaaagaccatcccacagcagttcagatgagaggaaattcaactctgtccaggaagaattgcctggaagcattctgggttcctagggtccccatggtattcccttatga

SEQ ID NO: 75126 - DNA, 600 bp, Chicken  19866894358512_1
atgcttacactcccatgaaagcaaacgattctattgctgaactggtatgcagagttatgttcataaggaaacaaagttagcccagctcgtttttgttctcgtgttttcatgttagttgcaaggcagtgaataaaatattctagaccatgttgagtggtacacaaagaatcctcaccgatattcaacaattcccctcccagtctttgcaagtgacattcaaaatctatcatcttagctctagaggagcccacagccagagccaaagttgcagccatgtcccacggcaggcaatatggaacraaactgctttagatcatacaaaatcagcccaagctgtttaattgacattaatcacaaatgtgacaccacttaattcactacacgaacattactaaacagttttggcctctggaaagccttaatgaccttttaagaaaaatgctctaaggtttattcccagtgtactgaacctgaaggatgcatgaatattggacaggctgtgtatgtatgtgaggccactaaactgtgaacaggtgtatgtccctcagagcattgagcacaaggacagaaataacacttgcaggggggttcatgttagca

SEQ ID NO: 75127 - DNA, 600 bp, Chicken  19866894358515_1
gttgaagcattttagaaatgttagactgttgctgctttctttgttgcttcaattcagtgtaaacatgagtttaaatatttaattgttggaacattattcaaaaagtttgggcctttggctttcatctaaagcaccacatgcactagtggtgttgtgaactcggagatctaaaattgtctgtgaccattacatattgatgataaatctctgtgtttctaatttatgctttctctgtgagaaagttttgagttagtttgagatggggataaatctgtgtaaggcaaattgtataaactcagyaatgtagtactgggagagatttctacagtcactgggtcgagttacctgtccttccaagcattcaggtcatgtaatctgttctgtaaacctagagccatttgtattaaatttagtgttttgtccccactcrtctctgatttgaagtttgttccataacctcagttctatgatcattagaaacttaatcttctaattgatagaactgtttacttgcagccagtttgtacttgtttgttgctgcaccaacactggcctcctttgaaataggttgtttcccttcctgatatttgctcccttgtg

SEQ ID NO: 75128 - DNA, 600 bp, Chicken  19866894358515_2
gcaccacatgcactagtggtgttgtgaactcggagatctaaaattgtctgtgaccattacatattgatgataaatctctgtgtttctaatttatgctttctctgtgagaaagttttgagttagtttgagatggggataaatctgtgtaaggcaaattgtataaactcagyaatgtagtactgggagagatttctacagtcactgggtcgagttacctgtccttccaagcattcaggtcatgtaatctgttctgtaaacctagagccatttgtattaaatttagtgttttgtccccactcrtctctgatttgaagtttgttccataacctcagttctatgatcattagaaacttaatcttctaattgatagaactgtttacttgcagccagtttgtacttgtttgttgctgcaccaacactggcctcctttgaaataggttgtttcccttcctgatatttgctcccttgtgtttttatagcgtttggcttttctctgaattgtggctttctattcttcacatcatctcagtagtttttctgtgtgcttgcattagttcaagcccatcttccttgtatgttgtaatcagaattgtgcagaag

SEQ ID NO: 75129 - DNA, 600 bp, Chicken  19866894358515_3
gttgctgcaccaacactggcctcctttgaaataggttgtttcccttcctgatatttgctcccttgtgtttttatagcgtttggcttttctctgaattgtggctttctattcttcacatcatctcagtagtttttctgtgtgcttgcattagttcaagcccatcttccttgtatgttgtaatcagaattgtgcagaagtattctagaagattttcttttaatgttatatgaaattcatagttgtgttgcattcttatttcatatttttgttttttccattttcaaaggcatttctttaaartatttttaaaggcttacatgctgttgattaaagaatgtgtgatatgtcattgctctatagaattttttaccccctttatttttaaaatttttattacagtcagtagtaattaactgccttcgtagtgatattcttgagggttttttgaggtatggcttccatggaaatgayaggcatagaaatatgatcacatttatctaccttataactctcatgttcttacygaaaactttaaaatcatatatatgttacatttgattcctaatgagacgtagctttaaatgtcctgtgtgcatttca

SEQ ID NO: 75130 - DNA, 600 bp, Chicken  19866894358515_4
tcccttgtgtttttatagcgtttggcttttctctgaattgtggctttctattcttcacatcatctcagtagtttttctgtgtgcttgcattagttcaagcccatcttccttgtatgttgtaatcagaattgtgcagaagtattctagaagattttcttttaatgttatatgaaattcatagttgtgttgcattcttatttcatatttttgttttttccattttcaaaggcatttctttaaattatttttaaaggcttacatgctgttgattaaagaatgtgtgatatgtcattgctctaragaattttttaccccctttatttttaaaatttttattacagtcagtagtaattaactgccttcgtagtgatattcttgagggttttttgaggtatggcttccatggaaatgayaggcatagaaatatgatcacatttatctaccttataactctcatgttcttacygaaaactttaaaatcatatatatgttacatttgattcctaatgagacgtagctttaaatgtcctgtgtgcatttcatcttttcacattaaaacagagacagaaggtgtatatttaccctaataggatcccaatg

SEQ ID NO: 75131 - DNA, 600 bp, Chicken  19866894358515_5
atgttgtaatcagaattgtgcagaagtattctagaagattttcttttaatgttatatgaaattcatagttgtgttgcattcttatttcatatttttgttttttccattttcaaaggcatttctttaaattatttttaaaggcttacatgctgttgattaaagaatgtgtgatatgtcattgctctatagaattttttaccccctttatttttaaaatttttattacagtcagtagtaattaactgccttcgtagtgatattcttgagggttttttgaggtatggcttccatggaaatgayaggcatagaaatatgatcacatttatctaccttataactctcatgttcttacygaaaactttaaaatcatatatatgttacatttgattcctaatgagacgtagctttaaatgtcctgtgtgcatttcatcttttcacattaaaacagagacagaaggtgtatatttaccctaataggatcccaatgcttgaataattagtgataattaatggttttggtaaagaataggatccctatttgtctgccaaaactgcctgtcagttttggtcagtgttgtaagtgttggaataaggatcata

SEQ ID NO: 75132 - DNA, 600 bp, Chicken  19866894358515_6
atatgaaattcatagttgtgttgcattcttatttcatatttttgttttttccattttcaaaggcatttctttaaattatttttaaaggcttacatgctgttgattaaagaatgtgtgatatgtcattgctctatagaattttttaccccctttatttttaaaatttttattacagtcagtagtaattaactgccttcgtagtgatattcttgagggttttttgaggtatggcttccatggaaatgayaggcatagaaatatgatcacatttatctaccttataactctcatgttcttacygaaaactttaaaatcatatatatgttacatttgattcctaatgagacgtagctttaaatgtcctgtgtgcatttcatcttttcacattaaaacagagacagaaggtgtatatttaccctaataggatcccaatgcttgaataattagtgataattaatggttttggtaaagaataggatccctatttgtctgccaaaactgcctgtcagttttggtcagtgttgtaagtgttggaataaggatcataagataactgtacagttcttcaaataccaacctgcacaaatttttttgtatacc

SEQ ID NO: 75133 - DNA, 599 bp, Chicken  19866894358516_1
accaacagtaaaacaaacaaagcgaagacatttcaaagcattctatttttaatctcaagccaattgtatacaacacttataagaaagtgttaatgtttcctagacaactttcagaaaaagaggaccacatatcttctaatcagttaaacatttgatgtatctgtgcttaaaagagttcaaagcatcctttatagacttttgaaaagtatgtataacttttaggcatactttgtaagcggtttacatggtattcatgacagctaactttatctagtaggaagataaggctctaggctaagytgtattctctctacagtcaacaggaggagaacattattgttgctgtcatgattgtcttgaagatataaccaagacagattatttaagaagagatagtatttttattatggtgtcttgtgcacttagaaaaacttgaacacgtctttcagttgctcagatctgaaaccaaagatggagagagacactcacttctggtgggtgattcatcccttcctaagatagataagatgactcacgctccataggtgcctattcatctcaattgaccatagagggattctggatgaagcttacactaa

SEQ ID NO: 75134 - DNA, 409 bp, Chicken  19866894358521_1
aaagggggacataggaaagaagggaacagactctagtctcacggttggttgggataagacaaggagaaatggtttcaaactaaaagagaggagattcagattaggtataagaaagcattttacaggcagggtggtgaggcagtggcacaggttgcccagagaggtggtggttccgcatcccaaggtcaggctggaggggctctgagcaccctgatctacccataggtgtccctgttcattgcaagggagttggactgggtggttttaaggggctcttccaacttatgactctatacccamcccatgcggtttacccatatctcatgctccaaccaccacgctcaatactcgggatttcttcccattctgatcactaaagcaccactatcccccccaggctttaccgttg

SEQ ID NO: 75135 - DNA, 599 bp, Chicken  19866894358527_1
  misc_feature (1)..(232): n is any nucleotide
nnnnnnnnnnnnnnnnnnnnnnnnnnnnnnnnnnnnnnnnnnnnnnnnnnnnnnnnnnnnnnnnnnnnnnnnnnnnnnnnnnnnnnnnnnnnnnnnnnnnnnnnnnnnnnnnnnnnnnnnnnnnnnnnnnnnnnnnnnnnnnnnnnnnnnnnnnnnnnnnnnnnnnnnnnnnnnnnnnnnnnnnnnnnnnnnnnnnnnnnnnnnnnnnnnnnnnnnnnnnnnnnnnnnnnnnggggcaggcaaaacgtggaggaaagcgagcaggagctgctgcaagagcccggagcagtgctggtgctraagtagtccttgcgcatcacatagtgcaaaatttgttgaaacarttcatacgtatagtctgaaattccctggcaaggcacagagctcacggcaggagaattaacagccctgccctgatggctgctctccagagctttggggtttgcccagctagagcgagagcctggggcagatgggtgcaggagcccgtgcaggacggggggcttctccttggggctgtgctkcagccgtgttgcaccgcgctcagcccttcttcctctccccagggctgccgagcttcaccgacagcaagttcgtca

SEQ ID NO: 75136 - DNA, 599 bp, Chicken  19866894358527_2
  misc_feature (1)..(188): n is any nucleotide
nnnnnnnnnnnnnnnnnnnnnnnnnnnnnnnnnnnnnnnnnnnnnnnnnnnnnnnnnnnnnnnnnnnnnnnnnnnnnnnnnnnnnnnnnnnnnnnnnnnnnnnnnnnnnnnnnnnnnnnnnnnnnnnnnnnnnnnnnnnnnnnnnnnnnnnnnnnnnnnnnnnnnnnnnnnnnnnnnnnnnnnnnnnnggggcaggcaaaacgtggaggaaagcgagcaggagctgctgcaagagcccggagcagtgctggtgctraagtagtccttgcgcatcacatagtgcaaaatttgttgaaacarttcatacgtatagtctgaaattccctggcaaggcacagagctcacggcaggagaattaacagccctgccctgatggctgctctccagagctttggggtttgcccagctagagcgagagcctggggcagatgggtgcaggagcccgtgcaggacggggggcttctccttggggctgtgctkcagccgtgttgcaccgcgctcagcccttcttcctctccccagggctgccgagcttcaccgacagcaagttcgtcaagatgctccgggagctgaaggactccgagcgcaccgacaggatc

SEQ ID NO: 75137 - DNA, 599 bp, Chicken  19866894358527_3
  misc_feature (1)..(8): n is any nucleotide
nnnnnnnnggggcaggcaaaacgtggaggaaagcgagcaggagctgctgcaagagcccggagcagtgctggtgctraagtagtccttgcgcatcacatagtgcaaaatttgttgaaacarttcatacgtatagtctgaaattccctggcaaggcacagagctcacggcaggagaattaacagccctgccctgatggctgctctccagagctttggggtttgcccagctagagcgagagcctggggcagatgggtgcaggagcccgtgcaggacggggggcttctccttggggctgtgctkcagccgtgttgcaccgcgctcagcccttcttcctctccccagggctgccgagcttcaccgacagcaagttcgtcaagatgctccgggagctgaaggactccgagcgcaccgacaggatcccattgatcccctccacgcccgaggagatggccgacatgctgaagctctgctcctacgttcgcttcaaggtgccacagcaggtgaggaaccgggagagggattttggggcggcaccccggatctgcccggcggcgccttccctgtgggcttccctgctgccctctgccagtgccggctgg

SEQ ID NO: 75138 - DNA, 412 bp, Chicken  19866894358527_4
tctccccagggctgccgagcttcaccgacagcaagttcgtcaagatgctccgggagctgaaggactccgagcgcaccgacaggatcccattgatcccctccacgcccgaggagatggccgacatgctgaagctctgctcctacgttcgcttcaaggtgccacagcaggtgaggaaccgggagagggattttggggcggcaccccggatctgcccggcggcgccttccctgtgggcttccctgctgccctctgccagtgccggctggaatagccctgcgtgaggcgccggagttccagcarcgggctgcgagatagaagtgttttgcaatcaatatggctgtcaggaagcactaaataaacaaagcaggaggctattgtccgtcctgaggggggattgtttgttgctttttta

SEQ ID NO: 75139 - DNA, 600 bp, Chicken  19866894358533_1
ttttgaactccagaaggtagttgtgatgattcagtgtgtttctcacagtactaaatgcagacttggagcagcattaaggatcttaaggctgctagaattgctatgttcaaatagtcctgcgcagccaaggccaaacctaaaattgattttcagtgcttttttacgtaaagagaattaagactatgagatacaatattctatctcagtcctaggctggataattgcatctatatctctgaatctgccttacaactggtaataattttttcttgcttttttcagtatcagtaaataataagrtagggtacagtttatcagctcctkatactttcttaacaaaaggcttcttttcaataataaactaatctccatgagtatgcatgtacttccatatatcagtcagaccctctttcactttcacagattgcaatataatttgaaatccttcccttgaaattgctagccactttatgaagaagaaagaggcaataatagtaataaaacagcatatacaaatttacataaaattaatgcttcactgttaattaaaagataatagttttaaatatcagatttctttcagttatttagcacaattac

SEQ ID NO: 75140 - DNA, 600 bp, Chicken  19866894358533_2
gatgattcagtgtgtttctcacagtactaaatgcagacttggagcagcattaaggatcttaaggctgctagaattgctatgttcaaatagtcctgcgcagccaaggccaaacctaaaattgattttcagtgcttttttacgtaaagagaattaagactatgagatacaatattctatctcagtcctaggctggataattgcatctatatctctgaatctgccttacaactggtaataattttttcttgcttttttcagtatcagtaaataataagrtagggtacagtttatcagctcctkatactttcttaacaaaaggcttcttttcaataataaactaatctccatgagtatgcatgtacttccatatatcagtcagaccctctttcactttcacagattgcaatataatttgaaatccttcccttgaaattgctagccactttatgaagaagaaagaggcaataatagtaataaaacagcatatacaaatttacataaaattaatgcttcactgttaattaaaagataatagttttaaatatcagatttctttcagttatttagcacaattacaaaacccttttctctggaaaaatg

SEQ ID NO: 75141 - DNA, 600 bp, Chicken  19866894358535_1
tcaaaggacttgatccaaacttattaagtcaatgagactctttctattagcacaaactggccttctatttgatcctacacagcaagatggaaattttattcctttaaaaaaccagtgctgattaaaagagcatttccagtgaaagggttttcacactcttatgtaacagaagttgtacttctgctgttcaccagaaatcctgctagtttgctcagcatagtatatttcagtccttgctaaaattttaaaacattttcatggacagaggggagaccagaagctgctcaagtggcagtacckttgcttgaaaatgaaatacttgtttttgagtgtagaagctacagtagactgaatgtaatctagaccccggcagatcagaaagaatgcacctaaatattggcagaataatctgcagagctctagagaagccttaagtgctccaggccactgcctaccatttggcaggtatacaaggggctgcaaactcagagctatctttttgtttgtttctttgtttgttttgttttttcttaataagacattcacatagacctaacactgaagtgtgagaatgctgggaagcataacagtcaacagagg

SEQ ID NO: 75142 - DNA, 600 bp, Chicken  19866894358535_2; identical to SEQ ID NO: 75141

SEQ ID NO: 75143 - DNA, 600 bp, Chicken  19866894358535_3; identical to SEQ ID NO: 75141

SEQ ID NO: 75144 - DNA, 600 bp, Chicken  19866894358539_1
tgcttcttggaatcaaataaatgttgatcttgctgaattgctgtcttcctcttaaattctccttctctttggatttatatccttttcagaacatcccctcttttttttccacaaattgttgatgatttcagttccttgatttagtgttactgacttctaccaactcagcagtctcttctttcttctgcttctacattcttatcttgcacaaagtaatagcttatgtgctctttcacttagagtaatagctacagcacaacattaatttttctttcaacagaattgtgacaaggtcacgcrgtatcccttcaattttatgtaacacataattctaaaaacataaagtcaaaattaaaaggaatacgctgtaaataaaataggtcagcatttgctgatgtatacctccataatgacagttaaatttttgacctgagcagcacctttcttcatgcaacaaagccttttgtagggcactctgctttttattatatcctacctttggcatgcataaatactcactagttctttactataggtaccagtttatagaagaagcttttcagaaccagaaagtgatcattgagactctaatcactaaac

SEQ ID NO: 75145 - DNA, 599 bp, Chicken  19866894358543_1
  misc_feature (1)..(165): n is any nucleotide
nnnnnnnnnnnnnnnnnnnnnnnnnnnnnnnnnnnnnnnnnnnnnnnnnnnnnnnnnnnnnnnnnnnnnnnnnnnnnnnnnnnnnnnnnnnnnnnnnnnnnnnnnnnnnnnnnnnnnnnnnnnnnnnnnnnnnnnnnnnnnnnnnnnnnnnnnnnnnnnnnnnnnctttttgaggaattcagggtgaatacatttagtttgacagtcccccaatgggtcacgtagatgctactagctcgattttccatgcatgagagctggggtaacctgtcttgcccaaggttgggaaggcgacccaaygtggtagagtagaacatttgctctacaagaagtgcaaatgcagctcatgatgtgctcggaatttgcagctcatgtccttggaccattcatgcgtgttgtgcccgcttctcttttgtattctgttctggaaagaaggaggaaccagaggtggacttcataaaatatccatggaaaacacgtttttaaatttgtatgcctgcacatagggatgtgtgaagcctgctgttggagacccactcacccaaagaggcwgtgtgacctacttgttcagtcagaggagctctagtttcatgtatcaa

SEQ ID NO: 75146 - DNA, 600 bp, Chicken  19866894358543_10
gtttgacctatataacatcttagatagtcaaaattcagcttgaagaatctcaaggcaaaaagtgaggaaggatggcgtaagcsagcaagatggcattagcacatatagacgtgacttatcgctggaaaacatccaagcagaaatcaaaaggagagcgttttgtaaataataggattagagagcaggttggtattttgtgggactggctatacagtcwaactgataacaactagattaataaagtaattcaatctaaacacgstgtagccctagaaagcttttcaaaatcaatgcctatcygtgcagttttaatcaaggttggtcttcgccttttgacgccaagagatttgaaactccaggtcagtgaggtgtaataaaatgggctttgtttgtttgtttgttggtttaacacgtgcctctttaattactgccttccgtttcttaatgtttgcctcttcccacatgggacggtgaggtggtacaggtggtttgcctttgttggaggctgtggcagaccttggaaaatattgtgtttggctgaaccgcaggcattttgagccagtggaggactgagctggacaactggatgggtccctctgc

SEQ ID NO: 75147 - DNA, 600 bp, Chicken  19866894358543_2
gagagctggggtaacctgtcttgcccaaggttgggaaggcgacccaaygtggtagagtagaacatttgctctacaagaagtgcaaatgcagctcatgatgtgctcggaatttgcagctcatgtccttggaccattcatgcgtgttgtgcccgcttctcttttgtattctgttctggaaagaaggaggaaccagaggtggacttcataaaatatccatggaaaacacgtttttaaatttgtatgcctgcacatagggatgtgtgaagcctgctgttggagacccactcacccaaagaggcwgtgtgacctacttgttcagtcagaggagctctagtttcatgtatcaaaatggctcaaagcaagaccaaactgtgctgggcaacrattaagagaataatttaagaagaggacaatgaaaaaccctaaacaacccattcgttgacaggaartaaaaaagtmtttgcatacctggtatatcaggaattcttcatccaagagaatttggacccraatcataatattatattgatctttgatattttttctttcttatcctccgttatatgaatcagtgtcactttgcaactgagcacggaaatg

SEQ ID NO: 75148 - DNA, 600 bp, Chicken  19866894358543_3
aatgcagctcatgatgtgctcggaatttgcagctcatgtccttggaccattcatgcgtgttgtgcccgcttctcttttgtattctgttctggaaagaaggaggaaccagaggtggacttcataaaatatccatggaaaacacgtttttaaatttgtatgcctgcacatagggatgtgtgaagcctgctgttggagacccactcacccaaagaggcwgtgtgacctacttgttcagtcagaggagctctagtttcatgtatcaaaatggctcaaagcaagaccaaactgtgctgggcaacrattaagagaataatttaagaagaggacaatgaaaaaccctaaacaacccattcgttgacaggaartaaaaaagtmtttgcatacctggtatatcaggaattcttcatccaagagaatttggacccraatcataatattatattgatctttgatattttttctttcttatcctccgttatatgaatcagtgtcactttgcaactgagcacggaaatgtttgacctatataacatcttagatagtcaaaattcagcttgaagaatctcaaggcaaaaagtgaggaaggatggcgtaagcsag

SEQ ID NO: 75149 - DNA, 600 bp, Chicken  19866894358543_4
ccgcttctcttttgtattctgttctggaaagaaggaggaaccagaggtggacttcataaaatatccatggaaaacacgtttttaaatttgtatgcctgcacatagggatgtgtgaagcctgctgttggagacccactcacccaaagaggcwgtgtgacctacttgttcagtcagaggagctctagtttcatgtatcaaaatggctcaaagcaagaccaaactgtgctgggcaacrattaagagaataatttaagaagaggacaatgaaaaaccctaaacaacccattcgttgacaggaartaaaaaagtmtttgcatacctggtatatcaggaattcttcatccaagagaatttggacccraatcataatattatattgatctttgatattttttctttcttatcctccgttatatgaatcagtgtcactttgcaactgagcacggaaatgtttgacctatataacatcttagatagtcaaaattcagcttgaagaatctcaaggcaaaaagtgaggaaggatggcgtaagcsagcaagatggcattagcacatatagacgtgacttatcgctggaaaacatccaagcagaaatcaaaag

SEQ ID NO: 75150 - DNA, 600 bp, Chicken  19866894358543_5
tttgtattctgttctggaaagaaggaggaaccagaggtggacttcataaaatatccatggaaaacacgtttttaaatttgtatgcctgcacatagggatgtgtgaagcctgctgttggagacccactcacccaaagaggcwgtgtgacctacttgttcagtcagaggagctctagtttcatgtatcaaaatggctcaaagcaagaccaaactgtgctgggcaacrattaagagaataatttaagaagaggacaatgaaaaaccctaaacaacccattcgttgacaggaartaaaaaagtmtttgcatacctggtatatcaggaattcttcatccaagagaatttggacccraatcataatattatattgatctttgatattttttctttcttatcctccgttatatgaatcagtgtcactttgcaactgagcacggaaatgtttgacctatataacatcttagatagtcaaaattcagcttgaagaatctcaaggcaaaaagtgaggaaggatggcgtaagcsagcaagatggcattagcacatatagacgtgacttatcgctggaaaacatccaagcagaaatcaaaaggagagcgttt

SEQ ID NO: 75151 - DNA, 600 bp, Chicken  19866894358543_6
tatccatggaaaacacgtttttaaatttgtatgcctgcacatagggatgtgtgaagcctgctgttggagacccactcacccaaagaggcwgtgtgacctacttgttcagtcagaggagctctagtttcatgtatcaaaatggctcaaagcaagaccaaactgtgctgggcaacrattaagagaataatttaagaagaggacaatgaaaaaccctaaacaacccattcgttgacaggaartaaaaaagtmtttgcatacctggtatatcaggaattcttcatccaagagaatttggacccraatcataatattatattgatctttgatattttttctttcttatcctccgttatatgaatcagtgtcactttgcaactgagcacggaaatgtttgacctatataacatcttagatagtcaaaattcagcttgaagaatctcaaggcaaaaagtgaggaaggatggcgtaagcsagcaagatggcattagcacatatagacgtgacttatcgctggaaaacatccaagcagaaatcaaaaggagagcgttttgtaaataataggattagagagcaggttggtattttgtgggactggctata

SEQ ID NO: 75152 - DNA, 600 bp, Chicken  19866894358543_7
crattaagagaataatttaagaagaggacaatgaaaaaccctaaacaacccattcgttgacaggaartaaaaaagtmtttgcatacctggtatatcaggaattcttcatccaagagaatttggacccraatcataatattatattgatctttgatattttttctttcttatcctccgttatatgaatcagtgtcactttgcaactgagcacggaaatgtttgacctatataacatcttagatagtcaaaattcagcttgaagaatctcaaggcaaaaagtgaggaaggatggcgtaagcsagcaagatggcattagcacatatagacgtgacttatcgctggaaaacatccaagcagaaatcaaaaggagagcgttttgtaaataataggattagagagcaggttggtattttgtgggactggctatacagtcwaactgataacaactagattaataaagtaattcaatctaaacacgstgtagccctagaaagcttttcaaaatcaatgcctatcygtgcagttttaatcaaggttggtcttcgccttttgacgccaagagatttgaaactccaggtcagtgaggtgtaataaaatggg

SEQ ID NO: 75153 - DNA, 600 bp, Chicken  19866894358543_8
aatattatattgatctttgatattttttctttcttatcctccgttatatgaatcagtgtcactttgcaactgagcacggaaatgtttgacctatataacatcttagatagtcaaaattcagcttgaagaatctcaaggcaaaaagtgaggaaggatggcgtaagcsagcaagatggcattagcacatatagacgtgacttatcgctggaaaacatccaagcagaaatcaaaaggagagcgttttgtaaataataggattagagagcaggttggtattttgtgggactggctatacagtcwaactgataacaactagattaataaagtaattcaatctaaacacgstgtagccctagaaagcttttcaaaatcaatgcctatcygtgcagttttaatcaaggttggtcttcgccttttgacgccaagagatttgaaactccaggtcagtgaggtgtaataaaatgggctttgtttgtttgtttgttggtttaacacgtgcctctttaattactgccttccgtttcttaatgtttgcctcttcccacatgggacggtgaggtggtacaggtggtttgcctttgttggaggctgtggcagacc

SEQ ID NO: 75154 - DNA, 600 bp, Chicken  19866894358543_9
atatgaatcagtgtcactttgcaactgagcacggaaatgtttgacctatataacatcttagatagtcaaaattcagcttgaagaatctcaaggcaaaaagtgaggaaggatggcgtaagcsagcaagatggcattagcacatatagacgtgacttatcgctggaaaacatccaagcagaaatcaaaaggagagcgttttgtaaataataggattagagagcaggttggtattttgtgggactggctatacagtcwaactgataacaactagattaataaagtaattcaatctaaacacgstgtagccctagaaagcttttcaaaatcaatgcctatcygtgcagttttaatcaaggttggtcttcgccttttgacgccaagagatttgaaactccaggtcagtgaggtgtaataaaatgggctttgtttgtttgtttgttggtttaacacgtgcctctttaattactgccttccgtttcttaatgtttgcctcttcccacatgggacggtgaggtggtacaggtggtttgcctttgttggaggctgtggcagaccttggaaaatattgtgtttggctgaaccgcaggcattttgagccag

SEQ ID NO: 75155 - DNA, 600 bp, Chicken  19866894358545_1
tgctaataccgcggaggctgaaatgtgtgattatttttgcatattttactttgaaatgcaaattctgacagcagctccgatatctgcgccatctcctggggtcagaggacagagggcagctaatcacttgaaataaatctatttcccagtaatcctttgtgctatcaggccccatctagctcccctttcctccacctggctgatctcagtgagttccccgggctctcagtgctgtcatcccaaaccagcaccaagttggggcgaaagactgatggtaacaaacagccacccaacagtgayacacatggagttgggaagtatgaagctgaggtcaaaactattttctttctctcattacacggagcgtacatycattttgctgggaaagcagcagtcctgcagggaaggaggtgacccttcagggcagggtctcattgcactctttgctcccagccctgggcccatcgccaccccactgctggacaggagcagcgccaccacggctctggaatgagctttgttaagctgtaatagggtttgtaactctgccaatgtgccatataaaaggtgatgaaaattgacggcgaggcgtaacgacct

SEQ ID NO: 75156 - DNA, 600 bp, Chicken  19866894358545_2
agctccgatatctgcgccatctcctggggtcagaggacagagggcagctaatcacttgaaataaatctatttcccagtaatcctttgtgctatcaggccccatctagctcccctttcctccacctggctgatctcagtgagttccccgggctctcagtgctgtcatcccaaaccagcaccaagttggggcgaaagactgatggtaacaaacagccacccaacagtgayacacatggagttgggaagtatgaagctgaggtcaaaactattttctttctctcattacacggagcgtacatycattttgctgggaaagcagcagtcctgcagggaaggaggtgacccttcagggcagggtctcattgcactctttgctcccagccctgggcccatcgccaccccactgctggacaggagcagcgccaccacggctctggaatgagctttgttaagctgtaatagggtttgtaactctgccaatgtgccatataaaaggtgatgaaaattgacggcgaggcgtaacgacctgcacttccaccccagccctcctcccacctgtagcacggagcaggagctgtgtgcactgattgctctccaagc

SEQ ID NO: 75157 - DNA, 600 bp, Chicken  19866894358550_1
tttgctctcgtccacttatccaattaagcaattaactttgtgtggacatgaaggcagatacggtaacagccttttgcgtggtcttcctatcccccttgtaaagtggcacttaattaacttaaaacacttcagagatatgtggatttacttcccataagaataagataatgcttatcttctataacacttatcatcctgaaagtacattacaaacttagctaactaccgagtataaaattatatatgtaaataaggcagattagaagccgttccatggcatgtagtagtgctacacccacrgattagcaatatgaggatttcctaacaggtaggtaatgtataactgaagcacaaagcagttctctgattaagataaacagctaaatatacagaactgagagtagaataacgctgcttataggcagaacgggccaaactttaatcacattaatgaaatcaaatcaaaatagatcttcataggagcatagccttgctgcgtgaaaccctttgatatcagagatggtgacgtggagataaaacagaaccgtggcacgctacgatggatgtgactgctgtgttaactgatggttatcacacagc

SEQ ID NO: 75158 - DNA, 600 bp, Chicken  19866894358555_1
tgtggtctccccctttggcatctcacaggggccctccgcctccaccatcagcgccgagcactcactggagccctctgaggaggccgagctcaggatttaggcctgggcccacagacttccccgccctcccctgcagacatggggccaagagcggggccacgccgagggctgctcggcacggtactggtttggctttcccagcaccttgcccattccagggccccacgtgctgtgggttcccgtgtgctttgggactgctgactcctgtcgctccctgtggtctggcagattcagtgctcrttttgatgccctgcggactgctgagcccagcgccagcaccccaaggcatggctccttgtactgctcgtggtgtcccaggccagcgcctggcacgctgctgcttcgtggtactccgtgctctgagaggggctgggagctccctgctcactgctccctgcccagctgggtccgagcgctgccacctgcggcccctgctctatcccagccagctgcccaagccgtgcagcagcccagatgcagtgagggctgccccgtccccgctggccctgtccccgtgggactcatagggccactcgctgc

SEQ ID NO: 75159 - DNA, 599 bp, Chicken  19866894358560_1
  misc_feature (1)..(83): n is any nucleotide
nnnnnnnnnnnnnnnnnnnnnnnnnnnnnnnnnnnnnnnnnnnnnnnnnnnnnnnnnnnnnnnnnnnnnnnnnnnnnnnnnnncaacaaaggaaagaaggtgagcacttgacacagaatgaatgacataggtcattatttccgggagtgagtaccgtgtagctcagctttgtaactgcttaccccagccagaaacagagcagagttggctgaagttgggactcagttggtccagagctgcccatctatcccaccagagccgctgatttgcacctggctgacctggagcgtgagggaatcrtggacacagaggtctgtgcccatcagtgttgacacagctgaagagctgttagaaggttaagtagacactgcatctattttacttttctgtggtgtagkgaaagctgcatttattttcttgttgtttacttctttttattgttagtttctgctcaggtgagaaattgaagtttgccttaagcttcatgaatgtctccatagacacctggaaacaaaacagaatttatcacacacagtactccattaaattaaatttgatcaagacagaaataaatttctgttctttctatttcagaaggt

SEQ ID NO: 75160 - DNA, 600 bp, Chicken  19866894358560_2
ggtgagcacttgacacagaatgaatgacataggtcattatttccgggagtgagtaccgtgtagctcagctttgtaactgcttaccccagccagaaacagagcagagttggctgaagttgggactcagttggtccagagctgcccatctatcccaccagagccgctgatttgcacctggctgacctggagcgtgagggaatcrtggacacagaggtctgtgcccatcagtgttgacacagctgaagagctgttagaaggttaagtagacactgcatctattttacttttctgtggtgtagkgaaagctgcatttattttcttgttgtttacttctttttattgttagtttctgctcaggtgagaaattgaagtttgccttaagcttcatgaatgtctccatagacacctggaaacaaaacagaatttatcacacacagtactccattaaattaaatttgatcaagacagaaataaatttctgttctttctatttcagaaggtctttgttgatctccatttgactggaaccattagcgctgctgagaagtctttgttaatggctcagcatttcctctgttttgctcaagtgtgaaatgccgg

SEQ ID NO: 75161 - DNA, 600 bp, Chicken  19866894358562_1
gacttatccaggcagcactgagaacccagatctcaatggatctgaatgctggctgctagcccaggaccagcaggtgtcaccaggaggttggctcaaacactgctcttcttaggaaagctctcagcctattagggcccaggtgaagtgagtcaggccatggttaagtacagagaaaagacctgcttttgtgctgagaatctccctgaggagattggtggtattggtgaggtattggtgcccttctccaggtgggtctggcagccacagttcaccagaatgcttacaaaatctagcccacastttgtggatcctgtcctgccactatgaatcctggatctcagatcaagagggtacttaggaatggacaaagccaaagcctagttgaggattttgctgttcactgttctacagacaatatctgggttgaaatcactgaaaccactcaagaccaggcagatcatgccatttcaaattgagtgctatgaagggatcttgttctggatacactctccgttctctgttgggagttaaatggagatgtgtagcagagaaggatgggaagaaggtcctctttgtgagatttatgattcttcaggtgct

SEQ ID NO: 75162 - DNA, 600 bp, Chicken  19866894358569_1
tctaatagggctctgtaatgccttgctgccttgctgtctctcatgggtgtctgagaatgcaaagatctcccctgattccattagtccaaggtagcattccatgcactcaacaaagataagctaacagggtgaagcctgagcccctgggagagctgtgatggaagatattgaaatttcccaaaaatgtgcagcagaaaggaaggctaagaaagaactctctaacggggagcatgggtccaaccatctaaccaaatttctccacactgaattctttctgcagacattatgcattcctgctcrgtgttgtcaggtctgcttggcgtggtggcgatgctctgtgggatcctcttggtcatgtacttgggagtgagatgtagaagacaggctggacgcatcctgggtaagagctggaccactatggatgatgcacctggtctccctgcagggcttcgttgtgcttttgaatgcatttctgggattggagtttgtaccctctgtgcatcaccctgctcctttattttgcagacaagtcacatgtaaggaagatggagaatgctggggatgtcttagttagccacacttctgatactgaaggcaaga

SEQ ID NO: 75163 - DNA, 599 bp, Chicken  19866894358571_1
  misc_feature (1)..(257): n is any nucleotide
nnnnnnnnnnnnnnnnnnnnnnnnnnnnnnnnnnnnnnnnnnnnnnnnnnnnnnnnnnnnnnnnnnnnnnnnnnnnnnnnnnnnnnnnnnnnnnnnnnnnnnnnnnnnnnnnnnnnnnnnnnnnnnnnnnnnnnnnnnnnnnnnnnnnnnnnnnnnnnnnnnnnnnnnnnnnnnnnnnnnnnnnnnnnnnnnnnnnnnnnnnnnnnnnnnnnnnnnnnnnnnnnnnnnnnnnnnnnnnnnnnnnnnnnnnnnnnnnncaatgttccccaacagctcccattaaggtggagctgcttgctygcaccccttggcatccccagtgcctcctrctccctatgggggcaaygtggggacactgagtggtgccagggggggtcacagagttggggttcctcgcacagagattcctggcactgtgctgggagagtagtagggagggtggtcttctcaaagggtttcttgctttccacagcctggttcctggcaccaatcccatccccaggctgccygtggtgacactatggatgccyctatgtgttttgctgaatatctcctccaattgggtggtggccacatccccaggtaggacccgctgccca

SEQ ID NO: 75164 - DNA, 599 bp, Chicken  19866894358571_2
  misc_feature (1)..(228): n is any nucleotide
nnnnnnnnnnnnnnnnnnnnnnnnnnnnnnnnnnnnnnnnnnnnnnnnnnnnnnnnnnnnnnnnnnnnnnnnnnnnnnnnnnnnnnnnnnnnnnnnnnnnnnnnnnnnnnnnnnnnnnnnnnnnnnnnnnnnnnnnnnnnnnnnnnnnnnnnnnnnnnnnnnnnnnnnnnnnnnnnnnnnnnnnnnnnnnnnnnnnnnnnnnnnnnnnnnnnnnnnnnnnnnnnnnnncaatgttccccaacagctcccattaaggtggagctgcttgctygcaccccttggcatccccagtgcctcctrctccctatgggggcaaygtggggacactgagtggtgccagggggggtcacagagttggggttcctcgcacagagattcctggcactgtgctgggagagtagtagggagggtggtcttctcaaagggtttcttgctttccacagcctggttcctggcaccaatcccatccccaggctgccygtggtgacactatggatgccyctatgtgttttgctgaatatctcctccaattgggtggtggccacatccccaggtaggacccgctgcccacggctcacctctggcattgtttcccatta

SEQ ID NO: 75165 - DNA, 599 bp, Chicken  19866894358571_3
  misc_feature (1)..(211): n is any nucleotide
nnnnnnnnnnnnnnnnnnnnnnnnnnnnnnnnnnnnnnnnnnnnnnnnnnnnnnnnnnnnnnnnnnnnnnnnnnnnnnnnnnnnnnnnnnnnnnnnnnnnnnnnnnnnnnnnnnnnnnnnnnnnnnnnnnnnnnnnnnnnnnnnnnnnnnnnnnnnnnnnnnnnnnnnnnnnnnnnnnnnnnnnnnnnnnnnnnnnnnnnnnnnnnnnnnncaatgttccccaacagctcccattaaggtggagctgcttgctygcaccccttggcatccccagtgcctcctrctccctatgggggcaaygtggggacactgagtggtgccagggggggtcacagagttggggttcctcgcacagagattcctggcactgtgctgggagagtagtagggagggtggtcttctcaaagggtttcttgctttccacagcctggttcctggcaccaatcccatccccaggctgccygtggtgacactatggatgccyctatgtgttttgctgaatatctcctccaattgggtggtggccacatccccaggtaggacccgctgcccacggctcacctctggcattgtttcccattagtgggaagaaatagtcc

SEQ ID NO: 75166 - DNA, 599 bp, Chicken  19866894358571_4
  misc_feature (1)..(189): n is any nucleotide
nnnnnnnnnnnnnnnnnnnnnnnnnnnnnnnnnnnnnnnnnnnnnnnnnnnnnnnnnnnnnnnnnnnnnnnnnnnnnnnnnnnnnnnnnnnnnnnnnnnnnnnnnnnnnnnnnnnnnnnnnnnnnnnnnnnnnnnnnnnnnnnnnnnnnnnnnnnnnnnnnnnnnnnnnnnnnnnnnnnnnnnnnnnnncaatgttccccaacagctcccattaaggtggagctgcttgctygcaccccttggcatccccagtgcctcctrctccctatgggggcaaygtggggacactgagtggtgccygggggggtcacagagttggggttcctcgcacagagattcctggcactgtgctgggagagtagtagggagggtggtcttctcaaagggtttcttgctttccacagcctggttcctggcaccaatcccatccccaggctgccygtggtgacactatggatgccyctatgtgttttgctgaatatctcctccaattgggtggtggccacatccccaggtaggacccgctgcccacggctcacctctggcattgtttcccattagtgggaagaaatagtccctaactgccaataaaagcccga

SEQ ID NO: 75167 - DNA, 599 bp, Chicken  19866894358571_5
  misc_feature (1)..(48): n is any nucleotide
nnnnnnnnnnnnnnnnnnnnnnnnnnnnnnnnnnnnnnnnnnnnnnnncaatgttccccaacagctcccattaaggtggagctgcttgctygcaccccttggcatccccagtgcctcctrctccctatgggggcaaygtggggacactgagtggtgccagggggggtcacagagttggggttcctcgcacagagattcctggcactgtgctgggagagtagtagggagggtggtcttctcaaagggtttcttgctttccacagcctggttcctggcaccaatcccatccccaggctgccygtggtgacactatggatgccyctatgtgttttgctgaatatctcctccaattgggtggtggccacatccccaggtaggacccgctgcccacggctcacctctggcattgtttcccattagtgggaagaaatagtccctaactgccaataaaagcccgagaatggcagatctatcataacccaaggactgctgtagggcaggatttcaatcaagccaaaatttccccttctttaacccacgatccaatcctaatttcagtggaattataaagtcaatgttggggtgcagaagcctggagg

SEQ ID NO: 75168 - DNA, 599 bp, Chicken  19866894358571_6
  misc_feature (1)..(27): n is any nucleotide
nnnnnnnnnnnnnnnnnnnnnnnnnnncaatgttccccaacagctcccattaaggtggagctgcttgctygcaccccttggcatccccagtgcctcctrctccctatgggggcaaygtggggacactgagtggtgccagggggggtcacagagttggggttcctcgcacagagattcctggcactgtgctgggagagtagtagggagggtggtcttctcaaagggtttcttgctttccacagcctggttcctggcaccaatcccatccccaggctgccygtggtgacactatggatgccyctatgtgttttgctgaatatctcctccaattgggtggtggccacatccccaggtaggacccgctgcccacggctcacctctggcattgtttcccattagtgggaagaaatagtccctaactgccaataaaagcccgagaatggcagatctatcataacccaaggactgctgtagggcaggatttcaatcaagccaaaatttccccttctttaacccacgatccaatcctaatttcagtggaattataaagtcaatgttggggtgcagaagcctggaggctgagtccagaaggctgactg

SEQ ID NO: 75169 - DNA, 514 bp, Chicken  19866894358574_1
ggcacgtccactgcgctcttgtaaatttaccaatccttgactaaaaccgccaggcacctgcttggcagagcacaaagctgcctacgtttcaaccaccgacaatttactgtttcatcgccttctaaattgccctgacaatagaggggtgcaacgctaataccatttaaatcgggggagccggccgaaccccgggccgaagagcagcctgcggccgtgtgcgggagcggctcaggtgtgagcgctgccgcagcaccccccggccgcccccggaggccgaggcggccccgagccgcaggtagyggtggcagggagccctctccccccggaggactcgcgctcaaggccaccggaggaaagcagaacttaacaagcgcggtttgataaggagtcccgtttggcagtacacacaagcactcatggggtgagggaatggttcggaattaagttttgcctcttgtcgctcctttgcggatcagagaatccctcttttctaagtccctcccttcatttcttc

SEQ ID NO: 75170 - DNA, 600 bp, Chicken  19866894358575_1
cttatattcatgtgctaaatcaggtgctgcttaagccaaagtcacatcaaagggaagtatttcacaatgaccttgggatagatgactgatgtctctgagtattaaatctgctactgcttttagcatagtgaatgactgaactggcccaaagctatgaaggttgtcctggaaacagtaagcaggagtcctctttaaaggtcagtattgttcatgagagaaacatttgactccaccagcaagatccgaaatgaagtgcctgcccttttgtccttgtaagagtatttaggcagacatcctttycactaatcatgccagccctaggaattgctatataagagaccatcttctggacccagaactctactccaactgttgcacrgactgagaaataagctcacaggaatcaaagttcctgaagccacaaagctcagtaagtctatactctttactcatttgtctgtggaacaataccacatgttgattcactattcaggttcatttgtttttttaaaaatagagttataaataatttcctagagcccaaatcccagaagagagcaattcaactttagyaggaattcagactttaaggaagtgatt

SEQ ID NO: 75171 - DNA, 565 bp, Chicken  19866894358575_2
agatgactgatgtctctgagtattaaatctgctactgcttttagcatagtgaatgactgaactggcccaaagctatgaaggttgtcctggaaacagtaagcaggagtcctctttaaaggtcagtattgttcatgagagaaacatttgactccaccagcaagatccgaaatgaagtgcctgcccttttgtccttgtaagagtatttaggcagacatcctttycactaatcatgccagccctaggaattgctatataagagaccatcttctggacccagaactctactccaactgttgcacrgactgagaaataagctcacaggaatcaaagttcctgaagccacaaagctcagtaagtctatactctttactcatttgtctgtggaacaataccacatgttgattcactattcaggttcatttgtttttttaaaaatagagttataaataatttcctagagcccaaatcccagaagagagcaattcaactttagyaggaattcagactttaaggaagtgatttttcagactctctgcttgaaggcataagactgaatcaaatgtca

SEQ ID NO: 75172 - DNA, 371 bp, Chicken  19866894358575_3
taagagtatttaggcagacatcctttycactaatcatgccagccctaggaattgctatataagagaccatcttctggacccagaactctactccaactgttgcacrgactgagaaataagctcacaggaatcaaagttcctgaagccacaaagctcagtaagtctatactctttactcatttgtctgtggaacaataccacatgttgattcactattcaggttcatttgtttttttaaaaatagagttataaataatttcctagagcccaaatcccagaagagagcaattcaactttagyaggaattcagactttaaggaagtgatttttcagactctctgcttgaaggcataagactgaatcaaatgtca

SEQ ID NO: 75173 - DNA, 599 bp, Chicken  19866894358578_1
  misc_feature (1)..(181): n is any nucleotide
nnnnnnnnnnnnnnnnnnnnnnnnnnnnnnnnnnnnnnnnnnnnnnnnnnnnnnnnnnnnnnnnnnnnnnnnnnnnnnnnnnnnnnnnnnnnnnnnnnnnnnnnnnnnnnnnnnnnnnnnnnnnnnnnnnnnnnnnnnnnnnnnnnnnnnnnnnnnnnnnnnnnnnnnnnnnnnnnnnnnntcaggttgttcagagctccatccagcgtgaccttcagtgtctccaggatcagggcatctgggctcatgctgacagaggacatccctccagccttggtgactggcacccttggcaggggrctcccagcacagctcccaaagggtggtattgcccactatcactggagcccacatcaggtgagcagttctgtgctcatccaacctgatgcaagggccagaagcatttgcagcttagtgtgtcagggcattggcagcagagggaagccaagyggggtgcttctgtgggatcccactcctgttgtcacctgtgtgatgctgasatggatccccttgggtttaggggtacgtagctgggctgctgcaccactcaggtaaactgaaatgttatttggatgtggcgtcatgcttggagagttcag

SEQ ID NO: 75174 - DNA, 599 bp, Chicken  19866894358578_2
  misc_feature (1)..(31): n is any nucleotide
nnnnnnnnnnnnnnnnnnnnnnnnnnnnnnntcaggttgttcagagctccatccagcgtgaccttcagtgtctccaggatcagggcatctgggctcatgctgacagaggacatccctccagccttggtgactggcacccttggcaggggrctcccagcacagctcccaaagggtggtattgcccactatcactggagcccacatcaggtgagcagttctgtgctcatccaacctgatgcaagggccagaagcatttgcagcttagtgtgtcagggcattggcagcagagggaagccaagyggggtgcttctgtgggatcccactcctgttgtcacctgtgtgatgctgasatggatccccttgggtttaggggtacgtagctgggctgctgcaccactcaggtaaactgaaatgttatttggatgtggcgtcatgcttggagagttcaggacaacactaagcaactccttggcaatgaaaaaaataaacatttatctgttatctttttcccttttggaaccataaaatactcaacctgaaaaggaatatggcttttaaatttattctggaataagaaaacattgttctgtgtcagttca

SEQ ID NO: 75175 - DNA, 600 bp, Chicken  19866894358578_3
atccagcgtgaccttcagtgtctccaggatcagggcatctgggctcatgctgacagaggacatccctccagccttggtgactggcacccttggcaggggrctcccagcacagctcccaaagggtggtattgcccactatcactggagcccacatcaggtgagcagttctgtgctcatccaacctgatgcaagggccagaagcatttgcagcttagtgtgtcagggcattggcagcagagggaagccaagyggggtgcttctgtgggatcccactcctgttgtcacctgtgtgatgctgasatggatccccttgggtttaggggtacgtagctgggctgctgcaccactcaggtaaactgaaatgttatttggatgtggcgtcatgcttggagagttcaggacaacactaagcaactccttggcaatgaaaaaaataaacatttatctgttatctttttcccttttggaaccataaaatactcaacctgaaaaggaatatggcttttaaatttattctggaataagaaaacattgttctgtgtcagttcagaaaaggctttttctgtctgctgtgggccagattgccttatccgaaaccac

SEQ ID NO: 75176 - DNA, 600 bp, Chicken  19866894358586_1
agcagcacaaactgcgtttggatggttggaaatcacagatggctggctggggctcgcagggattcagcctccatcctcccttccttctgcttcgccttcctcccccacacagcaaaggctgttttcaggtcatctgtaggactgtgttactgcgtgccacagctgaagcagatttggctgctgcctgctgaaaacacttacaagggctgcagaaatgcatgtggtgcctgagctctgctggaatgacccctcttagctccagaatacccacctggatctacgcgaaaaataaagacagcrgttgttaagctgtctctaatcccagaaatctttttttttctgaaatgatctattggaaaagaaaaaaacacacacaacaatctgcgaaacgaaagaagttttcataattgccctgaaggatttcggtgatgctgtttacagtgcattcctgtgcgctgttgtattggcgcggctcaattgcaagtggaggcggggcgaaatcaggagctgagttacaggcctgttctgctgctggataacgcgttcctgcaacgcagacactgattcctggtgtcagtgcaaaggcgtcacagagcctaa

SEQ ID NO: 75177 - DNA, 600 bp, Chicken  19866894358593_1
aaacaactggatatcatattctgccagacaccttcaaatgaattctacacattaaaacaaatgcaaactacgataaatgaaataactacacagagcaagacatgaaatttcagaacaaagcagaacaaagcaacatgctggtaccatggcctaaagctgacctatgttttccacatgatgcttgaggcgaagcaagacttgaggtgtcttcacggctccaatgaggaggactccctacctgctcccacagcagcagatgcctgtggctggaaagcagagagctgctgcgcataggaattkcacctccgtgtacacccaatatgtagatgaggcatgttcagggataggggcacaatgggccctttcatcagaccaagaacacttgctggaaaacttactagtgatctagataacragaactcagaaagaatgactggcacaggaaaaagaaataaagaacaaaatgcaatacagtatgccaaaaacatgcatctattatggaaggagaaagcatttmgctaataaacatatcagagaaaggcctaaagaggaagaacagaagaaaaccaatgacactcaactgtttgatcacaagacaat

SEQ ID NO: 75178 - DNA, 600 bp, Chicken  19866894358593_2
caaagcagaacaaagcaacatgctggtaccatggcctaaagctgacctatgttttccacatgatgcttgaggcgaagcaagacttgaggtgtcttcacggctccaatgaggaggactccctacctgctcccacagcagcagatgcctgtggctggaaagcagagagctgctgcgcataggaattkcacctccgtgtacacccaatatgtagatgaggcatgttcagggataggggcacaatgggccctttcatcagaccaagaacacttgctggaaaacttactagtgatctagataacragaactcagaaagaatgactggcacaggaaaaagaaataaagaacaaaatgcaatacagtatgccaaaaacatgcatctattatggaaggagaaagcatttmgctaataaacatatcagagaaaggcctaaagaggaagaacagaagaaaaccaatgacactcaactgtttgatcacaagacaatgagtacaacaatgagtttgaagaactccaagaactgtccagctccaggtaaaaaagggactcttaccatgacaatgtctgtcagaagggtagttacacaccagcagttgttaagt

SEQ ID NO: 75179 - DNA, 600 bp, Chicken  19866894358593_3
ccaatgaggaggactccctacctgctcccacagcagcagatgcctgtggctggaaagcagagagctgctgcgcataggaattkcacctccgtgtacacccaatatgtagatgaggcatgttcagggataggggcacaatgggccctttcatcagaccaagaacacttgctggaaaacttactagtgatctagataacragaactcagaaagaatgactggcacaggaaaaagaaataaagaacaaaatgcaatacagtatgccaaaaacatgcatctattatggaaggagaaagcatttmgctaataaacatatcagagaaaggcctaaagaggaagaacagaagaaaaccaatgacactcaactgtttgatcacaagacaatgagtacaacaatgagtttgaagaactccaagaactgtccagctccaggtaaaaaagggactcttaccatgacaatgtctgtcagaagggtagttacacaccagcagttgttaagttcctcaaatgtggtgaggattttttcacttcagtgtagcagcagatagtgcagggtgtttatgtcagattagtttgctgtagcaggtttgactcatctacag

SEQ ID NO: 75180 - DNA, 599 bp, Chicken  19866894358595_1
  misc_feature (1)..(104): n is any nucleotide
nnnnnnnnnnnnnnnnnnnnnnnnnnnnnnnnnnnnnnnnnnnnnnnnnnnnnnnnnnnnnnnnnnnnnnnnnnnnnnnnnnnnnnnnnnnnnnnnnnnnnnnnccctgatccctatgacatgtgtacagattacagagaaatccctcagcaatgaggctgttttaactccttcgcgctctggggctgcccaatgcagctctgaggtgtccccagctccggtgggtttaggacatgcttttattgctgccagagatcccagcagacattgctggggtatgtgcagcctgtctgggcaacrcacaatctaaatattttctttggatgaggcatgcaatraaagaaggaacatctcaaggctgctctgcttgaccagagatgaagaggagggaggctttgggtcactgctttgctgaagagcaagctggagaaggagtggatgtagagggagccccagaagggtctctgcaatgtgccactgacctgttatcctctaggacatgctgtgctcacctcacccaagctcacagtgggctgtggggtctggctccattgagcctacccagcctgctaacggagccgtgctgccagggaaataga

SEQ ID NO: 75181 - DNA, 599 bp, Chicken  19866894358595_2
  misc_feature (1)..(66): n is any nucleotide
nnnnnnnnnnnnnnnnnnnnnnnnnnnnnnnnnnnnnnnnnnnnnnnnnnnnnnnnnnnnnnnnnnccctgatccctatgacatgtgtacagattacagagaaatccctcagcaatgaggctgttttaactccttcgcgctctggggctgcccaatgcagctctgaggtgtccccagctccggtgggtttaggacatgcttttattgctgccagagatcccagcagacattgctggggtatgtgcagcctgtctgggcaacrcacaatctaaatattttctttggatgaggcatgcaatraaagaaggaacatctcaaggctgctctgcttgaccagagatgaagaggagggaggctttgggtcactgctttgctgaagagcaagctggagaaggagtggatgtagagggagccccagaagggtctctgcaatgtgccactgacctgttatcctctaggacatgctgtgctcacctcacccaagctcacagtgggctgtggggtctggctccattgagcctacccagcctgctaacggagccgtgctgccagggaaatagagaatggagagaagtcctgagcggtgcttttcccccacc

SEQ ID NO: 75182 - DNA, 600 bp, Chicken  19866894358595_3
atgaagaggagggaggctttgggtcactgctttgctgaagagcaagctggagaaggagtggatgtagagggagccccagaagggtctctgcaatgtgccactgacctgttatcctctaggacatgctgtgctcacctcacccaagctcacagtgggctgtggggtctggctccattgagcctacccagcctgctaacggagccgtgctgccagggaaatagagaatggagagaagtcctgagcggtgcttttcccccaccctgctcaaagcagagccagctcctggaagctgaggtgtgygctgcattgcagctctgagtgtaacacctgcatttgcaccttatttactgctctgtatatccctggtgaagctagctgtgtggttgttagagtccttgggttgtgttttgaaaaatgcaaaaccttttttctatctctgcttggagcaaagaaccgaatccaccctcagatcacccagtgtccattctgtgggtacctgtgctcaggttttataggggcattttgcaaactggtgctcagtggtggtgaagttgcagacgctcgtgttgccccagatgcgtgctggtttgcaaagttcac

SEQ ID NO: 75183 - DNA, 599 bp, Chicken  19866894358596_1
  misc_feature (1)..(167): n is any nucleotide
nnnnnnnnnnnnnnnnnnnnnnnnnnnnnnnnnnnnnnnnnnnnnnnnnnnnnnnnnnnnnnnnnnnnnnnnnnnnnnnnnnnnnnnnnnnnnnnnnnnnnnnnnnnnnnnnnnnnnnnnnnnnnnnnnnnnnnnnnnnnnnnnnnnnnnnnnnnnnnnnnnnnnnnaacttttggaaatacctgtgttggaactctgcagtttggcatatcaccagtaaaagcagagcaaaatcagtttagtgtgatttttttaacaactttaacaatagttcagttcactgcactcccctcctgacawgctaacaatgaaccagcagcatgtgatgaacttgtatctgacggagggccgtgccagcatcaggcaccatcctcccaacctgctgaatagtgcagaatggctgcctgagtgctgaagtaatgatcttctgtattaaaagccaacaaagcactttgttttctcttttaaaaatccagcctggacccacaaaggactttgtggcagaggctggcagttccatacttgctgtatgcaaggctgttagggctcattctgatggagatgtttgtrgtctctgcatgtttgtatgtgtatgtatg

SEQ ID NO: 75184 - DNA, 600 bp, Chicken  19866894358596_2
gttcagttcactgcactcccctcctgacawgctaacaatgaaccagcagcatgtgatgaacttgtatctgacggagggccgtgccagcatcaggcaccatcctcccaacctgctgaatagtgcagaatggctgcctgagtgctgaagtaatgatcttctgtattaaaagccaacaaagcactttgttttctcttttaaaaatccagcctggacccacaaaggactttgtggcagaggctggcagttccatacttgctgtatgcaaggctgttagggctcattctgatggagatgtttgtrgtctctgcatgtttgtatgtgtatgtatgcatacctgtaacaagtagctgtggaccatcaatcagaatttcattcaactattttaactagctgatcacacacaccagatatagggatttcagcttagggcagtgggagattgaggtgggtgcagacataatcattgtagtttaatgctgcaggatactgatgtaaaaggtgaagaagcacagatggaatgaacttgctgtaggagagcagcatgtcttttggctccctaatggcatgggagttgcccaccagtatctgttacgagcagtc

SEQ ID NO: 75185 - DNA, 600 bp, Chicken  19866894358599_1
caggacataatcaatgatacccattttgcattataaatgatgacgcttatactcaacagcttttaggcagagtgtgggtgtgacagtttgaaaaacagtgtttagtatgacatgagagctgtcaactcctaaatgcagttattaatgacctgctaagcatgtggattttaaatgtgtcacttatttttctgaaatatctcaagagtaaaaaattatttgcaatttatcattcttattaataaaaaactgagaatgagaatacacaagagcaatgagaaatcacagtaaaggtcatggcaraaacacttcatgcttttattggtaataagaaaaaaaatcagacctgtctccaagatttctctcagtcaacatcctcttcrgtgtatcattttagaggtagaggtatacagggattggctatattttcaagtattgtctccaagactaacactggcagtttaaraccaagactcaaaagaaaagctttgttctgttggatgcctgacactaatcctgcaatatctgartgtgtacaacccttcttctaggacttgatcrgtatcaaaaaaggacagatctcatttttaaatgaagcttaat

SEQ ID NO: 75186 - DNA, 600 bp, Chicken  19866894358599_2
tgacagtttgaaaaacagtgtttagtatgacatgagagctgtcaactcctaaatgcagttattaatgacctgctaagcatgtggattttaaatgtgtcacttatttttctgaaatatctcaagagtaaaaaattatttgcaatttatcattcttattaataaaaaactgagaatgagaatacacaagagcaatgagaaatcacagtaaaggtcatggcaraaacacttcatgcttttattggtaataagaaaaaaaatcagacctgtctccaagatttctctcagtcaacatcctcttcrgtgtatcattttagaggtagaggtatacagggattggctatattttcaagtattgtctccaagactaacactggcagtttaaraccaagactcaaaagaaaagctttgttctgttggatgcctgacactaatcctgcaatatctgartgtgtacaacccttcttctaggacttgatcrgtatcaaaaaaggacagatctcatttttaaatgaagcttaataaagcatcagttttcagatgttaagcctcacaaggaaaccagacctgccattgctttcttgctctgcttctgcctgcacc

SEQ ID NO: 75187 - DNA, 600 bp, Chicken  19866894358599_3
gattttaaatgtgtcacttatttttctgaaatatctcaagagtaaaaaattatttgcaatttatcattcttattaataaaaaactgagaatgagaatacacaagagcaatgagaaatcacagtaaaggtcatggcaraaacacttcatgcttttattggtaataagaaaaaaaatcagacctgtctccaagatttctctcagtcaacatcctcttcrgtgtatcattttagaggtagaggtatacagggattggctatattttcaagtattgtctccaagactaacactggcagtttaaraccaagactcaaaagaaaagctttgttctgttggatgcctgacactaatcctgcaatatctgartgtgtacaacccttcttctaggacttgatcrgtatcaaaaaaggacagatctcatttttaaatgaagcttaataaagcatcagttttcagatgttaagcctcacaaggaaaccagacctgccattgctttcttgctctgcttctgcctgcacctcatccattagctagagctaaccaaccattgcggctgtactattttttatttcattgttcagcagtaagtcatacagcatgga

SEQ ID NO: 75188 - DNA, 600 bp, Chicken  19866894358599_4
cattcttattaataaaaaactgagaatgagaatacacaagagcaatgagaaatcacagtaaaggtcatggcaraaacacttcatgcttttattggtaataagaaaaaaaatcagacctgtctccaagatttctctcagtcaacatcctcttcrgtgtatcattttagaggtagaggtatacagggattggctatattttcaagtattgtctccaagactaacactggcagtttaaraccaagactcaaaagaaaagctttgttctgttggatgcctgacactaatcctgcaatatctgartgtgtacaacccttcttctaggacttgatcrgtatcaaaaaaggacagatctcatttttaaatgaagcttaataaagcatcagttttcagatgttaagcctcacaaggaaaccagacctgccattgctttcttgctctgcttctgcctgcacctcatccattagctagagctaaccaaccattgcggctgtactattttttatttcattgttcagcagtaagtcatacagcatggaaaatggaataatttcttctccaccaaagtcctttaaataccttcttctatttcatgtattaaac

SEQ ID NO: 75189 - DNA, 600 bp, Chicken  19866894358599_5
atacacaagagcaatgagaaatcacagtaaaggtcatggcaraaacacttcatgcttttattggtaataagaaaaaaaatcagacctgtctccaagatttctctcagtcaacatcctcttcrgtgtatcattttagaggtagaggtatacagggattggctatattttcaagtattgtctccaagactaacactggcagtttaaraccaagactcaaaagaaaagctttgttctgttggatgcctgacactaatcctgcaatatctgartgtgtacaacccttcttctaggacttgatcrgtatcaaaaaaggacagatctcatttttaaatgaagcttaataaagcatcagttttcagatgttaagcctcacaaggaaaccagacctgccattgctttcttgctctgcttctgcctgcacctcatccattagctagagctaaccaaccattgcggctgtactattttttatttcattgttcagcagtaagtcatacagcatggaaaatggaataatttcttctccaccaaagtcctttaaataccttcttctatttcatgtattaaacaggttttaaaactatcagtactctgggttac

SEQ ID NO: 75190 - DNA, 599 bp, Chicken  19866894358604_1
  misc_feature (1)..(67): n is any nucleotide
nnnnnnnnnnnnnnnnnnnnnnnnnnnnnnnnnnnnnnnnnnnnnnnnnnnnnnnnnnnnnnnnnnngggaatttttgcagactcttatgttctgtgtgtcatctttagaaaatgttttaatcaaagatttatggtccacctcagtctttctgaaaattgttcttcttttaaatactaatttagtaacaagaaattaaacatgtttgtttctttcttgcacagatgacttgcccaggaagcggctctctcagatctataaaccacctacgtctgaaatgttagcatatctagattttagygtttccacaacgggcatgcttacaggagtgaaggtacagtaaaatgcttttagaaaatgaatttttttggtgttgtgtcttcggctgataatccagaccagctctcctgtctacctccaccagaactggctttgtagcttaaaggctgtacttttctgtgagtaaagctataaattccccgcatgtaatgcagtatgacttcaggctgaagaatcagctctgctatatagaacgagaggtctctacagcgggcattctgctgcctcccaccagagagcaggctgatgggagagcagtgg

SEQ ID NO: 75191 - DNA, 600 bp, Chicken  19866894358615_1
ctgctgtggtgctgagctgctgttgattatggattcctgcctttcatgggccaagctgctgtgttagctttgcatcacctgtctctaagaagatgcacttagttttttacctctctgatctaggttaaaaacctgattgaggagatggctgctctggatgagattattgccaagctgacaaaagagaagaaagcactacaagaggcccatcaacaggccctggatgacttgcaggctgaggaagataaagtcaacacgctgaccaaagccaaggtcaaactggaacagcaagtggatgaygtgagtcgtgggccagtgacagcgaagtgatagtggtttgagtcacgcacctctgggagagcaaatgggctgccaatgagtggagtctggaaagcgtggtgattattgattccaatgcaataaggccagctggtgagcaacctcattgacagactgcccctaaaccaaggagtggcccagggtacccctatggagagcagccctgggctgagggagaggaacargaggccaactgggaaacagctatggctctcagggctgggtgaagttcccaagcaatgggtatggggaaggtcaggc

SEQ ID NO: 75192 - DNA, 600 bp, Chicken  19866894358615_2
tgacttgcaggctgaggaagataaagtcaacacgctgaccaaagccaaggtcaaactggaacagcaagtggatgaygtgagtcgtgggccagtgacagcgaagtgatagtggtttgagtcacgcacctctgggagagcaaatgggctgccaatgagtggagtctggaaagcgtggtgattattgattccaatgcaataaggccagctggtgagcaacctcattgacagactgcccctaaaccaaggagtggcccagggtacccctatggagagcagccctgggctgagggagaggaacargaggccaactgggaaacagctatggctctcagggctgggtgaagttcccaagcaatgggtatggggaaggtcaggcactgcagggggttttctccctccctagcctgttgccctctgttctccagctggaaagctctcttgaacaagagaagaaaatccgcatggacctggaaagagctaagaggaagcttgaaggagatctgaagctgacacaggagtctgtgatggatctggagaatgacaagcagcaactggaggagaaactcaaaaagtgagtgtgtggtgtgtgctgggctgtgt

SEQ ID NO: 75193 - DNA, 600 bp, Chicken  19866894358626_1
ggaagagcctcatggactggctgagatgtcccacagctcactggggacaacagtggtgttcacgtggtgccctctgaactaagaactgcaaggtttttagtacaaagtcctgtgaatgctcaacagtgccaccatggctctgcccagaaaacatgctcctgataacgagaggctgctaatggtggcttgtaagcaagaaggatttcttgaaggcttcaccctacagggacaacagagagtgggattacatgtattatttcattacccagcttcactattttttggaacttcgtgacaatyggtgtttttttttcctttgaagccccctgctggaacaaggagaccttcaggtttccttgttaaagtaaataacctcacacagatagctggagggttaaggcccttgagcaaaattggagtaaaatggcaaataactctgggatgcagtgagtttttaaattctcatgagcttctatggcagactcacaagtttgtgctgccttgtagtcagcatgtggtggggacctggggtgacctaaactgcagggtgctgggctccacaggctgtgtttatcagcagcctgagggatgctgctgctg

SEQ ID NO: 75194 - DNA, 600 bp, Chicken  19866894358631_1
cagtaacaaagaattactgaggcaaaaaacttgaactgctgcatggtgttcttatagcagcaaatagtattttgtcatgatgttgtgaggtgattttgataacatactgatggcactgctgtaactaataggtactaccaagcagttactacatattttaggggtatacatagtacagttctcattcctttgccttcacacaggaaagaattcataaatttttggtaaaagaaattctgtggaaattgcaagcatactaaaaccattaacaaagtattaaatatctagaaaatctgagasgcctaagtctgccttgtggtgctaccattcaatcactgtgtaagtaaattcagacgttagggttcttacatccaaacagggattttattctcacatatgacatcagcatatgaggtcaatattatggtatttaaatatcagtgtgatttagaagtttcttgtatcttagcttaaaattgagccaccttaagagatactcaatcctagctttcactaaaagaaacttttagtttctaaagttttagtttagaaactagtttagtttctaaaacttttactaagcattctccattttaacat

SEQ ID NO: 75195 - DNA, 600 bp, Chicken  19866894358633_1
tctgcaattgtcacagaaattctacatgctttgctgaggtaaaaatctatatccagacattgtttcccagcttttttattatttttttttttttagattttagttacctaatgtcccattaaacatgccatttgaatgaagaaattaaataagattttacagtagacatagctttttctacacttcacaaatcatcgattttgcttctctttaaatcagttgtaaaaatggcagtgacttaaagagatccatgtattagggtaatgtacctatgtatgccactaatcacatgtagtccaytgggctcaagatgagatccctctgattaaacgtaggcatctgcttgtggacaggatgaatcattccccagactcttctgtatgaacatatgaacacagtggatgagaactttgaggatcacataaattttagacagctaaaataaaatgagattatcttaactttcctccctcattctcatctctagcgagctgagaattaaaatctttttgtgcagtgaacatcattcagcattcagacatttttcaaggacttcacattttagcagactcattgcagtatgaacagttgatgtttcaa

SEQ ID NO: 75196 - DNA, 600 bp, Chicken  19866894358638_1
ttgtgagagcttggaacgttccagtttaagacagagaacagcaatctttccctaaaagcatccttcagctgctcattttctgtgttttaatggacccattaacgtcttcagatatgtcttcccaagataagcacagtagtccacaacctggaaaaagctccgctcctggtcagagctcctcaacttttccctcgcagaagattcttcccagaccacctgaacaacacgtaactggttagtagtggactgtataaaagaaaatgcttaggagagagcaaaggtctccttctagaaccgagycctcctctccacacggcacttgacttcataaggatgctgcctctttacccagtactgcagtaaaacatcctaccacaaggtcacagctctgagacgcagggaatgggagtgccttaatttacatctgaactggaaaaccacaccactgaaattgcctcttccctcgggctccagagctcttccctagttcggtctttctttaaataagagagttctccaagaagctcggagacgaaatccaaattctggactcagggttttcgtggtccaggaaggctcattcattgccaccaaagggag

SEQ ID NO: 75197 - DNA, 599 bp, Chicken  19866894358641_1
  misc_feature (1)..(40): n is any nucleotide
nnnnnnnnnnnnnnnnnnnnnnnnnnnnnnnnnnnnnnnncttactacacagtcatagggttgtataagcactatggagaattagtttattctattctaagttcccaagaatcacacatgcctaatgggaagcagcaataatgctgtaatcaagtacaactaaggcatgtttgtgactctaaatctcaaattaatgttgaattctataatctgttccacagaactatttagccatacagtagagatgaggtgcagaatgatattatttcacacagaactattctccccaaaggcccatayactgtctataagcattgttgaacatatcaacctttgcaggccaaattcaagtttgggtaagctgagtcaaaccaagattgcagtcagggtgatttgcttttatcaaaatcattatttttcccatcttttctggtttcagttaatatcacaaatggaatcagcacgccttgttaattagtctgattgctgaagaccatggtttaggtaagtaaaaaagacaacaaaaaccttcagaatgaactagaaactgccttggggacccaaagctgctgccttaactgctgcctgtgttgctgcca

SEQ ID NO: 75198 - DNA, 600 bp, Chicken  19866894358653_1
aagcaagatcctaaagtgtgtgtgatattcttccactaaatgacaaagaagtgttagtgaagaataccagggaagtagagcatattttcatgcaaaagaaaactatctgaagttgcaagaagaaacagcatcctttgctttccaggagtagattcatgctttacatgcatgctctatgtggcctggtctggtgcaaagttctgaatgatcttctactattgtagatgctttgtgaaaataaatagctgttactgatgatcccaagcacatcaggtacccatgtgatgaaactggagaacrtgtatttaaataccactgagatctcgagaatggcaccctacaaatgctgaataagtaacataaagtgattgaatctgctgttgtgttttaaacaggtttgttttggtatggtaatgaatttatttagggaggaaactgctttgtttgtctaaagattatctcagttgcattccctttgtgctggacagatgctgatgcatgcattaactragtgtatatccaaatccaggggaaaggagttatttctccaaaattcacgatttggaagtagatggatatgattttgcttcttctgaatgt

SEQ ID NO: 75199 - DNA, 600 bp, Chicken  19866894358653_2
ttctactattgtagatgctttgtgaaaataaatagctgttactgatgatcccaagcacatcaggtacccatgtgatgaaactggagaacrtgtatttaaataccactgagatctcgagaatggcaccctacaaatgctgaataagtaacataaagtgattgaatctgctgttgtgttttaaacaggtttgttttggtatggtaatgaatttatttagggaggaaactgctttgtttgtctaaagattatctcagttgcattccctttgtgctggacagatgctgatgcatgcattaactragtgtatatccaaatccaggggaaaggagttatttctccaaaattcacgatttggaagtagatggatatgattttgcttcttctgaatgtcagagctgctttaattctgtgcagactggattcagtgtaagtacaagatctgctcagctgtgctcaatgcctcactcagtaccagattgtcagggtgcagtgtctcagaaacataaggtggatttgaacaattggtgtatgataggttaagctgtgcagatgagctgttgaaggcttttgccagttaaactagatagtattagcygagct

SEQ ID NO: 75200 - DNA, 600 bp, Chicken  19866894358653_3
aactragtgtatatccaaatccaggggaaaggagttatttctccaaaattcacgatttggaagtagatggatatgattttgcttcttctgaatgtcagagctgctttaattctgtgcagactggattcagtgtaagtacaagatctgctcagctgtgctcaatgcctcactcagtaccagattgtcagggtgcagtgtctcagaaacataaggtggatttgaacaattggtgtatgataggttaagctgtgcagatgagctgttgaaggcttttgccagttaaactagatagtattagcygagctagctctgaagctgactgatgtaaaataacaaggcttgaaatggactgcctttttgtgtggagacagaaaaaggcacagcagcattaatcagatttttgttaatctgatttgagtagctgagagcaatcctatgtgtgtttgcagaataagtgctgtatcttggaggacaagggaaaaaagaaagaaagggaaagctactttttatttacagctttttagaagactattcaaaactgcatcagagagctctttaaggagctcaacacagtcgctttgatgaatggtaacttatttt

SEQ ID NO: 75201 - DNA, 600 bp, Chicken  19866894358664_1
tgtaggacacagtgctggatttgacttaacacgcactatgcggctctttcttttctcagtaatgtggtgagtactgttccaactactctttcatttgaactaataataattcaatattttgatagccagtccttgcaatttagaaactctgagcaagatagcaaaatgaaacaactgaaacaaagcagtgtaggaggataagcccagctgtgaaacttgggaaatgactgtaaaatacaaaaagggacaagattggagctggtaacgatgggactctagggaaaggcatgaaggtacaayaggggaggtttaggttggataccaggaaaatcatagaatcactaaggttggaaaagacccamaggatcatccagtccaatgttctgcctcagagagcagatgggcacaggtacaggctccctagggaagcgctggtagcactgagcttgccagaatttaagaagtgtctgtatagagctctcagacatatgggctcattttcatgtggtcctgcgtggatccaggagttggaattaatgatccttgcaggtcccttccaacttgagatgtcctgtggttctacaatcttttaagtgcctt

SEQ ID NO: 75202 - DNA, 600 bp, Chicken  19866894358664_2
tgtggtgagtactgttccaactactctttcatttgaactaataataattcaatattttgatagccagtccttgcaatttagaaactctgagcaagatagcaaaatgaaacaactgaaacaaagcagtgtaggaggataagcccagctgtgaaacttgggaaatgactgtaaaatacaaaaagggacaagattggagctggtaacgatgggactctagggaaaggcatgaaggtacaayaggggaggtttaggttggataccaggaaaatcatagaatcactaaggttggaaaagacccamaggatcatccagtccaatgttctgcctcagagagcagatgggcacaggtacaggctccctagggaagcgctggtagcactgagcttgccagaatttaagaagtgtctgtatagagctctcagacatatgggctcattttcatgtggtcctgcgtggatccaggagttggaattaatgatccttgcaggtcccttccaacttgagatgtcctgtggttctacaatcttttaagtgccttaatrttcagtcctatatttcctgcacttcaaaaccaaacctttcattttccattgacttata

SEQ ID NO: 75203 - DNA, 448 bp, Chicken  19866894358664_3
gaggtttaggttggataccaggaaaatcatagaatcactaaggttggaaaagacccamaggatcatccagtccaatgttctgcctcagagagcagatgggcacaggtacaggctccctagggaagcgctggtagcactgagcttgccagaatttaagaagtgtctgtatagagctctcagacatatgggctcattttcatgtggtcctgcgtggatccaggagttggaattaatgatccttgcaggtcccttccaacttgagatgtcctgtggttctacaatcttttaagtgccttaatrttcagtcctatatttcctgcacttcaaaaccaaacctttcattttccattgacttatataaatacccacattaactcataactgaattcccaatagtgacatttttttccctttctaacttttgatcacgaacccttcagcttggtga

SEQ ID NO: 75204 - DNA, 599 bp, Chicken  19866894358668_1
  misc_feature (1)..(93): n is any nucleotide
nnnnnnnnnnnnnnnnnnnnnnnnnnnnnnnnnnnnnnnnnnnnnnnnnnnnnnnnnnnnnnnnnnnnnnnnnnnnnnnnnnnnnnnnnnnnncgtgcccttcctcaacaactgaagtttatgtgtatgtgtagcagttgtgttctggtattttaagtaagcagtgtgttcgtgttccaagcatttactatgtaatccttctgaaaaatccaaaaagctgaagtgtaagtttgtggttgaatagtgaaacagctgctgttgatttagagcccagctttggttatcgcataaagtgatagracacttacaagttgatgttgtagagggtcagtggcattggttcttttccttcccagtaaaaaggcagacttcggtatttctctaatctatagtagttcgtggaattggtgttttaaaacaaaatttttgctcttttgggaaatctgctagctcaaagcttgggcaacctggtgcgggaaacttgcttttattgtgcaattatgagacttgttcatcaaatacttggttgttatttggaatcatgtttgtttcgcttgctgatgaaattcttctccctctgtttgtaggatgataaagtt

SEQ ID NO: 75205 - DNA, 600 bp, Chicken  19866894358669_1
cggctgatccaggaacaacccccactcctgagctcccggcgcccgcacgtcacagccggtccatccggaacgtgtcctctgtggcggggtcggtgaggaccatgtccgggtcgttcagcatgtgcagtccatccaaggttaaagggtcaattttgagttcatccagaggaaactgggaatccgcgtcgaagctgacgtcgcccactcctgccaaagagctggtcagttctttcgataagctgggaggagattctcctgtcactgcggggaggagggacagaaaggcagcggtgttggccyccggtatcctccaggcacaacattaggatacagcaaaaaccaggctgctataattcccgaatcgtttactgaactaaagctggagctgagacaaatccatcctcatttccagccggatgaactacagatctgtctgagcacctccacggcacaacacaaagcacagctcatctgagtgtatgtggggctacaaaggggcaacactcrggtctctgctctccctttgctttaggagccataacctcagtttgcattacacttattggtatgagccccgggctgaaggatggattcaactcc

SEQ ID NO: 75206 - DNA, 600 bp, Chicken  19866894358669_2
ctgccaaagagctggtcagttctttcgataagctgggaggagattctcctgtcactgcggggaggagggacagaaaggcagcggtgttggccyccggtatcctccaggcacaacattaggatacagcaaaaaccaggctgctataattcccgaatcgtttactgaactaaagctggagctgagacaaatccatcctcatttccagccggatgaactacagatctgtctgagcacctccacggcacaacacaaagcacagctcatctgagtgtatgtggggctacaaaggggcaacactcrggtctctgctctccctttgctttaggagccataacctcagtttgcattacacttattggtatgagccccgggctgaaggatggattcaactccagcttttttcagtgacctatgcagaaaccgtttccaaatgtccaactgcgaccagattctccaccgtatggaacactgaaataatccttgctggcaggcctgggcagaggaaggagctcagctcccgtggatgcgtgagtcagcagcacgcagcgctgtgctgagggcagggctggagcaggagccccacagccaggaactcagcac

SEQ ID NO: 75207 - DNA, 600 bp, Chicken  19866894358670_1
catttgaaggccttcagtctggactgtgcccatcagtgagtagctcttaccaagcaggccaaagtccacagtgccacattttggtagcagaaagatgttgctgaaaataattgggtctggcagcactcgattggtttccaaaaccagtctataagttccaaagctcacaaagtgtttggttgctctgtaaagcagccacatgcctagatactgtgcccaattaatctggaatgagtttgatttaacaatgtatattcgcaacaagctgcttctgttagaggaaatagaaaaagaagaaamaatattttaaagtcttttgtttcatcccagttacacctttttacctttctctcattagctgtgtgtctgccagtgcccacaggtattcctgagggatgtggcaggagacaacagtacaactggcttcctgacaagggaaaggtggcctgccaactgctacccattgactggagcgtgtgcttggctctgagaggcaaacactgctgcaatatgctctccccagagaaatccatcctcagaaatcatgactagtgctgaaatgttcccagatctcactgcatttttgaagtacgaaagttg

SEQ ID NO: 75208 - DNA, 600 bp, Chicken  19866894358670_2
ggaaaggtggcctgccaactgctacccattgactggagcgtgtgcttggctctgagaggcaaacactgctgcaatatgctctccccagagaaatccatcctcagaaatcatgactagtgctgaaatgttcccagatctcactgcatttttgaagtacgaaagttgagcatcaggggaaccagtcaaagaatctgcatttaagctgctggaaatagtaatactgtgcttcctcctagcaccatttctgcaggtttttttcagttgtttttctctcatcacccccatcactagtaaaagcayacacgaggcaaatccaggctccaggttcctactgtcttctgcccggatttaagacattctctcctcagaggaatgaagattctccattcaaacaattctgcagacatgcagcaatggcaacagtttgctgtcacattgcttggtgtcctccttcccttagtttcatagtcatctgtaagctagttctgttaacattacacattcacacagattcacaatgtgcaaaaaggcatatcctttctactaggaaaacagaatgtatactgtgagaggtgtctgatgtaacaccagcctaacacc

SEQ ID NO: 75209 - DNA, 595 bp, Chicken  19866894358671_1
aaaatagccataacgaagttcaaaatgtccagttttgcaatgcggaggtattgattggaataagaccaccatggctgttcagagctttggttgcgttaaacctgagcctggtgcattaaacgttctccttcacctcccaaggttcaggattgcatttcctcagtgccggagtctcaggctgaaatgttgggaaaaagtcaataagaagtcgccctggtctaagaacttctgaaagctccggcacacgcctgcagctttagaggactgtgggttttttggtatccagatccatgcccttarcctttgggaagatgggatttaggcaccgctgaaggtgtcagctaagatacattcagtaggctgagaaagagatcgttttatgaatcacgtgcttttctgaaagaaatagcataatgaaatagatgactgatccttgtcgttagggggatcttgttctttaggtggatcaataaaaatgcatctttaacaaggaagggatagctactctctcatatgccggataatttcacattgctacaatttagcaggcagaaaaactggtctgttcgtcaagggcaacgtgaaagaaggacta

SEQ ID NO: 75210 - DNA, 600 bp, Chicken  19866894358674_1
ggttggtaagcatggtgggtatgggttgacggttggactagatgatgttagtggtcttttcaaaccttaatgattctatgactctacgattttataaaaactttggtactatttttgcctgtctacatctcctgtaacctctaaaacctactgcagctgtagataggatgttgtcagagcagtacaggagagatctccctcactgagagcacacctggaaacaaaacagagcatccctgaagagcctgggaaagctctcaaaaccagataaatgagtgctttaagatatatttctcacargatttttgtcatatttaagtagcacatttattctctttacagtttatttaatattctgagtatgtcagatctggatttcatttgcatttaaaagacactcagtatggtcagaaggacattttgaggcattaattcatcttatygtgcattaggagagctctttcacracttcaagtactaagttctgtaacagtrataacttcctattaatcgttctcaatgacattttcttgctcacatacctttgcattgagaaatttcctgtatcatctttgcaactttctgaccaacctagcaaag

SEQ ID NO: 75211 - DNA, 600 bp, Chicken  19866894358674_2
aaacctactgcagctgtagataggatgttgtcagagcagtacaggagagatctccctcactgagagcacacctggaaacaaaacagagcatccctgaagagcctgggaaagctctcaaaaccagataaatgagtgctttaagatatatttctcacargatttttgtcatatttaagtagcacatttattctctttacagtttatttaatattctgagtatgtcagatctggatttcatttgcatttaaaagacactcagtatggtcagaaggacattttgaggcattaattcatcttatygtgcattaggagagctctttcacracttcaagtactaagttctgtaacagtrataacttcctattaatcgttctcaatgacattttcttgctcacatacctttgcattgagaaatttcctgtatcatctttgcaactttctgaccaacctagcaaagtttgactgtgatatcctatgccactgtgtttgaaatttgtcagtcaagacaatactaatgtatttttgaagatgaagtaacccattgttagaaaaatctttttcttcttctctgaggtgagatgatacttgctctctctccct

SEQ ID NO: 75212 - DNA, 600 bp, Chicken  19866894358674_3
atgttgtcagagcagtacaggagagatctccctcactgagagcacacctggaaacaaaacagagcatccctgaagagcctgggaaagctctcaaaaccagataaatgagtgctttaagatatatttctcacargatttttgtcatatttaagtagcacatttattctctttacagtttatttaatattctgagtatgtcagatctggatttcatttgcatttaaaagacactcagtatggtcagaaggacattttgaggcattaattcatcttatygtgcattaggagagctctttcacracttcaagtactaagttctgtaacagtrataacttcctattaatcgttctcaatgacattttcttgctcacatacctttgcattgagaaatttcctgtatcatctttgcaactttctgaccaacctagcaaagtttgactgtgatatcctatgccactgtgtttgaaatttgtcagtcaagacaatactaatgtatttttgaagatgaagtaacccattgttagaaaaatctttttcttcttctctgaggtgagatgatacttgctctctctccctggtttggcacagggacttctgatc

SEQ ID NO: 75213 - DNA, 600 bp, Chicken  19866894358674_4
tccctcactgagagcacacctggaaacaaaacagagcatccctgaagagcctgggaaagctctcaaaaccagataaatgagtgctttaagatatatttctcacargatttttgtcatatttaagtagcacatttattctctttacagtttatttaatattctgagtatgtcagatctggatttcatttgcatttaaaagacactcagtatggtcagaaggacattttgaggcattaattcatcttatygtgcattaggagagctctttcacracttcaagtactaagttctgtaacagtrataacttcctattaatcgttctcaatgacattttcttgctcacatacctttgcattgagaaatttcctgtatcatctttgcaactttctgaccaacctagcaaagtttgactgtgatatcctatgccactgtgtttgaaatttgtcagtcaagacaatactaatgtatttttgaagatgaagtaacccattgttagaaaaatctttttcttcttctctgaggtgagatgatacttgctctctctccctggtttggcacagggacttctgatcttcccttcttgaaaatgccagtatctgg

SEQ ID NO: 75214 - DNA, 434 bp, Chicken  19866894358675_1
ttctgcaaaatattttgtctcagaaaatgtacaaaattctgttacaaccaaaaagtaggtgcacaataatgttttgaagtatgtaatcaaattactgattactttataggatttaatcgtcattctgaaataaagaaaatattttttaacaggcaggaaaatagatgatatataaagagatgggacctgtgatggtgtctgtaattaaaaatgtctgaaactagtgtacaggtttacatctgtctggatgagtatatatctgtattacaccttaaaacatatacatctctacataaacayacactgcaacttcacatagttttacttaattaaaaacacactgagactaaacaaatgcttgttaacagcagaaaatacttctgtttttttttttttcctctgtgtttttctgggttgagattgggtaaaataaa

SEQ ID NO: 75215 - DNA, 600 bp, Chicken  19866894358680_1
aggaggagggaagggtgcagaagactatgtatagatcaaatgcagatttctcttttccaggctgatggatacatctgaaaggaagcaatgtgtgtgtgtagctggtactgctgggttttctgctcctgcagtgtgtgagaacactctactcttgagatctgtcagccagaaattatttcagtcaagcgtacagtcatctgcgtggatcaaggctcttccctgcagacactattagtttctctaaatgtctatcttcaccaactttaagcctaacgttttctgtgtacttagagcctgttrtgtgtactgtgcagtctgcacatgcttagaaaacaggaggctgctggagttgtgctttgtgcctgtagcaaccagagcagaccttaagtgcatatcatcacttggctgtacaaaatgaaagggactgtgccacttcagccagcatcagtgcactagccttaaacaaatctcacatcaagcctggagagatgggtctttcagtgcaagtcacttcaaagtgactttggattgtcctctctttgctgtggaaagtatactgggcaagttggtagaatagcttctggagataggtgagtgttt

SEQ ID NO: 75216 - DNA, 584 bp, Chicken  19866894358682_1
atctggttccctccatgaattctaccgtgctggtccagggagagctgtctcttttaagtcagtttagcagtgtggaagttcctgaggagagggaaaatcctgttaagtgatatttgggaacatggagtgtgtcagcaaggagaccacgagcatcgcccctgatgatggtgttccctgtcacagccgaggggagcatgcagaagcagcctgcagcggtcccagcctggcaccagcagaagagtcggtgtgctgctctgctcacaagagcgtgcctttatatattggtggtttttgaaagcmtgatgaccacatttgccaagaattaaacatttctgcaagtaaaaatgaaacctgacgtcaagctaatccgtggacaaacactaagtgcctttcctcactagaatccttgtctggaagcctaaagaccaaggaactcaaacctacttctgaactaaaagctcgagggccctgcagaagattgccagctggcacaaggtgctcatcctaccctttgaaggtcagataaaatgtaaatgaccagaattctcctcagacttcttttaaaacaaacaaacaaataagtt

SEQ ID NO: 75217 - DNA, 600 bp, Chicken  19866894358687_1
tcttacaaagacaggctgaaggagccgggcttgttcattctggagaagagaaggttctgggagacctcactgcaaccttctagtacctaaaggaggcctacaagaaaactggagaagactctttaccatggtatataacgatagaacaaggggaaccgttttaaactaaaagagggaagatttaagttaggtgttaggaggaaatcctttatgcagaggtggtgaggctctggcactgctgcccagatagctgtgggtgacccatccctggaagtgctcaaggccaggttggatggagcrctgggcagcctggtttggtgagtggcagccctgcccatgacaaaagattgggacgaggtgggctttaaggtcccttctaaccctaattctatgattctgcaagtaatttcacatgaagagacttggcagaaagagaggaaaggaaaacaataaagaagttgattgtgaaaacaataaagaagtcgagttgttgttctgcatatcaacaacataggcactactgtgttttaataatttgcataatatgtctggaataacacatatgataaagccttgtaagattacaaggaattgtgcctg

SEQ ID NO: 75218 - DNA, 600 bp, Chicken  19866894358691_1
cctgataagccaaggaaatggcagaagcaggtatatggtaaatacattttcaggtctccctatcattgccattttttcagttaatagaaaaacaaaagcaaaaagcaagcaacctgctcttactgaatttcattctgagtagcagtaatacaatttggggggtcttctattaaagcaaggagaccgtatataataaaagatatcactgcaagatccaggcacgtagcagtgtccaggctcctcctgatttatattcccctaaacttgcacttgctgaataccaatatggggtaaactacygagttgatattgactttgcctttcacctggtgtacttatactgaagggaagtagatgatttacattttaacttccyatttcacctgttgaaactgggaattcctcctaccactgtatcaggttggttgtgctgtaatggttaagccacaaaatggattttttttttttttctgtgaaataatgctggatagagaaactgaaatgtctgtacgtatgggtctaatagtctggtcgtgactggatttcccattctgatttggtaactgggatgtgctgtcaggccctgaagtttagatgcag

SEQ ID NO: 75219 - DNA, 600 bp, Chicken  19866894358691_2
tcagttaatagaaaaacaaaagcaaaaagcaagcaacctgctcttactgaatttcattctgagtagcagtaatacaatttggggggtcttctattaaagcaaggagaccgtatataataaaagatatcactgcaagatccaggcacgtagcagtgtccaggctcctcctgatttatattcccctaaacttgcacttgctgaataccaatatggggtaaactacygagttgatattgactttgcctttcacctggtgtacttatactgaagggaagtagatgatttacattttaacttccyatttcacctgttgaaactgggaattcctcctaccactgtatcaggttggttgtgctgtaatggttaagccacaaaatggattttttttttttttctgtgaaataatgctggatagagaaactgaaatgtctgtacgtatgggtctaatagtctggtcgtgactggatttcccattctgatttggtaactgggatgtgctgtcaggccctgaagtttagatgcagctatgttcttctatcactccttaccaaattcactttgcaaattatcttatatgccccccaagatctcttaaacact

SEQ ID NO: 75220 - DNA, 600 bp, Chicken  19866894358691_3
tggatagagaaactgaaatgtctgtacgtatgggtctaatagtctggtcgtgactggatttcccattctgatttggtaactgggatgtgctgtcaggccctgaagtttagatgcagctatgttcttctatcactccttaccaaattcactttgcaaattatcttatatgccccccaagatctcttaaacactaataagcttcattgactgctgacttagtttgtagacgtgcaaaagaacaaaaaaagtaaaagtagaatgctcaattaagagtgctctgatagtacagttatattaagrcattagattttcttaccctacacaagattttcactgttttagatgaaaaaatgactcaattgtaaaattcatagtgtttattacactcccagcattttatttagtaattggaacagctttcttccctctttattactgttgttcatttaccatgagcagacaacttagtttgggtgtttctcctgtttttaattttccctttccccacccccccaaagtttccaaatagtgttggcataaatgtgccttttctttaactcatctgggaccaagaccagtgaaaataaagaaattcggact

SEQ ID NO: 75221 - DNA, 559 bp, Chicken  19866894358702_1
tgattaatattggtgctgggtatttttggaaaactgaagttgttaagagcagctgcagagatgccttgtttcataccaagaagggatcctgaattctctgccttcctagaggttgggagcagccaccaggcagagggatgagctggcatggggaaaaagaaattccttctcaaagaagactttattttctgcgaggcgcagcgcttttggctgaagggtaacctgaatgaaagttgacaactgggaatagagacctgctctgtaaaaggcaggacttcatgatcccactaaaatggaaamttaatgagattcaggagagaaaaaggtccttcaagtattctgtcccacgctaccaaaagatttgtttacgcagtccctggagcaagcatgccaaggcagtcttaaagacagctgtttctaaacagatgtttttgctgagatctaaarggtgttcacaagagtgaaggaatgatggcaatatatacaataagtagagtggcaatatcaccccataccaccccagactgaacactatgccttttgattcttctttttatga

SEQ ID NO: 75222 - DNA, 412 bp, Chicken  19866894358702_2
atggggaaaaagaaattccttctcaaagaagactttattttctgcgaggcgcagcgcttttggctgaagggtaacctgaatgaaagttgacaactgggaatagagacctgctctgtaaaaggcaggacttcatgatcccactaaaatggaaamttaatgagattcaggagagaaaaaggtccttcaagtattctgtcccacgctaccaaaagatttgtttacgcagtccctggagcaagcatgccaaggcagtcttaaagacagctgtttctaaacagatgtttttgctgagatctaaarggtgttcacaagagtgaaggaatgatggcaatatatacaataagtagagtggcaatatcaccccataccaccccagactgaacactatgccttttgattcttctttttatga

SEQ ID NO: 75223 - DNA, 600 bp, Chicken  19866894358703_1
tgtcccagattttattgcagttttgagaatggtacaatttagtgaaagacctgcctacctctcttcaactcttctctttgcaccttccaacttcaggcattgccagccttctgtatcccctcgcagcgaaacagcacctatcccagttcctactcagctacggaattaccagcgtatagaacagaacctctcctctactgccagccctgtgtccaacccccacggatcaccaaggtgagttttcagactccttttacttggttctagttattgtttgtaccctaacagatgtctgtgctytcttatgtcttttttttttttttccaacacagcaccataatagagaggcattttaatgagaaataatagtccttcacaatctcaagattgttgaatgggcagttgacatttttcagtaaaacaaaatgaacttgttcctttgctcaaatgcagtgcaagaagataaaaagatgaagttttgctctttttgatttctttttgtataatatgcagtgttacatcataaactagaaagtcrgtaataagttaggttctgttttcacacatgcagtgatgagctgaatgccttgttttgtccaa

SEQ ID NO: 75224 - DNA, 600 bp, Chicken  19866894358703_2
gttttcagactccttttacttggttctagttattgtttgtaccctaacagatgtctgtgctytcttatgtcttttttttttttttccaacacagcaccataatagagaggcattttaatgagaaataatagtccttcacaatctcaagattgttgaatgggcagttgacatttttcagtaaaacaaaatgaacttgttcctttgctcaaatgcagtgcaagaagataaaaagatgaagttttgctctttttgatttctttttgtataatatgcagtgttacatcataaactagaaagtcrgtaataagttaggttctgttttcacacatgcagtgatgagctgaatgccttgttttgtccaatatcaaggaaacaattttttttgcatgctaattaactagcttgtcttagtacaaagctccagtgtgctggacttattctgtgcctcacgatcaacaggattgggatggtaaatgtcaatgactcaggaacagactgctgagaactctggagttctttacaaaaacacaattccttccttctatttttattttcgagatctgatttttgcagttatttctacacttcagaaagtgcctt

SEQ ID NO: 75225 - DNA, 476 bp, Chicken  19866894358704_1
tggcagctttgatgagcctttatcgcacagctctttgtgcctcattaaccatgaggaataaaagaagagtgcaggactccaaagaccaacctgcacagactgatgagtgatggactgggggagaaaggacacagtgctgccagagggtgtggggcactgcagcagtgcagtgcctgggggagcccctgcctgccctgccctgccctgccctgccctgccctgctctgccctgctgccacccagacctgcacctggcaccggggaccgtccccatcactgccacagcagaacatttccctkcacaaacagctccatatttagacctgaaggtttcagtttgaatgtgagagttttttatttattttttgcatctggagttcatttgtttatttgcttgagaagattagaaaagtctcaggagagcgcgtgttcttattcatccccatttcctacctggaattacattaccaacactt

SEQ ID NO: 75226 - DNA, 600 bp, Chicken  19866894358706_1
cacatagaatgcttttcttagcagatctgcaacataagcccagtgtttgtctttaagttacaagtgctggtcagtgggctctttaatttattccttcctacctcagaggctgtattcacttgggacccaatcaaggtgagttgctttggcccaccgaagccatctgattttaggcacacaggatctgtttcttgtttttgcagcttctatttgatgttccagccagatgttttagaggtaactgggggctggtggctgctggaaggttggcaagggggggccagagccttgtgcagcccsaygccaggaggagctgcccctcttgtatttgcacttcacytgcytattctgctgctgggtcttgcaatttctcaaattaaaagccagaggtattgttgagacagcctgctgtgggatggacttcccaacaaacaaacaagagaaattaaagcacatcaggcttgtagaacacaacagctctccgctgtcttaatccagcacttttacgggggtgtctgttttgcaggcagcttaactgcagcagaaatgaccagagtcccctaagaccgatgttcagtgcagtccattggtaatgatttt

SEQ ID NO: 75227 - DNA, 600 bp, Chicken  19866894358706_2
catagaatgcttttcttagcagatctgcaacataagcccagtgtttgtctttaagttacaagtgctggtcagtgggctctttaatttattccttcctacctcagaggctgtattcacttgggacccaatcaaggtgagttgctttggcccaccgaagccatctgattttaggcacacaggatctgtttcttgtttttgcagcttctatttgatgttccagccagatgttttagaggtaactgggggctggtggctgctggaaggttggcaagggggggccagagccttgtgcagcccsaygccaggaggagctgcccctcttgtatttgcacttcacytgcytattctgctgctgggtcttgcaatttctcaaattaaaagccagaggtattgttgagacagcctgctgtgggatggacttcccaacaaacaaacaagagaaattaaagcacatcaggcttgtagaacacaacagctctccgctgtcttaatccagcacttttacgggggtgtctgttttgcaggcagcttaactgcagcagaaatgaccagagtcccctaagaccgatgttcagtgcagtccattggtaatgatttttt

SEQ ID NO: 75228 - DNA, 600 bp, Chicken  19866894358706_3
cagtgtttgtctttaagttacaagtgctggtcagtgggctctttaatttattccttcctacctcagaggctgtattcacttgggacccaatcaaggtgagttgctttggcccaccgaagccatctgattttaggcacacaggatctgtttcttgtttttgcagcttctatttgatgttccagccagatgttttagaggtaactgggggctggtggctgctggaaggttggcaagggggggccagagccttgtgcagcccsaygccaggaggagctgcccctcttgtatttgcacttcacytgcytattctgctgctgggtcttgcaatttctcaaattaaaagccagaggtattgttgagacagcctgctgtgggatggacttcccaacaaacaaacaagagaaattaaagcacatcaggcttgtagaacacaacagctctccgctgtcttaatccagcacttttacgggggtgtctgttttgcaggcagcttaactgcagcagaaatgaccagagtcccctaagaccgatgttcagtgcagtccattggtaatgattttttgcctggctgttaccagctgcagactttgctaggaaaac

SEQ ID NO: 75229 - DNA, 600 bp, Chicken  19866894358706_4
gtttgtctttaagttacaagtgctggtcagtgggctctttaatttattccttcctacctcagaggctgtattcacttgggacccaatcaaggtgagttgctttggcccaccgaagccatctgattttaggcacacaggatctgtttcttgtttttgcagcttctatttgatgttccagccagatgttttagaggtaactgggggctggtggctgctggaaggttggcaagggggggccagagccttgtgcagcccsaygccaggaggagctgcccctcttgtatttgcacttcacytgcytattctgctgctgggtcttgcaatttctcaaattaaaagccagaggtattgttgagacagcctgctgtgggatggacttcccaacaaacaaacaagagaaattaaagcacatcaggcttgtagaacacaacagctctccgctgtcttaatccagcacttttacgggggtgtctgttttgcaggcagcttaactgcagcagaaatgaccagagtcccctaagaccgatgttcagtgcagtccattggtaatgattttttgcctggctgttaccagctgcagactttgctaggaaaacttct

SEQ ID NO: 75230 - DNA, 600 bp, Chicken  19866894358710_1
taactgagcagggtagttgatattttgtctcattaagagaaactctagaaataaaattcgtttttacaaatggtgcagatctcacaagaaacaattatacagtgtgaaatcccagagggcacaagcacaacacaaactacagcccctaatgatattgaatggaactgtacaaggacacatttatgtctgcataaaaggatggagcactaatactacgcatcaaatgtgcctatgattaattggatttttgctcaatttctctcattatagctagaaaacgtgctcttgattttttttttwaattagactttgttttctcaagtttttcaattagttaagttctagttagctaacagcaactgagaagaaatagtattgataatgaagaccaagaaactggataaatgttagatttaagcctgatgtgttaagcattacatctcccttgcggggttaggagtagacttyatgtctgccagtttactatcattacaccctgcacttcttggtacaagagccagtaaggttcagaagctcaggagatgcataggctttggataacaatgtccaaccaaagagaagaataataagaaatgttga

SEQ ID NO: 75231 - DNA, 600 bp, Chicken  19866894358710_2
acaaggacacatttatgtctgcataaaaggatggagcactaatactacgcatcaaatgtgcctatgattaattggatttttgctcaatttctctcattatagctagaaaacgtgctcttgattttttttttwaattagactttgttttctcaagtttttcaattagttaagttctagttagctaacagcaactgagaagaaatagtattgataatgaagaccaagaaactggataaatgttagatttaagcctgatgtgttaagcattacatctcccttgcggggttaggagtagacttyatgtctgccagtttactatcattacaccctgcacttcttggtacaagagccagtaaggttcagaagctcaggagatgcataggctttggataacaatgtccaaccaaagagaagaataataagaaatgttgactgttcaatattaaccctagaacaacagcttctaaagaaatcgcatcataaattctaggctgtttgaagtcttttgtttgctttaaatgtctctaagcatactagtcattttaaaatatgaagagcaagcaattgtctggtaaacactctctgaaaaaaagcttattt

SEQ ID NO: 75232 - DNA, 600 bp, Chicken  19866894358716_1
gaagttgcaaaggcactctgaaaagtcaagttcttatcttagatatgtattgatttacccagacaggttaataaattgtcagcaatcacagtattgcccaggagatatagaaaatactaggaataaacataaacattcttgtagttttattacagggggatttaaaggtgttagcattttctgattcttgtagttacattttcattgtaatggacaaatggatgcctttcaatatcacttaacaggtcgaactaagtcttaaattaagcaagccgtttaactttcaagaatcactgaagmatgcagacacacgtcccaaaagaaatcaaaacacattaaagtatttcaggacatttttacaaagtataagatgtacctactacataatgagaaggaaacaaacagaaactgaatgagaaaggattgtttgtttcaagaataacactagaattctttgcactctcttcattccaatgaaatcatgagcactcacttaatcactgtatctctgaagacctacattttcatcctacatcatggttttgactgggatagtgttaattttcttcatagaggcttgtatgacattgtgtttgggat

SEQ ID NO: 75233 - DNA, 600 bp, Chicken  19866894358719_1
gaaacctcttcttgaatgttgttttcttttttcctactgttactgaaagggaagaagatgaacaactgaagataccaaacagttttgccagtttgaaaggaaacctggagggactttcctacaacggtgccattgaaaccctgggccaattgaagcatctcaactggacagctgttaaaaatgagcaagataacgtaaaagtgaagtttgagcctcatacaaatggtgagtgtttcgtgcaggaggaatcgctcacttctaatacaccagttttaggcattcaaaacaactgcaccacawacaatagctggactttcagaaactcaagctcttgttctataaatcagcgaatgaatgcgtgttcaaacagaagagctggatcgttctacaacagagaccaaagtttcttaaatttagcatcaacttgtccttcccactggggtagtgcagaaaattgtcagtcttactcaggcttacaacaacgtgctgtggagaactatactgcagaccacctgaaactgcagagatcgttaatatcctcagagtctctctatgatgcagcgtttcccttggatatgcctatcaaaacagaatacgatt

SEQ ID NO: 75234 - DNA, 600 bp, Chicken  19866894358720_1
acatattaggtttacttggcatacattggtaacctccacagctgattgctacaaacaatagtcttctgcaaaaaaaaattaaggtgatcatgactgactactcagtgagtttgaattacataactacactttcagtgtgaatgccaaagggttacattcttctaagtgggaacaggatccttctacaagcactactcataagccgagaaagcatttcaaatcaattgcttacaaacacccacagactaaaattatttcaagactaattcctgctttcagtatactctcccagctgacacraagaaacacaaaactcgcaatacagagttattaggcaatagactgagttgttctgttatgcaactgcttttatgtaaaagatcaccgacaagaaatttctccagtagccacgcataaggtattctgacaaggttaagttaagggcacaagaatgagcattgaggagcagcaccttctcccattgtgctgaatactttggaatctccttttcattcacacattaattccagtgctctggagaaaggtcccacaggggcaaaatccaagcatacacacagtatttctgatggcatcatgggt

SEQ ID NO: 75235 - DNA, 600 bp, Chicken  19866894358726_1
agacactaaaacctaagcaactaccttgaccttacattttaaaagaaaagtctatattccaaacaacagcaagacaggaaggaaattgtgctttgagcctgtccacaacaaaagtttaccctctaacagaactaaagtttaccctctaacagctgagacaaccaaacagaacaaaatccacaaagaactcagacatggcccaagagaggagaatccaaaggcagagccacagccccccaggatctgcaagcagtagcacttgaatggcaggaaaatgcatgccaaatattttgagcagcyttgatagagatggtggcaaagaggaggtttgatcaggtagaacccatgccattgcctgatcattcctttagggcttcttcgcatgcttcataaccagagtttttctcacatcactacttctttgtggrgaaaaaaragagaatttgataaaaagcaggcatgctcgtggtgagaratgcccatgagacaccaccacacagtgccagcaggcctggtacaaccctcctggtgtgtctgttttcttcatttccgagaaacaacccctaatcccacatactcagctgagactgctcaggagat

SEQ ID NO: 75236 - DNA, 600 bp, Chicken  19866894358726_2
gaactaaagtttaccctctaacagctgagacaaccaaacagaacaaaatccacaaagaactcagacatggcccaagagaggagaatccaaaggcagagccacagccccccaggatctgcaagcagtagcacttgaatggcaggaaaatgcatgccaaatattttgagcagcyttgatagagatggtggcaaagaggaggtttgatcaggtagaacccatgccattgcctgatcattcctttagggcttcttcgcatgcttcataaccagagtttttctcacatcactacttctttgtggrgaaaaaaragagaatttgataaaaagcaggcatgctcgtggtgagaratgcccatgagacaccaccacacagtgccagcaggcctggtacaaccctcctggtgtgtctgttttcttcatttccgagaaacaacccctaatcccacatactcagctgagactgctcaggagataagacactccagattttgggtttgttttcctcacagggaaatgaaatcagccagagagaccatgtaaaatctcttttcacggtgtttgtcattaccgtggtttcacctgcaggccacatgaaagaaaa

SEQ ID NO: 75237 - DNA, 600 bp, Chicken  19866894358726_3
gtttaccctctaacagctgagacaaccaaacagaacaaaatccacaaagaactcagacatggcccaagagaggagaatccaaaggcagagccacagccccccaggatctgcaagcagtagcacttgaatggcaggaaaatgcatgccaaatattttgagcagcyttgatagagatggtggcaaagaggaggtttgatcaggtagaacccatgccattgcctgatcattcctttagggcttcttcgcatgcttcataaccagagtttttctcacatcactacttctttgtggrgaaaaaaragagaatttgataaaaagcaggcatgctcgtggtgagaratgcccatgagacaccaccacacagtgccagcaggcctggtacaaccctcctggtgtgtctgttttcttcatttccgagaaacaacccctaatcccacatactcagctgagactgctcaggagataagacactccagattttgggtttgttttcctcacagggaaatgaaatcagccagagagaccatgtaaaatctcttttcacggtgtttgtcattaccgtggtttcacctgcaggccacatgaaagaaaatgatcctc

SEQ ID NO: 75238 - DNA, 600 bp, Chicken  19866894358726_4
atccacaaagaactcagacatggcccaagagaggagaatccaaaggcagagccacagccccccaggatctgcaagcagtagcacttgaatggcaggaaaatgcatgccaaatattttgagcagcyttgatagagatggtggcaaagaggaggtttgatcaggtagaacccatgccattgcctgatcattcctttagggcttcttcgcatgcttcataaccagagtttttctcacatcactacttctttgtggrgaaaaaaragagaatttgataaaaagcaggcatgctcgtggtgagaratgcccatgagacaccaccacacagtgccagcaggcctggtacaaccctcctggtgtgtctgttttcttcatttccgagaaacaacccctaatcccacatactcagctgagactgctcaggagataagacactccagattttgggtttgttttcctcacagggaaatgaaatcagccagagagaccatgtaaaatctcttttcacggtgtttgtcattaccgtggtttcacctgcaggccacatgaaagaaaatgatcctctgtgcagccagaattacccagcagactacaaaaactcat

SEQ ID NO: 75239 - DNA, 600 bp, Chicken  19866894358739_1
cattttgttagggtatctttttggcgttgttggaatgactttgttcctgatgtggcatctgacaataaagcatataaatacaatgtagggtgattttttttcctatattataaacttttactgtttttttccaacacatagatctactttttatgctattactataactatacacaatattttctcagtctttcatctatgactttgtctttctaaaagataaaaagaaaaaaagaaaatgtatgaccaacatctttaaatgaccaaaagccgtagagggataagcaagctgtgctgagytgttataagcacagtgaacctcacctcatgtgtctgtaacttgtggtgggatttttaagtagcagtacattatctcaggttgtrttactgcagggtgacattgagctcagatctcgtggctctgctgcattaacatctattgtcttcagaaactgaatgtgctgtttgcatgtcattcctctttggcaagtggtcatttattttgatctagkgggaactgggataaatgtgacattacaagtcytgtaatcctttaggcctatgagattgctttttattaagcaagagagactcctgatg

SEQ ID NO: 75240 - DNA, 600 bp, Chicken  19866894358739_2
gtagggtgattttttttcctatattataaacttttactgtttttttccaacacatagatctactttttatgctattactataactatacacaatattttctcagtctttcatctatgactttgtctttctaaaagataaaaagaaaaaaagaaaatgtatgaccaacatctttaaatgaccaaaagccgtagagggataagcaagctgtgctgagytgttataagcacagtgaacctcacctcatgtgtctgtaacttgtggtgggatttttaagtagcagtacattatctcaggttgtrttactgcagggtgacattgagctcagatctcgtggctctgctgcattaacatctattgtcttcagaaactgaatgtgctgtttgcatgtcattcctctttggcaagtggtcatttattttgatctagkgggaactgggataaatgtgacattacaagtcytgtaatcctttaggcctatgagattgctttttattaagcaagagagactcctgatggaggttacaagctcctaagaatacactttcccggtcttgcctctcaactgtgtgctgtttctgtgcaacctttgaggaagcaaa

SEQ ID NO: 75241 - DNA, 600 bp, Chicken  19866894358739_3
ctaaaagataaaaagaaaaaaagaaaatgtatgaccaacatctttaaatgaccaaaagccgtagagggataagcaagctgtgctgagytgttataagcacagtgaacctcacctcatgtgtctgtaacttgtggtgggatttttaagtagcagtacattatctcaggttgtrttactgcagggtgacattgagctcagatctcgtggctctgctgcattaacatctattgtcttcagaaactgaatgtgctgtttgcatgtcattcctctttggcaagtggtcatttattttgatctagkgggaactgggataaatgtgacattacaagtcytgtaatcctttaggcctatgagattgctttttattaagcaagagagactcctgatggaggttacaagctcctaagaatacactttcccggtcttgcctctcaactgtgtgctgtttctgtgcaacctttgaggaagcaaagtttgggctgagtaaaatctaattcttgaagagttttctactgcttaatccaaattgcttcttgtagccattttgctgtgggaagatgacaaaagtatttacttgggcagttttttcttttgtttcca

SEQ ID NO: 75242 - DNA, 600 bp, Chicken  19866894358739_4
gaccaacatctttaaatgaccaaaagccgtagagggataagcaagctgtgctgagytgttataagcacagtgaacctcacctcatgtgtctgtaacttgtggtgggatttttaagtagcagtacattatctcaggttgtrttactgcagggtgacattgagctcagatctcgtggctctgctgcattaacatctattgtcttcagaaactgaatgtgctgtttgcatgtcattcctctttggcaagtggtcatttattttgatctagkgggaactgggataaatgtgacattacaagtcytgtaatcctttaggcctatgagattgctttttattaagcaagagagactcctgatggaggttacaagctcctaagaatacactttcccggtcttgcctctcaactgtgtgctgtttctgtgcaacctttgaggaagcaaagtttgggctgagtaaaatctaattcttgaagagttttctactgcttaatccaaattgcttcttgtagccattttgctgtgggaagatgacaaaagtatttacttgggcagttttttcttttgtttccagatgcagttctatagacctttttcaaaataac

SEQ ID NO: 75243 - DNA, 600 bp, Chicken  19866894358741_1
agtagatccttgaatactgaatagtacaaatgatcttagccattgtctgtggcattagaccccaatacaggctgacgacaaattgggcaagtggaattttcagaaagccagcgatctatacaatggatatgaaattcatgcatacaaggtaactgccttagcttatttcctgttacatattcattaatgcaaacactacatgttttacttatttcctcctcagtgtggatatccccataattccgagtagaaagattgtcaatctgctctttggttaaacctcttaaacgctcgtcttcrtcrtcttcattcagcaggaagaagtgggcaagccgaaggatgggcagagttccattttccactaggttgttagcgtcttgagactgtctgttatcctggttttcattattgcgagcatarcgttgtgtatcaacactctgtccatttctttcactgtcgtcttctactacgtgcccattccgagaagaaacctcacttggatcactgctatcatttactgagcttgagttattccgctctgcctgtacatctggtaagcgatgagcacctctttgcatttctgagttagattcagtttcc

SEQ ID NO: 75244 - DNA, 600 bp, Chicken  19866894358741_2
agatccttgaatactgaatagtacaaatgatcttagccattgtctgtggcattagaccccaatacaggctgacgacaaattgggcaagtggaattttcagaaagccagcgatctatacaatggatatgaaattcatgcatacaaggtaactgccttagcttatttcctgttacatattcattaatgcaaacactacatgttttacttatttcctcctcagtgtggatatccccataattccgagtagaaagattgtcaatctgctctttggttaaacctcttaaacgctcgtcttcrtcrtcttcattcagcaggaagaagtgggcaagccgaaggatgggcagagttccattttccactaggttgttagcgtcttgagactgtctgttatcctggttttcattattgcgagcatarcgttgtgtatcaacactctgtccatttctttcactgtcgtcttctactacgtgcccattccgagaagaaacctcacttggatcactgctatcatttactgagcttgagttattccgctctgcctgtacatctggtaagcgatgagcacctctttgcatttctgagttagattcagtttccatt

SEQ ID NO: 75245 - DNA, 600 bp, Chicken  19866894358741_3
caatggatatgaaattcatgcatacaaggtaactgccttagcttatttcctgttacatattcattaatgcaaacactacatgttttacttatttcctcctcagtgtggatatccccataattccgagtagaaagattgtcaatctgctctttggttaaacctcttaaacgctcgtcttcrtcrtcttcattcagcaggaagaagtgggcaagccgaaggatgggcagagttccattttccactaggttgttagcgtcttgagactgtctgttatcctggttttcattattgcgagcatarcgttgtgtatcaacactctgtccatttctttcactgtcgtcttctactacgtgcccattccgagaagaaacctcacttggatcactgctatcatttactgagcttgagttattccgctctgcctgtacatctggtaagcgatgagcacctctttgcatttctgagttagattcagtttccattaaagaactcagttctccaaaacctgtcataatttgtctaaggattgaccgaagagccactgatgaaggctcaccaagcccagtttctgaaatccgacgaagaggtatccgtatagtg

SEQ ID NO: 75246 - DNA, 600 bp, Chicken  19866894358754_1
aaatctgttagatttataaaagtaatttgagacaaagtactgctatattgggcacaccaagtatataaaaatttaaaatagatgcttgtaagtgtagcatagtttctaatgggaatttgtcttagttataatagttacagtgattgattacgcatgtctaggaaagcttattcagtaagtttctcttatactaatagcactttagaggaagacctttcatttgagactgctggggaatctctacatgtactaaaagatttcataaactgatgaaaaattatagtaggaattcaaatattktggtgcttcacttctaaagcaaacagtgtttattctactgagttgataaagctagtaatttctctatgctttgtgcatctatgtacattatgttagttttttctcttatgtaccgtgcaatattttaaattgtatttcagaaaactaaagcaaaatgaatttgtgaaatttaagtttatgtactgtgagtagaaaaatggaaggaggcaaaattgctatgaggacttaaatgactaataatttagactaatttaataattagactaataatttaatatagactaatttagtccatctgaa

SEQ ID NO: 75247 - DNA, 600 bp, Chicken  19866894358759_1
cacggatgattcagctctgaggaagagcatttctcacaaggaaggtttctatgcaaacgcccggccattgttttaattatgctcggcgcagctgccgccagcccttgcagccagcagcaccgcacgcacacgccgtcagcactcagcggctcccggcaagtttctgtggcatccgcagaaaacccggcgctgcagaaacggagctgaccacagaggtcctcccgtggactgggctgtatgttttgctatcggcgccggttacgctgtaagaagtgggctcgagtcaaagcgagagggacrgtttggggtttctgtaaaacaagacgggcagcggagggaaaggtgtgcgctggcaacaggtggggctccccctcgccgtggctgcacgtaaggggaggaaaacataacgtgatggctgaaccgccgcagccccaccacggactgtgggaatgtttacagctccatccgcagagcagcgctcagggcttaacgaggtgagaagcggcccgcgggtaatgcatctccgccccagcacggggatggccggggtgctcctggatggacagcgctcagcccagcgcatcccattgcatcctgcat

SEQ ID NO: 75248 - DNA, 600 bp, Chicken  19866894358760_1
catttctgagttggtaaatatgagggtctgattcaatttttggaatattttatatcattgtcacactaaccacaactttactggggactgagcagtctttgggctgctcttgcctgtagactctaccatgtgtaaacattgttgcctccagctctgcatcacaggtacacaggagttgccttggtagagagcagtcaaactcaccccatggtaagcatggttttgtcagggttgtgagctgaaactttgaagcaacatcagtttggaaggcaagcaacctggccatgcagctggtcagakgaccaagagctacatgcttccagtatttttgtgacacgagagatcactatgtcacttcgaaggaaaactgtgagttttctaacacaagaatccctattacaaataaacaccgggatggtgatgctcgaagtgatccacccggaactcctaagggagcgtcccgggagcagccggtgctggcatggcggcctccaacagagggcgctgccgcctcggtccgccgtcggcctcccatgtctggggcgggtcttatggcggccccgctgcgccttggccgtgctgcacgcttgctgccggccg

SEQ ID NO: 75249 - DNA, 600 bp, Chicken  19866894358766_1
atccctcccggcactaccggctaacgcggcccctggggctggaaaccattttcccggagccgtcccgatcttaaagttcgaaggcagtcccgagaaaggcagagcgctaaatcggggatcgttgcatcttattccgaatcccgactgccagggccgcgctctccgccctgggcagggtttaaagataaactccgtctacggaacgcggctttgatttgaacgcgttcaccgctaattaggacgattcttttatctgccgtgagtgatttcggttcagttctgaaagatttatttccccgrtaggtggtttcgtttaagaaatcctaactcatctgttctggatataaaatccccagtcgatatctttctccttcttcgtggtattggactttctaatatttttcacatttgcaatccatttcccacttattagtccttctctttattctatttctttttaatatatatatgcatacatatatatatatatacgaccttttaccgtttccatccaactccagcaacctgctgcgagttaaaacatcggccgtctcggggacgagttattgcgaatatcagwgggtgaaaacgggtcgttgt

SEQ ID NO: 75250 - DNA, 600 bp, Chicken  19866894358766_2
tgaaagatttatttccccgrtaggtggtttcgtttaagaaatcctaactcatctgttctggatataaaatccccagtcgatatctttctccttcttcgtggtattggactttctaatatttttcacatttgcaatccatttcccacttattagtccttctctttattctatttctttttaatatatatatgcatacatatatatatatatacgaccttttaccgtttccatccaactccagcaacctgctgcgagttaaaacatcggccgtctcggggacgagttattgcgaatatcagwgggtgaaaacgggtcgttgtcaacgtattttcttctttaaaaagaataagaatagcgaaagagaaagcagggaaagaaaggaaaggaacaaagaaaaagagagaaaggagagagggaaggaaaaagaaaaagaggaatggagagaaggaatgaagaaagggggagaaaagtggaaagggaaggggaaggaaacgaacgaagcgggcttttaatatatttttcggattattctccccacatttcaagcgacttggaggttgaatgttctgacttgtctgtccttaagctgtccctgccgaa

SEQ ID NO: 75251 - DNA, 600 bp, Chicken  19866894358768_1
tgaaaaaacaacttcactacacatctaggacagcttatgtaagtgaattccagatcacgaaaacaacaacatatattgaaattctttcatcattctttaatggagaaactttaacgttgtaatattaataataaaaatcacactgctgatttgcttctgcaaacacacaactgcagaaatcagaggtccatttatatcccagacttcccacaaagctcattcagtgacccagactgttcttccagggttttcccaaaaacttccttcaacttacttctcccgtctctcttgacatcagtwtccacacatacagcctccaaactgcttctatcagatctcttttttcctctagaaaatttcatcccaaatcttccccatcacagacttttttggacacctttctcatcagctccggaggctacatgcctgtcttttctatccaccagcatcactcttctatatgtgtctgtctgaaatccacttcctcaggactaatgtctgcttaagaatatctgtgtctacatccagctgttcccatcctctcatggccactgcaatgtgatagggaactgatccacctcaagaattttttgctcaagt

SEQ ID NO: 75252 - DNA, 600 bp, Chicken  19866894358771_1
caagagctgaatttgttgtcaccagagaatggtgtgctttcggaagacgagagacctgcgtctgcaggccccacaggcacctggcacagggccacacaaagcaaggctgtctgtccaggttgctgcatttcatccctccctactccaaataaagtgctacatcaatctccctaacgcagattaacacaacgactatgtgtgagcacggaggtggaacttaatttttaaaagggaactttttcctgtccctgctgaagtcctttggaagtgctcccagtcgctcaacactggcgttcagastcaaaacagaggctccagtaaaataaaggcagtgatgaatgttacagatttgccataaagataacaaaaatcctaaagattatcctgttaatgagtcgcaggcataacgtgtaacagaatgagaaaatgcaggagctgtacaagacagaatccaggaggagctcacagctgcaacacggtcagtaggtactgcattaaaaaggcatgctccagtgtgtgcttacccagcctcttccttttgttcaggtgccactgggctggacgtctggaaggcacctgtgtagaaaagccattctggct

SEQ ID NO: 75253 - DNA, 600 bp, Chicken  19866894358778_1
ccatgaggtagcactgacttaaatttcagactaaggaaggaggatccaaactaaggcagggattctcactcgttacatggcagccagcacagcagggtgcacttatcagtactacagttcactatgtattaacttcaggagaacactttcgaccacatacctacaacgttatgacagaactgcagcctcctcatgttatttgcagataggttgcctgaagataaaatgtatgtcttcaaaacatttagcatgcaaagatggagcctgccttctcagaggaatgagactatgttactaaaygagagctgctgtcagaaataaaagcctttggctacctcactccagcagccagagcacactaaatgccaatttttcctttgctaggacacagtctgttggtgctagaatgctgaggcttcctatgggaaaggatgatatgtgacaagcatcaggcttataaattacatgccatcatagggattcagtatgaacagcctgcttttacaacagcatttctcagtttttccctgtagggaagcctaacatgaaagacaaaggagaattaaacgagaagttatcaaactgttgtctatctagggc

SEQ ID NO: 75254 - DNA, 600 bp, Chicken  19866894358779_1
tctgttctacttgatatcatagcaaaataacaaagttcaaaaatggaggtgtatacgctaaatagcacagaactgaatacctagcagttctaaacttgcagtatttttaactgaaaatcagcagtggctgggtgtatttctaaagggattgtaatgccacttcagtagttctaccaacccccaaaaagatcccacaatgtcctgacaagatttgtcagctagagataagcagtgaagagagggtatttggctccgaatgtcacactggattggatgtaagcaaatgtcatttattttaamaggatcggacccaagtttggacaacttgaaaaaatacatgcactggaatgcagctcctctccaggaaacagcgactgtaaataactcctggaaatcacaggaataaaacagatgggtctgaaaaagttatgagactaaaaaacaaaggaatcgttgtgaggcatccactggcaggctacatgactggtgtctttgaagaataaagcacttatatgttgatgtccttcccatttagcccctctttttctcacatggacctcctccattctaacagagcagtttaagcaacctggtaacctg

SEQ ID NO: 75255 - DNA, 600 bp, Chicken  19866894358779_2
gacatattgtgcagcgagcacactcgaatgatcgatataaataagaagcatgacttcatcctttcaaacattaataaacttttccagaaagagattttcagacatgtctgcaaaatgagccacgaaattaaacagcggggggagagctttcttcctggaacaaaacgtgcccgttcctgcacagctggcagtgcacacccaatgctctgcctcagtgggcagtcccatccttgggctgcccgtgaataaaagctgtggcagctcaatagtcccgctgtgcccatcctggccccgatgccrcgggttgtgctcgtccgaagctgtaagcactttgccatagccaagcaaaggctcaactcacagaagtggagtgcttaagaatctgaattccaaacttaaaataaaaaccagatgcacacttgtacatgcaggatggtgccagatcgttttcagcttgggctcattcagggttgtcttatggccaacagcaggccagagcacagatcgcgagcacctgagctacactgggatggtcttacgcggataaattctgctaaatgttcacgcttgcagctctgacacagcagaaaggtgcaggtt

SEQ ID NO: 75256 - DNA, 600 bp, Chicken  19866894358780_1
aacgtaagcattctgagtgaatacatagagtttactaggagatgtcagtctgctattcagtagattacttattgtaccagcattaaattacttaaactgaatatcgaaatgtcaaagattgtttagatttcttctgttaatagtttaaaggccaactttatagcatgcaattataatgagccattgagattttagattagaaataggtctgtgcaagttagtactggcaatgtttgaaacagaacagtttgttgtagctggagccagtaaatgaaacagtctagcggccatgaaaaggarcataacctgtgtgtggaaggcatttatcaagaagagatatcattgatgcttgcctctaagaatccatccttgtagcccactcccaaaaatctacagttttgctgcccacttatttcaccagaaggtactaaatggagtgccttcaaggaagcgtttgctttcctcagtgtcagagcaccatcctgttgccaaaagcatgcagattccaagcagrggggcttatgctgtgtgtgagattaaaaaaatattgtaataattaaaaaaaccacacagtattgcaataatttttagaaattatcc

SEQ ID NO: 75257 - DNA, 600 bp, Chicken  19866894358780_2
aagttagtactggcaatgtttgaaacagaacagtttgttgtagctggagccagtaaatgaaacagtctagcggccatgaaaaggarcataacctgtgtgtggaaggcatttatcaagaagagatatcattgatgcttgcctctaagaatccatccttgtagcccactcccaaaaatctacagttttgctgcccacttatttcaccagaaggtactaaatggagtgccttcaaggaagcgtttgctttcctcagtgtcagagcaccatcctgttgccaaaagcatgcagattccaagcagrggggcttatgctgtgtgtgagattaaaaaaatattgtaataattaaaaaaaccacacagtattgcaataatttttagaaattatccatgtcgtggagtgtttcaggcagtttaagaagctgtgacatcagaagtgatttactggtgataacatatttttaactgtttgctttttcataatagcttgaaaatgccttatgttttagttgtaaaggctttttttatatgtttatagggatgtttcagggttcactattggtaaacctataacgttttactattctactgcataaatgcatta

SEQ ID NO: 75258 - DNA, 600 bp, Chicken  19866894358784_1
ggaaggcggctgctgatcctcctacacggagcacatcctgctgttgcctgaacaagagcaggtcctgagggcaacacaacacagctgtgccacaaagtcctcgagcacacgaggctgcagcccaaggacctacccggtgccaatgctgctggtgccaagcactgcgtcctgcaggtgaacggctgacaggagtcagggctgggctctgaaagggctgaaggtgcaccagtcaggttagaatgaccccaggagctgtgggaagagggtggaggggtttgttggaggaggaacaaggagcargaagaaggaaagaaaaattcacgggaagtgcccgagagaagtgcttaaaaatagaagccactaataacaacccttctttagaagggataaaagctgctctcatttcccacacagggaactgtttatttgagctgctgggttataccacagcattataactgtgtttttccagcgctgctgtgctgggtcatttcctggtggcacctaaaagtgagagggctgcttgtgtcagaaaccctttccactgggacacggatgtgtgcgtcacggtggcacggctggggctgcggaggtcatctc

SEQ ID NO: 75259 - DNA, 600 bp, Chicken  19866894358789_1
caagatgggacaaattgtttaacttcaactatcttcctgaatataagtactgcagggataacattgtttcctctcagatacctccattctacaacatctttcaagccttcaaattgttcagagactttgtctctaccaacttatatatcacctgtgcaaagatacctagctcaacttttagccatgaagtctttcaatgtggcatattgataagttaaaagcagctcatggtttatcagccaccatgtcaaaatgatggaaaggtgatacaaaaaaagtattactgttttgcactctacrcatggaatactatttataggtctcaaggttcatgttcaccagtgcaaagcttacatcttgcactctgctctgtccaacctgaggcaatacagcagacagagatttagatagctgggtgatgatttcatgctcttatccttgaactgcctttcctcgtgcttcttgatttagatcatacttccaacacagaagccctgattaatactcagtaccagcaaatccccctctaattaatttatgcagaaggaatgacaatgcatgatgaaaactacattccagaagacgcaacgctctaytgag

SEQ ID NO: 75260 - DNA, 600 bp, Chicken  19866894358789_2
tacrcatggaatactatttataggtctcaaggttcatgttcaccagtgcaaagcttacatcttgcactctgctctgtccaacctgaggcaatacagcagacagagatttagatagctgggtgatgatttcatgctcttatccttgaactgcctttcctcgtgcttcttgatttagatcatacttccaacacagaagccctgattaatactcagtaccagcaaatccccctctaattaatttatgcagaaggaatgacaatgcatgatgaaaactacattccagaagacgcaacgctctaytgagaagctggcaagctcccatacgtattgtgataacactgactaagcatcttctctaatctcttccttactctccctgtcttccacaagccttgctgggaccactgtgcctccagtttcattcccatctgacagtatgcttttctcagaagtctacatgacgtgaccaaatccagcttcacttcccaaatgaacattacatttttgggataagatccaaccaactgggggagttcatcagttgtttgtttggggtagtgtctaaacgatatttagtctcaatcacctttcacatgccca

SEQ ID NO: 75261 - DNA, 600 bp, Chicken  19866894358796_1
atcttagtgaacagtcatttgagacagaaaggtctggtacctcaggtcattttaggcaacatttaggatttaataattttgattattaattttcagcaattcatattaagctatggcaactcaccatgcctcattaaaggcaggcttccaggaggattagagctgctgccagactcttggaataatctaataaaatccagcatactcaaacatttctagattagcttttatgtttccttgcagtcagcagtcacacagaactgctttgatacctgggataagcagggcacataggaatcyaggcattgccttgtgtttacactggcatggtttttcaggagagcgtaagggacttcgtgaatatggcagatgctcctagtcatgtgtgatacacatgacctctctgcccgacaggtaaagggtagaatttagctaggtctaaagcaggctcttgccctgggtcacttccattaggcagacatcaccatccaagccctggagcagtggagctactccactccrtggagactaccctcacacttcagttagcttccttgagcctctatttctccactggaaaagcacctcaggtgactctca

SEQ ID NO: 75262 - DNA, 600 bp, Chicken  19866894358796_2
agcttttatgtttccttgcagtcagcagtcacacagaactgctttgatacctgggataagcagggcacataggaatcyaggcattgccttgtgtttacactggcatggtttttcaggagagcgtaagggacttcgtgaatatggcagatgctcctagtcatgtgtgatacacatgacctctctgcccgacaggtaaagggtagaatttagctaggtctaaagcaggctcttgccctgggtcacttccattaggcagacatcaccatccaagccctggagcagtggagctactccactccrtggagactaccctcacacttcagttagcttccttgagcctctatttctccactggaaaagcacctcaggtgactctcagaaaaaaatgtgccaggtaacaactaacacctcctacaaataagggcacatcgaacactytgggggattcgttagcatttctttctctccatttaactttcctgtggtatctcagtaagcagggatcacttgcaggctctgttcgtacttttatgtctgtacaaaccagcaacatatagaagagaggagagatgcatttacgttgcactgctgcataaatga

SEQ ID NO: 75263 - DNA, 600 bp, Chicken  19866894358796_3
atatggcagatgctcctagtcatgtgtgatacacatgacctctctgcccgacaggtaaagggtagaatttagctaggtctaaagcaggctcttgccctgggtcacttccattaggcagacatcaccatccaagccctggagcagtggagctactccactccrtggagactaccctcacacttcagttagcttccttgagcctctatttctccactggaaaagcacctcaggtgactctcagaaaaaaatgtgccaggtaacaactaacacctcctacaaataagggcacatcgaacactytgggggattcgttagcatttctttctctccatttaactttcctgtggtatctcagtaagcagggatcacttgcaggctctgttcgtacttttatgtctgtacaaaccagcaacatatagaagagaggagagatgcatttacgttgcactgctgcataaatgacaagggaaggagcttcactactgagatagcaactgttagagtaaggctttggaaaggagttaacaaaagcattctttccaccttcaaatccagttgaaaccaaactgtgcggggtcctcaggtctgaaccagtgccca

SEQ ID NO: 75264 - DNA, 600 bp, Chicken  19866894358798_1
tgactgagaaatagatgaaaatttactggagtctttgatattcagtgttgctgtgtcacagtacattgagaataatgaagaggacattcacttggagcagagaacattagttttcttacccaagacacaaggaagccagctggagaggagaaaattgccaggtagattgtcaacataaaggcaaagttaacatgctgataataaccaggggaagtatgaagataataacagaggatgataacaacccagctaagaagaagaagggggatctagaagatcaagtagtgccaagctgtgcamagctattatgcacgtagagggacacttccactcaggcagaagggagcttgtttgtttctcatgcagctgaatgtgttaactccagtcttgtgctaaacaagattaggccttgctttctccctattatcgagagtatgtatttcttgacagatttccacattgctgccttgttactgtgaatgtagcattatttatcccactttgccctccctcccccttccccttggctgtacagctctgcaagttgcaggcaagtgtcatgtcaggtatatgtgaatctgtcaaatgcacgatgaggaa

SEQ ID NO: 75265 - DNA, 600 bp, Chicken  19866894358805_1
gtgagcacaatgaggtggtgggtggtatgtttcagcagtggcaagagtgacatgaaagataagccacttcctggacagccatgcacagatgtcacaccatgaaattaatagcatctcgactagctcatctgtgcacatcagtgcacatcaccactatgagccagagtcaaaatggcagtccatggagtggtgacacgtgaatttaagacacagccctcagtggatagtgatgtgcactgtcttttgggttgagaaagggatgaccagtctggatttcctgtaatcttgacagatgatcarctctaatagctatgtttggataaagggcctggagcatctcccttacaaggaaaggctgagtaacctgaatctgtttagcctggagaaaagaaatctgatgggggatctgattaaagtttgtaaatatctaaaggagagtgggaagcaaatgaatgaggccaggctcttctcaggggtgtttagtgataggacaaggagcaatggcctaaaatttgaacataggaagttctatatagacatgtggaggaactttatggtaagaatgacagagcactggaacaggttgcccagagaggttat

SEQ ID NO: 75266 - DNA, 600 bp, Chicken  19866894358805_2
ggaagttctatatagacatgtggaggaactttatggtaagaatgacagagcactggaacaggttgcccagagaggttatggagtctcctactatagagatattcaagacctacctggacagctacctgtgcaacttactgtagggaaccagctttatctggggagttggatctcttgatgtcccttccaacttctgcagttctgtgattctatgacactgactaagctgaagtatcaaacttccagagtcaggccagagaagaaaacaacctttatcttgcaactcaataatggcaggcsccaaaccagtttgaacacggtggagcatgttgccagtcttggctggactgtcctaccacacccaccatatagtcaagatttggagcctgatttccacctgtttgggccaatgaaagatggattttgtgggcaacattttcctgacaaccctgtatatcatctttgaaacagagggtcaycttcactggtgaagatttttatgagtgcagcatgcaaacttttcttcatcactggagaaaactcaaagctaatggtggtgactatgctgaaaaatagttttttgtagctgacaatttgttc

SEQ ID NO: 75267 - DNA, 600 bp, Chicken  19866894358805_3
gtcccttccaacttctgcagttctgtgattctatgacactgactaagctgaagtatcaaacttccagagtcaggccagagaagaaaacaacctttatcttgcaactcaataatggcaggcsccaaaccagtttgaacacggtggagcatgttgccagtcttggctggactgtcctaccacacccaccatatagtcaagatttggagcctgatttccacctgtttgggccaatgaaagatggattttgtgggcaacattttcctgacaaccctgtatatcatctttgaaacagagggtcaycttcactggtgaagatttttatgagtgcagcatgcaaacttttcttcatcactggagaaaactcaaagctaatggtggtgactatgctgaaaaatagttttttgtagctgacaatttgttccatcaaatattgttactgtgctcttcatatctgttgtctttccatgaaaataagtgggaggcattacttttggagcaacctatgtatatatcataaccaataggcttgggaactaattttcttcatgttctccactgtccttcactcttgaattctttccctataagagctagagctct

SEQ ID NO: 75268 - DNA, 599 bp, Chicken  19866894358808_1
  misc_feature (1)..(65): n is any nucleotide
nnnnnnnnnnnnnnnnnnnnnnnnnnnnnnnnnnnnnnnnnnnnnnnnnnnnnnnnnnnnnnnnnacaggagtgaaaaacacagattactcatagctgaaagaaattgaataggtttttgcagcactatctttctcactgtgggtttgctttgagttcttataacagagagtgaatgagtaatatcaagttttatgactggaagtacaaatgaagtctgaaatggggaaggagcagggagatgcgacgttaaatctctgtgctttgtgagtagtaaaactcttctcctcttgatcatagktgcttttccttcttcatatgcatacctccgagagaaatattaaccaagaatgctggcagagggactggcttattggatatagtaayraacaccgtaactccttggcagttgacaagtcacagactgagtgaccttctaaaatactggagcgtgaaaataaatgacaataaaagtggctctcaaagccagccagacaggctctgtcaaattctgttgccacatccttccgcttatttaattagaaaatagaagcaagtaattttaatttccagtgyaacaaactgcttaaagatctcyct

SEQ ID NO: 75269 - DNA, 600 bp, Chicken  19866894358808_2
tactcatagctgaaagaaattgaataggtttttgcagcactatctttctcactgtgggtttgctttgagttcttataacagagagtgaatgagtaatatcaagttttatgactggaagtacaaatgaagtctgaaatggggaaggagcagggagatgcgacgttaaatctctgtgctttgtgagtagtaaaactcttctcctcttgatcatagktgcttttccttcttcatatgcatacctccgagagaaatattaaccaagaatgctggcagagggactggcttattggatatagtaayraacaccgtaactccttggcagttgacaagtcacagactgagtgaccttctaaaatactggagcgtgaaaataaatgacaataaaagtggctctcaaagccagccagacaggctctgtcaaattctgttgccacatccttccgcttatttaattagaaaatagaagcaagtaattttaatttccagtgyaacaaactgcttaaagatctcyctctcaattaggtatttactgattgttcctatacctatgaatgtaygagacaagaatttactgctttgttttgccagtgttgttttcag

SEQ ID NO: 75270 - DNA, 600 bp, Chicken  19866894358808_3
actcatagctgaaagaaattgaataggtttttgcagcactatctttctcactgtgggtttgctttgagttcttataacagagagtgaatgagtaatatcaagttttatgactggaagtacaaatgaagtctgaaatggggaaggagcagggagatgcgacgttaaatctctgtgctttgtgagtagtaaaactcttctcctcttgatcatagktgcttttccttcttcatatgcatacctccgagagaaatattaaccaagaatgctggcagagggactggcttattggatatagtaayraacaccgtaactccttggcagttgacaagtcacagactgagtgaccttctaaaatactggagcgtgaaaataaatgacaataaaagtggctctcaaagccagccagacaggctctgtcaaattctgttgccacatccttccgcttatttaattagaaaatagaagcaagtaattttaatttccagtgyaacaaactgcttaaagatctcyctctcaattaggtatttactgattgttcctatacctatgaatgtaygagacaagaatttactgctttgttttgccagtgttgttttcagc

SEQ ID NO: 75271 - DNA, 600 bp, Chicken  19866894358808_4
aaactcttctcctcttgatcatagktgcttttccttcttcatatgcatacctccgagagaaatattaaccaagaatgctggcagagggactggcttattggatatagtaayraacaccgtaactccttggcagttgacaagtcacagactgagtgaccttctaaaatactggagcgtgaaaataaatgacaataaaagtggctctcaaagccagccagacaggctctgtcaaattctgttgccacatccttccgcttatttaattagaaaatagaagcaagtaattttaatttccagtgyaacaaactgcttaaagatctcyctctcaattaggtatttactgattgttcctatacctatgaatgtaygagacaagaatttactgctttgttttgccagtgttgttttcagctcagttcaccttgggcagatagacttttatgtgcttatgtgggaattraatgatcattaaattaatttatttttaaagtaaacatctactttgtgcgttsgatgtcttctgccctcttccttttactgtcacagcagtcacagacgaatggaggaaagcaacacaaaatcaccttgtgagacgtgaca

SEQ ID NO: 75272 - DNA, 600 bp, Chicken  19866894358808_5
agktgcttttccttcttcatatgcatacctccgagagaaatattaaccaagaatgctggcagagggactggcttattggatatagtaayraacaccgtaactccttggcagttgacaagtcacagactgagtgaccttctaaaatactggagcgtgaaaataaatgacaataaaagtggctctcaaagccagccagacaggctctgtcaaattctgttgccacatccttccgcttatttaattagaaaatagaagcaagtaattttaatttccagtgyaacaaactgcttaaagatctcyctctcaattaggtatttactgattgttcctatacctatgaatgtaygagacaagaatttactgctttgttttgccagtgttgttttcagctcagttcaccttgggcagatagacttttatgtgcttatgtgggaattraatgatcattaaattaatttatttttaaagtaaacatctactttgtgcgttsgatgtcttctgccctcttccttttactgtcacagcagtcacagacgaatggaggaaagcaacacaaaatcaccttgtgagacgtgacacagaagcactggggctgaaaac

SEQ ID NO: 75273 - DNA, 600 bp, Chicken  19866894358808_6
ccaagaatgctggcagagggactggcttattggatatagtaayraacaccgtaactccttggcagttgacaagtcacagactgagtgaccttctaaaatactggagcgtgaaaataaatgacaataaaagtggctctcaaagccagccagacaggctctgtcaaattctgttgccacatccttccgcttatttaattagaaaatagaagcaagtaattttaatttccagtgyaacaaactgcttaaagatctcyctctcaattaggtatttactgattgttcctatacctatgaatgtaygagacaagaatttactgctttgttttgccagtgttgttttcagctcagttcaccttgggcagatagacttttatgtgcttatgtgggaattraatgatcattaaattaatttatttttaaagtaaacatctactttgtgcgttsgatgtcttctgccctcttccttttactgtcacagcagtcacagacgaatggaggaaagcaacacaaaatcaccttgtgagacgtgacacagaagcactggggctgaaaactgtcctgtccttgtgtgtacttcgtaaagcaggatttggttcacct

SEQ ID NO: 75274 - DNA, 600 bp, Chicken  19866894358808_7
ctaaaatactggagcgtgaaaataaatgacaataaaagtggctctcaaagccagccagacaggctctgtcaaattctgttgccacatccttccgcttatttaattagaaaatagaagcaagtaattttaatttccagtgyaacaaactgcttaaagatctcyctctcaattaggtatttactgattgttcctatacctatgaatgtaygagacaagaatttactgctttgttttgccagtgttgttttcagctcagttcaccttgggcagatagacttttatgtgcttatgtgggaattraatgatcattaaattaatttatttttaaagtaaacatctactttgtgcgttsgatgtcttctgccctcttccttttactgtcacagcagtcacagacgaatggaggaaagcaacacaaaatcaccttgtgagacgtgacacagaagcactggggctgaaaactgtcctgtccttgtgtgtacttcgtaaagcaggatttggttcacctttgcaatgactgtcacaggcattacgtaatgcagccttaaaccctggtgatgctacacctgtaatgagacaaaagttgactaattatagtgg

SEQ ID NO: 75275 - DNA, 600 bp, Chicken  19866894358808_8
agccagacaggctctgtcaaattctgttgccacatccttccgcttatttaattagaaaatagaagcaagtaattttaatttccagtgyaacaaactgcttaaagatctcyctctcaattaggtatttactgattgttcctatacctatgaatgtaygagacaagaatttactgctttgttttgccagtgttgttttcagctcagttcaccttgggcagatagacttttatgtgcttatgtgggaattraatgatcattaaattaatttatttttaaagtaaacatctactttgtgcgttsgatgtcttctgccctcttccttttactgtcacagcagtcacagacgaatggaggaaagcaacacaaaatcaccttgtgagacgtgacacagaagcactggggctgaaaactgtcctgtccttgtgtgtacttcgtaaagcaggatttggttcacctttgcaatgactgtcacaggcattacgtaatgcagccttaaaccctggtgatgctacacctgtaatgagacaaaagttgactaattatagtggagtctgtgcctaaaattcttggtgtagatttcatgtttcccaagtgttggct

SEQ ID NO: 75276 - DNA, 600 bp, Chicken  19866894358814_1
tgctgctgaatcatcctctgatacatgcttgtttttgtcagcgtgcaaggcctttgaacacagtggaaataaaatacagcattctcaaagctggtcttgtatcctgcatgaatattgtagcttctatattccttaacagaggtttaatttttgaggtttgtagttatgtgtttgtttgttttttaataaaaaaaaacacagaaatttttttttccagaagaaaaggaatgaaaggcaggattaaattttatgagtacatctcatgagtagtaataacgaatctatgtatgcaaccctaascattkagctgccaacaggcaagcctaacacacrgaaaatataatctgaaaattactggaaattaaatatatttactggacatacaagggctgctctgaaaataataccttctattttattgtattggccctcaacgctatacgtagatgttggtggtatggcagtggaggctgaaccttcccaccaatattccgctacatgttactgctgtgagacagatggcagcagaggggcactctgacacaatggcgtttgacgtggaagtgcagatgaagcaaagctttggcactgaattcctct

SEQ ID NO: 75277 - DNA, 600 bp, Chicken  19866894358814_2
ctgaatcatcctctgatacatgcttgtttttgtcagcgtgcaaggcctttgaacacagtggaaataaaatacagcattctcaaagctggtcttgtatcctgcatgaatattgtagcttctatattccttaacagaggtttaatttttgaggtttgtagttatgtgtttgtttgttttttaataaaaaaaaacacagaaatttttttttccagaagaaaaggaatgaaaggcaggattaaattttatgagtacatctcatgagtagtaataacgaatctatgtatgcaaccctaascattkagctgccaacaggcaagcctaacacacrgaaaatataatctgaaaattactggaaattaaatatatttactggacatacaagggctgctctgaaaataataccttctattttattgtattggccctcaacgctatacgtagatgttggtggtatggcagtggaggctgaaccttcccaccaatattccgctacatgttactgctgtgagacagatggcagcagaggggcactctgacacaatggcgtttgacgtggaagtgcagatgaagcaaagctttggcactgaattcctctgtgca

SEQ ID NO: 75278 - DNA, 600 bp, Chicken  19866894358814_3
tttgtcagcgtgcaaggcctttgaacacagtggaaataaaatacagcattctcaaagctggtcttgtatcctgcatgaatattgtagcttctatattccttaacagaggtttaatttttgaggtttgtagttatgtgtttgtttgttttttaataaaaaaaaacacagaaatttttttttccagaagaaaaggaatgaaaggcaggattaaattttatgagtacatctcatgagtagtaataacgaatctatgtatgcaaccctaascattkagctgccaacaggcaagcctaacacacrgaaaatataatctgaaaattactggaaattaaatatatttactggacatacaagggctgctctgaaaataataccttctattttattgtattggccctcaacgctatacgtagatgttggtggtatggcagtggaggctgaaccttcccaccaatattccgctacatgttactgctgtgagacagatggcagcagaggggcactctgacacaatggcgtttgacgtggaagtgcagatgaagcaaagctttggcactgaattcctctgtgcagaaaaaaaatggcacccactgacattca

SEQ ID NO: 75279 - DNA, 600 bp, Chicken  19866894358822_1
tttcactgttttgaggttaagggggatgggattggctggaaggagaaggaaggtgtagtcccttgttttgacaagtaaaacagactggtaaataatggagagacacagaggtctaaaacataactcatccaagaaagaggaaagtaatataatgcataaatattactggatgataaataagagtaatttgcttccacttagtaatttgataagggcatggctgcactatgaaaaaccgcctgcatattgttcttaaacacagtagattgatgcacgagtgaaatatctgtgacagcatcygtacacaaataagcagcattaagcctcacagtgcaagcagggtaatcttgtgctattggatatggaaaattaatttgcctccataacagtaacagatcaaggtaattatgaagcgagtgcaattacttttatgttggccacacggargaattctggcattcacaggagccaggcagtactacttcatccctgtgcactgcaagttttatccatattgttgtgtgcataaaatcgcattgtggaatcctctgtgggcttagaaacaaagacagtgaactgtcagacatgaagaacagaaat

SEQ ID NO: 75280 - DNA, 600 bp, Chicken  19866894358822_2
tataatgcataaatattactggatgataaataagagtaatttgcttccacttagtaatttgataagggcatggctgcactatgaaaaaccgcctgcatattgttcttaaacacagtagattgatgcacgagtgaaatatctgtgacagcatcygtacacaaataagcagcattaagcctcacagtgcaagcagggtaatcttgtgctattggatatggaaaattaatttgcctccataacagtaacagatcaaggtaattatgaagcgagtgcaattacttttatgttggccacacggargaattctggcattcacaggagccaggcagtactacttcatccctgtgcactgcaagttttatccatattgttgtgtgcataaaatcgcattgtggaatcctctgtgggcttagaaacaaagacagtgaactgtcagacatgaagaacagaaatgtcactggggaaaaaggaaacgtactgcagtaagtgctagaagagtcatcttgtccttagctgtacactcagtaatgggttaactacagaaacctcctggagactttggaacgtggtagcacctctgttctgcttgsaagttagaaa

SEQ ID NO: 75281 - DNA, 600 bp, Chicken  19866894358822_3
ccacacggargaattctggcattcacaggagccaggcagtactacttcatccctgtgcactgcaagttttatccatattgttgtgtgcataaaatcgcattgtggaatcctctgtgggcttagaaacaaagacagtgaactgtcagacatgaagaacagaaatgtcactggggaaaaaggaaacgtactgcagtaagtgctagaagagtcatcttgtccttagctgtacactcagtaatgggttaactacagaaacctcctggagactttggaacgtggtagcacctctgttctgcttgsaagttagaaaattgtgctagcaaaatacaatcactgaaggatggcaaaacaaacaaaaccccaagccgtagtgcttatggagtaagaggaagacgcttacagaagcaataccagggaacaaggaccaattgcctaccaggtacttggtctgcaagttaacatttcctgtggaaagcagcctaaaatcaaaaaattgttcaacaagagcagctgcatagcagtgtttggagaagcaggggggaaatgtgtctgtggaagcactgtggatgaggatctgtaatttataccaagtttccagct

SEQ ID NO: 75282 - DNA, 600 bp, Chicken  19866894358823_1
gaaaaacagaaactagagctaaagcatgagaaataaacaactggaaaatagtagttggatgccaggattttcaaaacagaagtttccacaatctctgtcatttaaaccattgctttaaaaagcttgatgcttggaaaattgtatttccatagttaaagtgatagcccttcacagtttaatgataatgcagacaatgtgggcaatagatacaaacatttaaatttggtttctgctttaggagctctggttctccacaaaagcactggacgaagagacttctccagggtatgagaaaaaacrtytaggttaagtctttatccttcratactactacaaatctgggatggaataagacaaggcgaataacccttaaggactaaataggtcttttcaaaaaaagtagtacatttgatttttactaactgtagtcattaacacagaagaagacgaaaatgcagaagtacataaacttctgaacttaaaaaaaatagaagtctttgcccttacagccttggcagaatttacaaaaatcttaaataattcaatttatcaaaaaaaaaaaaaaaagcaacaaatgtaaatatgagctaagcttctttc

SEQ ID NO: 75283 - DNA, 600 bp, Chicken  19866894358823_2
aaaacagaaactagagctaaagcatgagaaataaacaactggaaaatagtagttggatgccaggattttcaaaacagaagtttccacaatctctgtcatttaaaccattgctttaaaaagcttgatgcttggaaaattgtatttccatagttaaagtgatagcccttcacagtttaatgataatgcagacaatgtgggcaatagatacaaacatttaaatttggtttctgctttaggagctctggttctccacaaaagcactggacgaagagacttctccagggtatgagaaaaaacrtytaggttaagtctttatccttcratactactacaaatctgggatggaataagacaaggcgaataacccttaaggactaaataggtcttttcaaaaaaagtagtacatttgatttttactaactgtagtcattaacacagaagaagacgaaaatgcagaagtacataaacttctgaacttaaaaaaaatagaagtctttgcccttacagccttggcagaatttacaaaaatcttaaataattcaatttatcaaaaaaaaaaaaaaaagcaacaaatgtaaatatgagctaagcttctttctc

SEQ ID NO: 75284 - DNA, 600 bp, Chicken  19866894358823_3
catgagaaataaacaactggaaaatagtagttggatgccaggattttcaaaacagaagtttccacaatctctgtcatttaaaccattgctttaaaaagcttgatgcttggaaaattgtatttccatagttaaagtgatagcccttcacagtttaatgataatgcagacaatgtgggcaatagatacaaacatttaaatttggtttctgctttaggagctctggttctccacaaaagcactggacgaagagacttctccagggtatgagaaaaaacrtytaggttaagtctttatccttcratactactacaaatctgggatggaataagacaaggcgaataacccttaaggactaaataggtcttttcaaaaaaagtagtacatttgatttttactaactgtagtcattaacacagaagaagacgaaaatgcagaagtacataaacttctgaacttaaaaaaaatagaagtctttgcccttacagccttggcagaatttacaaaaatcttaaataattcaatttatcaaaaaaaaaaaaaaaagcaacaaatgtaaatatgagctaagcttctttctcctcactgcatagtgctatatta

SEQ ID NO: 75285 - DNA, 600 bp, Chicken  19866894358829_1
tgaaagagaaaagaattcttgtaaatttttaatctaagctatatagacaattacattaataagagcaaattatatcatgaaatatttagtgtttttctctatgctaaatattactttgaacatgattcttttgagaagatttgaaagttcaagaaatacatagaaacaaaacaggaacaactattaaatataattttgaaaatgtattcatagcatagaccattgcttccatcattacttaaaaaatgaaaatactttggtgagctattgcattttattctttttgtagacagagagaaracataataaatactttgtgcaatatgttcatttaatagaaaaacagctcatctattatagaacacataatgtacaattaacatcaaagttatggcagaaatgcatagctatttattaatgtctacatttattttgtattatgccaaagctaaccagccatatatttgctatcatccacaatatgtcttgataattaatccaattgtgaaatttcctaaattgtatgctgctgtttcttttgttgtatggctcctcaacgtgacattacttcataatgaatgcacaccacatttcctgtag

SEQ ID NO: 75286 - DNA, 600 bp, Chicken  19866894358829_2
atactttgtgcaatatgttcatttaatagaaaaacagctcatctattatagaacacataatgtacaattaacatcaaagttatggcagaaatgcatagctatttattaatgtctacatttattttgtattatgccaaagctaaccagccatatatttgctatcatccacaatatgtcttgataattaatccaattgtgaaatttcctaaattgtatgctgctgtttcttttgttgtatggctcctcaacgtgacattacttcataatgaatgcacaccacatttcctgtaggaaatgcaytggtttctagccatcctagtccttagcactgactcgacattgtgtatatccacactgacccacaggctgggtccccattctcacccaaasactggcctttgactgcccatgcacctcccagtggtgctgagatgtcaaaccccaagagtttacctgactgttaggtgactatgggacagtgcactggggacacagtgtaaatgtggacaagtcctctcccagtctgtcagctcctcccaggtgggaatcactgctatgggaaggctaccctgaaaaagataagcatgtgtttctgtaaat

SEQ ID NO: 75287 - DNA, 600 bp, Chicken  19866894358829_3
atgcatagctatttattaatgtctacatttattttgtattatgccaaagctaaccagccatatatttgctatcatccacaatatgtcttgataattaatccaattgtgaaatttcctaaattgtatgctgctgtttcttttgttgtatggctcctcaacgtgacattacttcataatgaatgcacaccacatttcctgtaggaaatgcaytggtttctagccatcctagtccttagcactgactcgacattgtgtatatccacactgacccacaggctgggtccccattctcacccaaasactggcctttgactgcccatgcacctcccagtggtgctgagatgtcaaaccccaagagtttacctgactgttaggtgactatgggacagtgcactggggacacagtgtaaatgtggacaagtcctctcccagtctgtcagctcctcccaggtgggaatcactgctatgggaaggctaccctgaaaaagataagcatgtgtttctgtaaataagagttctgttcttacatttaatacaattaacacttgtactgacacatatctatgcatkctttatataaaataaacataatttatatat

SEQ ID NO: 75288 - DNA, 600 bp, Chicken  19866894358829_4
cacaggctgggtccccattctcacccaaasactggcctttgactgcccatgcacctcccagtggtgctgagatgtcaaaccccaagagtttacctgactgttaggtgactatgggacagtgcactggggacacagtgtaaatgtggacaagtcctctcccagtctgtcagctcctcccaggtgggaatcactgctatgggaaggctaccctgaaaaagataagcatgtgtttctgtaaataagagttctgttcttacatttaatacaattaacacttgtactgacacatatctatgcatkctttatataaaataaacataatttatatatattcatatgcacacgtgtgtgtatacactcatcatacaatctacacagaagcagaaacctcagcatctgttcctgcacacacaccctccctgtcagaaatatctattattattcttatttcttcagggcatgctcagaacctgccctgcgataagctcttcaaaagtttctgtgcacagcacacacaaaactgtgatttcccactcattgtaaattgtctgtttggtctcacagcagctaaggcaccacaactttctctatatttgcctt

SEQ ID NO: 75289 - DNA, 600 bp, Chicken  19866894358834_1
tccatcctgtgcttctgtactgctcacgtcttcctgcctttccttccttcctataactttcccgtcagcgcgggggaaaatacaaggcatttttcagccttaataattaaagaaaagcttctcaaaaaaggaatggttttcctcctgccctccaaactctgtgcatttccttccttgtacgtcagccttctgggttcgtctccagccgaagggacagagaggcagctgtgatgagcggctctcgctggagctccacttgcagcctgggagccgctcagtgcaggatttttgtccggagckctgggagcctttgctggcagcctccttcaggacacttcaagaatttgctgttactggccttctagctatatgctgtttagtaacatgtggaggagagattataaacatataaacatatcaggtcctagcctatgtctggggctccgaggcaccgccacaacataaataacaatcattataactaattactgtttgggcaatggggagggagagcacttgtatttatttttataatgggaagcaaataaatttctgaaatatcaagaggagggagtaaagagcttctacagagtgatgaga

SEQ ID NO: 75290 - DNA, 600 bp, Chicken  19866894358834_2
gagggagtaaagagcttctacagagtgatgagataaatggatttggaaacattccagctctccgaagccagtagcctgggacggatgggttttgttgacaaactcctcgagccatgtgagctgtgctgtatttatttacatcattcctgtaggaaagtgcgttacccaaacatgtgtgaccacagaagtaccgtgcagaagcaggaaggatcccagttttctgaagaggtgcaggaaagggttttggggatctccactctgggcagtggagccactcgcattgtttgtattagctgtgtrttcacartggtgccatctgggaattggtcctagagggcaaaatatacaaagaaatgcaggaggcacagacctcataacctcacttgggcaccctcaaactttgcaaatacccgttgtccaaattccggtgatgattctaaacttcacagttgccctctaggacaagcaggaacaaaaggataaagccaaacagctttgaatgtagagctgcactgaaggagaagggagcgttccgtgttggaaattcatgcagggggttgtgcagctcggctctgtttctgggaggtgttttttttaact

SEQ ID NO: 75291 - DNA, 600 bp, Chicken  19866894358834_3
taaagagcttctacagagtgatgagataaatggatttggaaacattccagctctccgaagccagtagcctgggacggatgggttttgttgacaaactcctcgagccatgtgagctgtgctgtatttatttacatcattcctgtaggaaagtgcgttacccaaacatgtgtgaccacagaagtaccgtgcagaagcaggaaggatcccagttttctgaagaggtgcaggaaagggttttggggatctccactctgggcagtggagccactcgcattgtttgtattagctgtgtrttcacartggtgccatctgggaattggtcctagagggcaaaatatacaaagaaatgcaggaggcacagacctcataacctcacttgggcaccctcaaactttgcaaatacccgttgtccaaattccggtgatgattctaaacttcacagttgccctctaggacaagcaggaacaaaaggataaagccaaacagctttgaatgtagagctgcactgaaggagaagggagcgttccgtgttggaaattcatgcagggggttgtgcagctcggctctgtttctgggaggtgttttttttaactgctgcct

SEQ ID NO: 75292 - DNA, 600 bp, Chicken  19866894358835_1
aaggatctacttcagcagaaagatgttaagaaggatttactacactgcgtttgtctcaaataaccttataacagagttttgtttgaaatatagtattgctggttgtaatatctcaccttagatttcagatccattgtaattgctggaatttaggtagactgcttcgttttcattcctccctttgcaggttgaagaaatgaaacgtcggcagtacacgcttgctttcacatccgctggagcacaagcccaaacataccacgtttccttcgaaacgctggcggagtgccagcggtggcaccracaggcatccacggtgaggccctggagactgcagcagttggggtggtggataccaagggaatgaagggagttgttgtacaggctgggtctgcagacagatttaaactgtgatgctggagaaagtacctgggatgctttccagctttcttcatttcttacatgctcaggattacagaaattttctttgagctttctcctggggctctggctgtccagcagtgttgagtagcagttctgtgttcttttcacccccaccctattgagagtagctaatcatagctcactaggaacaaaccccag

SEQ ID NO: 75293 - DNA, 599 bp, Chicken  19866894358836_1
  misc_feature (1)..(189): n is any nucleotide
nnnnnnnnnnnnnnnnnnnnnnnnnnnnnnnnnnnnnnnnnnnnnnnnnnnnnnnnnnnnnnnnnnnnnnnnnnnnnnnnnnnnnnnnnnnnnnnnnnnnnnnnnnnnnnnnnnnnnnnnnnnnnnnnnnnnnnnnnnnnnnnnnnnnnnnnnnnnnnnnnnnnnnnnnnnnnnnnnnnnnnnnnnnnnaaaaacctgttttgtcttacaaagcccagaggaaactaagcaattcagatccacactgttttttattctgcagcaccataattcagtgcacaagtagtttatctccccacracgttttatattatgagaaaaaaatggagatgaagattttaaaaattaaatctagaatgtattttgaatccagaaagtcatttttctcttcataagccaaactctttctttagggtgtcataaagttctgtggtcttaggtctattcagctgggtgatagtagagcttagtgacaaaaccaaaaagagcagaccacagtctcttccattcagattggctctactagcacaggggatgaaagtgatgccatcaggaagtcatgtctgaaggggacaagccctagcgcatcagtggcactc

SEQ ID NO: 75294 - DNA, 600 bp, Chicken  19866894358837_1
aagaatttgaggaaaatacttctgatagatttgacgatacagtaggtaaacgggaatcgatccactacagagaggtcaagaggtgaaaaagtacaacgtgaactaaggaggtttgagcagaagaaatcagtttttgatccaaaagacttaagagagctagcaacagaaaagagctgtcaaaattttacttttcatattaaagaccaaaaaattgtaattcaccttaaatcagggcagtagcaaatgaaatcggatggacctcacagcctcctggctacacagtccaaagtttctgacacygaaactgtcagttcacttcaaagatgaacttcaaattattcaaagacacaccttttcttactatctcagacagaaagatatctaattacatgatctacaaaattctagagagagggaaggaattcaaccacaggctttcatcttcctccactcattttattacagctgaattatgaatcttattgttgaagatttattcctcgttgtcctgttcctatttctatctcctttctctacatttacgcattctttatatgtatgtatttatatgttgatttataatgtgaagataaaaaaaag

SEQ ID NO: 75295 - DNA, 599 bp, Chicken  19866894358841_1
  misc_feature (1)..(36): n is any nucleotide
nnnnnnnnnnnnnnnnnnnnnnnnnnnnnnnnnnnnctctgggctcagggcatgcagtcgctttaaactttgaagcagtttatgccaacttggaacaaagccttcacatagcaagctaaaaatccagatttcttcattcacttcaaaattcatacattttgtcctggattaattttctcaggcagacaaaccctaatacattaaacaaccacttcccttggtttggagcacttagcacctggagatacactcagagctgaagtcctctgagtcctcagggctaaacacacaaaactttcyggcaagctagaagacttgtagtagactgataagagtgcttttttaagcagagtaatacaaattgcagattggattgtgaagagagcaagtatagygcttacaaacaccctgtgaaaccagcctgctatggtaaagactcccgttagtcaccagaagacagactagcagacagcaagatggtgtgattgctcagatagcatcagcacatcaagttcgcgcagtttaagttgcagctcactttgcaggaatatgatttcagagacttacatttttttcctcttcccctcctcccaccccct

SEQ ID NO: 75296 - DNA, 600 bp, Chicken  19866894358841_2
caaagccttcacatagcaagctaaaaatccagatttcttcattcacttcaaaattcatacattttgtcctggattaattttctcaggcagacaaaccctaatacattaaacaaccacttcccttggtttggagcacttagcacctggagatacactcagagctgaagtcctctgagtcctcagggctaaacacacaaaactttcyggcaagctagaagacttgtagtagactgataagagtgcttttttaagcagagtaatacaaattgcagattggattgtgaagagagcaagtatagygcttacaaacaccctgtgaaaccagcctgctatggtaaagactcccgttagtcaccagaagacagactagcagacagcaagatggtgtgattgctcagatagcatcagcacatcaagttcgcgcagtttaagttgcagctcactttgcaggaatatgatttcagagacttacatttttttcctcttcccctcctcccacccccttcccattcattctctcatgtctacttggtcaaaagctattgctcccccatttgtttcaatgcattcatttctattgctatgctttaagtaatctaa

SEQ ID NO: 75297 - DNA, 600 bp, Chicken  19866894358845_1
gctttgttcagagtactgtcactttcatgagtactggtaaaagcattattttccagcaattttaacaactctttgatagctctctgcttcgaaaagagttgtccaaccagcaacaatatcaacagaatgtggctttaaaaactgctcaagaattgtgaaaaccctttagtctagtggcacaaaaatggtttctgaacagttcctggagtaaagcatatccatttggtctacttctttttcagaagagtaggatgagccccattgtttatggcttatgaggaaaggtagagggtgctggaytggtcttacagagtggaagataacgacagcctgcagatattagattgacagctgcaaaaatgataaaatcaaactcctctcacttgcatgtgatgatacaaaaggacaagaatcacaagccatagcttgraagatctatgtgggatgattaggaaaacattttcacaggcagaatagtatggtcttttagcgtggacgttgccatgactcgcctcacctaaggctggtgatagtcttgctccaagcaacaagttgtgttagaagcctccagatgtccgttgcaaccagtacttctgcagt

SEQ ID NO: 75298 - DNA, 600 bp, Chicken  19866894358845_2
ggctttaaaaactgctcaagaattgtgaaaaccctttagtctagtggcacaaaaatggtttctgaacagttcctggagtaaagcatatccatttggtctacttctttttcagaagagtaggatgagccccattgtttatggcttatgaggaaaggtagagggtgctggaytggtcttacagagtggaagataacgacagcctgcagatattagattgacagctgcaaaaatgataaaatcaaactcctctcacttgcatgtgatgatacaaaaggacaagaatcacaagccatagcttgraagatctatgtgggatgattaggaaaacattttcacaggcagaatagtatggtcttttagcgtggacgttgccatgactcgcctcacctaaggctggtgatagtcttgctccaagcaacaagttgtgttagaagcctccagatgtccgttgcaaccagtacttctgcagttctctactttcatgaatctttaatttcaaatatgcttgcagtcaggctcaaggcaaccattctgaattgcaaacacattcataaaaacaaagtgtagcaccttaggttccaaacgtctgcattcaaactg

SEQ ID NO: 75299 - DNA, 600 bp, Chicken  19866894358853_1
tcctctttctctactaccattttctattttgtgacacagaagttaccatgaaataacacagcaattactgcaaaacctcagatgttttctaaggttcaggcctatgtcccattttcttcttgtgttttattcacatttctgttttgatttggggttaccagaaacaaatgaggtttttctgtcacactgtgcatggtgactctgcagacccccacgacacatcctgcattgcatactcagctcaaacagcgtacatggggaactattttcttctatagtaaggaagaaagcctttttcartgtttgaatagatagtaatatacagcctctatgtccaccaactttcactctatgtactgcaacattaatgaacagcagaattctaggaagattctgcaggccaagcagtcttttagacttaatctgtttcactatgagagtgatcacttcagtaattttagaaaaaaaatgactatgcactcaaaaactttctgacaaactttgttaaaagagctacctagaaattctctaccgtcttatatcaatttgtaagtatttcttaaagttcctccataccctataataactttgcagaacagg

SEQ ID NO: 75300 - DNA, 600 bp, Chicken  19866894358858_1
cctcctgacaaaacaggcaacgaaagaagaaggatactgtgagtttgctgggaagattcgtattcttcttcatcttcttttttttttttttagtttcccccatcatttcatttggatcagtttcttttccatttctccatttcattctatctaacagcagatatataaacagtgcagaaataacccaggtccactctttttgtcctatttttttttttgcagtgcagttggtatttgtttcagttggagtatggcagaaatggcagcgccccgaaggcaagagatgagacccacagagcygagcacatccccagtccgacagcagtgaccctcctggcagggcagggaactggcagctgctttggtctgtgacaaaaggagcatcatgctggaagcacgtagtgctcgataagatattccttctgtagacacagaaaggaaataaccttggaggccagaggtaggagttacattctccattacgcctggcagcacatagcccagggtttagtcatgggcagttgtaaccatctgaactgctgtgctcccgtggctgccttggaaggattattctgcagcctaatgcatctcgttgttggg

SEQ ID NO: 75301 - DNA, 552 bp, Chicken  19866894358858_2
actgtaaataattcctctccctccttgatgtttacagcatccaaatacttgcaggctgttatcatgtccccttcgccatctctgcacatatttggtgcttttaatctctccttagaactcagcccacaggctgtgtcctgctgccttatcacggagctctgcactcctcccagccccttcccagcaccgccatagctgtgtttgggcaactgggtttccaacctatcttacttctcctctcccagatcccttctcagctcccaccctccatcccaggggatgggcagtaaggagacacaryttccccttcccagggcagtgggacacaccragctgtgcgcacatccyatctcaccatgcctttgttttctcgccacgaggagatgttaaactgcagagcttatttgtaggattatcaaagctggtggctggagaagagcctgagggtgtctgcattcagacaagcacctgcgcccgctgcctgcagctgtaggctgatgctgtgaggggcagagggatgcagcacacacctcccagcagctgaaacccgaa

SEQ ID NO: 75302 - DNA, 551 bp, Chicken  19866894358858_3
ctgtaaataattcctctccctccttgatgtttacagcatccaaatacttgcaggctgttatcatgtccccttcgccatctctgcacatatttggtgcttttaatctctccttagaactcagcccacaggctgtgtcctgctgccttatcacggagctctgcactcctcccagccccttcccagcaccgccatagctgtgtttgggcaactgggtttccaacctatcttacttctcctctcccagatcccttctcagctcccaccctccatcccaggggatgggcagtaaggagacacaryttccccttcccagggcagtgggacacaccragctgtgcgcacatccyatctcaccatgcctttgttttctcgccacgaggagatgttaaactgcagagcttatttgtaggattatcaaagctggtggctggagaagagcctgagggtgtctgcattcagacaagcacctgcgcccgctgcctgcagctgtaggctgatgctgtgaggggcagagggatgcagcacacacctcccagcagctgaaacccgaa

SEQ ID NO: 75303 - DNA, 521 bp, Chicken  19866894358858_4
ttacagcatccaaatacttgcaggctgttatcatgtccccttcgccatctctgcacatatttggtgcttttaatctctccttagaactcagcccacaggctgtgtcctgctgccttatcacggagctctgcactcctcccagccccttcccagcaccgccatagctgtgtttgggcaactgggtttccaacctatcttacttctcctctcccagatcccttctcagctcccaccctccatcccaggggatgggcagtaaggagacacaryttccccttcccagggcagtgggacacaccragctgtgcgcacatccyatctcaccatgcctttgttttctcgccacgaggagatgttaaactgcagagcttatttgtaggattatcaaagctggtggctggagaagagcctgagggtgtctgcattcagacaagcacctgcgcccgctgcctgcagctgtaggctgatgctgtgaggggcagagggatgcagcacacacctcccagcagctgaaacccgaa

SEQ ID NO: 75304 - DNA, 504 bp, Chicken  19866894358858_5
ttgcaggctgttatcatgtccccttcgccatctctgcacatatttggtgcttttaatctctccttagaactcagcccacaggctgtgtcctgctgccttatcacggagctctgcactcctcccagccccttcccagcaccgccatagctgtgtttgggcaactgggtttccaacctatcttacttctcctctcccagatcccttctcagctcccaccctccatcccaggggatgggcagtaaggagacacaryttccccttcccagggcagtgggacacaccragctgtgcgcacatccyatctcaccatgcctttgttttctcgccacgaggagatgttaaactgcagagcttatttgtaggattatcaaagctggtggctggagaagagcctgagggtgtctgcattcagacaagcacctgcgcccgctgcctgcagctgtaggctgatgctgtgaggggcagagggatgcagcacacacctcccagcagctgaaacccgaa

SEQ ID NO: 75305 - DNA, 600 bp, Chicken  19866894358860_1
caagaagttaaagcttcctcactttttgcatgtgtgagaaacaactggattgggtaatctaccttaaaattgccctcactgccattatgctctgctccaaatggatctgcacggggtaatagctaaagcactgatagctgttcatgtgctcactgtgtagccactgcctgtggaactgcagcagtgatctcattgtggcagtgggaagtcatggttaactgtgcagatgagaatcccatgtgtaagaccatctcatagatactggctttcctgatttgattttccttcagctgctctgcyttattattgtcataagtttccatacgatcttaactgggatagtctttatccaccctaacagtgatgaagggataggctttaatcaggtggtagaacccttccatcgccttctgaccaatatgcactgtggattacactaatcgtagcttttgtcactgcttcaggagaacgtgtgcccagtccctgttctctcactaacctgtagatggtcttttagttcaggaccaaagaacagcatgccttttagtgcagtaggatgtggccactgcaaagatttttcctattctttggcgtttggtt

SEQ ID NO: 75306 - DNA, 530 bp, Chicken  19866894358860_2
atacgatcttaactgggatagtctttatccaccctaacagtgatgaagggataggctttaatcaggtggtagaacccttccatcgccttctgaccaatatgcactgtggattacactaatcgtagcttttgtcactgcttcaggagaacgtgtgcccagtccctgttctctcactaacctgtagatggtcttttagttcaggaccaaagaacagcatgccttttagtgcagtaggatgtggccactgcaaagatttttcctattctttggcgtttggttcacagagtaaagcacaaaaamgtctgatctagatatattatgsagattgatctcagcatgaagcatgcaggtctgttcctgtcatcttagttacaaaccacacctaatgccaggtctggacagctgtgtacagcagcttctgggaagatggtgggggaacaccaagctgtgtacctactagtgaaagcaaagagtatgtagctagcaggcaataggaaatgctctttctgtggccactctcaagttcagca

SEQ ID NO: 75307 - DNA, 508 bp, Chicken  19866894358860_3
ctttatccaccctaacagtgatgaagggataggctttaatcaggtggtagaacccttccatcgccttctgaccaatatgcactgtggattacactaatcgtagcttttgtcactgcttcaggagaacgtgtgcccagtccctgttctctcactaacctgtagatggtcttttagttcaggaccaaagaacagcatgccttttagtgcagtaggatgtggccactgcaaagatttttcctattctttggcgtttggttcacagagtaaagcacaaaaamgtctgatctagatatattatgsagattgatctcagcatgaagcatgcaggtctgttcctgtcatcttagttacaaaccacacctaatgccaggtctggacagctgtgtacagcagcttctgggaagatggtgggggaacaccaagctgtgtacctactagtgaaagcaaagagtatgtagctagcaggcaataggaaatgctctttctgtggccactctcaagttcagca

SEQ ID NO: 75308 - DNA, 600 bp, Chicken  19866894358861_1
cttagcaataatgccacaaaactccagtgtcacaaacaaggaaatttgtcaaggtggaataagaccatattgccactgtcagttttctaaccaatcctcaaagcatttctttctgctattgtctgatttctgagaccttccacttctactatgagtgatgtgacacagctgttgtcagaaagaccattttcttctgttaaaaacgtgaaatatatagaagaggacaggatggtccatctaagttttgtactgtgcctctgacagaagcaacagccaccgtcatacacagatcttgttatmcatggatgagtactaggataatgcctgtctgaagtactcagaaattgtcagaaactgatttatccatgcttcagtgacagcaggggaaaaaagttctaaggattagaattttattatacacgcaattcgaacatttaaaattaatgaaaaaagaaagaaaacaaattcattgatgattgctgaagccctgaaaaatgaaagcaaaaacaactctgagaccatttgcagcagtcttcttgacttcagtttttcatctgaatgtcaaaaatgaacaattcactgaaaatgtcatttttcctt

SEQ ID NO: 75309 - DNA, 600 bp, Chicken  19866894358873_1
aaaggagtgatagcagaaatgaaattacaggatctatgcttgtgtcttcccccttgatcgtggtaggaaacctgccattcagactcagggaaaggacgaataagcatggttctatgttgtgtacagactattaacatttaccttgttatttttttaattttattacatgaatatatattttgcatagacaaagatatcaatcttgacattgcaaaagatggcttgtttagtaacaggttagtttaattgagtcttgtattcactgaattcatttatagcttggacatcatgttcactagracttgcatttatgtctttatttgattgtgctgctacttacatattgtactgaataattcttgaagaggaggaaaaaaatctaggctaaaattcaaataggaatcccrtagttccagtagagatggacttgtasaaarttaccacctttctgctcccttttccttgttttgcttctctcttttggatattggggggaagttctttacaggaagagtgatgagatgctgaaacaggctgccagagagtgttgtggatgctttgtccctggaggtgttcaagaccaggttggatggggccctg

SEQ ID NO: 75310 - DNA, 600 bp, Chicken  19866894358873_2
ggttctatgttgtgtacagactattaacatttaccttgttatttttttaattttattacatgaatatatattttgcatagacaaagatatcaatcttgacattgcaaaagatggcttgtttagtaacaggttagtttaattgagtcttgtattcactgaattcatttatagcttggacatcatgttcactagracttgcatttatgtctttatttgattgtgctgctacttacatattgtactgaataattcttgaagaggaggaaaaaaatctaggctaaaattcaaataggaatcccrtagttccagtagagatggacttgtasaaarttaccacctttctgctcccttttccttgttttgcttctctcttttggatattggggggaagttctttacaggaagagtgatgagatgctgaaacaggctgccagagagtgttgtggatgctttgtccctggaggtgttcaagaccaggttggatggggccctgggcaacctggtctagtaccacatctggaggttggtggtcctgcctgtggcaggggggttggaacttgatgatccttgtcccttccaacccaagctattccatgattc

SEQ ID NO: 75311 - DNA, 600 bp, Chicken  19866894358873_3
acatttaccttgttatttttttaattttattacatgaatatatattttgcatagacaaagatatcaatcttgacattgcaaaagatggcttgtttagtaacaggttagtttaattgagtcttgtattcactgaattcatttatagcttggacatcatgttcactagracttgcatttatgtctttatttgattgtgctgctacttacatattgtactgaataattcttgaagaggaggaaaaaaatctaggctaaaattcaaataggaatcccrtagttccagtagagatggacttgtasaaarttaccacctttctgctcccttttccttgttttgcttctctcttttggatattggggggaagttctttacaggaagagtgatgagatgctgaaacaggctgccagagagtgttgtggatgctttgtccctggaggtgttcaagaccaggttggatggggccctgggcaacctggtctagtaccacatctggaggttggtggtcctgcctgtggcaggggggttggaacttgatgatccttgtcccttccaacccaagctattccatgattctatgattctgtgatttccttttctcc

SEQ ID NO: 75312 - DNA, 600 bp, Chicken  19866894358873_4
ttaccttgttatttttttaattttattacatgaatatatattttgcatagacaaagatatcaatcttgacattgcaaaagatggcttgtttagtaacaggttagtttaattgagtcttgtattcactgaattcatttatagcttggacatcatgttcactagracttgcatttatgtctttatttgattgtgctgctacttacatattgtactgaataattcttgaagaggaggaaaaaaatctaggctaaaattcaaataggaatcccrtagttccagtagagatggacttgtasaaarttaccacctttctgctcccttttccttgttttgcttctctcttttggatattggggggaagttctttacaggaagagtgatgagatgctgaaacaggctgccagagagtgttgtggatgctttgtccctggaggtgttcaagaccaggttggatggggccctgggcaacctggtctagtaccacatctggaggttggtggtcctgcctgtggcaggggggttggaacttgatgatccttgtcccttccaacccaagctattccatgattctatgattctgtgatttccttttctcctcta

SEQ ID NO: 75313 - DNA, 600 bp, Chicken  19866894358882_1
ccacaagagaagcctatgaaagaaccgtgtttaagggttttggtttttaagaatatatgcatccctaaattcagtaagaatgtcccatagtctgatattaccaccacccactgctttgctggttttgatacttttcagtaaaatactagctaaaggatggaaatatttgtttagctctaacaccactgaacggcggcacaaccaacctgccttagttggccatagtgacaacacagacaggactcaactcttctcctcttcatagaaaaatctccgcagaacagggagcggttgcaaacrgacatgaactcctgcatctcccgtgttctggatagatccactactgactttaccagaaacaaagttttccaaagagtctttaaaaataagcctcctggttagttttagctctcgagagaaagagtgctggagggcactgaggccacagcctcatctgcccacaaatccccactcagtatttccagatgtctgctgcatctgtcctgagaccatcacgtcaattataccaaactgcacagtggaataaaagaagtcattcccatgtgcaaactgcctgcctctggcacctaccacctacat

SEQ ID NO: 75314 - DNA, 600 bp, Chicken  19866894358885_1
ggtgaaacatgaagtgctttcacatcagagtcactaatttatcacatgttcatacacacatggctggtctttagttctcttacattcccagtccatatctcacgttaatcttaaattgtggggataattcacttgtgagaaaaggcagcaattttcctaagcttgtgtttcttatgagttacactgtatttcttcactgctcatggataaagggctttattactacctagtaatcagaccataagttatattctgccccacaactctgaccacattccagggacacaagtaagactgaawagatagagagaagatgtgagtccacagaggcacagcatagaagtggttatagctataccactgccacattcacaccctctgcaatgcttgaactgttgggtttggcaccttgaaatcaatgctcaaggaaagatagagtacatagctttcttatagctgcaagtgtattaccaatccactcttgacaaagacttatgatgtagagaagcagtctactgcacacaaagcaataatagacctccgttttgtttactgatttttgtagtctgaagtgctctaagcaacctccacaaatggcaa

SEQ ID NO: 75315 - DNA, 600 bp, Chicken  19866894358890_1
atatcttcctgatgatgagaccagtgatgtcaagcctttgcttggactacttgatgacatattttaaaacagaatatattgtaagtgtttaaaaacaaacaaacaaaaaacacttattttttccagaatgaagccttcagatactactaaaagaatttcttctctattttgcaactatttaccagtagtgggattactgccatacagtagaccattacatattattaaaaaaaaaaaaaagcaattgatgtttatttaatggaattttgggtatattatcttattttgaaaattgcttayattttcatttgttgacctcgctgttttcaggattgaaaagaaaaaatgttggaatgtgtcaaaggagttctcatgctgacagtgtttctatagataaagtaaaaatcatataagaaatagtaagctgtttatgacatgtcctgctcctaagtactgtttaaatgaatgaaaaactgtttcctcggaaatttcttaaagcttttttattttgtttgtcagttttttaatgctgaattcttctgattctgttaaataattagatttaaaataaagagtaatggaactgtaagttactctagg

SEQ ID NO: 75316 - DNA, 600 bp, Chicken  19866894358902_1
acaaaggcagcacactcttacatgtgctgctgcagatcaaacccttgaagttgcccaggtgctggcaccagatcctggcacgttgcaaggtattattctaactaaagcaaattcctcatctatttgttttaaaaagtttcactgaattacagcactctgcctgtgcttgatatcttctactacttctccatcacaacctttcagcagagaatgagcctgaaagaggtgtactgggactgtctgtgccccagatcccccccactcctgaaccaggtagcagccgccagttacctgctggckcctgagcctgagagcagccaatagaagcagcttggttggcactttccatttccttgtaggttgtacccatcattcctagcaaggaatgcatttaaaattagaaagctgtgtcctgggatggcttctgaggggcttgccttagcacataagagctttcaccagctctcaatcagtagaagatccttaatattccccctttgcagccagctggtgaatgcgtgtccgcagaacaggcagaggttttggacacctctcaagcttgagtcagtgctgattgtttacagccctttgggcctatgg

SEQ ID NO: 75317 - DNA, 600 bp, Chicken  19866894358908_1
ggggactctgacattgggctcttgtagatgttacttttcctagaactatatacttggcagaaaataaatgtagcggaaccacagagagatagcctaaattatcagctcacactcattcagataaattgctctagaattagatacttatgcttagtaatagttctcacatgcagcaatttctactggtttattacctgaagtgactttggccaagccgtaagttacttatactgaagtcttattgcatgtggaatgccaaatggaattcaagctgtgtgtgttctccccagataacctggygtagatggtagagcagcaggtggaagagattctccatgagctgagcctgctcaggtggcaggtcagcacctgttccccaccaggtgataagcacctgcttatctccccctaaggcaaggagcagcatwcgtcccctgtaaagagttccactgccatgtcccctcctctcacagctcactgtttcatcccacaccattataattaaaagctaataatttttttctactggccctagaatttttttcaagtatcactgcctatcttctccttcagaatccattttcattcaatttctgcatt

SEQ ID NO: 75318 - DNA, 600 bp, Chicken  19866894358908_2
ctctagaattagatacttatgcttagtaatagttctcacatgcagcaatttctactggtttattacctgaagtgactttggccaagccgtaagttacttatactgaagtcttattgcatgtggaatgccaaatggaattcaagctgtgtgtgttctccccagataacctggygtagatggtagagcagcaggtggaagagattctccatgagctgagcctgctcaggtggcaggtcagcacctgttccccaccaggtgataagcacctgcttatctccccctaaggcaaggagcagcatwcgtcccctgtaaagagttccactgccatgtcccctcctctcacagctcactgtttcatcccacaccattataattaaaagctaataatttttttctactggccctagaatttttttcaagtatcactgcctatcttctccttcagaatccattttcattcaatttctgcattgtccttctcttcaaattgtttgacttcccctttgcctgagtcttacacaggggatcagtagaaaaattacagacttcttggtgtggtgtctcagaccatgcagtgagaagggcatttactcccagctg

SEQ ID NO: 75319 - DNA, 600 bp, Chicken  19866894358920_1
agtgacctggatgggaagaagaggcgaagggtgtggtgctgcagaaagtgccaacagcacggccttacttaaactttacctaggcttgcctgcgtgttgattttagtgtaaggacggtcaagtcaggcctctgtgcttaaaggacaagagagggggaaatgtcaagaaagtgcggttacctcactgtgaaaagcaaacagactgagttagtgggaaacctggtgtcctgggggagctgctggagatcgcattacgtaagggagcatttgcaccgcagcagctctcacgcgcatcaccaarcacaagcttagccctgtgcttgcccacagccccgtgggcactgtctgctggtgcacagagcgagttgtgcagccctgtacgttgttacagtcccttagaacattggcttggarctagctcagatggacccgctctggctgcrcttgctgtggtgcagatgttccctgggaagtttagaaaagagtaaaacccagacaaaatatgctaaaggtggtaacgagaggagggtgctagcttagctgaagggccgttttcagctctgttttttgaggatagccttgctggaaggcgaggagtcga

SEQ ID NO: 75320 - DNA, 600 bp, Chicken  19866894358920_2
acggtcaagtcaggcctctgtgcttaaaggacaagagagggggaaatgtcaagaaagtgcggttacctcactgtgaaaagcaaacagactgagttagtgggaaacctggtgtcctgggggagctgctggagatcgcattacgtaagggagcatttgcaccgcagcagctctcacgcgcatcaccaarcacaagcttagccctgtgcttgcccacagccccgtgggcactgtctgctggtgcacagagcgagttgtgcagccctgtacgttgttacagtcccttagaacattggcttggarctagctcagatggacccgctctggctgcrcttgctgtggtgcagatgttccctgggaagtttagaaaagagtaaaacccagacaaaatatgctaaaggtggtaacgagaggagggtgctagcttagctgaagggccgttttcagctctgttttttgaggatagccttgctggaaggcgaggagtcgaggaaaaagtttgttcatcttgttatccagctgcttcacgcccttgtcacagtccctggctggctctggggaaggcaggtcctccagcacagcttgaaggatggatcccgagta

SEQ ID NO: 75321 - DNA, 600 bp, Chicken  19866894358920_3
gacaagagagggggaaatgtcaagaaagtgcggttacctcactgtgaaaagcaaacagactgagttagtgggaaacctggtgtcctgggggagctgctggagatcgcattacgtaagggagcatttgcaccgcagcagctctcacgcgcatcaccaarcacaagcttagccctgtgcttgcccacagccccgtgggcactgtctgctggtgcacagagcgagttgtgcagccctgtacgttgttacagtcccttagaacattggcttggarctagctcagatggacccgctctggctgcrcttgctgtggtgcagatgttccctgggaagtttagaaaagagtaaaacccagacaaaatatgctaaaggtggtaacgagaggagggtgctagcttagctgaagggccgttttcagctctgttttttgaggatagccttgctggaaggcgaggagtcgaggaaaaagtttgttcatcttgttatccagctgcttcacgcccttgtcacagtccctggctggctctggggaaggcaggtcctccagcacagcttgaaggatggatcccgagtagcagtgtggctctgaggtgctgttatggt

SEQ ID NO: 75322 - DNA, 600 bp, Chicken  19866894358930_1
tctctccatctctttcaaggcagtaaattatgctctccctggcccagcttcctggagaaccagagatagctgctattactccagccttgtgtacctcaaactatttgggagcatttaactttgagcattctccaacctgttctccaaactgacaactgcagtttctactctctcgttgcggaaggtttttggctatggcctgtgattgataaacagccatttctccttttagagaagaaggccttatatcctgtagccatctcagcaaagtccagttatttttcctgtttatggaacacrggcagccttttccattgtgttctcctggctacagaaatgctcattttctcatgatcctgtatattttttactgcaggttttctaattttctctagctgcttgtgttattttatatttatccggaagagtttaaccttttaaaaaagtgtatattttttatatagcacctcaacttagcaaacagctgatagttcatctaagttattctttagctcttcaccaggtggtaagctcgcatctgtaaacttgaggtcaactgccaccaatactgacttcctcggcccagagggaggtgttttt

SEQ ID NO: 75323 - DNA, 600 bp, Chicken  19866894358931_1
ttttagcttgtgttcacaagtacattattttattaggtaacaaaatatttgtattttcttttcttgttcaattatgcttttccacattaaagctgaatatatacagaaatatattcccttttactaacagtggcaagtgtcaatgttggggaaagttgtataaccttctggagtttaaagtgttttgattgtattgattactgtatggtggactgaaggagcttgctcaaggtcacagataggaaactagcccaagttaaaaataccctcataagagatactttacagcacttgttttgraagtttggtacaagcaaacaagaaagcaaacaaagcaacctgactcttgttaaattctttgtctttgaaaatgacaggaataaccttgatggaatggaaatcagcctgcagtaggtgtcatagaaacaatcagatctgctgagctcccgcacttccctgtgatgcactggggagggatcctggtgcatctgtgttctccacaggttacggcaarctatcagactgcagaagttaatcagcttagaacaggcgttaataaaagcagtcttttgaattcttaactactgtcttaacttttca

SEQ ID NO: 75324 - DNA, 600 bp, Chicken  19866894358931_2
gaaggagcttgctcaaggtcacagataggaaactagcccaagttaaaaataccctcataagagatactttacagcacttgttttgraagtttggtacaagcaaacaagaaagcaaacaaagcaacctgactcttgttaaattctttgtctttgaaaatgacaggaataaccttgatggaatggaaatcagcctgcagtaggtgtcatagaaacaatcagatctgctgagctcccgcacttccctgtgatgcactggggagggatcctggtgcatctgtgttctccacaggttacggcaarctatcagactgcagaagttaatcagcttagaacaggcgttaataaaagcagtcttttgaattcttaactactgtcttaacttttcatattctgccttgcagtgaagaactccagtcttatattatccccagtactgtaagttttacagaagaatatatatatatatatatatattattattattaggattgccagcacagtttggcacttcattgttttatgctatttgggtaagcagtgactagttcatcacctggtgscttggccttctgctctggagtaattcattctgtccactgc

SEQ ID NO: 75325 - DNA, 600 bp, Chicken  19866894358931_3
ggatcctggtgcatctgtgttctccacaggttacggcaarctatcagactgcagaagttaatcagcttagaacaggcgttaataaaagcagtcttttgaattcttaactactgtcttaacttttcatattctgccttgcagtgaagaactccagtcttatattatccccagtactgtaagttttacagaagaatatatatatatatatatatattattattattaggattgccagcacagtttggcacttcattgttttatgctatttgggtaagcagtgactagttcatcacctggtgscttggccttctgctctggagtaattcattctgtccactgccttctccctgctgtcctgaggtgggcagaaatttggtattgctgtggctttatacgtgatttatactaccttctgctccttgctgatccctatcagcctgagagcaagcagacatgaggaactagctgcatcatgcatatcaggactggaggagaatcgcaactctgcagcaagaggagatgtttgcatatactcttcttaaagctttccacagctgaagatttcacgaacaattctgtttgcttaattatttttaacac

SEQ ID NO: 75326 - DNA, 600 bp, Chicken  19866894358936_1
tagaaaatgaaatattacacttaactcagcatttctttgcctaacaagattgtcactgcaacaaaaacaatgcagagcagagcctaggcatttgagacaacaagtctcagaaattatcaattaccattcacttttaccaaagagaattaaggataagaaattctaagacagtatacaaatgaagataaaggctttaactacaatcacaagacaatctgggtaagttacactacaaggaaccaagttcaattcctttgagcagaaatttggtaggacttggaataatttgaaatttttatyctaactggagatgggagcttaaagactccagataagaacattgcatcaatgcctacaagagaaggtcgcatctccaatacgataaatactagcaagcttcaagaattcacaggttaacaatcagaaggcatacacactttcaagtagtcaagtctaaaactgattaaagttgaagctttactatagacatcatttttctttttttgaaaaaaagaattatatttcagaaagcaaaccaaacttcatacattcaacctagaggcagggtaagcttcagaggatggaagaatcttcctatca

SEQ ID NO: 75327 - DNA, 487 bp, Chicken  19866894358936_2
gatgggagcttaaagactccagataagaacattgcatcaatgcctacaagagaaggtcgcatctccaatacgataaatactagcaagcttcaagaattcacaggttaacaatcagaaggcatacacactttcaagtagtcaagtctaaaactgattaaagttgaagctttactatagacatcatttttctttttttgaaaaaaagaattatatttcagaaagcaaaccaaacttcatacattcaacctagaggcagggtaagcttcagaggatggaagaatcttcctatcactctcactycacacaactgctataaatccagagagatgatcttgagagagtactgcacaaagctatcataaatcctgcctcccacatgtctggtacatgagctacaatcttctgctgttcagggaaatacatatctgttactaaacaatattgaggaatatcaggatctgcattcagggaagcatctttaactcaa

SEQ ID NO: 75328 - DNA, 600 bp, Chicken  19866894358945_1
gttcgggtcaggccagaaaaaaggtatccattcttcttcccactttgcacagcctgctgcctgcccagctctttgtctcggccccttcccagctcagacagcatttcccttttaaatgacatctgagcgctgacatgctggaggcacccatcctgcatcgtcgctggcagatggtgcagctggccacgattttcgggattgcttaaataaaaccaccgtgccatatcaagagatgtaaagaaaatgctcaacagtgcttaagatgtttaaacatcacaaactgtctaagacttcagattkctgcactgagccttttctgctgatgcaaccaccttaatgaataacgagagtaaattcagccttgcaatttggtctcttttctttctggcaggcagagacaagtcctacgatatttctgctctgacccagtgtcagaatctggaaaaagtttggacagttgtaacaacagaagtcaaaagytggaggtgtctggagaaaggagtcccaccactacsagcatcagcatcaggatgcccacactgaaaggtgaccccttccttctatccacagagctgataatgcctctgcatcactttcgca

SEQ ID NO: 75329 - DNA, 600 bp, Chicken  19866894358945_2
tggccacgattttcgggattgcttaaataaaaccaccgtgccatatcaagagatgtaaagaaaatgctcaacagtgcttaagatgtttaaacatcacaaactgtctaagacttcagattkctgcactgagccttttctgctgatgcaaccaccttaatgaataacgagagtaaattcagccttgcaatttggtctcttttctttctggcaggcagagacaagtcctacgatatttctgctctgacccagtgtcagaatctggaaaaagtttggacagttgtaacaacagaagtcaaaagytggaggtgtctggagaaaggagtcccaccactacsagcatcagcatcaggatgcccacactgaaaggtgaccccttccttctatccacagagctgataatgcctctgcatcactttcgcaatcatgcaagcacttctacctggagcatgcagcaacattcacacatcagctcaccttctcccctattttttcaatggttggagctaatcagcttgatggccattttaggagatggttggttgtgctcagtggtacatttacttcgggaaaagcccaattttaagcaaaaattgccgctgc

SEQ ID NO: 75330 - DNA, 600 bp, Chicken  19866894358945_3
ccgtgccatatcaagagatgtaaagaaaatgctcaacagtgcttaagatgtttaaacatcacaaactgtctaagacttcagattkctgcactgagccttttctgctgatgcaaccaccttaatgaataacgagagtaaattcagccttgcaatttggtctcttttctttctggcaggcagagacaagtcctacgatatttctgctctgacccagtgtcagaatctggaaaaagtttggacagttgtaacaacagaagtcaaaagytggaggtgtctggagaaaggagtcccaccactacsagcatcagcatcaggatgcccacactgaaaggtgaccccttccttctatccacagagctgataatgcctctgcatcactttcgcaatcatgcaagcacttctacctggagcatgcagcaacattcacacatcagctcaccttctcccctattttttcaatggttggagctaatcagcttgatggccattttaggagatggttggttgtgctcagtggtacatttacttcgggaaaagcccaattttaagcaaaaattgccgctgccatatgcaggagccatataactctacaaaattctc

SEQ ID NO: 75331 - DNA, 600 bp, Chicken  19866894358945_4
ccacctgtacaacatatttaccatactgcagttgttctgttgctgtttgcacaggaataatcttggcaggaaatggtagttaaaccagagcataattttttacgctgtgtgtaatgtaaaatcgcctctctggatacgtaatgcacgctcattgccttcttaatggaatatagtatttcttgtcaacatcagaaattggccagaactgccacttgaggtctgaatgcctccattcaagttccagattgcaatttcttaaaaagaaaaaaaaaaaaaaagaaagaacaagaaaaaacaacmagggaactaccacaaactctgccaggtaggtgtgggatgctgctggacccgtcccaatggctgtggtggtgacatgcagagccattgcagagttggtttgagtagaggcttcggcttcaaacacagatccagaacctggatgggctctttttatgtaatcccagtccgagccacatccatttgatattacagagcaggccagcacactgctaacaaagtcacttggagcaaccttttgctgttggcttttcttttttttttttttaagtaaatttaaaatttccttgcccagactttgat

SEQ ID NO: 75332 - DNA, 600 bp, Chicken  19866894358949_1
tccatgacagatattctatacacaatgtgtctatgtgatggtatgttcactgaagtcattgtatgctacaggcctatatcgatattagagtgtcaatttaaagttacttctgttggcaaaggtactgttgagaagaagatcagatgggagaaaatgtatccaatcccattataggcccatgaagagatttttttttaaggccttcttatttctgccagcattcttaatttttttatttagacatagaagacttcctgcgatcagaaaattcagaaatgaatgactgattaaatctaacaktttaaaatgcatccaaagctagcttactgaggagagcatgtgtatttgtaaccctagtaacccttgtgactttatatcctacgtcaactcctgcgatagtggctagaagtagcttttaacatttggatcagacaactaatagttgtaataaccatttggatacttgaattaataatggccatttcagttagatgataactgtgagtttcaaacaaagctgataatcagaaatggcagttttgtagtgattttttgcacttagctatgccatgattatttttgctaactgtgaataagcag

SEQ ID NO: 75333 - DNA, 599 bp, Chicken  19866894358950_1
  misc_feature (1)..(171): n is any nucleotide
nnnnnnnnnnnnnnnnnnnnnnnnnnnnnnnnnnnnnnnnnnnnnnnnnnnnnnnnnnnnnnnnnnnnnnnnnnnnnnnnnnnnnnnnnnnnnnnnnnnnnnnnnnnnnnnnnnnnnnnnnnnnnnnnnnnnnnnnnnnnnnnnnnnnnnnnnnnnnnnnnnnnnnnnnnnccaagagggacattggcccatcaataataagtctccaaacttatatgtttcatgaagaaggcaccccaactcatgccaggctctttagcagagtgtgttgtagtaggacaaggggaaatagttccaaaytaaaaaaggggaaatttagactggatataagggaaattttttttacagtatgggtggtgaggcactggcacaggttgtccaaagaggtggtggataccccgcccctgcagacacccaaggtcaggctggacagggctcrgaacatcctgatggagctgtaggtgtccctgtttattgcagggtakttggaccagatggcctttaagggtcccttccaactcaaacgattctatgattctatgctcatggctgctggtacagccctacacctctagggcctccatccccatgtgtcatct

SEQ ID NO: 75334 - DNA, 599 bp, Chicken  19866894358950_2
  misc_feature (1)..(32): n is any nucleotide
nnnnnnnnnnnnnnnnnnnnnnnnnnnnnnnnccaagagggacattggcccatcaataataagtctccaaacttatatgtttcatgaagaaggcaccccaactcatgccaggctctttagcagagtgtgttgtagtaggacaaggggaaatagttccaaaytaaaaaaggggaaatttagactggatataagggaaattttttttacagtatgggtggtgaggcactggcacaggttgtccaaagaggtggtggataccccgcccctgcagacacccaaggtcaggctggacagggctcrgaacatcctgatggagctgtaggtgtccctgtttattgcagggtakttggaccagatggcctttaagggtcccttccaactcaaacgattctatgattctatgctcatggctgctggtacagccctacacctctagggcctccatccccatgtgtcatctgtggtcagggtgggtcaaggggctcgtggggctcagtagggcactgcgggaggcaagggggctgctgagagcctggtgcgtgctgtaggcagcgtgtgatgtcttctgcgtgggagatgatgtcaacatcgagaaggcc

SEQ ID NO: 75335 - DNA, 600 bp, Chicken  19866894358950_3
ggcccatcaataataagtctccaaacttatatgtttcatgaagaaggcaccccaactcatgccaggctctttagcagagtgtgttgtagtaggacaaggggaaatagttccaaaytaaaaaaggggaaatttagactggatataagggaaattttttttacagtatgggtggtgaggcactggcacaggttgtccaaagaggtggtggataccccgcccctgcagacacccaaggtcaggctggacagggctcrgaacatcctgatggagctgtaggtgtccctgtttattgcagggtakttggaccagatggcctttaagggtcccttccaactcaaacgattctatgattctatgctcatggctgctggtacagccctacacctctagggcctccatccccatgtgtcatctgtggtcagggtgggtcaaggggctcgtggggctcagtagggcactgcgggaggcaagggggctgctgagagcctggtgcgtgctgtaggcagcgtgtgatgtcttctgcgtgggagatgatgtcaacatcgagaaggccaacaactccctcatcagcaatgaccggagctggaagaggagcaagtt

SEQ ID NO: 75336 - DNA, 599 bp, Chicken  19866894358951_1
  misc_feature (1)..(143): n is any nucleotide
nnnnnnnnnnnnnnnnnnnnnnnnnnnnnnnnnnnnnnnnnnnnnnnnnnnnnnnnnnnnnnnnnnnnnnnnnnnnnnnnnnnnnnnnnnnnnnnnnnnnnnnnnnnnnnnnnnnnnnnnnnnnnnnnnnnnnnnnnnnnnnntgacatggagttggcgatgctgctcgtgttgcccagggttgaagtccagctcaggcatggatttcttcctccagttttgcttttattggtctgcatcgctggtgctattttcagtggtggaactgtgagctcagccagcgctggggttgagtaaagwattatttaaagcctcatcgattcgtggccaaaacccttatgctttgrgatataaatatctgctggcattaatgcagcggcaggatgcacaaatccgtggtaccttgtgtaattaacatacagaaaagctctttccccctattgtctgccttttagtgcttggtttgttgtttcagcgctgtgctgtgggtagatgagcatggatgagtgctcttctggcacacgcagaggcagtcggtgcacacactgcagtttacacagacctcagtgcccgtttgcagcaaggacactgggctgggg

SEQ ID NO: 75337 - DNA, 599 bp, Chicken  19866894358951_2
  misc_feature (1)..(96): n is any nucleotide
nnnnnnnnnnnnnnnnnnnnnnnnnnnnnnnnnnnnnnnnnnnnnnnnnnnnnnnnnnnnnnnnnnnnnnnnnnnnnnnnnnnnnnnnnnnnnnnntgacatggagttggcgatgctgctcgtgttgcccagggttgaagtccagctcaggcatggatttcttcctccagttttgcttttattggtctgcatcgctggtgctattttcagtggtggaactgtgagctcagccagcgctggggttgagtaaagwattatttaaagcctcatcgattcgtggccaaaacccttatgctttgrgatataaatatctgctggcattaatgcagcggcaggatgcacaaatccgtggtaccttgtgtaattaacatacagaaaagctctttccccctattgtctgccttttagtgcttggtttgttgtttcagcgctgtgctgtgggtagatgagcatggatgagtgctcttctggcacacgcagaggcagtcggtgcacacactgcagtttacacagacctcagtgcccgtttgcagcaaggacactgggctggggtgctcctgcagcctgcgggacggggggaacatctcccatccccgctt

SEQ ID NO: 75338 - DNA, 600 bp, Chicken  19866894358953_1
tgagtgcagcgcttgtgagagcccttcctgtgacagatagaagcactctccagtggtccccagagagaaaatggcagggaacaccttgggcactgacctctgaaatgttctccttggacgtattcaaggtcaggctagaggggctctgagcacctgatcagctggaggtatccctgcttattgcaaaggaattggaccagatggcctttaaggatcccttccaaatcaaatgattcaatgattctataattccataaatgtcccagagcatctaatagcacacagcccatcaccaagcarccccttcacggccatctggcaggatttggggtattgaagccaccctatgatccctacctaaagagggttgcataacccaaacagcaaggggaacgcaaggttgtccaaagaagggaggtggccctgaggttgcaatgccctaaataagagtgtttgggtctgtgggcttacaacacctggcctttgcctgcccaccagtaacagcaggtatggtgctcagggagacaacagtaatcccagagcagtcccaggcatgggttgatggttggaccggatgatcttagtggtcttttcaacctt

SEQ ID NO: 75339 - DNA, 507 bp, Chicken  19866894358953_2
acccaaacagcaaggggaacgcaaggttgtccaaagaagggaggtggccctgaggttgcaatgccctaaataagagtgtttgggtctgtgggcttacaacacctggcctttgcctgcccaccagtaacagcaggtatggtgctcagggagacaacagtaatcccagagcagtcccaggcatgggttgatggttggaccggatgatcttagtggtcttttcaaccttaataattccatgattcgatgattccttgggacccactaagcagagaagattaaaggaaagcatccttctaccartctgatggacttgtaccctgtatagatttaaaattaccttcttcatcttcttcctgatcctcttaaatcttaccccaatttgctgccttgggaatgacggccagccctctcactttcagcatgtccctgtcagagctggtgcctttgtgtctgccctgtaccaaaccagctaaagctcatctgcctgtgtgaaaacacattttaatt

SEQ ID NO: 75340 - DNA, 600 bp, Chicken  19866894358955_1
aggtccagagtatgccgagtttatgcatattcactgtatactatttataaaggctccaccacctctcagcattgctgattaaaatcacttgtagctatgagaatgattatgtaatcaaagacatataaatgtgatttttttttttttaattattcacacctgcacaaatttaaaattatacactctgctgtatcttttagatgctggaaaaaacaaacatactgttcatactcagtgtgctatttttaaacgcctacaatttgttatttaaagttcagtttctgcttttttttttttttwatcttaacattgcaaaaaacactgtttgttatccagagagatgaataattttatttcacttggaattttgtgcattgttccatatgaactgaaagtaaaatgtttggtgttgggtccttctaaaaaatgtagggatatacagaagtacttactgaaaattctttttatccatcagtttgtgaattacagaattctgcaagattgtgagatatggattcagttcccagctttatttgaataatgaactgaactatgctacctttaattctgtggtaaggctgaagaacagtgaggtgaagg

SEQ ID NO: 75341 - DNA, 600 bp, Chicken  19866894358957_1
gacacaagaactggctccaaggatgttcctacgtagctcaaagctgacacaaattccacagatgagctttttcagtgagatcgggaaatgggattgggagattggactgccagagttgactcaaatatgctgcaaagaataggctaaaccactttaaaaattaatgaactgtatgagtttaggactactcagatttataggctaatggataaccatcagaaggagaaaatattgtatgaaaacaaacactggggaaatttagagcccttacgtctctcctggtttatgctgatgtaaatyaggattagttgcactgaagtcatttgacttaccataatataagtaggaagaatatgggtaatttatgctcactttrcagtaccacacagatagaattaagtggtctttttggaaatgagaaataggtcttttctgagccattttgcaggaaattaagaatggcaaccagatgcttcatttcagatgggaaaaagtgaaccctgggaggcttttacagtatttcttaagaccatgtgctatgtatttaccagttataagtctgtgaaatttatatatactgtagacaatattatttttcaa

SEQ ID NO: 75342 - DNA, 600 bp, Chicken  19866894358957_2
gagatcgggaaatgggattgggagattggactgccagagttgactcaaatatgctgcaaagaataggctaaaccactttaaaaattaatgaactgtatgagtttaggactactcagatttataggctaatggataaccatcagaaggagaaaatattgtatgaaaacaaacactggggaaatttagagcccttacgtctctcctggtttatgctgatgtaaatyaggattagttgcactgaagtcatttgacttaccataatataagtaggaagaatatgggtaatttatgctcactttrcagtaccacacagatagaattaagtggtctttttggaaatgagaaataggtcttttctgagccattttgcaggaaattaagaatggcaaccagatgcttcatttcagatgggaaaaagtgaaccctgggaggcttttacagtatttcttaagaccatgtgctatgtatttaccagttataagtctgtgaaatttatatatactgtagacaatattatttttcaaagaaatctaaaatatccacaacaagaaattctgatcacttcctataaacactctgaaatgggggtgttctctacag

SEQ ID NO: 75343 - DNA, 600 bp, Chicken  19866894358959_1
caggatgtgaacgcatcagcctgcctgtggtccctccgaagttgtcaataaggattcagcagcacatcctgtggcagaggtttgtttttccaggaagagaagtgagggaaactgactttcataaaagacagagcacaaactactcagcgtccagcttatttcaaattaggattttgatcggtgtcataaagggattggtatcttccccgttcctgtagaccacccacctctcaaaagtataaattagcttagttctttcaatcctgttgtaagccaatgggagatggactttcacctgcwctgtgggaaatgtatgctgtcctaaagatcctgaaacaaagagcttctgttgaagaaacaaatcaattgaaaaaaatcaaggttagtgattaatttctgaccaatgaaataaacccaaagaaggaaaagactttttaacccatgaggatatgttttgtaaaaatgctgtctagacattaggagtagatgygatcagtaaaacactacagaaataccataacaagctgaaactgcacagctgttaaaagcacacctcaggtgtttcactgtggaaaagagaactttcagactgactggctt

SEQ ID NO: 75344 - DNA, 600 bp, Chicken  19866894358959_2
gggattggtatcttccccgttcctgtagaccacccacctctcaaaagtataaattagcttagttctttcaatcctgttgtaagccaatgggagatggactttcacctgcwctgtgggaaatgtatgctgtcctaaagatcctgaaacaaagagcttctgttgaagaaacaaatcaattgaaaaaaatcaaggttagtgattaatttctgaccaatgaaataaacccaaagaaggaaaagactttttaacccatgaggatatgttttgtaaaaatgctgtctagacattaggagtagatgygatcagtaaaacactacagaaataccataacaagctgaaactgcacagctgttaaaagcacacctcaggtgtttcactgtggaaaagagaactttcagactgactggcttaacataaacctgacagagaccgattatgtattactgacagtagctaaaggagctcccccttccttcctccccagcaggacaacagtcttatcacacattcagaatagctgaatgcacaggaatgctacctttttccaggcagtgtttattgtggtttggtttttttttttttctaattttacttttatac

SEQ ID NO: 75345 - DNA, 599 bp, Chicken  19866894358960_1
  misc_feature (1)..(115): n is any nucleotide
nnnnnnnnnnnnnnnnnnnnnnnnnnnnnnnnnnnnnnnnnnnnnnnnnnnnnnnnnnnnnnnnnnnnnnnnnnnnnnnnnnnnnnnnnnnnnnnnnnnnnnnnnnnnnnnnnnnatgcaagttttattctgttaaccctcccaataccacctggagtaacttctccaatgtctctgcagttcctttgttttagcctagcgtaccaaaggacagagcttgactcacctacttcagacacactgcgtgagaggaaaagaggcaaaatgtataggtattgtcaagtgcatggaggccattastaatgctctttcttacagtgaggtagccatggggctgtgcttccttgacaagctcccacaggcatgtctgtgagtagcaaatcctgaaagactcagctgtggcttgtcrtggacttcacccaggcatgagcccagcagcctgtcctcttgggtgattactttggagatgtgcagcctctcacagccaatggtgcctagataactgctggcatccagactctctgccagcattgggccctcatgctacacatccacatggaaggaaagttgagtaagtttgaaaggacccaatgtttcat

SEQ ID NO: 75346 - DNA, 599 bp, Chicken  19866894358960_2
  misc_feature (1)..(6): n is any nucleotide
nnnnnnatgcaagttttattctgttaaccctcccaataccacctggagtaacttctccaatgtctctgcagttcctttgttttagcctagcgtaccaaaggacagagcttgactcacctacttcagacacactgcgtgagaggaaaagaggcaaaatgtataggtattgtcaagtgcatggaggccattastaatgctctttcttacagtgaggtagccatggggctgtgcttccttgacaagctcccacaggcatgtctgtgagtagcaaatcctgaaagactcagctgtggcttgtcrtggacttcacccaggcatgagcccagcagcctgtcctcttgggtgattactttggagatgtgcagcctctcacagccaatggtgcctagataactgctggcatccagactctctgccagcattgggccctcatgctacacatccacatggaaggaaagttgagtaagtttgaaaggacccaatgtttcatagtctcattcagaatcaggacttaaactcttgggagaagtgggacttaaactgcacatgccccaacagcatttgggcagcattgtagcttggcaactctcttgtgagga

SEQ ID NO: 75347 - DNA, 600 bp, Chicken  19866894358960_3
cctgtcctcttgggtgattactttggagatgtgcagcctctcacagccaatggtgcctagataactgctggcatccagactctctgccagcattgggccctcatgctacacatccacatggaaggaaagttgagtaagtttgaaaggacccaatgtttcatagtctcattcagaatcaggacttaaactcttgggagaagtgggacttaaactgcacatgccccaacagcatttgggcagcattgtagcttggcaactctcttgtgaggactgatctgtcctacacaactagtgatattstatgggaccttttccttaccatgcatagtggtggtaaagcagctgccccttcagggttgtacacggtgtgagttactgcaaaagagctgaggagagctgaaaggtacaggatccttccagacccatgctgattaatgatttttctgttaaaaaaaaaaaaaaaaaaccacgctgatcactgtaggcccttctaatatctgatctgaagagtatgaatgagtgacttttggaggttttgtacagcttatctgtgctaatacagaccttaatttgtatgattgtttttactgtggtgactaa

SEQ ID NO: 75348 - DNA, 599 bp, Chicken  19866894358965_1
  misc_feature (1)..(99): n is any nucleotide
nnnnnnnnnnnnnnnnnnnnnnnnnnnnnnnnnnnnnnnnnnnnnnnnnnnnnnnnnnnnnnnnnnnnnnnnnnnnnnnnnnnnnnnnnnnnnnnnnnnactgaaaatcacagcactggctccccatgtgatttcgcatcccactttagggtttggctccagagctactggacttactcactccaggctgacctaaaagagctgcttgtacctcatagatgtcctcaggctcagagatcagtcagtgccaattaattgatcattccaatggtctgactgaaaactgccggtgccgaagcyttggctcctccagctgtacttggtggaaatccctatgaccttcatccagagagggtggggagggggaaataaatctgctaatctgtataaatacaaagagaaaacactttctctaagatgacaacagcttggcctcagtgaggggaaagctggggtttgtgttttatctctaacatgaaattgtgtaggtgtaatgtatattcagaaattttcctgactcaggcactgctgtggctcccagccagtagcagatacaagcagcaaggagcccagacaagagaaatccccagggatgctca

SEQ ID NO: 75349 - DNA, 600 bp, Chicken  19866894358966_1
ttacagtgacgaatggcaagttgcactagtgctgtcgtaatttcagctgtggcacttagaacttagttctgtgcggaataaaacattaagtctcagcagtctgagggagctgtggtggggtttattttacccataccactgctgttcttacgcagatggaatgtgctccccggtgtgggtgtgcctccagttctttcaaccagtgctggggaaaacttgagctcagatagcagataccacactgagatcatcagtgtcaaatacttctacagcagctctgagagtcacctggtgctcccyttctgggtcagaagagctgtgcaatgcagtctgtgtatctgggtgattcacctcattctacatttggacagataagtgatacttgaagccccagtgaacatactgccagttctcttttggctgtagtgagatcctggagatctagctgagatgctggcagtgatgctgtattaagttagaggcgacgatgagccccccaaccaagtctcctcttaccgtaatcactgttagtccgaacatcctggctggaaaccacaagatttatgttacagatcagagtcgcttcgctccatttcctcc

SEQ ID NO: 75350 - DNA, 600 bp, Chicken  19866894358966_2
gacagataagtgatacttgaagccccagtgaacatactgccagttctcttttggctgtagtgagatcctggagatctagctgagatgctggcagtgatgctgtattaagttagaggcgacgatgagccccccaaccaagtctcctcttaccgtaatcactgttagtccgaacatcctggctggaaaccacaagatttatgttacagatcagagtcgcttcgctccatttcctccgtgtcagtttaaggcagcccttggtgaagcagtatgtcaagtgagtctgtgcatctctcccagatycttccagcacaccgactggaaggatgcagcaggacaagagaggatgtgtcctgaactgacacaggctgtgagaggtgggaaggaatacaaaatagccagaatctcagagaaaaagttagcaaaaggtaatctgaagtaggctagagttgtctagagatgtccatttctgattgacttaactgcatgtggaggtgctgcacctttctgacttccaggtagctttgtgttataggcagcagagctgccaattacaacaggactgacacaaactgatgaacacctgtacagatttatgctatt

SEQ ID NO: 75351 - DNA, 599 bp, Chicken  19866894358967_1
  misc_feature (1)..(160): n is any nucleotide
nnnnnnnnnnnnnnnnnnnnnnnnnnnnnnnnnnnnnnnnnnnnnnnnnnnnnnnnnnnnnnnnnnnnnnnnnnnnnnnnnnnnnnnnnnnnnnnnnnnnnnnnnnnnnnnnnnnnnnnnnnnnnnnnnnnnnnnnnnnnnnnnnnnnnnnnnnnnnnnngtcagacccctgaaggagtgtaagataaaactgaaaatggcaatttatcatcccactcactttgtgtccctgtatcttccagatctctgggcttcctatttgaataattttatatttccttcatcaaacgagctaaaaaytgygctttgggaaaaagtgcacttcgttcttagtcccagggctcttatttctggcatggcttcccccccaggaggctctgcagaaatagcagctgcaaaaataagctggttttgaagggtggccctgatcattttcccaacatagacgagccctgggagaacaggattttacctaaatagcttgggcagatggggaacaacagggctaaaaatcccacgtcttcagggatgtgcctccatgcacactgctctgagctgcctgaagctcaatgtcaggatgtcccggtgtcacccatcac

SEQ ID NO: 75352 - DNA, 599 bp, Chicken  19866894358967_2
  misc_feature (1)..(157): n is any nucleotide
nnnnnnnnnnnnnnnnnnnnnnnnnnnnnnnnnnnnnnnnnnnnnnnnnnnnnnnnnnnnnnnnnnnnnnnnnnnnnnnnnnnnnnnnnnnnnnnnnnnnnnnnnnnnnnnnnnnnnnnnnnnnnnnnnnnnnnnnnnnnnnnnnnnnnnnnnnnnngtcagacccctgaaggagtgtaagataaaactgaaaatggcaatttatcatcccactcactttgtgtccctgtatcttccagatctctgggcttcctatttgaataattttatatttccttcatcaaacgagctaaaaaytgygctttgggaaaaagtgcacttcgttcttagtcccagggctcttatttctggcatggcttcccccccaggaggctctgcagaaatagcagctgcaaaaataagctggttttgaagggtggccctgatcattttcccaacatagacgagccctgggagaacaggattttacctaaatagcttgggcagatggggaacaacagggctaaaaatcccacgtcttcagggatgtgcctccatgcacactgctctgagctgcctgaagctcaatgtcaggatgtcccggtgtcacccatcaccca

SEQ ID NO: 75353 - DNA, 600 bp, Chicken  19866894358967_3
gcacttcgttcttagtcccagggctcttatttctggcatggcttcccccccaggaggctctgcagaaatagcagctgcaaaaataagctggttttgaagggtggccctgatcattttcccaacatagacgagccctgggagaacaggattttacctaaatagcttgggcagatggggaacaacagggctaaaaatcccacgtcttcagggatgtgcctccatgcacactgctctgagctgcctgaagctcaatgtcaggatgtcccggtgtcacccatcacccatgcagacaattcctcrtcaaaagtccrccgccgtctgcagaggaagtgagttaatcccggtgcttaatgcaaactgtcacttccatcccctctgctcgaatgccggagggtttctctggaaggggccagctggctcccggctgcctgtaggacagcacatgtcggggtttggggtcatgggggtttctgtgcagccaaagctcagagcggtgcacggcatcatccagtcgggttagcgaattgctgccccgtgagctatgttgtgtggtctgttcagcagtttggggctgaaaagcagctaaattgtggtgtttgg

SEQ ID NO: 75354 - DNA, 600 bp, Chicken  19866894358967_4
ttagtcccagggctcttatttctggcatggcttcccccccaggaggctctgcagaaatagcagctgcaaaaataagctggttttgaagggtggccctgatcattttcccaacatagacgagccctgggagaacaggattttacctaaatagcttgggcagatggggaacaacagggctaaaaatcccacgtcttcagggatgtgcctccatgcacactgctctgagctgcctgaagctcaatgtcaggatgtcccggtgtcacccatcacccatgcagacaattcctcrtcaaaagtccrccgccgtctgcagaggaagtgagttaatcccggtgcttaatgcaaactgtcacttccatcccctctgctcgaatgccggagggtttctctggaaggggccagctggctcccggctgcctgtaggacagcacatgtcggggtttggggtcatgggggtttctgtgcagccaaagctcagagcggtgcacggcatcatccagtcgggttagcgaattgctgccccgtgagctatgttgtgtggtctgttcagcagtttggggctgaaaagcagctaaattgtggtgtttgggaaaagcataa

SEQ ID NO: 75355 - DNA, 600 bp, Chicken  19866894358970_1
tttcactaagaacattattgttagagggggaatgaaagcagctattttcagaaaagcagtgaaccaagccaagctacatcccttcgggcagcaaagacagaagcacaacagaatacctggcacaagtctgcatgttccagactatgtctatttctccctcccatcagggcaaccaagggcagctcctcaatgcctacaccaatgccttgactgcacctatggaccatgggcccttttctcatagtgaacaaaatttctgcctgggtatgcggtcaatctacttttttgatacagcagcargctcaaggcaggaatggaaagggctcytctctttgggttcttgcctcttagcaaactcaaaattcagctaccacaaagtcgctttttccaaacaaaagagttcagcgttttgtttgcatgttgtaagttcagtgctatgttcccctgwgtcagaaatagggccattaacagtatttctctgtcatcctctttgcaatatcatgctcttgggaaattaattaaaagcctaccctattctacactgagacttgctgaattccaatctgaatagttcacgctctccccctcccccacctcttc

SEQ ID NO: 75356 - DNA, 600 bp, Chicken  19866894358970_2
gggaatgaaagcagctattttcagaaaagcagtgaaccaagccaagctacatcccttcgggcagcaaagacagaagcacaacagaatacctggcacaagtctgcatgttccagactatgtctatttctccctcccatcagggcaaccaagggcagctcctcaatgcctacaccaatgccttgactgcacctatggaccatgggcccttttctcatagtgaacaaaatttctgcctgggtatgcggtcaatctacttttttgatacagcagcargctcaaggcaggaatggaaagggctcytctctttgggttcttgcctcttagcaaactcaaaattcagctaccacaaagtcgctttttccaaacaaaagagttcagcgttttgtttgcatgttgtaagttcagtgctatgttcccctgwgtcagaaatagggccattaacagtatttctctgtcatcctctttgcaatatcatgctcttgggaaattaattaaaagcctaccctattctacactgagacttgctgaattccaatctgaatagttcacgctctccccctcccccacctcttcctctaggaaaggataataaaattacag

SEQ ID NO: 75357 - DNA, 600 bp, Chicken  19866894358970_3
tatttctccctcccatcagggcaaccaagggcagctcctcaatgcctacaccaatgccttgactgcacctatggaccatgggcccttttctcatagtgaacaaaatttctgcctgggtatgcggtcaatctacttttttgatacagcagcargctcaaggcaggaatggaaagggctcytctctttgggttcttgcctcttagcaaactcaaaattcagctaccacaaagtcgctttttccaaacaaaagagttcagcgttttgtttgcatgttgtaagttcagtgctatgttcccctgwgtcagaaatagggccattaacagtatttctctgtcatcctctttgcaatatcatgctcttgggaaattaattaaaagcctaccctattctacactgagacttgctgaattccaatctgaatagttcacgctctccccctcccccacctcttcctctaggaaaggataataaaattacagaaaattattttcaaaaacagaattttcaaaagtcaggtgtgatacagcaccccagatgttcatagtttagagaatatcatagcagagcagtttacttcactgcgagcagtgaataataaag

SEQ ID NO: 75358 - DNA, 600 bp, Chicken  19866894358972_1
atctgcctagcagagtaagtgctgagacccttctcggttctctgatgcttactgaaacactggtggcaattctacagctgctcttcatgcagcagctcttgtgggtcagcctgagctaacattctcctaataaatttagcaggcaaactgagcacgtaaaccatttgaaggaatgaagttcctttacagcattgcaaatggtagtctgcaattgtattttaaaatgtcttacaattggtgttgatgcttacataaattgttatggttaggtattcatgaagtagatttaatgtaaactgyagtcgcttttttaacgaaatcatgagatggctttaaagagaaaagcaggtatttgtgaaaaagaagagaaaattggaagcagatttggaagataaaaaggtgggtatccaaggttttcgaatggtggagtttcggacactgctgtgttgcaggcaagtcgccgagtttcacaaggtttgtagcttaaaaaaaagcaaaatgaagtagaggaggtgatcaatactttgactgcccaggtgtaagaatgtttattgactgaatgcatgtgaagtcactgagatagaaactttatggaagtga

SEQ ID NO: 75359 - DNA, 600 bp, Chicken  19866894358972_2
gtcgcttttttaacgaaatcatgagatggctttaaagagaaaagcaggtatttgtgaaaaagaagagaaaattggaagcagatttggaagataaaaaggtgggtatccaaggttttcgaatggtggagtttcggacactgctgtgttgcaggcaagtcgccgagtttcacaaggtttgtagcttaaaaaaaagcaaaatgaagtagaggaggtgatcaatactttgactgcccaggtgtaagaatgtttattgactgaatgcatgtgaagtcactgagatagaaactttatggaagtgaytgttattagagctgtcattattaataaggctgactaaagttgccctgtttgatttctgctctcttacccaaagagaaagttttaagtaggaagagtgaagagaactgaaattgatatccacagaagtgcggtaatggtgactgggaagaaatgctgtcaagttcagcctgtttgggaaatgtacggccattaaattcagccattactccagagactgttttgctgaggtaataacttccacagagcatccatcgtggttagaattactagaaaaacagtcttgctgtctcagagttgtta

SEQ ID NO: 75360 - DNA, 600 bp, Chicken  19866894358981_1
atgagctctgtggaggaggacctgggtgttctggtacacaacgggtgcatcaagaaggcaatggtatcctgaggtgcattaaaaagagcatgaccagcaggtcaatggggaggggatcgtccccatctactctgacctggtgaggtcacattataatactgtgtccagacctgggctctccagttcaaaaaagacagggatctcctagaaggagtacaatggatggccacaaaggtgataaagggtctggcgcgtctcccttatgaggaaaggctgagaaacatgggtctgttcaacctraggaaaagaagactgaagggggatctgattaatttttataaatatctaaagggaggtgggaggcaaatggatgctgtgtcacacaggaaggttatcagaatagatacagatggaaatcatattcactcaaattatattctgttagtattgcttcttttctaaaaataataatgccttcaggccctgcaagacagaaaatgagaaatagaattgcagtttaccgtaaaatacaaaaaatgactaaactagctactagacataagagtctttagaaaagtctgaacaatgtatatagacctt

SEQ ID NO: 75361 - DNA, 600 bp, Chicken  19866894358987_1
aagtttctgtccctttcaggagcaatggggaatctgtgtgaggactcagaggggctgctggggttgctggcctcctccatctctccaatgaggtccagcacaaagtcacagcccagtaaatcctgccacgtgttgccagttagcatggagacagaccaccctcgagacctcttatcacagcccctggtaacagggataaggagagaaaaggtgtcagagtaagaaggagtaaaaagagaaataggaaaacattgcattcagcttcatcctgccttctctaaccataagctttagggtgcraatcgatgattaagcacccagagtcaggaataaaaaagtgaatcacccataatttgactgtatttgtcttaatcttttctctgaagctgctctgactgatcacagcaatgattcccccattcctcgggagtcccacagttcatgcacacagatggaagggacaaggagagaacatcagccagagtgggtaaggagcagctactccgtatctgaccacataaattccagcctgcagccccagctgatctggactctaaaaccagtcatagtctctttcacatccccaaacctcctgtcctc

SEQ ID NO: 75362 - DNA, 600 bp, Chicken  19866894358988_1
aggtggggagaaacccacagggtaatttaagtgtttagcagccaacagttaagaagctctgtggctcatctgagagctaggagtgagatgagaggctgctgtgggaggaactgcggtagcgataatgaaaatattattggctgttaatgttgcagactattcagagagacagggaaacttctaccagttctgaagtccaaatgcttgaatgcaggccttaaatctgaaagtccttggaagcttcagaaaagtttagattacaaatttgaagatatgttttacttattcaaatgcctgtgygtttggtaggttctgaagcttggactgaatctgattccttagaaacttccctatacatttgcagagtttttacctgtggtactggcttttttgttgttgttttgctttgttttcctttttttttcccttgtttttaatctgtgatccatcagtggttcttctctttcttgtgatcctccaacagactctgccacatgctttgtgctacgttcggtgtaattsagaatgaagtcctggactatgatagtttttggaagagctctgaaaaagcactcaactttttgatggcatctaaagaag

SEQ ID NO: 75363 - DNA, 600 bp, Chicken  19866894358988_2
tctgaaagtccttggaagcttcagaaaagtttagattacaaatttgaagatatgttttacttattcaaatgcctgtgygtttggtaggttctgaagcttggactgaatctgattccttagaaacttccctatacatttgcagagtttttacctgtggtactggcttttttgttgttgttttgctttgttttcctttttttttcccttgtttttaatctgtgatccatcagtggttcttctctttcttgtgatcctccaacagactctgccacatgctttgtgctacgttcggtgtaattsagaatgaagtcctggactatgatagtttttggaagagctctgaaaaagcactcaactttttgatggcatctaaagaaggagctcatgagactgtaggaaaatatacgttctgaaggcaatagacattggtgctggctagctctggtgcttagtcagaagcactattattccagcactgataaaatattgtaccagaacatgaggtgatggtgtgtatgtgaattaaaggcaaaggagcagtgatgctgacaatgggaacagaaggtgtatagatccatcctcattctccactgagatctt

SEQ ID NO: 75364 - DNA, 600 bp, Chicken  19866894358990_1
gtctgatgtgcagaaggcaaactgaaatctgcctgggctatgagggcaaacaccttcaggcttatgcaattaacctcaggataattgatgaccacaagtaatcaagctgtggttggggggtatcatgtgcaagaaacgtactaaggcatatcattcagtattgactcagaggaaagggctccactgaatcaataacaccatctcctgaagtgcagtgggtttccttcaaaatcttccttaattaccagatgaaatcaccaggtgcttgaaagactcaaaagagtagttacaggtgtgctwgcattcccagtgcctctcagctattgcatacaaagaatggtaaagccctttagctggctgtggggaagaaaggcrtaccactctcaaaatcatccccygattatttactagaatgatttagtaataatacaggcaaaagcatgcatggggaactttacggtactaccaaagagatagaaatcaaacaagaaaaaaaamcmcctcttattctggagttccaggggccatgcaaagagctgtacccaaaccactgctctgataagacaccaaaggaacacctctttcaaacaagtccctcac

SEQ ID NO: 75365 - DNA, 600 bp, Chicken  19866894358990_2
tcaggataattgatgaccacaagtaatcaagctgtggttggggggtatcatgtgcaagaaacgtactaaggcatatcattcagtattgactcagaggaaagggctccactgaatcaataacaccatctcctgaagtgcagtgggtttccttcaaaatcttccttaattaccagatgaaatcaccaggtgcttgaaagactcaaaagagtagttacaggtgtgctwgcattcccagtgcctctcagctattgcatacaaagaatggtaaagccctttagctggctgtggggaagaaaggcrtaccactctcaaaatcatccccygattatttactagaatgatttagtaataatacaggcaaaagcatgcatggggaactttacggtactaccaaagagatagaaatcaaacaagaaaaaaaamcmcctcttattctggagttccaggggccatgcaaagagctgtacccaaaccactgctctgataagacaccaaaggaacacctctttcaaacaagtccctcacctttcctcccctctacctcccactcttcatttacctttcactttagactgagagcttggcgaagcctgagttttc

SEQ ID NO: 75366 - DNA, 600 bp, Chicken  19866894358990_3
taatcaagctgtggttggggggtatcatgtgcaagaaacgtactaaggcatatcattcagtattgactcagaggaaagggctccactgaatcaataacaccatctcctgaagtgcagtgggtttccttcaaaatcttccttaattaccagatgaaatcaccaggtgcttgaaagactcaaaagagtagttacaggtgtgctwgcattcccagtgcctctcagctattgcatacaaagaatggtaaagccctttagctggctgtggggaagaaaggcrtaccactctcaaaatcatccccygattatttactagaatgatttagtaataatacaggcaaaagcatgcatggggaactttacggtactaccaaagagatagaaatcaaacaagaaaaaaaamcmcctcttattctggagttccaggggccatgcaaagagctgtacccaaaccactgctctgataagacaccaaaggaacacctctttcaaacaagtccctcacctttcctcccctctacctcccactcttcatttacctttcactttagactgagagcttggcgaagcctgagttttcttctgctatgacttttatggctt

SEQ ID NO: 75367 - DNA, 600 bp, Chicken  19866894358990_4
catctcctgaagtgcagtgggtttccttcaaaatcttccttaattaccagatgaaatcaccaggtgcttgaaagactcaaaagagtagttacaggtgtgctwgcattcccagtgcctctcagctattgcatacaaagaatggtaaagccctttagctggctgtggggaagaaaggcrtaccactctcaaaatcatccccygattatttactagaatgatttagtaataatacaggcaaaagcatgcatggggaactttacggtactaccaaagagatagaaatcaaacaagaaaaaaaamcmcctcttattctggagttccaggggccatgcaaagagctgtacccaaaccactgctctgataagacaccaaaggaacacctctttcaaacaagtccctcacctttcctcccctctacctcccactcttcatttacctttcactttagactgagagcttggcgaagcctgagttttcttctgctatgacttttatggcttcaccttcattgaaagaactgatatttatctctttattaatttttaatgaggacagctattgcatttaattccctggaattattactttgatataactgtt

SEQ ID NO: 75368 - DNA, 600 bp, Chicken  19866894358990_5
tctcctgaagtgcagtgggtttccttcaaaatcttccttaattaccagatgaaatcaccaggtgcttgaaagactcaaaagagtagttacaggtgtgctwgcattcccagtgcctctcagctattgcatacaaagaatggtaaagccctttagctggctgtggggaagaaaggcrtaccactctcaaaatcatccccygattatttactagaatgatttagtaataatacaggcaaaagcatgcatggggaactttacggtactaccaaagagatagaaatcaaacaagaaaaaaaamcmcctcttattctggagttccaggggccatgcaaagagctgtacccaaaccactgctctgataagacaccaaaggaacacctctttcaaacaagtccctcacctttcctcccctctacctcccactcttcatttacctttcactttagactgagagcttggcgaagcctgagttttcttctgctatgacttttatggcttcaccttcattgaaagaactgatatttatctctttattaatttttaatgaggacagctattgcatttaattccctggaattattactttgatataactgttag

SEQ ID NO: 75369 - DNA, 600 bp, Chicken  19866894358990_6
gcttggcgaagcctgagttttcttctgctatgacttttatggcttcaccttcattgaaagaactgatatttatctctttattaatttttaatgaggacagctattgcatttaattccctggaattattactttgatataactgttagaggttcattcccagcaagtgtactgcactgagcataaccagtcaccctgcaataagatccctgttgctttctcatccctgaaattccacactgaggatcagatctggagaaaaccacttgattagcaaggaatttccctattttttgcaatgragacataagctctgtcagtgcatgggatctgatgtcagaagtgtctgaaagtcagcaaaaaacttcttgtaaaagaactaattaattaattaaaagaactaattartyaataacagagctcagggtgcttaaggagctgaccctcaaaagcccaaggaggctgtggatgccccatccctggaggcattcaaggccaggctggatgtggctctrggcagcctggtctggtggttggcaaccatgcacatagcaggggggttgaaatttaatgatcattatggtccttttcaacccaggcca

SEQ ID NO: 75370 - DNA, 600 bp, Chicken  19866894358990_7
catttaattccctggaattattactttgatataactgttagaggttcattcccagcaagtgtactgcactgagcataaccagtcaccctgcaataagatccctgttgctttctcatccctgaaattccacactgaggatcagatctggagaaaaccacttgattagcaaggaatttccctattttttgcaatgragacataagctctgtcagtgcatgggatctgatgtcagaagtgtctgaaagtcagcaaaaaacttcttgtaaaagaactaattaattaattaaaagaactaattartyaataacagagctcagggtgcttaaggagctgaccctcaaaagcccaaggaggctgtggatgccccatccctggaggcattcaaggccaggctggatgtggctctrggcagcctggtctggtggttggcaaccatgcacatagcaggggggttgaaatttaatgatcattatggtccttttcaacccaggccattctatgattctctggagacttaagaaagtatttctaaacccattctggagctgcagttcttaacaaatggatgatttccacagacatcatcctgtggttgcttcc

SEQ ID NO: 75371 - DNA, 600 bp, Chicken  19866894358990_8
tttaattccctggaattattactttgatataactgttagaggttcattcccagcaagtgtactgcactgagcataaccagtcaccctgcaataagatccctgttgctttctcatccctgaaattccacactgaggatcagatctggagaaaaccacttgattagcaaggaatttccctattttttgcaatgragacataagctctgtcagtgcatgggatctgatgtcagaagtgtctgaaagtcagcaaaaaacttcttgtaaaagaactaattaattaattaaaagaactaattartyaataacagagctcagggtgcttaaggagctgaccctcaaaagcccaaggaggctgtggatgccccatccctggaggcattcaaggccaggctggatgtggctctrggcagcctggtctggtggttggcaaccatgcacatagcaggggggttgaaatttaatgatcattatggtccttttcaacccaggccattctatgattctctggagacttaagaaagtatttctaaacccattctggagctgcagttcttaacaaatggatgatttccacagacatcatcctgtggttgcttccac

SEQ ID NO: 75372 - DNA, 600 bp, Chicken  19866894358990_9
ctttctcatccctgaaattccacactgaggatcagatctggagaaaaccacttgattagcaaggaatttccctattttttgcaatgragacataagctctgtcagtgcatgggatctgatgtcagaagtgtctgaaagtcagcaaaaaacttcttgtaaaagaactaattaattaattaaaagaactaattartyaataacagagctcagggtgcttaaggagctgaccctcaaaagcccaaggaggctgtggatgccccatccctggaggcattcaaggccaggctggatgtggctctrggcagcctggtctggtggttggcaaccatgcacatagcaggggggttgaaatttaatgatcattatggtccttttcaacccaggccattctatgattctctggagacttaagaaagtatttctaaacccattctggagctgcagttcttaacaaatggatgatttccacagacatcatcctgtggttgcttccaccctgtttcccccagtgacctcaacagcgaaggaaagcaaatcagaaaagtactgaaaaatcaaaataaaaccaaaagagaattagtaagtatagcctatggaggt

SEQ ID NO: 75373 - DNA, 600 bp, Chicken  19866894358997_1
gaggcccagggctgtctcatcttggcagcctacaggcatagtcctacttcgacacaagcaaggagttggacttgctgtggcaaaaactgtgctatcgcaaggacacaaggaagaaaaaaaagctctactatatgagttcccaatcatgggctcacttggacactacagccaccagcaaaagtctcaaccctgccatgagctgctcattcctttctcgcagaggagtagagcaggagtacagcaaaaggcaaaccttcccccacatgccattacagcatcactattcaaacccagcaacarccagtgatcttatctgatgagactcagaggcagaccagctattacttctgggaataacagatgtacctttttctaaaacactcaggtatgagagggcagcaaatagctcatgtttctataaaaaaatgccacccttacagagttgtgcagtgcaataccaaagctgttgagcctaggctgctgggcttcagatgggatgtctgcacacacttccagatagatgcgtctgttgctgaaattaaaaaacagctatgctcctcactgtctgttagcaaaacaccataccttccattcctaatt

SEQ ID NO: 75374 - DNA, 600 bp, Chicken  19866894358997_2
gcagcaaatagctcatgtttctataaaaaaatgccacccttacagagttgtgcagtgcaataccaaagctgttgagcctaggctgctgggcttcagatgggatgtctgcacacacttccagatagatgcgtctgttgctgaaattaaaaaacagctatgctcctcactgtctgttagcaaaacaccataccttccattcctaattacactgtatttgctgagctgagtttgttgtggggagtgtgatgttagagcttctctgagcctgggcaatgcctcctgctgcagctctgctgggcrttgctttcctcttgctctggctgcaacagcagagcagctgtttgggtaggagagcatttgtgcctgagcagcggtgtggttcagttgttgcccaagctgtatttacagtttttaaggctctaagctggcagcagcagaacagggtggtttaaaaagctgtgtctggttcccaaatcatattcagtttgcagtgttgggaaattatgtttcaaaacaagccaggcactggcttcctcctaggttaatccacactgctcctgccttgtgtattttggaatattaacaacaccgcagcagcag

SEQ ID NO: 75375 - DNA, 600 bp, Chicken  19866894359004_1
agttcttcaaaacaaaaattgaaagttatctgtgtgtttcaagtgaaatgatttagttctagctgattgatcaagttaaatccaggataaaaagactagcttttaaatgacagtctctgtttcttggtccacatacactgtgattaaaattaatctgaattgttggcttcgcacagaggttgattggactctgggctgcacagagcataagaaccatggtggaaaaagtgagcacttacattttgggacctacaatctaagttccaagtgctaacattgctccaccacaaactgttttcwgactcaggggacayatttctcagcacccttgggcctgtcagagttattctgatgttggatctgacagagcagggagggggagcagggatcagaagggcctggctgggatggggagygggcagcagcccatgaagaggagccagatggctttcgcagtgctctccatagccctgggctcctgcttgagcttcatctcccatgcatttggggttcctccaacactagtatctttcctttctccagctacattagctgtattttactgaatgcctctggtgtctagggagccatatatgtatc

SEQ ID NO: 75376 - DNA, 600 bp, Chicken  19866894359004_2
aaaattgaaagttatctgtgtgtttcaagtgaaatgatttagttctagctgattgatcaagttaaatccaggataaaaagactagcttttaaatgacagtctctgtttcttggtccacatacactgtgattaaaattaatctgaattgttggcttcgcacagaggttgattggactctgggctgcacagagcataagaaccatggtggaaaaagtgagcacttacattttgggacctacaatctaagttccaagtgctaacattgctccaccacaaactgttttcwgactcaggggacayatttctcagcacccttgggcctgtcagagttattctgatgttggatctgacagagcagggagggggagcagggatcagaagggcctggctgggatggggagygggcagcagcccatgaagaggagccagatggctttcgcagtgctctccatagccctgggctcctgcttgagcttcatctcccatgcatttggggttcctccaacactagtatctttcctttctccagctacattagctgtattttactgaatgcctctggtgtctagggagccatatatgtatcatacatgtgtagat

SEQ ID NO: 75377 - DNA, 600 bp, Chicken  19866894359004_3
ctgtttcttggtccacatacactgtgattaaaattaatctgaattgttggcttcgcacagaggttgattggactctgggctgcacagagcataagaaccatggtggaaaaagtgagcacttacattttgggacctacaatctaagttccaagtgctaacattgctccaccacaaactgttttcwgactcaggggacayatttctcagcacccttgggcctgtcagagttattctgatgttggatctgacagagcagggagggggagcagggatcagaagggcctggctgggatggggagygggcagcagcccatgaagaggagccagatggctttcgcagtgctctccatagccctgggctcctgcttgagcttcatctcccatgcatttggggttcctccaacactagtatctttcctttctccagctacattagctgtattttactgaatgcctctggtgtctagggagccatatatgtatcatacatgtgtagatggtagtgggatttatcagtgctgctatggaaaattatctggtcccaatttctccttgttagcccattggggagaaaaaacccaccacaccgctaccaccacc

SEQ ID NO: 75378 - DNA, 599 bp, Chicken  19866894359012_1
  misc_feature (1)..(278): n is any nucleotide
nnnnnnnnnnnnnnnnnnnnnnnnnnnnnnnnnnnnnnnnnnnnnnnnnnnnnnnnnnnnnnnnnnnnnnnnnnnnnnnnnnnnnnnnnnnnnnnnnnnnnnnnnnnnnnnnnnnnnnnnnnnnnnnnnnnnnnnnnnnnnnnnnnnnnnnnnnnnnnnnnnnnnnnnnnnnnnnnnnnnnnnnnnnnnnnnnnnnnnnnnnnnnnnnnnnnnnnnnnnnnnnnnnnnnnnnnnnnnnnnnnnnnnnnnnnnnnnnnnnnnnnnnnnnnnnnnnnnnncaggaaggtgtacttggccacrctgctgttcagctccaccgtgcggtcttccaggtccccaggctggcggatggagacacgcaccctactgacggtggagtgtttgagccggtggagagcccattgcaccgtgatggtgctggccgtcacgttcgtgatctcaaagccttccaccggacgcggtcctggccggagcgagcagagaagcagggagggctgcggtcagcagctggccgcggcggggctgcatccttcccgcatcccttatctcccacaccccagcctgccatgtggaccagccttcctagagtcaccatgggc

SEQ ID NO: 75379 - DNA, 600 bp, Chicken  19866894359012_2
gctggccgtcacgttcgtgatctcaaagccttccaccggacgcggtcctggccggagcgagcagagaagcagggagggctgcggtcagcagctggccgcggcggggctgcatccttcccgcatcccttatctcccacaccccagcctgccatgtggaccagccttcctagagtcaccatgggcacatccacagcaccaggacggctcagcgccactgccccgtgtccccgctgttgggcagccgggggcacccagcctggcccccatgttggttgctcctcagcaagcatggagcccagrggtccagctcgtagtcatcccttaggcctggtgctgcctgcccagcctctagcctccacccagccacgtgcacaccagcatggatgaggcctagacccaaggcagaggctgcccggctgccccacaccctcaggccctgctgccccctcccagcccgaggtcacctctgggctggtgccacgcatgggcagcgctgggctcagcctagctcaccagcaatgggatcaagcccctgggcctcccctctcactacagggaattttttccaggtccaatctctttcatcctcaatttgccttc

SEQ ID NO: 75380 - DNA, 600 bp, Chicken  19866894359026_1
agtgctggttgctactgtgagggacagagccttaattggcaaaaaaatctcttttggctgcgtttttattagtcaggacaactctccgtgtttctaggaattgaaccttgagtgtgtctggctgaaagtatcaaagaagacatttggcaattttactggaattataaactatgtataaaacactgataacactaattgttacttgagggatttattagctaaagtagttacacttcttgggtattctggattaaaaacttactgacaaatcttacttgcacataaacctcaggggttatraaatcttattaattgggaaactgtatgacacagttaagccatgaacgtaacgaagatgtttctagcaagacactcctgggatacagatcccgtgcatttcaatgagctgaaaactttctctagcaaagtcctttctctgagcaattacagtttaattcatactgttgagcttcttcaatcaacaaatacaaatatgatgagatcatggagcaaatgagtgtactaaagatcaagaaaatacatataatttttcaaatgactgaatttgagagagggggtggaaaagctattctgtatgtc

SEQ ID NO: 75381 - DNA, 600 bp, Chicken  19866894359042_1
ttcttcaaaggcaggtaagtgatttcatttctaccagcacctgcttctggggctcacaaaggtagaacattacgttcatttcaaggaatttatcttcctttggttacaagggaaaatatttctttctgaaagtattaaggcagctttgcagatttttactagtccagcaagagttgggtgagtaacacggtttactgacaggtgagtaaactgttgcagtccatcatccatcactgttgccgttgtgcaaggctgaataatctcagcatcactcctcagcctgcagctagttcacacagyactttcctcatcacaccagtccaggtgcaggtcatggagctgtgggaagtgccactggtgtcttttggcagcactctgaccaaggggtacacagtgaactagtgcccagtactgctcatagagagtccctgccattagatggccctgctttttctgtatgttctgacaatgagcactttaacagggggttggcagtgcattttctctctggagaaaggggacagcatgtcaggcctagggtttcattcacatcttgggttggtgactatgtttcaattgaataaacttcctttgatgaag

SEQ ID NO: 75382 - DNA, 600 bp, Chicken  19866894359044_1
agaggtagttgcagttagaggaaaaagtcaaattaggacagattaggagtaagactgcatcccattaggacggaatggaaacaagccagggaacccaattagtgaatgcctgcactgaacactgcagagcagtgcagaaagacctgagctaatgtggactttatctgctctggaagcagtatgtcatggcacagatgagtggtatttattatcttaaactgcattaaagtggatgagctgcttctggccatgagctggtattgctgcagcacaactggtagacatatcagctgggaccarcaatagctcaggaatatgcaccaaatttcactgcactgcacagacatcttctgcatgagcttgtgttgtgcattcaggcaaaatgaaagctgtcagggtatatgattgcttgctataaatatatcaaggaagggaagggaaagtgaaaactgacaccaggactggaaaaattatttaaactaggggataatgttggcacaaaatcaaatagatataaactagctacaaataggtttagactggaaattagaagacagtttcaagccatcagagcagtaaattcggaaggttttacaaaag

SEQ ID NO: 75383 - DNA, 593 bp, Chicken  19866894359047_1
aaactacttcatttatgtgcttcaagggacctgagctcttttaagcaaataggttgtagtggagaaatgatttggagaacactcatcaagggtgatcttggtaagatgaatcaatgcagaattgtagtggcaaaactattcactgtcaggtgttcttttatcatttcctcatatactaaagcactcttcaaaaacttccactgaccagaattcccttgaccacagagaaatgggtcaattgttctgcttatgtactgtatgctattcacagcagcaatcttccaaagttgctataattcyctcccacaccccaaaattccaaatcttttttcagtttaagcaggtatggaaagatgttcagtctcagctttcctggcctgagagttaccaagctttggttcccattttctgtccttaataaaaccacatttcctgcccttggcccaccatgtaaagcagagttcaccataccaatcaaccttacaagatttcaggaataattaactcatgaacagtttccagcacgctgcagggaaaacctactttagaaaagtatcacatttatataccatggttaagtttgctcttaacct

SEQ ID NO: 75384 - DNA, 600 bp, Chicken  19866894359051_1
tcaaaatttggtcagtggatctacagccgaggattttaaagttgtgaaagaaaatatcagagtggttggtgtgtcttccttagacaggaaaatatgaatgatgttatcagagcgttgagcagggcatgcgagaagcgtagagctgaaaagcaaatggagtcatgcagcatggagtaaatcctttcccttccatgtttccccttctactgtatcccctcatacctcccagcttttcctcctcaaattaagggagcaaaataaaaaacaagtcattttgaggaacgaaacaacccaacgaamtwtaattctaactgattaatattggatttggagaagatggatgtamtccagtttttctctgctgttccagagcctcacagtggatgcaggggtaaygctgtgcaaatatttgccaaatagccttgaaaacagaacaaatattttacatttttgaaaaaaaaaaaaaaggaagaaagaaagaaaaaaatcaattcaactcacccccactaaaaactttaaacaaaccccgacttgcattgtagaagaagctgctcagttgctggaggactttgcccgatccatttagaattagatgatgat

SEQ ID NO: 75385 - DNA, 600 bp, Chicken  19866894359051_2
aaaatttggtcagtggatctacagccgaggattttaaagttgtgaaagaaaatatcagagtggttggtgtgtcttccttagacaggaaaatatgaatgatgttatcagagcgttgagcagggcatgcgagaagcgtagagctgaaaagcaaatggagtcatgcagcatggagtaaatcctttcccttccatgtttccccttctactgtatcccctcatacctcccagcttttcctcctcaaattaagggagcaaaataaaaaacaagtcattttgaggaacgaaacaacccaacgaamtwtaattctaactgattaatattggatttggagaagatggatgtamtccagtttttctctgctgttccagagcctcacagtggatgcaggggtaaygctgtgcaaatatttgccaaatagccttgaaaacagaacaaatattttacatttttgaaaaaaaaaaaaaaggaagaaagaaagaaaaaaatcaattcaactcacccccactaaaaactttaaacaaaccccgacttgcattgtagaagaagctgctcagttgctggaggactttgcccgatccatttagaattagatgatgatta

SEQ ID NO: 75386 - DNA, 600 bp, Chicken  19866894359051_3
aaagaaaatatcagagtggttggtgtgtcttccttagacaggaaaatatgaatgatgttatcagagcgttgagcagggcatgcgagaagcgtagagctgaaaagcaaatggagtcatgcagcatggagtaaatcctttcccttccatgtttccccttctactgtatcccctcatacctcccagcttttcctcctcaaattaagggagcaaaataaaaaacaagtcattttgaggaacgaaacaacccaacgaamtwtaattctaactgattaatattggatttggagaagatggatgtamtccagtttttctctgctgttccagagcctcacagtggatgcaggggtaaygctgtgcaaatatttgccaaatagccttgaaaacagaacaaatattttacatttttgaaaaaaaaaaaaaaggaagaaagaaagaaaaaaatcaattcaactcacccccactaaaaactttaaacaaaccccgacttgcattgtagaagaagctgctcagttgctggaggactttgcccgatccatttagaattagatgatgattatacaatcaattaaaccatctgacatgctgaataaatacaagtgc

SEQ ID NO: 75387 - DNA, 600 bp, Chicken  19866894359051_4
aatgatgttatcagagcgttgagcagggcatgcgagaagcgtagagctgaaaagcaaatggagtcatgcagcatggagtaaatcctttcccttccatgtttccccttctactgtatcccctcatacctcccagcttttcctcctcaaattaagggagcaaaataaaaaacaagtcattttgaggaacgaaacaacccaacgaamtwtaattctaactgattaatattggatttggagaagatggatgtamtccagtttttctctgctgttccagagcctcacagtggatgcaggggtaaygctgtgcaaatatttgccaaatagccttgaaaacagaacaaatattttacatttttgaaaaaaaaaaaaaaggaagaaagaaagaaaaaaatcaattcaactcacccccactaaaaactttaaacaaaccccgacttgcattgtagaagaagctgctcagttgctggaggactttgcccgatccatttagaattagatgatgattatacaatcaattaaaccatctgacatgctgaataaatacaagtgctttatcattttaatgagcttatgtaccgttaagtatatttatttattttt

SEQ ID NO: 75388 - DNA, 600 bp, Chicken  19866894359051_5
tggagtcatgcagcatggagtaaatcctttcccttccatgtttccccttctactgtatcccctcatacctcccagcttttcctcctcaaattaagggagcaaaataaaaaacaagtcattttgaggaacgaaacaacccaacgaamtwtaattctaactgattaatattggatttggagaagatggatgtamtccagtttttctctgctgttccagagcctcacagtggatgcaggggtaaygctgtgcaaatatttgccaaatagccttgaaaacagaacaaatattttacatttttgyaaaaaaaaaaaaaggaagaaagaaagaaaaaaatcaattcaactcacccccactaaaaactttaaacaaaccccgacttgcattgtagaagaagctgctcagttgctggaggactttgcccgatccatttagaattagatgatgattatacaatcaattaaaccatctgacatgctgaataaatacaagtgctttatcattttaatgagcttatgtaccgttaagtatatttatttattttttgcatgcgttgtctgyktgtgttactgaatacacatgctgaaagagactcacaggagt

SEQ ID NO: 75389 - DNA, 600 bp, Chicken  19866894359051_6
ccaaatagccttgaaaacagaacaaatattttacatttttgaaaaaaaaaaaaaaggaagaaagaaagaaaaaaatcaattcaactcacccccactaaaaactttaaacaaaccccgacttgcattgtagaagaagctgctcagttgctggaggactttgcccgatccatttagaattagatgatgattatacaatcaattaaaccatctgacatgctgaataaatacaagtgctttatcattttaatgagcttatgtaccgttaagtatatttatttattttttgcatgcgttgtctgyktgtgttactgaatacacatgctgaaagagactcacaggagtgacctatatttgtaaggcgagaataaaactaagagcagtgaagagctgggtattgcataggtgtgtggtcaaaaaggaggcgtgaggaaggttttacatgcagtgctgcacagaagcagtcctgcttatctcccttttaaggtcttctttatttctcttcttttctttatgtttatctttatactactgtagctactgatgtttaggaactaaacagacaactagacagaaagctcaagcgagtgtttccagtggaag

SEQ ID NO: 75390 - DNA, 600 bp, Chicken  19866894359051_7
caaatagccttgaaaacagaacaaatattttacatttttgaaaaaaaaaaaaaaggaagaaagaaagaaaaaaatcaattcaactcacccccactaaaaactttaaacaaaccccgacttgcattgtagaagaagctgctcagttgctggaggactttgcccgatccatttagaattagatgatgattatacaatcaattaaaccatctgacatgctgaataaatacaagtgctttatcattttaatgagcttatgtaccgttaagtatatttatttattttttgcatgcgttgtctgyktgtgttactgaatacacatgctgaaagagactcacaggagtgacctatatttgtaaggcgagaataaaactaagagcagtgaagagctgggtattgcataggtgtgtggtcaaaaaggaggcgtgaggaaggttttacatgcagtgctgcacagaagcagtcctgcttatctcccttttaaggtcttctttatttctcttcttttctttatgtttatctttatactactgtagctactgatgtttaggaactaaacagacaactagacagaaagctcaagcgagtgtttccagtggaagc

SEQ ID NO: 75391 - DNA, 600 bp, Chicken  19866894359068_1
acaaaacaaaaaaaggcagcagcaataggaaaacaaagggtggccccagggtggggggtcctggagcagggggtggcattgtgctgtgggggtcccctgggggtgcagccccatcgggatcgctcagccccacaaggtgttaaggggcagtgggggttcatgcagtgccccctcccagctgtgatgcaaccggggctctgctcacactttattaaccgggtttatcccatcatcctaatggaattgcatccagtaagagacatgctgggagcactggggctgatgcagtttggtgagtgsagrcacacctcagatgagggaaggaagatggggcagtgctgcgtggctgcatcccttgctcctggagaccctgggtgggatggggctgtgcatcccctggcatggggggtgggtcccccccagtcccatgggagaacgcattctgttggggacacaaaggcaggaaagagctccatttctgctgccaggcagccagggaagggtttcacacagctcccatctctctgtgcacatctctcaatgcactgcagcagcgaggagtcagcacagaagaatttgcagtgtgtgctcagcacctgc

SEQ ID NO: 75392 - DNA, 600 bp, Chicken  19866894359068_2
aaacaaaaaaaggcagcagcaataggaaaacaaagggtggccccagggtggggggtcctggagcagggggtggcattgtgctgtgggggtcccctgggggtgcagccccatcgggatcgctcagccccacaaggtgttaaggggcagtgggggttcatgcagtgccccctcccagctgtgatgcaaccggggctctgctcacactttattaaccgggtttatcccatcatcctaatggaattgcatccagtaagagacatgctgggagcactggggctgatgcagtttggtgagtgsagrcacacctcagatgagggaaggaagatggggcagtgctgcgtggctgcatcccttgctcctggagaccctgggtgggatggggctgtgcatcccctggcatggggggtgggtcccccccagtcccatgggagaacgcattctgttggggacacaaaggcaggaaagagctccatttctgctgccaggcagccagggaagggtttcacacagctcccatctctctgtgcacatctctcaatgcactgcagcagcgaggagtcagcacagaagaatttgcagtgtgtgctcagcacctgccca

SEQ ID NO: 75393 - DNA, 599 bp, Chicken  19866894359073_1
  misc_feature (1)..(204): n is any nucleotide
nnnnnnnnnnnnnnnnnnnnnnnnnnnnnnnnnnnnnnnnnnnnnnnnnnnnnnnnnnnnnnnnnnnnnnnnnnnnnnnnnnnnnnnnnnnnnnnnnnnnnnnnnnnnnnnnnnnnnnnnnnnnnnnnnnnnnnnnnnnnnnnnnnnnnnnnnnnnnnnnnnnnnnnnnnnnnnnnnnnnnnnnnnnnnnnnnnnnnnnnnnnntctctctgcttcactggttgcttaatgacgaattttgagctttatgagtgtagaagggagtgtaagtgaacatgcattggtgcagctcctcagtgmcacactgtgcacaaatagctggcatctgacatgagaacttaagccttgaataggtgcttgtgagggggagatgaaagtaagcatgtggataattaactgcaaaagtagaagacaactgttcttttattcatcttctgctcttttcagaatgtgttagaatttgttctttgccctgggcaccttaacaatcwcttgcaagtaatggactaaataaggggtgttcctgtgaatagatccactgctgctcaatgtaactttggggaggagtgatggcttgcacagaatgatagcaaaaatga

SEQ ID NO: 75394 - DNA, 599 bp, Chicken  19866894359073_2
  misc_feature (1)..(13): n is any nucleotide
nnnnnnnnnnnnntctctctgcttcactggttgcttaatgacgaattttgagctttatgagtgtagaagggagtgtaagtgaacatgcattggtgcagctcctcagtgmcacactgtgcacaaatagctggcatctgacatgagaacttaagccttgaataggtgcttgtgagggggagatgaaagtaagcatgtggataattaactgcaaaagtagaagacaactgttcttttattcatcttctgctcttttcagaatgtgttagaatttgttctttgccctgggcaccttaacaatcwcttgcaagtaatggactaaataaggggtgttcctgtgaatagatccactgctgctcaatgtaactttggggaggagtgatggcttgcacagaatgatagcaaaaatgatggagggttctgacrcaccatgggggttcatgtcccctgagagacaacaacagcatatgatatggacagaggggcaagaaactgcctcaaagcactgatggatttgtaggttaaaactgtcaccttgaattccacgtggaagcttactagaggtcaatgaaatgcatgggacaagtataaattgctcccag

SEQ ID NO: 75395 - DNA, 600 bp, Chicken  19866894359073_3
atagctggcatctgacatgagaacttaagccttgaataggtgcttgtgagggggagatgaaagtaagcatgtggataattaactgcaaaagtagaagacaactgttcttttattcatcttctgctcttttcagaatgtgttagaatttgttctttgccctgggcaccttaacaatcwcttgcaagtaatggactaaataaggggtgttcctgtgaatagatccactgctgctcaatgtaactttggggaggagtgatggcttgcacagaatgatagcaaaaatgatggagggttctgacrcaccatgggggttcatgtcccctgagagacaacaacagcatatgatatggacagaggggcaagaaactgcctcaaagcactgatggatttgtaggttaaaactgtcaccttgaattccacgtggaagcttactagaggtcaatgaaatgcatgggacaagtataaattgctcccagtatgcagcctgccaggttgtagcatactgttctggctgcatactgaatattttgaagatgtagctgcatgggttgaccattaaaatcattcttgtccctcatcttgaataaatatgtcatggcc

SEQ ID NO: 75396 - DNA, 600 bp, Chicken  19866894359075_1
agagccccacatccaaaggcactgcactgcccgggctgggccaggcaaagggcgctgctcccacctgagcttttgtttatttcagttttttaatggggaaaagcgtaccagaagcactgctatgtcagtgacaccccctgatgctgagactcacacagcaaacctgagaagggcagcagcatgcagctgtggcagttaccctgcagctcagaaacaaaggagccacttttgttttacctgtacttctgtatccacccaccaatgggtacagagagcacgtggataaccacggagccttcrgcctcagctgcacacactgatcatcacctggatcagaaccctcagcccctcactgaggcataacagcacctttagatacacacagaacacagcatttcccccctcatttcccagcagaacaagcagtctctgcaggcatggtgaacataagtaaggtgttataaccagccaagagcagcacatcacagccttaaaaacctttctgcttggccagctccaaccagctgtactcaatgagcttttaatcagcgtgttacccacaggcagcatgtaaaggaacggacgaatgccctatgctcc

SEQ ID NO: 75397 - DNA, 511 bp, Chicken  19866894359077_1
gataaatgttcattaaagcttcagatttaatctaaacatttggcaagtatgcttgcaggagattaattacatctaagacacttctgaacatgaaacaccttgctaaaaacaggtacactctaacagcaatagttttcttatttaagaataaatggtaatccacagaatgttagcatacaaactagccacgaatatcttgtagtgagattttcttcttatccagcctgttctgttgaagaatacatcaggatgacttgttttaattatcaagtgttgtgatagagtgcattctcaacttgrtgcaatggagtatatgaattacattcattttccaagtgttaatgttaactacatttgtgaaactgctgaagagggagattcttttatgaagataattcactccagattttttcattacttcatagaaaccagaactttataaacacaattttacacacaaatcatgatgtaaaacttcaaaatcaagagcaatgatcttaccaggggataa

SEQ ID NO: 75398 - DNA, 600 bp, Chicken  19866894359083_1
gaaactgccaaatgtggatcatgttactttctagtaagcacagttaagcaaatatgtagctgtaataacagattttaccaaaagcagcatctgttttctgtgtgatttccagcttgtgtggccaatttacagagggggtggctctgtcagtgcagttcactgagtacagcaaatctagatgtattctaaaatcttctttgaggctgataggagaacagatggactaatatgctttgttcaagatggaaacctcaaagcataacacacatactattgtagtggcagctattccacaattcrcaacagcatatttaatgtcattaattatgactctaaccagtgtgttaccactgacatggttatactaataaaagtacggacaaggctttgggatctcagaaccagttttttcaaygccttttgtcattatagagtacaygtggaaatacctatatactcatttttctactctttttatgccactgagtagaggttaagcctctgagaattattcatttcacataacactttaaccaaatcataaatgaccatcatttgtaaactacagaatccttacttcctgctcatatgctgattatc

SEQ ID NO: 75399 - DNA, 600 bp, Chicken  19866894359083_2
gtgtggccaatttacagagggggtggctctgtcagtgcagttcactgagtacagcaaatctagatgtattctaaaatcttctttgaggctgataggagaacagatggactaatatgctttgttcaagatggaaacctcaaagcataacacacatactattgtagtggcagctattccacaattcrcaacagcatatttaatgtcattaattatgactctaaccagtgtgttaccactgacatggttatactaataaaagtacggacaaggctttgggatctcagaaccagttttttcaaygccttttgtcattatagagtacaygtggaaatacctatatactcatttttctactctttttatgccactgagtagaggttaagcctctgagaattattcatttcacataacactttaaccaaatcataaatgaccatcatttgtaaactacagaatccttacttcctgctcatatgctgattatcagaatgtaacaytttgtaacagaatgtaacgtgtaagggaaatacctttttcatcatagctagactttcttcaaatgaacattaagcttgaatcctcatagcttgtgcaagttag

SEQ ID NO: 75400 - DNA, 600 bp, Chicken  19866894359083_3
ggctctgtcagtgcagttcactgagtacagcaaatctagatgtattctaaaatcttctttgaggctgataggagaacagatggactaatatgctttgttcaagatggaaacctcaaagcataacacacatactattgtagtggcagctattccacaattcrcaacagcatatttaatgtcattaattatgactctaaccagtgtgttaccactgacatggttatactaataaaagtacggacaaggctttgggatctcagaaccagttttttcaaygccttttgtcattatagagtacaygtggaaatacctatatactcatttttctactctttttatgccactgagtagaggttaagcctctgagaattattcatttcacataacactttaaccaaatcataaatgaccatcatttgtaaactacagaatccttacttcctgctcatatgctgattatcagaatgtaacaytttgtaacagaatgtaacgtgtaagggaaatacctttttcatcatagctagactttcttcaaatgaacattaagcttgaatcctcatagcttgtgcaagttagatgtgtaacattgttaatccaact

SEQ ID NO: 75401 - DNA, 439 bp, Chicken  19866894359083_4
taatgtcattaattatgactctaaccagtgtgttaccactgacatggttatactaataaaagtacggacaaggctttgggatctcagaaccagttttttcaaygccttttgtcattatagagtacaygtggaaatacctatatactcatttttctactctttttatgccactgagtagaggttaagcctctgagaattattcatttcacataacactttaaccaaatcataaatgaccatcatttgtaaactacagaatccttacttcctgctcatatgctgattatcagaatgtaacaytttgtaacagaatgtaacgtgtaagggaaatacctttttcatcatagctagactttcttcaaatgaacattaagcttgaatcctcatagcttgtgcaagttagatgtgtaacattgttaatccaactaaagcagcaaga

SEQ ID NO: 75402 - DNA, 600 bp, Chicken  19866894359085_1
tttcctctttttttcttttttcttttttttttttttttccccagatgaaagtctgaaggaataatggacactgaaatgttgaaatgttccagaagaagaaagtattacaatatttttcttattttctcctactatcattaaattggagatcgctaacatctaaaaacaatttacagatccatctgcttaacaaacagaatattaaatccctgtaactgcctttcagacaggggaatatttcatgcatactaaagtcagtgagctcctccacgtctcctgtgaacacaaaggaaaaccagraggaaatgaaaggaaaaattcagaatttttaaattcataaaagtcctgtctgcattcaccagtatgtaactggttcccaaagtcaagtaacagtttccatcaagttcagatgaattttgtcagaaagattttttgtcatgagatttactaactgcaacaaaacatttttattgagatcctgaatttcctacattgtaaaaacttctattatcttaagattcatggattataaatgcaagagtagatccttttgtccatctagttataatacaaatggcaatacttcctatcaatgtcctc

SEQ ID NO: 75403 - DNA, 600 bp, Chicken  19866894359089_1
tcactcattagttaatttgcttctatctgcactaagaaagcaatcattaggtgaattcaccaacatgccctgtgaaattgtatataaagatgctggcagttgtatctaggtgtatctaggtatgtggtcacaaaagttaagccaaggtcaaaaccttagtttccagctttaacactcttccatttgccttgttcaaacccccaaaacaagcttagatgttctgcaaatggtgtcatgactcttgttatatgctattgagggccagctctgggaagtgagctaggacttgtaaccacatgyggtatacccattggttaaactggcactggatgaaatggcagaaatctgtggtcctggcagttttcctgctttgcttctgttcctagtaccaggtggtcagagcactgtcaatcaactgttcccaactggaaatgggaaaaacgaagatatggcaagggggtagaacaggctctggggactgcaggctctctgggccacagcctaggttctgacatcagctcaccctcaacacagacacagcctctgccccagctctgactcagctctgtctgtaggggtatcttgcatgtaacatcactg

SEQ ID NO: 75404 - DNA, 600 bp, Chicken  19866894359091_1
aactaatgaagagcggatgaattaattatcagcagctgagtatactattatgtaaggctaggagtacgtcagtttgcttgattcacctgtcagttcatggagatgattgtagcacctctctttagccagtttaacttaattctatgatggtaatgataatttctacctacagtggatttagaaaactgtttgactctcctaagaatgcagactaatgccgctcttcggcagtcttctatagcatcttcttttgactttgctactggctgttgtcataagtcctaaacttggtttgtgtgratgtgacttctttgagctgttcttctctgagcctttcctttgagcrctttgctttttctgtatgcttaggcaccactttggcccctttcaaattatagtcacgaggtctgctttaaagcaaacaaaacaaaaacaaaacaaaaccaccacagaacacacatttaaaagtcctgcttatcgctgacgtggctattgactttgggttactggggaacaattctaccgtcatgtctggggctcaagcttagagcctgagaatatcatcaaaggtaacagtagatgtagggaaacttgttcaca

SEQ ID NO: 75405 - DNA, 600 bp, Chicken  19866894359091_2
attatgtaaggctaggagtacgtcagtttgcttgattcacctgtcagttcatggagatgattgtagcacctctctttagccagtttaacttaattctatgatggtaatgataatttctacctacagtggatttagaaaactgtttgactctcctaagaatgcagactaatgccgctcttcggcagtcttctatagcatcttcttttgactttgctactggctgttgtcataagtcctaaacttggtttgtgtgratgtgacttctttgagctgttcttctctgagcctttcctttgagcrctttgctttttctgtatgcttaggcaccactttggcccctttcaaattatagtcacgaggtctgctttaaagcaaacaaaacaaaaacaaaacaaaaccaccacagaacacacatttaaaagtcctgcttatcgctgacgtggctattgactttgggttactggggaacaattctaccgtcatgtctggggctcaagcttagagcctgagaatatcatcaaaggtaacagtagatgtagggaaacttgttcacagcagacatgcattctaaaagcgttctccctcgttattcagtggtgc

SEQ ID NO: 75406 - DNA, 600 bp, Chicken  19866894359097_1
ctgccttctgctgcaaacgtctcagcgttgcttttggtgaaagcagagggttttggtcggcctggggccgtgcctttgctttcaggtccgtgtgtgaaccgctgacacgcagcgttataaccgcaccaaagtttccatgttggcaccagggctgcagcacggcctgggtctggcacagggaagccgtgtgggatttcagaaccaaacctctcctccatcccaaaatagaggcacgaggagatgaaatacaccctcatgttcccgcgggcagaggggctttccttctgcccttcccgaccygctcagacagagcaatrccccaaaacacagcacagcagtgtgcgctctcaaacatcccattgaggcagatcccaatgtttggcagattcctgagatcaggaaattccttgagagttcgggaagccctccaagcccgaacccgagcgatttcacttgcagcagatatcgagttctcctccccttctgttgttttggtggtgggtcagtgggactttggcgagcgcgtgagaataagagcagcaaaacagcgcggaaggccaagggcaggcgcggggcgcaggaacagctgctcgcaaaggg

SEQ ID NO: 75407 - DNA, 600 bp, Chicken  19866894359097_2
cgtctcagcgttgcttttggtgaaagcagagggttttggtcggcctggggccgtgcctttgctttcaggtccgtgtgtgaaccgctgacacgcagcgttataaccgcaccaaagtttccatgttggcaccagggctgcagcacggcctgggtctggcacagggaagccgtgtgggatttcagaaccaaacctctcctccatcccaaaatagaggcacgaggagatgaaatacaccctcatgttcccgcgggcagaggggctttccttctgcccttcccgaccygctcagacagagcaatrccccaaaacacagcacagcagtgtgcgctctcaaacatcccattgaggcagatcccaatgtttggcagattcctgagatcaggaaattccttgagagttcgggaagccctccaagcccgaacccgagcgatttcacttgcagcagatatcgagttctcctccccttctgttgttttggtggtgggtcagtgggactttggcgagcgcgtgagaataagagcagcaaaacagcgcggaaggccaagggcaggcgcggggcgcaggaacagctgctcgcaaagggaagcggagcggccaagg

SEQ ID NO: 75408 - DNA, 480 bp, Chicken  19866894359110_1
cagcactaacacagggctgaactacccgacgaggcagggattggacctgcttgcctctctagaggctggccataaacaaaacttaaataattagagtgcttgggcggaggtgcagcctttaagtattcttaggctcaggcaaataaaggaaataaattcttggaaggtgccaggaaggatggggcagagggaggctcattttccacatcacttgagagcagccgttataaatctcactgaaagatgcacctccccaggctggtgatatttttaaactccggcagaaaggggagagagggraaaaaaaaaaaaaaagcacatttttagtatttacaccacaggcgaaaagagtatttaaaaaccaggatacgtttctgaaagtctgttcctgccacgcgaagagagaaagaatatccttcctatagagtgataactggaaatatcagccccggagaattcattcctaccaccatccttctc

SEQ ID NO: 75409 - DNA, 600 bp, Chicken  19866894359114_1
tcttttcttcttcttcttctttttttttcttcaagtcaaaccattaatgcttattgttctcctctgatttattggctgacattcactttgttatgaattcactttctcacctcattcactcccccgggagctgaactcaggtgttccttgtgggtcctttctgactctgcatgttctatgtttctataattttcatcatactctatgacagggaaaggaggacttaaagaagaaacatacacagagagtctttttctcttttcctcaccttcttacaaggacttaaaaacgtcctcctcrtcatctgatcaccctgcaaactttctacatgctagtttacctgtgtacccagcttacagatcctgctggggaaggaccgtctctcctgctatagtrgaacactgcaggtattcaacaagtaattaataatgatatctcctgctatcagtattgccagaggagcagagggaagagaggagtggcaagcgctggaagcgtattaatagctgttggaaaagtaggtgttcaggagccgttactgttgctcaaaggtaaggcaaagtactttgcaacaagaacagctctatttccctgtgtgat

SEQ ID NO: 75410 - DNA, 600 bp, Chicken  19866894359114_2
attcactttctcacctcattcactcccccgggagctgaactcaggtgttccttgtgggtcctttctgactctgcatgttctatgtttctataattttcatcatactctatgacagggaaaggaggacttaaagaagaaacatacacagagagtctttttctcttttcctcaccttcttacaaggacttaaaaacgtcctcctcrtcatctgatcaccctgcaaactttctacatgctagtttacctgtgtacccagcttacagatcctgctggggaaggaccgtctctcctgctatagtrgaacactgcaggtattcaacaagtaattaataatgatatctcctgctatcagtattgccagaggagcagagggaagagaggagtggcaagcgctggaagcgtattaatagctgttggaaaagtaggtgttcaggagccgttactgttgctcaaaggtaaggcaaagtactttgcaacaagaacagctctatttccctgtgtgatctgaacttggaggtagcattaaatggaagagcagctgtggacagctcttttgctgtcttgcaaaacagatgcaggcccaccagcatgatctaggac

SEQ ID NO: 75411 - DNA, 599 bp, Chicken  19866894359123_1
  misc_feature (1)..(1): n is any nucleotide
nccgtaccttggcctctgtaccaaatcaggatgattgactgttggcctgggcaggtagcagatgtggggctctcccaggtgatgtggagacatcatcagggcagctgcaccttgttttcttaaattgcctataaaaaaaaaggccagtgggcaaggtaagctctttgctggtggtggtgctgtgtggagggattgttctctgctcacaggtatgaatgttaattttcttaattctttttccagtctttgaataaatgtgcattagggttagggcccttaaagtagggtctttgggaactyggcagggtatgtgactgaaggcttctgtggggacacagaagccagggtgggctgtgcgtcagtctcccagagccaggaggtacctctactgggatcctctgcaaaggagtgatgagacatatgggagagagagcagagctgtgaccrgggcagcccagtgtgcctcagccagcacagcctctgcctgggggtcttttaaaatgaagcagtgcaggcgttgtcttgttgctgagctctccacagtgtcagcctgcttggtttgatctgtgttgcgctgatacccttgtaataagtggctc

SEQ ID NO: 75412 - DNA, 600 bp, Chicken  19866894359123_2
tgggcaaggtaagctctttgctggtggtggtgctgtgtggagggattgttctctgctcacaggtatgaatgttaattttcttaattctttttccagtctttgaataaatgtgcattagggttagggcccttaaagtagggtctttgggaactyggcagggtatgtgactgaaggcttctgtggggacacagaagccagggtgggctgtgcgtcagtctcccagagccaggaggtacctctactgggatcctctgcaaaggagtgatgagacatatgggagagagagcagagctgtgaccrgggcagcccagtgtgcctcagccagcacagcctctgcctgggggtcttttaaaatgaagcagtgcaggcgttgtcttgttgctgagctctccacagtgtcagcctgcttggtttgatctgtgttgcgctgatacccttgtaataagtggctccttctaagggaacagkgcaggatatgaaatgcactgaaatgttgccatttaaaggtgatgaattgttttcctttctagttcgctgcttttaaagcttctcactggcaagaacccatcataaagtgcagaaacgtagcatactcctctt

SEQ ID NO: 75413 - DNA, 600 bp, Chicken  19866894359123_3
tgaaggcttctgtggggacacagaagccagggtgggctgtgcgtcagtctcccagagccaggaggtacctctactgggatcctctgcaaaggagtgatgagacatatgggagagagagcagagctgtgaccrgggcagcccagtgtgcctcagccagcacagcctctgcctgggggtcttttaaaatgaagcagtgcaggcgttgtcttgttgctgagctctccacagtgtcagcctgcttggtttgatctgtgttgcgctgatacccttgtaataagtggctccttctaagggaacagkgcaggatatgaaatgcactgaaatgttgccatttaaaggtgatgaattgttttcctttctagttcgctgcttttaaagcttctcactggcaagaacccatcataaagtgcagaaacgtagcatactcctctttgagaggcttgagttatttcaacttggtgtctctaatctcaaaagcacatcagagaaatgtataaaggatgcagttcttgtcccagagatataatctaagcacagatatagcataacaaaaagatgacataacaggagaagctactgtggtgttatactggggttctg

SEQ ID NO: 75414 - DNA, 600 bp, Chicken  19866894359144_1
agcatgacaatttgtgtagcttcatgaatcctaccttgagcctagatattttataaatacgggggcggctttgaaagtaatgcctcttaatgtattatgttggcccacaaagtcagagatggatgttggtggtatggcagtaagaggtcaaatcttaccaccactgtgttgttgctgcatgacagatggcagcagagggacaatctgacagaatggcatctaatgtgaaactgatcatggagcaaaggtgtgtcactgagttcctccatgcagaaacaatggcacccattgacatctatygactctagctaaatgctgatggagaccaaaacagtgaatgtgagcaaagagaagagggggatgatacttctaagcagtgccaacagcaacagtgtgttgctcctctggtgcagatgtttatgagtgcagcatgcaggttcttgttcactgctggtgaaaatgcacagttaatggtgatgactgtgttgagaagccgtgttctgtagctgaaaattcctactacttgcctcaagacttcttgtcctatcaatactcagttccacttcttagtttgccaaatgactactccagcaatgaaaa

SEQ ID NO: 75415 - DNA, 600 bp, Chicken  19866894359144_2
gagggggatgatacttctaagcagtgccaacagcaacagtgtgttgctcctctggtgcagatgtttatgagtgcagcatgcaggttcttgttcactgctggtgaaaatgcacagttaatggtgatgactgtgttgagaagccgtgttctgtagctgaaaattcctactacttgcctcaagacttcttgtcctatcaatactcagttccacttcttagtttgccaaatgactactccagcaatgaaaaggaatccacaaagcctctgcacaatggaaattatttaatgctatcagttgaakattatttcactcatggatrtttagaaaataagaattaatttttcacttactgtcaaaaagtaaggccacattaaagggggagttgtcaaaattcattagaaaaaaactgccttatgaaagacagtaaagccccaaacttgctgtctgctctccaccccactatgtaaatacaataattgactagttgactgttgttgttcctattttgctgatcttttacaataagatttggattgtgtaaaaactcaatgacagtaccagcttactgcatttttattctacctttgctttacagcagca

SEQ ID NO: 75416 - DNA, 600 bp, Chicken  19866894359144_3
agcagtgccaacagcaacagtgtgttgctcctctggtgcagatgtttatgagtgcagcatgcaggttcttgttcactgctggtgaaaatgcacagttaatggtgatgactgtgttgagaagccgtgttctgtagctgaaaattcctactacttgcctcaagacttcttgtcctatcaatactcagttccacttcttagtttgccaaatgactactccagcaatgaaaaggaatccacaaagcctctgcacaatggaaattatttaatgctatcagttgaakattatttcactcatggatrtttagaaaataagaattaatttttcacttactgtcaaaaagtaaggccacattaaagggggagttgtcaaaattcattagaaaaaaactgccttatgaaagacagtaaagccccaaacttgctgtctgctctccaccccactatgtaaatacaataattgactagttgactgttgttgttcctattttgctgatcttttacaataagatttggattgtgtaaaaactcaatgacagtaccagcttactgcatttttattctacctttgctttacagcagcagtgtttcttggctgccaat

SEQ ID NO: 75417 - DNA, 599 bp, Chicken  19866894359155_1
  misc_feature (1)..(59): n is any nucleotide
nnnnnnnnnnnnnnnnnnnnnnnnnnnnnnnnnnnnnnnnnnnnnnnnnnnnnnnnnnnttattaaagcaactgacaaatgctgttatcttcaattgatatggaatgtggaatgtgtttgtgtatatggccaactatgttgggtgggtgttctcttaatcacttcctttaagcagaactgagaacctctgggttattcagaggacgtataattccagtagaaattggttaaaaaggtcctaaagaccaaagcatgagtattttgcaatcagatgaaacactatctcttgttctcatcccycatgaggagaaaagcaaaaatctagactaggaataagctacaaataagtaaataacaagacttatgaattactttgattagcaactgaaggaagatcaaccagatgtgtcctactctcattttagcctatatttcatgattaaataaagtgaaagctcaaataagacacctctccaacttgtaaatgttatacacatttgcaggatcttggggagagggctcttctgtttctaacagttcagataagcagttatgtgtccagttaaaccagtgtctgtatactgtaattcagtcatgtg

SEQ ID NO: 75418 - DNA, 600 bp, Chicken  19866894359165_1
tctagccacttgccaggcaacagtgctaacttcatacacactgatgggttctccacacactgcagctcttctctgaggttaggtgtagtcatgaacattttttcaggtgtaagaactgagaaacttccctgtgccaccaagttttctcctctgatttctcctaggggtgctgagagctcctttcaaagacccaaacaccctcagagagggaattatcatttggtatcaccacccttaaggagtgcctgggcaaaactttgatacttacagtggatatttggcacctagatccaaaacaarccaaaaataagtgagttcttaataatcatgccaaaaacaggagctacatgcctgaagggcctgttgtgtgaattccaaggtgttggagcaacttcagcggtttttggagctgttttccacgttgattgaatgcaagcaagcttttaatggatatcctgacctatctgtcttggcttttagggggcctggcatgaggctgttgctgtaaagccacccctgtgtctacagatgctctcacattgattccagtagttgtgcaccagcttaacagcctatgtcgttgtggtgttcctcttgggt

SEQ ID NO: 75419 - DNA, 600 bp, Chicken  19866894359168_1
caaatccaaacacttgcctctgcaaactggaaacttaagttccttgctgcaagggaaaataagctgcttccaatgggaaaaaatcccagaagttaagttcttggccctctgaaatagttgtgatgcatagtttcacaggtgcggttgaggagcctagcctttcttttatctcccatataaatgttcaaaaaaaaaaaaaaaaaaaaaagttgaaatctagtgtttggtcaaactggaaaagaacttgctttgtcaggattctgattttttgcatcttagaaactgctgtaagcactggcmtaagctgtcttcagtaaacagtgttaggaattctgaagtaaagtgttcattgtcactaygttttcttgaggtttactgtctgtgttctgtcatgcttttgccatttaaaagtgacactaaacrtaatctgctgcttagatttgacaaaaaggctgttagagggacatgatttggtctttgacaaagatggtaggccatgttagaaccagctgggatttcacaaagtgctaagactcagatgtgactgattgtctgaaaagtcagttatagacagcctcctggacttctgagaagtcattg

SEQ ID NO: 75420 - DNA, 600 bp, Chicken  19866894359168_2
taagctgcttccaatgggaaaaaatcccagaagttaagttcttggccctctgaaatagttgtgatgcatagtttcacaggtgcggttgaggagcctagcctttcttttatctcccatataaatgttcaaaaaaaaaaaaaaaaaaaaaagttgaaatctagtgtttggtcaaactggaaaagaacttgctttgtcaggattctgattttttgcatcttagaaactgctgtaagcactggcmtaagctgtcttcagtaaacagtgttaggaattctgaagtaaagtgttcattgtcactaygttttcttgaggtttactgtctgtgttctgtcatgcttttgccatttaaaagtgacactaaacrtaatctgctgcttagatttgacaaaaaggctgttagagggacatgatttggtctttgacaaagatggtaggccatgttagaaccagctgggatttcacaaagtgctaagactcagatgtgactgattgtctgaaaagtcagttatagacagcctcctggacttctgagaagtcattgatactcctggcaggagctgacatattgtgtttttgtgcacagcattgctacaaacacag

SEQ ID NO: 75421 - DNA, 571 bp, Chicken  19866894359168_3
tgcatagtttcacaggtgcggttgaggagcctagcctttcttttatctcccatataaatgttcaaaaaaaaaaaaaaaaaaaaaagttgaaatctagtgtttggtcaaactggaaaagaacttgctttgtcaggattctgattttttgcatcttagaaactgctgtaagcactggcmtaagctgtcttcagtaaacagtgttaggaattctgaagtaaagtgttcattgtcactaygttttcttgaggtttactgtctgtgttctgtcatgcttttgccatttaaaagtgacactaaacrtaatctgctgcttagatttgacaaaaaggctgttagagggacatgatttggtctttgacaaagatggtaggccatgttagaaccagctgggatttcacaaagtgctaagactcagatgtgactgattgtctgaaaagtcagttatagacagcctcctggacttctgagaagtcattgatactcctggcaggagctgacatattgtgtttttgtgcacagcattgctacaaacacagctaaggaataaaaggactataaaagggatgtgcta

SEQ ID NO: 75422 - DNA, 600 bp, Chicken  19866894359173_1
caggccacagtcgtaaaaatctgcaccagcagaggtgaccactatatcacagctgctgtgatggtgtcattgctaggaaaatagtagaatcatagaattgcttaggttggaaaagaccttaaggtcatcaagtctaaccgcaacctaaccatactactctaacaaccctctgctaaatcatgttaaatgttaaaatgttgtcaactcagtccatctttcatcgacctgaacagatggaatccaggttgttgagtggatgtggtagtacagcacagccaagattggcaatatgttccttcrtcttcaagctggtatgaggtctgacattattatgttacaagagaaaagctgtcttcttctctggcctgactctggaagtttaagccatcagtttagttagcgttgcaatgtagcttcagaattgatgatttgttccaggaaatccagaaagattaccccttttctatcccaaaagagcacacatcactacccgctgagggctgtgtcttgaactttctctttgatggggaattcacatgttgctggtccatggactgccatttagactcaggctcgtagtgatgacattgtgtctcatca

SEQ ID NO: 75423 - DNA, 600 bp, Chicken  19866894359178_1
ttgcttctgactgtcagtgactggttgtcacattccatcccagggttagctgcctttcctcaaaaaacaaagccatttccttcatttataattctgtagcatccctcaagttttgctgggctaaggttacgcaaagcgattttgtattttgctattagctctggggaataccagccatgcattcagaattaagtagtctatcaaatagcaaaagtaagtgttgcagcatacagtacctgttctgcaaagaactggaaacccttatcttcacgaatacattcataggtttctccaagaacrgggttaaatggcttacttccagctcggtagtaactggatgcatacgcagatactgcaaatgcagctatatatacctgggaataacacacagagaattctggttactttatcccaatcatgcactttctttttctatagattctgtcttaacagaaggtatacatatatawaaaaaaaggccttatcctgacatcagatatttattttttccattatttgcagaccataaatgcatatgcctcctcctgggagttaagcattagcccatacattacagaagttttcagttttcamtgaatc

SEQ ID NO: 75424 - DNA, 600 bp, Chicken  19866894359178_2
ccagccatgcattcagaattaagtagtctatcaaatagcaaaagtaagtgttgcagcatacagtacctgttctgcaaagaactggaaacccttatcttcacgaatacattcataggtttctccaagaacrgggttaaatggcttacttccagctcggtagtaactggatgcatacgcagatactgcaaatgcagctatatatacctgggaataacacacagagaattctggttactttatcccaatcatgcactttctttttctatagattctgtcttaacagaaggtatacatatatawaaaaaaaggccttatcctgacatcagatatttattttttccattatttgcagaccataaatgcatatgcctcctcctgggagttaagcattagcccatacattacagaagttttcagttttcamtgaatcattcaagaggccagcgatggagttaataggatcaaactttgcaaattattcagctgaaaacagtgtctctgaaaacagtttgaaacaattcagtattttggaacacacagaactgaaagcagtaaacttaaaaaccaccaatagattttgtgttgtaattggcttttaca

SEQ ID NO: 75425 - DNA, 600 bp, Chicken  19866894359178_3
agaacrgggttaaatggcttacttccagctcggtagtaactggatgcatacgcagatactgcaaatgcagctatatatacctgggaataacacacagagaattctggttactttatcccaatcatgcactttctttttctatagattctgtcttaacagaaggtatacatatatawaaaaaaaggccttatcctgacatcagatatttattttttccattatttgcagaccataaatgcatatgcctcctcctgggagttaagcattagcccatacattacagaagttttcagttttcamtgaatcattcaagaggccagcgatggagttaataggatcaaactttgcaaattattcagctgaaaacagtgtctctgaaaacagtttgaaacaattcagtattttggaacacacagaactgaaagcagtaaacttaaaaaccaccaatagattttgtgttgtaattggcttttacagtttcggtccgttattctatggatctactcactatccttaccctaaacacggcacaggaaatattgtgagagttttcataaaatttgctatgttcagtgcaatttgtaccatttttcttccttt

SEQ ID NO: 75426 - DNA, 600 bp, Chicken  19866894359180_1
gagtttgcaggcgctggcagcccaatttcacctccttctgaccacttcttgctaaatttggaggaaggtgcctgcctaaacctcctcctgctgctgggagctgtcaggattgagacctccaggagccaaacccagaaaccttctgggggcaggagaaaaatgccttatgctgtgggatttcagcagctctggctgctcgtctcacagaagggaaagattgagaggtggcttgattgtggtgtgttagtacctggctggggaaaggaaattgcagggtaagaaatagctgtcagccggcascagggcgagggctggggcgggctgctggcagagggaggcccttgcacggctttgtgcattcagagcagggcgggattgggtagatgagccagctggagtgggtgatttaatggtctcatctggccttaaaattctgcaaatctgcaagagtttcgtgatctccctgaaaagcctttgcctgtgcgtagctgtgggtaaraacacgaaaacagcctttgaccatcttctggaaagtgctttgagatcctgttgtagcagccrtggcacagtgacaatgattatctgcttataacagatgct

SEQ ID NO: 75427 - DNA, 600 bp, Chicken  19866894359180_2
tctcacagaagggaaagattgagaggtggcttgattgtggtgtgttagtacctggctggggaaaggaaattgcagggtaagaaatagctgtcagccggcascagggcgagggctggggcgggctgctggcagagggaggcccttgcacggctttgtgcattcagagcagggcgggattgggtagatgagccagctggagtgggtgatttaatggtctcatctggccttaaaattctgcaaatctgcaagagtttcgtgatctccctgaaaagcctttgcctgtgcgtagctgtgggtaaraacacgaaaacagcctttgaccatcttctggaaagtgctttgagatcctgttgtagcagccrtggcacagtgacaatgattatctgcttataacagatgctagatcaatagcggagcttcaagctacgctgcgaggcaattgactgcagaaagcaattctttattggggtaaagctggccttgcaacaaggctcagattcattcttacaactccagtcttaaaatgtcaccaccagctctgatgcctttcatcctttgtgctgggagagaatgcgcattattcataattggactctctac

SEQ ID NO: 75428 - DNA, 600 bp, Chicken  19866894359180_3
aaggaaattgcagggtaagaaatagctgtcagccggcascagggcgagggctggggcgggctgctggcagagggaggcccttgcacggctttgtgcattcagagcagggcgggattgggtagatgagccagctggagtgggtgatttaatggtctcatctggccttaaaattctgcaaatctgcaagagtttcgtgatctccctgaaaagcctttgcctgtgcgtagctgtgggtaaraacacgaaaacagcctttgaccatcttctggaaagtgctttgagatcctgttgtagcagccrtggcacagtgacaatgattatctgcttataacagatgctagatcaatagcggagcttcaagctacgctgcgaggcaattgactgcagaaagcaattctttattggggtaaagctggccttgcaacaaggctcagattcattcttacaactccagtcttaaaatgtcaccaccagctctgatgcctttcatcctttgtgctgggagagaatgcgcattattcataattggactctctaccaggcaggaataaccgttttcatttcctacaatgcctgagaaacagtgaggatttgcttttt

SEQ ID NO: 75429 - DNA, 600 bp, Chicken  19866894359180_4
aatgattatctgcttataacagatgctagatcaatagcggagcttcaagctacgctgcgaggcaattgactgcagaaagcaattctttattggggtaaagctggccttgcaacaaggctcagattcattcttacaactccagtcttaaaatgtcaccaccagctctgatgcctttcatcctttgtgctgggagagaatgcgcattattcataattggactctctaccaggcaggaataaccgttttcatttcctacaatgcctgagaaacagtgaggatttgcttttttttcttcttttyccccttccccaaacagcacttagtggcagttttattctgagtgactcggtaacgcttcccactcaggcggtggtggcttcggagcgatgctgtaatcgtgttgtgagagtgcagcatcgattcccccggccacctcgtaacaaacaccccaggactgttgtgtgtccaccatccccaggccagatctgtagcattgcacctgtttggctgctaaatttagtgtttccagtgtgtcaacaccgctgagagacacataacaggttccaaaaccgggtcacatcctctggcttgctggctgga

SEQ ID NO: 75430 - DNA, 600 bp, Chicken  19866894359187_1
gtcagtgttagggacagcagcaatgcagctctaaaatgcatctcccctagaatgtgtctgggtgatgaatatttagctaggaataacattccttaatcacacaaaatatctacagcatcctattggatgggaaagggcatcagtgtgattcctgtgcgtgtgctgtatttgtggggagtgcatttctgggctggcattgctcccagggttctccacctgatcattctgtgggtctctttactcctatgctgtggccttttgctgtgtattgcagctgtagtgcagagcagggtgctccarctcccatgtcctcagcagtggccttctcatgctttcagatgtgagtctgtgcagtgctcaggcactgtccggctctgagtagcacctgggcattgttttgctcttccaagtgaattgggatgcatcagttcccacatctctctgttgagtctgtaacaaaatagatagtagctatgattcccagcttaccaagtgcataagaatcataagggaagttctgggtatyctctgtgtttgagctacatgttgccatctctggaagaacacagattcatgttgaacgtaagatataaagtattg

SEQ ID NO: 75431 - DNA, 600 bp, Chicken  19866894359187_2
tgtgggtctctttactcctatgctgtggccttttgctgtgtattgcagctgtagtgcagagcagggtgctccarctcccatgtcctcagcagtggccttctcatgctttcagatgtgagtctgtgcagtgctcaggcactgtccggctctgagtagcacctgggcattgttttgctcttccaagtgaattgggatgcatcagttcccacatctctctgttgagtctgtaacaaaatagatagtagctatgattcccagcttaccaagtgcataagaatcataagggaagttctgggtatyctctgtgtttgagctacatgttgccatctctggaagaacacagattcatgttgaacgtaagatataaagtattgcaggacatgagaagatgcagatcgtacaccagaacttaactaacgtgatgtagggaaaagcgtgccttccccctgccctgtgcatgcctcactgattgcgcatgcctcagattttcaaagagctttgaatgctttagaagcaagcaatgtacgtctgtttggaaattttccagggctgggtaccactgtgctccagcatagggaatgttctgctggcttgtagctt

SEQ ID NO: 75432 - DNA, 600 bp, Chicken  19866894359187_3
tgcagatcgtacaccagaacttaactaacgtgatgtagggaaaagcgtgccttccccctgccctgtgcatgcctcactgattgcgcatgcctcagattttcaaagagctttgaatgctttagaagcaagcaatgtacgtctgtttggaaattttccagggctgggtaccactgtgctccagcatagggaatgttctgctggcttgtagcttgctctgctggtttgcaaggactgctgtggtgcttcagaaccggctggaagctggcacactgcagtccactgcgagttcctgatgcctarcaaaggtgtccacagawgtgacactcactgctgttagaattcatatttaagtgttttgtagcataacagagagtgaataaactgytgtatttcttattatgaagttacacccacggtrtttgtgatacagctgttcttgccctgcaccctcaggagcactggcacagctcgccctgttgctgcactcactccgcttgcgtgcagacttgcttgcacttgggttcatcttctcctggcagctgctgctcaggggcagttggctctgctttgctctggtttggggaattacatgtgttaggg

SEQ ID NO: 75433 - DNA, 600 bp, Chicken  19866894359187_4
aacttaactaacgtgatgtagggaaaagcgtgccttccccctgccctgtgcatgcctcactgattgcgcatgcctcagattttcaaagagctttgaatgctttagaagcaagcaatgtacgtctgtttggaaattttccagggctgggtaccactgtgctccagcatagggaatgttctgctggcttgtagcttgctctgctggtttgcaaggactgctgtggtgcttcagaaccggctggaagctggcacactgcagtccactgcgagttcctgatgcctarcaaaggtgtccacagawgtgacactcactgctgttagaattcatatttaagtgttttgtagcataacagagagtgaataaactgytgtatttcttattatgaagttacacccacggtrtttgtgatacagctgttcttgccctgcaccctcaggagcactggcacagctcgccctgttgctgcactcactccgcttgcgtgcagacttgcttgcacttgggttcatcttctcctggcagctgctgctcaggggcagttggctctgctttgctctggtttggggaattacatgtgttaggggagggaggccgggggca

SEQ ID NO: 75434 - DNA, 600 bp, Chicken  19866894359187_5
catgcctcagattttcaaagagctttgaatgctttagaagcaagcaatgtacgtctgtttggaaattttccagggctgggtaccactgtgctccagcatagggaatgttctgctggcttgtagcttgctctgctggtttgcaaggactgctgtggtgcttcagaaccggctggaagctggcacactgcagtccactgcgagttcctgatgcctarcaaaggtgtccacagawgtgacactcactgctgttagaattcatatttaagtgttttgtagcataacagagagtgaataaactgytgtatttcttattatgaagttacacccacggtrtttgtgatacagctgttcttgccctgcaccctcaggagcactggcacagctcgccctgttgctgcactcactccgcttgcgtgcagacttgcttgcacttgggttcatcttctcctggcagctgctgctcaggggcagttggctctgctttgctctggtttggggaattacatgtgttaggggagggaggccgggggcaggcagtgtcccagtgctcattccctcgaagcgtgtgctgatggctctctctgctcacagcccgcaggt

SEQ ID NO: 75435 - DNA, 600 bp, Chicken  19866894359187_6
ttagaagcaagcaatgtacgtctgtttggaaattttccagggctgggtaccactgtgctccagcatagggaatgttctgctggcttgtagcttgctctgctggtttgcaaggactgctgtggtgcttcagaaccggctggaagctggcacactgcagtccactgcgagttcctgatgcctarcaaaggtgtccacagawgtgacactcactgctgttagaattcatatttaagtgttttgtagcataacagagagtgaataaactgytgtatttcttattatgaagttacacccacggtrtttgtgatacagctgttcttgccctgcaccctcaggagcactggcacagctcgccctgttgctgcactcactccgcttgcgtgcagacttgcttgcacttgggttcatcttctcctggcagctgctgctcaggggcagttggctctgctttgctctggtttggggaattacatgtgttaggggagggaggccgggggcaggcagtgtcccagtgctcattccctcgaagcgtgtgctgatggctctctctgctcacagcccgcaggtccggcagcgcttggcatgtgggcatggaggggc

SEQ ID NO: 75436 - DNA, 600 bp, Chicken  19866894359189_1
taaacctctgttttggcttatggagacagcaacaagctgcagggtgagatagtgctggtcctttctgacacactgcagctctgcttgcatggggggaagcagtgtggaagagcatcctgacaactgtcccacaccttccccacactcatgtagctctggaggctttcagagctctgtgtgcagcccactgcagctacccaaacagacctgaggttgctccgtgtgccattctcacagttcccatccatgcgcctgcagggcagcccagcacgtttgtcagtgcaccctacccatggcccrtgctgttaatatggctgggcaccatacgcagggctttggcttcagcttcagctctgagctgggcggaagcagagagccctagcacattcatttgtggtcccatagagagcaagccaaccccacctgccgacacatccagagytctcttgcccrtgccataagggcatccttatggaaacggagccatcccatcctttagctccaccaccctacagcaccactgggacacggcacaacaccgctaccatccgcagtgtgggtgcagagccctgcatgagagcagctgtgcacaacacctcc

SEQ ID NO: 75437 - DNA, 600 bp, Chicken  19866894359189_2
cactcatgtagctctggaggctttcagagctctgtgtgcagcccactgcagctacccaaacagacctgaggttgctccgtgtgccattctcacagttcccatccatgcgcctgcagggcagcccagcacgtttgtcagtgcaccctacccatggcccrtgctgttaatatggctgggcaccatacgcagggctttggcttcagcttcagctctgagctgggcggaagcagagagccctagcacattcatttgtggtcccatagagagcaagccaaccccacctgccgacacatccagagytctcttgcccrtgccataagggcatccttatggaaacggagccatcccatcctttagctccaccaccctacagcaccactgggacacggcacaacaccgctaccatccgcagtgtgggtgcagagccctgcatgagagcagctgtgcacaacacctcccatgaagacacggctgtaggcgtctccaggcaatcaggacaaagggataacctccaagtaaggtgcccacgctgctgtctgccagtctgcaagctttgtgagtcacctggaaggaccgaatccaaaastttccacttacacc

SEQ ID NO: 75438 - DNA, 600 bp, Chicken  19866894359189_3
ctctggaggctttcagagctctgtgtgcagcccactgcagctacccaaacagacctgaggttgctccgtgtgccattctcacagttcccatccatgcgcctgcagggcagcccagcacgtttgtcagtgcaccctacccatggcccrtgctgttaatatggctgggcaccatacgcagggctttggcttcagcttcagctctgagctgggcggaagcagagagccctagcacattcatttgtggtcccatagagagcaagccaaccccacctgccgacacatccagagytctcttgcccrtgccataagggcatccttatggaaacggagccatcccatcctttagctccaccaccctacagcaccactgggacacggcacaacaccgctaccatccgcagtgtgggtgcagagccctgcatgagagcagctgtgcacaacacctcccatgaagacacggctgtaggcgtctccaggcaatcaggacaaagggataacctccaagtaaggtgcccacgctgctgtctgccagtctgcaagctttgtgagtcacctggaaggaccgaatccaaaastttccacttacacccacgccttgct

SEQ ID NO: 75439 - DNA, 600 bp, Chicken  19866894359189_4
gacacatccagagytctcttgcccrtgccataagggcatccttatggaaacggagccatcccatcctttagctccaccaccctacagcaccactgggacacggcacaacaccgctaccatccgcagtgtgggtgcagagccctgcatgagagcagctgtgcacaacacctcccatgaagacacggctgtaggcgtctccaggcaatcaggacaaagggataacctccaagtaaggtgcccacgctgctgtctgccagtctgcaagctttgtgagtcacctggaaggaccgaatccaaaastttccacttacacccacgccttgctcagtcggccctaaaaatgcagtttcagaaatggaaaagatcctcttgcttggtattccataaatgaatatatttaaagcctacccttgcaaactgtctgctcatgtttaagaagtcccaggatgactctggaaggtgttacttcgggaccaactgtctcttcgctgcttttgaaggcagcaaggaagtggataaaaccttggaggtcgtcaggccctgtctgttcttacattttatcagcgcacagttccaagcaattcctatttttctactgct

SEQ ID NO: 75440 - DNA, 600 bp, Chicken  19866894359192_1
atctgtaatagtaaaattaaaaaaaaatattttcttaatgtatgcaaagtaatgtatattgacacataagcaagccttttcatgatgaatattgaaatatatatgcaaagcacaggaaacgtgtaacatgttatagatctttcagtgtacatttagaggaaatgagccatttatattccacaatttagtgaatacctactgtttattggtacagagcacataggactatatttgtcttagtaatttatttaggtaaatatatttattcttctaggggttcttgtgctttttctggttctrtagtactagacataaatatttaacaatgcattgtctcaaatgttattcatgtaatttatcaggggaaacagtggagctgtaataacttttaagcctgcaccttcacttaaacctgagattgatttaaaatgtggggaaccgagcctgtttctccacatacagtaacaagaaggaccatttccccaagcaaggcatgactcacaccgcgtcggactgccacgctccaagagagggcaacccgccaacggttcactcctcttttttgggttgtcttctctaatctccgtgcagtgaaaacat

SEQ ID NO: 75441 - DNA, 600 bp, Chicken  19866894359195_1
tagtaaagctgtacatctaccagctttgtccaattaaaatactggtagcaatattactcacttaaactgcacttactcaagcagcctaaactgattttatagcatcctcataacaataattcagagtaattcaccttccatacttctggttccaaatataaaaggagccccagcatcaaaaagctttaccacaagaacagaatggatggacatgcagaactgaagtagcaggtacaactctcaccatgaacaacgtaccagcaaccactgaacttattttgcttgtgtagtaatttctgkgggcatgaatcaaacaataaaattaaatatgcaaagtgtattcaggtgtctcactctttaaaaacagagctataagttctgactccttaaatttccacctgtaggaagaaatgcagtgaatcctatatgagcattgctgggaagacctggccaaaagcttgcaggaggcacagaggtcaagatgttcccactggagacacagaactgagagcagtgaattgttcagcaagctcctaaaaatgcacctgtgaaaagaaaattccagaaggcgtggagcaactttattcaagcagtcatagc

SEQ ID NO: 75442 - DNA, 600 bp, Chicken  19866894359196_1
gcaatgtgactttatttcttcgttgtgaacgctgtatcttgtatggggaatcagaactgatttactttaggcatgttagaggctgctgcctgtgatgggactgaactgtggaaacctctcttttttcctaaaaaaagaacccaaacgagcaaacgctccttcaggcagggtgcgcccggatactgctattggccactccatttaccggagtgcgggcttcaaattcacttttaaacccggagtaccaatctctggatttgctcctcactgctaagtttaaagctttgttcctcaaagccyctgtttgtcccacggagcaaacccgctgacttgtgctggcagataaatctcccttcctgtgggtgctggaaagcatgaaggtcattcggtattgcccacatgtacaaatcatgagcttagagctgttaactttgcaaggaatgcggttttatcactgcacagtgccctattgcactacattccataacctgtgcacggtacataaatttacaatgcaattgctctttttattgttctgctgctctgtgttagacttaatgactgggagccttggatttccaaagcgggcttttttttttt

SEQ ID NO: 75443 - DNA, 600 bp, Chicken  19866894359197_1
aaaagtacccacacaggagtagctttcacatgccaagaactaaataacttcatgatcttaaagataaaatacttgtggacgtcagctgagacaagacccagaaacaccaaaacacctgtaattctacactcagtcagataaagaaagggactggattctttgactggtctgaagagaacagttctgtgcaggctgctattattgcttgagagaagcagaaaaacagtacttgggtatggggtgattagagaaatttcttcacatttgagaaacatgcaaactttgcagactctgtaaacmaaaggtcaaacaaaaaattgtttttcttctttgatgattaataacactaagtctatgtacttctgaatgccttctagccaagctccagtacttgtgtattttgtaggcacgagggagaattagaatttcttttatgtgattcaatcaaatacattttccagtcactagcaatgccacatttaataaggaataaagaaaaaagcacacacaaatttaatgctctcctaaaataaaaccagattgctttaacaaatttgttttttagtactctttcttgtaacgtactttttttctttgagg

SEQ ID NO: 75444 - DNA, 599 bp, Chicken  19866894359206_1
  misc_feature (1)..(62): n is any nucleotide
nnnnnnnnnnnnnnnnnnnnnnnnnnnnnnnnnnnnnnnnnnnnnnnnnnnnnnnnnnnnnncatcttcactctttgctctgcaagagattaaaagaactgttgttaaacatctgccttcaacgctgtgctaacttcatttcccctgcgctgaagggaggaccttcaggttggtgaaagccacagaagtaaattcaggcaaagctgtttttaaatgggacggcaccatgaaaagcaagaagtctcctttgacaggtggtacttggctctttaacccccaggtgacaactactgcacacaygctggctgggactcctaggaaatgtaaagggagacggaccccacggccacctcattttctgcccacgaccacagacatctcatcgatgtacagcaccaaattacaccggccaagctaaagaccaaggctaaacaccccgtgttatttctgcgagatccctgcagaggaagttgtcaacaattaaaatgtgagacctaaaaccagctgaggcccggcagcgtcagcttacactgtacattcttgtattacccagtgagagttttctattttgattctgctgcacacattgttgcagaagc

SEQ ID NO: 75445 - DNA, 600 bp, Chicken  19866894359215_1
tcccagcaccacttgagcaccactgtcaaagagtgcactgaatgagtactgcagtacacaccttgtgcttaattccagtgcagggcttcgcactgaactgcctgcaataaaatccagcagaggggtcctctcacagatcccataacaataaggtgcctctttcaaattaatttcctaaaattgttttgcactgtagaatattctgtgtgtatcaggtcagtgtaagcaccaagtgcagataaaccccatttctccagcttcagtgaaagaaatgggtatctcctctgctttctgtgaacygagtgctgatgtatcagtaacaccagacycacactgtaggctgctcctttgctttcctgggaggraggatgcaaactttccctctgctggctgataacaaggtgggctgctcagctttgcagggatgtgtgatgggatctaccagccaggagggtatgcatctgtctgggggaggcttatggcccactgaaatgagcagacaagcttgtgcaagcttgttttgggaaaaaaatgtactagtttatgtggatgttaccatttaaatgggtgatagtggcagcctgcacaaaacccctgatg

SEQ ID NO: 75446 - DNA, 600 bp, Chicken  19866894359215_2
agagtgcactgaatgagtactgcagtacacaccttgtgcttaattccagtgcagggcttcgcactgaactgcctgcaataaaatccagcagaggggtcctctcacagatcccataacaataaggtgcctctttcaaattaatttcctaaaattgttttgcactgtagaatattctgtgtgtatcaggtcagtgtaagcaccaagtgcagataaaccccatttctccagcttcagtgaaagaaatgggtatctcctctgctttctgtgaacygagtgctgatgtatcagtaacaccagacycacactgtaggctgctcctttgctttcctgggaggraggatgcaaactttccctctgctggctgataacaaggtgggctgctcagctttgcagggatgtgtgatgggatctaccagccaggagggtatgcatctgtctgggggaggcttatggcccactgaaatgagcagacaagcttgtgcaagcttgttttgggaaaaaaatgtactagtttatgtggatgttaccatttaaatgggtgatagtggcagcctgcacaaaacccctgatgaggatgaacacagctaagaggatgaacac

SEQ ID NO: 75447 - DNA, 600 bp, Chicken  19866894359215_3
tgcttaattccagtgcagggcttcgcactgaactgcctgcaataaaatccagcagaggggtcctctcacagatcccataacaataaggtgcctctttcaaattaatttcctaaaattgttttgcactgtagaatattctgtgtgtatcaggtcagtgtaagcaccaagtgcagataaaccccatttctccagcttcagtgaaagaaatgggtatctcctctgctttctgtgaacygagtgctgatgtatcagtaacaccagacycacactgtaggctgctcctttgctttcctgggaggraggatgcaaactttccctctgctggctgataacaaggtgggctgctcagctttgcagggatgtgtgatgggatctaccagccaggagggtatgcatctgtctgggggaggcttatggcccactgaaatgagcagacaagcttgtgcaagcttgttttgggaaaaaaatgtactagtttatgtggatgttaccatttaaatgggtgatagtggcagcctgcacaaaacccctgatgaggatgaacacagctaagaggatgaacacaccattccttcccctgtgctctcatgtaagaggaaa

SEQ ID NO: 75448 - DNA, 600 bp, Chicken  19866894359215_4
ctttccctctgctggctgataacaaggtgggctgctcagctttgcagggatgtgtgatgggatctaccagccaggagggtatgcatctgtctgggggaggcttatggcccactgaaatgagcagacaagcttgtgcaagcttgttttgggaaaaaaatgtactagtttatgtggatgttaccatttaaatgggtgatagtggcagcctgcacaaaacccctgatgaggatgaacacagctaagaggatgaacacaccattccttcccctgtgctctcatgtaagaggaaagcacacacayggtagaggctccctccagtgctatagcgataggagatgaagaattaagcaagtgatacataagagaattataagaatgctatagctatttctagcctaggaaggggaagaaatactcatgacccactgggggactttggaagttgtgcctcatcacaggagataccatggctattcaggaggatggagagaaraggagcaggcattcagagaaataacattcagtatcatcatcaygagttcccttttaaataaacaaaacaaataaacaattaaagttcagaactcaggagttcaggac

SEQ ID NO: 75449 - DNA, 600 bp, Chicken  19866894359215_5
tgatagtggcagcctgcacaaaacccctgatgaggatgaacacagctaagaggatgaacacaccattccttcccctgtgctctcatgtaagaggaaagcacacacayggtagaggctccctccagtgctatagcgataggagatgaagaattaagcaagtgatacataagagaattataagaatgctatagctatttctagcctaggaaggggaagaaatactcatgacccactgggggactttggaagttgtgcctcatcacaggagataccatggctattcaggaggatggagagaaraggagcaggcattcagagaaataacattcagtatcatcatcaygagttcccttttaaataaacaaaacaaataaacaattaaagttcagaactcaggagttcaggacaagacttatttcccccaggaattggatttccatagctgagcactgctgatttcacattttcctcttcagactgcccatagtctccacgcatcaaggatgaattctgagcacaaagggtgggaagcaaaatcctccaggtttccattctaacctgagacaacgtgtgtgtgtctaacaggatttgtgtggcttt

SEQ ID NO: 75450 - DNA, 600 bp, Chicken  19866894359215_6
agctaagaggatgaacacaccattccttcccctgtgctctcatgtaagaggaaagcacacacayggtagaggctccctccagtgctatagcgataggagatgaagaattaagcaagtgatacataagagaattataagaatgctatagctatttctagcctaggaaggggaagaaatactcatgacccactgggggactttggaagttgtgcctcatcacaggagataccatggctattcaggaggatggagagaaraggagcaggcattcagagaaataacattcagtatcatcatcaygagttcccttttaaataaacaaaacaaataaacaattaaagttcagaactcaggagttcaggacaagacttatttcccccaggaattggatttccatagctgagcactgctgatttcacattttcctcttcagactgcccatagtctccacgcatcaaggatgaattctgagcacaaagggtgggaagcaaaatcctccaggtttccattctaacctgagacaacgtgtgtgtgtctaacaggatttgtgtggctttcccctggggctgttcagatcagctggtgtttgacctgaccaga

SEQ ID NO: 75451 - DNA, 600 bp, Chicken  19866894359226_1
gtcaatgaggtctgtcctgcaatttaatacaaagctgagaatgtcaaaagtgagtgacttacataattccatagggatgacctttttgcatcttctgcaaggaagacttgcttgtcagaacagctttaagacaccacacagtgaggttggaatggaaatgggactgtgtcctatcctctcctgagagaccatgtctgttgaaagtttagaaaatcagtagttggttggctgttcctttgttatgtgtaggctgagctgtaggaaattatcaggctatgaagcaaacacacagttttctaktatctgagcaccaggtactcccttctctgcagaaaatgaaggtggccatgagcactggccaagaaaaatttgcatcagtgggtgttgcagctttggttcagcattttatctcatttactcagcctccagcagagctaggcagatactgcaaaaagaagaggaaaacaaatctcccctccagcatctgctcatatgcagaagtaaattcattttatgcttctctgttgttgaaagctcagagtgaaagaacagtggtgctgctggcttggccatctgtctggggctgggatctgagggtgc

SEQ ID NO: 75452 - DNA, 448 bp, Chicken  19866894359227_1
tcggcgtttctgattaaaagatatttccaaaagaaaacagagttctataataaattagagttcctgaaaaggtcaccctccaagagggaaactttcagaattcaagggaattaaaaaaggctatttatttagtcagagctcttcctaaaaatgactttattagtcctactgcagactaatagaaacgtgctattcctcagaattagtcttagactattaaaacactagtaagccatttacagactggtcagtgactcaaccctcttatgcctagtaccaattgaaggctgagcactgaayatttacacatgggagttacatttttctaattttgctttgctacatcaacaagtctttcaggtacctaccagtctttgcattatatatgcagcccaaaaccattgaataagatcagtctttacaagcaaaacctgcagcatttcacagt

SEQ ID NO: 75453 - DNA, 599 bp, Chicken  19866894359229_1
  misc_feature (1)..(219): n is any nucleotide
nnnnnnnnnnnnnnnnnnnnnnnnnnnnnnnnnnnnnnnnnnnnnnnnnnnnnnnnnnnnnnnnnnnnnnnnnnnnnnnnnnnnnnnnnnnnnnnnnnnnnnnnnnnnnnnnnnnnnnnnnnnnnnnnnnnnnnnnnnnnnnnnnnnnnnnnnnnnnnnnnnnnnnnnnnnnnnnnnnnnnnnnnnnnnnnnnnnnnnnnnnnnnnnnnnnnnnnnnnncctacaaaaaaaaagtctctctgagggcattagaccatagatgatgaagaacttcccatctctagatgggagcctctcccrtatctatctctacagctacaatatccctgcattttcccaccttctggctctaaatctgagcacaacacaattatttactgcggaagaactgtcttcattctgaactggcagggagatcagagttggtctctccatcccaacagcagcaatagcaatggcagtagcaatactaatagtagtgataaaaagaataagaacaagaattaaagtaagaacattataatcataattcaggttggatattatgaaaaaattatgaaagagtggtgatgcagtggcacaggctgctcagggaggtg

SEQ ID NO: 75454 - DNA, 600 bp, Chicken  19866894359237_1
tcttagctatcatcttcaggaggtcctcatgaattgtgtacaaaaacaaataaaaaaaatccaccgaaaccccaaaacaaaatgcagtgcaaaaaatgaattgtgctgtgagagtaagtagaatcagagtataaagtggagaagaaaaagaaaaattgtttatgtgccttatttcacattaataattgatgaagactgcaaacaaattggttttgttaactttttttttttaatttgatctataatttatggtttcaaaaatacaaaacactaaagacactgggtttctttttgtttggytgctttttttaagcatcctgcaatactccttcagtggtttatgttggcagattgcgtttattgttatgattagaggtatgaacagctgcctagtttagaagtcatgtatgaagaaaacaaatgggataatcgggaaaatctgaaatgccttttcttttttacactccccttttcaaaactggaatcaaaattagaggaaacatttatgctgtagaatgacctgtaaatacttggtcatgtgatatcatttgatttgttttcatttaactatcgaaatataagagttccagatcagaagag

SEQ ID NO: 75455 - DNA, 600 bp, Chicken  19866894359240_1
agactgatggagatgagcagagtatttggggaaacagtgttctgccctccccctgttcttatcctcctccctaggcacatgttgtgaccacagataggatactagagagggtgaagccatcccactccctactgctgcccatacagaacaacattacgctgctgccgacctcctgacttttccaagcagggcatccctgagtcaagcagctccaaaagcaaacctggcttggtggtaacgcaggaaagacaatgcacactgcatttctttgcactgcacagctttccctgagggctgctygggttgcagcacggcgcatatggacatgcatgatggctccttccaacccaactcaatctgtgatgctctgatcctatgatccatatgccatgatgctgactttatgattccatgagtctaggattctgtgatgccttgatcctgtgatttcagtcccctcctatgagtgaacacagctgcctccacactcacaattcatgttgcactgtttggcaaaggattcataggcacaactgcaaatggagagcttatgaataacccagtatcaattacactgtgcaagcattataaagacctgcg

SEQ ID NO: 75456 - DNA, 599 bp, Chicken  19866894359248_1
  misc_feature (1)..(169): n is any nucleotide
nnnnnnnnnnnnnnnnnnnnnnnnnnnnnnnnnnnnnnnnnnnnnnnnnnnnnnnnnnnnnnnnnnnnnnnnnnnnnnnnnnnnnnnnnnnnnnnnnnnnnnnnnnnnnnnnnnnnnnnnnnnnnnnnnnnnnnnnnnnnnnnnnnnnnnnnnnnnnnnnnnnnnnnnntattaggctggagggaaggtttcccctggagttctgcagatcatttttgggtgtcttcaaataattgtattttctgtggttgccatgcaccgaggtaagaatgtactaattaaaaagaaaatgaccaaaaygtaatagagggaacactgaagtgctttgagtaataaaaagatgaagtcggtgcaaagtcccrctcgtaraggcagcaggcagaaattatgtgctaaatgggaaaaagagactttccgastagaaatgcaagaggtggtggaaggatggggctgcctgcaggtgtgacacactgctcatccagggcaggagcagaaagcagcggtgcatgctgtgtgtgtcggtgcccatttgccttgtggttgcagcagctggccgtctcatggtcctggaggtaagaaatccttggaaactgagagaa

SEQ ID NO: 75457 - DNA, 599 bp, Chicken  19866894359248_2
  misc_feature (1)..(107): n is any nucleotide
nnnnnnnnnnnnnnnnnnnnnnnnnnnnnnnnnnnnnnnnnnnnnnnnnnnnnnnnnnnnnnnnnnnnnnnnnnnnnnnnnnnnnnnnnnnnnnnnnnnnnnnnnnntattaggctggagggaaggtttcccctggagttctgcagatcatttttgggtgtcttcaaataattgtattttctgtggttgccatgcaccgaggtaagaatgtactaattaaaaagaaaatgaccaaaaygtaatagagggaacactgaagtgctttgagtaataaaaagatgaagtcggtgcaaagtcccrctcgtaraggcagcaggcagaaattatgtgctaaatgggaaaaagagactttccgastagaaatgcaagaggtggtggaaggatggggctgcctgcaggtgtgacacactgctcatccagggcaggagcagaaagcagcggtgcatgctgtgtgtgtcggtgcccatttgccttgtggttgcagcagctggccgtctcatggtcctggaggtaagaaatccttggaaactgagagaaatgtgttgttttcgtccactgtggtgcatttgcagtgatacggtgacagcccccagcgtacy

SEQ ID NO: 75458 - DNA, 599 bp, Chicken  19866894359248_3
  misc_feature (1)..(100): n is any nucleotide
nnnnnnnnnnnnnnnnnnnnnnnnnnnnnnnnnnnnnnnnnnnnnnnnnnnnnnnnnnnnnnnnnnnnnnnnnnnnnnnnnnnnnnnnnnnnnnnnnnnntattaggctggagggaaggtttcccctggagttctgcagatcatttttgggtgtcttcaaataattgtattttctgtggttgccatgcaccgaggtaagaatgtactaattaaaaagaaaatgaccaaaaygtaatagagggaacactgaagtgctttgagtaataaaaagatgaagtcggtgcaaagtcccrctcgtaraggcagcaggcagaaattatgtgctaaatgggaaaaagagactttccgastagaaatgcaagaggtggtggaaggatggggctgcctgcaggtgtgacacactgctcatccagggcaggagcagaaagcagcggtgcatgctgtgtgtgtcggtgcccatttgccttgtggttgcagcagctggccgtctcatggtcctggaggtaagaaatccttggaaactgagagaaatgtgttgttttcgtccactgtggtgcatttgcagtgatacggtgacagcccccagcgtacygccactg

SEQ ID NO: 75459 - DNA, 599 bp, Chicken  19866894359248_4
  misc_feature (1)..(50): n is any nucleotide
nnnnnnnnnnnnnnnnnnnnnnnnnnnnnnnnnnnnnnnnnnnnnnnnnntattaggctggagggaaggtttcccctggagttctgcagatcatttttgggtgtcttcaaataattgtattttctgtggttgccatgcaccgaggtaagaatgtactaattaaaaagaaaatgaccaaaaygtaatagagggaacactgaagtgctttgagtaataaaaagatgaagtcggtgcaaagtcccrctcgtaraggcagcaggcagaaattatgtgctaaatgggaaaaagagactttccgastagaaatgcaagaggtggtggaaggatggggctgcctgcaggtgtgacacactgctcatccagggcaggagcagaaagcagcggtgcatgctgtgtgtgtcggtgcccatttgccttgtggttgcagcagctggccgtctcatggtcctggaggtaagaaatccttggaaactgagagaaatgtgttgttttcgtccactgtggtgcatttgcagtgatacggtgacagcccccagcgtacygccactgtcaccagcagtgagcgggttgatgttacagcggttaatgatgtgcacagt

SEQ ID NO: 75460 - DNA, 600 bp, Chicken  19866894359248_5
rctcgtaraggcagcaggcagaaattatgtgctaaatgggaaaaagagactttccgastagaaatgcaagaggtggtggaaggatggggctgcctgcaggtgtgacacactgctcatccagggcaggagcagaaagcagcggtgcatgctgtgtgtgtcggtgcccatttgccttgtggttgcagcagctggccgtctcatggtcctggaggtaagaaatccttggaaactgagagaaatgtgttgttttcgtccactgtggtgcatttgcagtgatacggtgacagcccccagcgtacygccactgtcaccagcagtgagcgggttgatgttacagcggttaatgatgtgcacagtggtggctgatggtgggcattacggtggttgagcagcacggtgttctgtagctgtcccctgtgctgcttccacagcagtggattctgctgtactggtgtggcatcagctgcgctcctcacgagctgctgggtaaagaatggtctttacacatttcaaatcgcagacttaatgtaacgctgtgctaatcagttgcagtgcccttgttggccaaaggcacttcatgataatgcagccatcctgagc

SEQ ID NO: 75461 - DNA, 599 bp, Chicken  19866894359251_1
  misc_feature (1)..(126): n is any nucleotide
nnnnnnnnnnnnnnnnnnnnnnnnnnnnnnnnnnnnnnnnnnnnnnnnnnnnnnnnnnnnnnnnnnnnnnnnnnnnnnnnnnnnnnnnnnnnnnnnnnnnnnnnnnnnnnnnnnnnnnnnnnnnnnccactgctccatcccacccaaacactcgcttagtcacgtcttccacaggatgagcaagcagcctccagaagccacattccccaaaaggaaagtggtctcacatcaagtatgtcatataataggtacatttttaatgaggatcagggctataaagctgaaaagatgagattcaastatttaaattgctgagactgtcttctttagaacaggaagaggaaagtgattctctcctgttctcatagacagcaggggaaatgttgagttttgtgatgtacagtccacgtctcaraagaaaattagcaatgttcagatgaatttcatgtaccagatttgagccaggatggcagtaaaagcccgagcaaaacatttgctgtacttttccatcaagaatctcaggagaatagttaccagacaaagtaagttcttaagtcctcagaatcckaagatgtactttyttacacatcaaatcaggt

SEQ ID NO: 75462 - DNA, 599 bp, Chicken  19866894359251_2
  misc_feature (1)..(11): n is any nucleotide
nnnnnnnnnnnccactgctccatcccacccaaacactcgcttagtcacgtcttccacaggatgagcaagcagcctccagaagccacattccccaaaaggaaagtggtctcacatcaagtatgtcatataataggtacatttttaatgaggatcagggctataaagctgaaaagatgagattcaastatttaaattgctgagactgtcttctttagaacaggaagaggaaagtgattctctcctgttctcatagacagcaggggaaatgttgagttttgtgatgtacagtccacgtctcaraagaaaattagcaatgttcagatgaatttcatgtaccagatttgagccaggatggcagtaaaagcccgagcaaaacatttgctgtacttttccatcaagaatctcaggagaatagttaccagacaaagtaagttcttaagtcctcagaatcckaagatgtactttyttacacatcaaatcaggttgagwgttctcactaggaacctgtcctgccgtcttaattgtgtgagtaaggtattttcatgtttaagccataggtttttgaagctctgtttgaytcttcccaccttgttatgtca

SEQ ID NO: 75463 - DNA, 600 bp, Chicken  19866894359251_3
agggctataaagctgaaaagatgagattcaastatttaaattgctgagactgtcttctttagaacaggaagaggaaagtgattctctcctgttctcatagacagcaggggaaatgttgagttttgtgatgtacagtccacgtctcaraagaaaattagcaatgttcagatgaatttcatgtaccagatttgagccaggatggcagtaaaagcccgagcaaaacatttgctgtacttttccatcaagaatctcaggagaatagttaccagacaaagtaagttcttaagtcctcagaatcckaagatgtactttyttacacatcaaatcaggttgagwgttctcactaggaacctgtcctgccgtcttaattgtgtgagtaaggtattttcatgtttaagccataggtttttgaagctctgtttgaytcttcccaccttgttatgtcacaggagaggagagttttggtgttgggttttcccctgccctgacagtgtgtggttcgtgtgggatcggtattcatcctgtcccactgcctgcttctctgcccacagcttgtctacttccttcccatgtctgttgggccagtcattaaatgtaagt

SEQ ID NO: 75464 - DNA, 600 bp, Chicken  19866894359251_4
tgaaaagatgagattcaastatttaaattgctgagactgtcttctttagaacaggaagaggaaagtgattctctcctgttctcatagacagcaggggaaatgttgagttttgtgatgtacagtccacgtctcaraagaaaattagcaatgttcagatgaatttcatgtaccagatttgagccaggatggcagtaaaagcccgagcaaaacatttgctgtacttttccatcaagaatctcaggagaatagttaccagacaaagtaagttcttaagtcctcagaatcckaagatgtactttyttacacatcaaatcaggttgagwgttctcactaggaacctgtcctgccgtcttaattgtgtgagtaaggtattttcatgtttaagccataggtttttgaagctctgtttgaytcttcccaccttgttatgtcacaggagaggagagttttggtgttgggttttcccctgccctgacagtgtgtggttcgtgtgggatcggtattcatcctgtcccactgcctgcttctctgcccacagcttgtctacttccttcccatgtctgttgggccagtcattaaatgtaagtagtgaattccaaa

SEQ ID NO: 75465 - DNA, 600 bp, Chicken  19866894359251_5
taaattgctgagactgtcttctttagaacaggaagaggaaagtgattctctcctgttctcatagacagcaggggaaatgttgagttttgtgatgtacagtccacgtctcaraagaaaattagcaatgttcagatgaatttcatgtaccagatttgagccaggatggcagtaaaagcccgagcaaaacatttgctgtacttttccatcaagaatctcaggagaatagttaccagacaaagtaagttcttaagtcctcagaatcckaagatgtactttyttacacatcaaatcaggttgagwgttctcactaggaacctgtcctgccgtcttaattgtgtgagtaaggtattttcatgtttaagccataggtttttgaagctctgtttgaytcttcccaccttgttatgtcacaggagaggagagttttggtgttgggttttcccctgccctgacagtgtgtggttcgtgtgggatcggtattcatcctgtcccactgcctgcttctctgcccacagcttgtctacttccttcccatgtctgttgggccagtcattaaatgtaagtagtgaattccaaatgttgaaagctgttagtgataag

SEQ ID NO: 75466 - DNA, 600 bp, Chicken  19866894359251_6
tgatgtacagtccacgtctcaraagaaaattagcaatgttcagatgaatttcatgtaccagatttgagccaggatggcagtaaaagcccgagcaaaacatttgctgtacttttccatcaagaatctcaggagaatagttaccagacaaagtaagttcttaagtcctcagaatcckaagatgtactttyttacacatcaaatcaggttgagwgttctcactaggaacctgtcctgccgtcttaattgtgtgagtaaggtattttcatgtttaagccataggtttttgaagctctgtttgaytcttcccaccttgttatgtcacaggagaggagagttttggtgttgggttttcccctgccctgacagtgtgtggttcgtgtgggatcggtattcatcctgtcccactgcctgcttctctgcccacagcttgtctacttccttcccatgtctgttgggccagtcattaaatgtaagtagtgaattccaaatgttgaaagctgttagtgataagcatattgattgataaattgattcttgagaggagcagctgaaatctggggtcctctcccgtagagctgaggtcagataacacatcctcag

SEQ ID NO: 75467 - DNA, 600 bp, Chicken  19866894359257_1
gagacactgagagtgggtcacttctgctggtgtagattttgatgaatgcagcatgcagactcttgttcatagctggctaaaatgcatagctaatggtggtgcatatgttgaagaatagtgttttgtagctgagaattttctctatcaaatagtattatagtgctctttgaatttgttgtattttcaattgatacaaataagagtcatcactttcaaagtgttctatttacttcccttatgctgagctacaatgagtgtgcgtagcctggtgcaggacaagatgtagggttatggccccawctgcaagttccttccacaagtacaagaactctttgtgaacctttgcaaaagcccagaagagattgtttgcatgcttcctatgaaaygtactggtgacaaccagtcttcatatgtcagctaatgggaatctgcattactaacctttattttctgtaagggctttattattcatgtcaatccaagcattagtcttttctctgtataaatagaaacaatacatctgtattgtctacacccctrgaaacatcctctgagcagaatttagaaattcagattacacaaaaatgcatcatgctaaga

SEQ ID NO: 75468 - DNA, 600 bp, Chicken  19866894359257_2
tagctaatggtggtgcatatgttgaagaatagtgttttgtagctgagaattttctctatcaaatagtattatagtgctctttgaatttgttgtattttcaattgatacaaataagagtcatcactttcaaagtgttctatttacttcccttatgctgagctacaatgagtgtgcgtagcctggtgcaggacaagatgtagggttatggccccawctgcaagttccttccacaagtacaagaactctttgtgaacctttgcaaaagcccagaagagattgtttgcatgcttcctatgaaaygtactggtgacaaccagtcttcatatgtcagctaatgggaatctgcattactaacctttattttctgtaagggctttattattcatgtcaatccaagcattagtcttttctctgtataaatagaaacaatacatctgtattgtctacacccctrgaaacatcctctgagcagaatttagaaattcagattacacaaaaatgcatcatgctaagaagtaagcctatggctagcatccttcaatggcttggactttctgagacataaagttcagtgacaatagaatacaacattgtaacatt

SEQ ID NO: 75469 - DNA, 529 bp, Chicken  19866894359257_3
ctgagctacaatgagtgtgcgtagcctggtgcaggacaagatgtagggttatggccccawctgcaagttccttccacaagtacaagaactctttgtgaacctttgcaaaagcccagaagagattgtttgcatgcttcctatgaaaygtactggtgacaaccagtcttcatatgtcagctaatgggaatctgcattactaacctttattttctgtaagggctttattattcatgtcaatccaagcattagtcttttctctgtataaatagaaacaatacatctgtattgtctacacccctrgaaacatcctctgagcagaatttagaaattcagattacacaaaaatgcatcatgctaagaagtaagcctatggctagcatccttcaatggcttggactttctgagacataaagttcagtgacaatagaatacaacattgtaacatttcgcagtttgtttgtggtgttacagttaataaaataaactaggcatacaaagagagctttgctataggaatactttattatta

SEQ ID NO: 75470 - DNA, 600 bp, Chicken  19866894359260_1
catctttggcctcttcaatgcctgcctggaccccatcacctatgggctcttcaccatccccttccggaggcgctgcggctgtccctgtgggcacagccctgagcctgagccaccctccccagccacgggttccttccactgttcagcctcatccctgcggggcaggcagggtatggggggcacagaggggccacacccacctatcgagctggggctgcccactggggctggctcctgccagagcagtgcgctgtgagccagggcagcctgatgccacgaggatggcactctgtgagcagkaagggcacagcagcgagggcagatggtggggggtctgctccacaatgcctctataagtggtagagcagagctgcttctacagccaggtgggtgtgagccacccctcttcactctctgcacccatttatgttacatgctggagcacaacgcagcaataaagcatcctgtggctatctcgtgtgctgcctgcatccctggatgtgggctgcactggggctgaggatgggtcatgtagggaccctggctgttgtccccaaggccagggtggtgctgccatccccgcagtgctgctgggggctg

SEQ ID NO: 75471 - DNA, 600 bp, Chicken  19866894359263_1
ttagtatagagaaaaacaagcaatagccagatctgagcaatcatgataaaatactatatatacagatgctttcttctgcttccagatttatttgttagctacatctttttccaccaatgaggaactaaacactgatctaatatgcactacagatgccttgatttaacttataacccacattcacaccagccagctcagatgatgttacctctaagtccaacttttttttcccctcactaccactgtaggtcatgaccaagctgcttcttctcccctcttttcctctaagcgttctaagamaacctatggatatttttattttaacaagcatcttattttccattgtttctgtaatcaatattatatgagaaatgacaaaaagacaattttgttcacataaaaaaaaaagcatcttttctaaacaggattaacgagatgctcgaacaaatagcatccttgataaaaataagaaatatcatacctactctgcaatctcctaggaataccaccttcctgaacttaacatctgaactacatgcagatacgcagaagaactgtttttgtaaaagcttgaatcacaactaaagaaatttactataa

SEQ ID NO: 75472 - DNA, 600 bp, Chicken  19866894359263_2
ttatatgagaaatgacaaaaagacaattttgttcacataaaaaaaaaagcatcttttctaaacaggattaacgagatgctcgaacaaatagcatccttgataaaaataagaaatatcatacctactctgcaatctcctaggaataccaccttcctgaacttaacatctgaactacatgcagatacgcagaagaactgtttttgtaaaagcttgaatcacaactaaagaaatttactataaattctgaaagccagattattaaagagttcagacaacaaagcattcagaacagtagtttcrgtgcacttagtattaccaccagatgtttgcactacactgatggaattactaagcatgggatgcacggagcaagagaacactgcagagacagacaagtttattttaggacagagtaggactaaaccaaagtatgtttaacatttgccagcaattatcttcatctaaggagaaagaactgaagctgagaaattttactttaacctcacactatgaaaaattaaaactcctcgtagctgacctaggacraattgtcattcagakataatagagaataaaattcctttttctgctactgtattt

SEQ ID NO: 75473 - DNA, 600 bp, Chicken  19866894359263_3
aaagccagattattaaagagttcagacaacaaagcattcagaacagtagtttcrgtgcacttagtattaccaccagatgtttgcactacactgatggaattactaagcatgggatgcacggagcaagagaacactgcagagacagacaagtttattttaggacagagtaggactaaaccaaagtatgtttaacatttgccagcaattatcttcatctaaggagaaagaactgaagctgagaaattttactttaacctcacactatgaaaaattaaaactcctcgtagctgacctaggacraattgtcattcagakataatagagaataaaattcctttttctgctactgtatttttctttcctaggagggaaatcttcatctttacataatggcaatcttgcacaagcatctaaaaatgcaacctcaattttcagatgcacagctgacagacaacatagaatatcaagtaaatatcaatcactgtaatagtttacatatgcataatattaagaagtatgctgttgtactactgtttttaaaactttcatcaaaagcaaataaactagcctgaagaagatcaggacacagtacttttacat

SEQ ID NO: 75474 - DNA, 600 bp, Chicken  19866894359263_4
aagagttcagacaacaaagcattcagaacagtagtttcrgtgcacttagtattaccaccagatgtttgcactacactgatggaattactaagcatgggatgcacggagcaagagaacactgcagagacagacaagtttattttaggacagagtaggactaaaccaaagtatgtttaacatttgccagcaattatcttcatctaaggagaaagaactgaagctgagaaattttactttaacctcacactatgaaaaattaaaactcctcgtagctgacctaggacraattgtcattcagakataatagagaataaaattcctttttctgctactgtatttttctttcctaggagggaaatcttcatctttacataatggcaatcttgcacaagcatctaaaaatgcaacctcaattttcagatgcacagctgacagacaacatagaatatcaagtaaatatcaatcactgtaatagtttacatatgcataatattaagaagtatgctgttgtactactgtttttaaaactttcatcaaaagcaaataaactagcctgaagaagatcaggacacagtacttttacatttgccttctgccata

SEQ ID NO: 75475 - DNA, 600 bp, Chicken  19866894359263_5
tgctactgtatttttctttcctaggagggaaatcttcatctttacataatggcaatcttgcacaagcatctaaaaatgcaacctcaattttcagatgcacagctgacagacaacatagaatatcaagtaaatatcaatcactgtaatagtttacatatgcataatattaagaagtatgctgttgtactactgtttttaaaactttcatcaaaagcaaataaactagcctgaagaagatcaggacacagtacttttacatttgccttctgccatagaagtcaagaaaaaactttacaacamagggccaggagatttttctgccatacagattttgaaactattgtatctagtaaatgaaacaaaaaataattgcaggaatctctaaatatttcacatatgttgatacattttgcaacagtttaactaaaaatccacagcaagccttcacagcaaaggtgcaattacttatttaaggaatcatcttgcacttttcaacattatcacttcagccagctgtattaagcagataacataccctcaaatctttcacttcttcttgctgtttcagtttttcataaaatgatgtgaaaaaatcacttc

SEQ ID NO: 75476 - DNA, 600 bp, Chicken  19866894359284_1
gatttagcactggaagtaggaaaacatgaactactacatctgagtctcgctaacagaaactgtcgtctgttatgaaacataagctatagatgtttcttctgtgtatatcagttttcttgcattttttttttttaatcattttcttcactgtagggctgatgagtttggtgagttttttgttaatgctcaaattattacagagcaagaagaagtattttggtaatatccataaccatactgtctgttttacatagtcaactagagatgcattttcattgctatgcttttcattattttcarcttggttagaaattatttacatttcttttttcctaagtgaaattkccagctcccacagaagagatccttctctaggtataaacactcagctgtggttgcgctggtaggagagaaaaggcaaaatgtaccactgaattcaaatgacgtaattcagcctctgagctctgttgctcttgctaagctgctcaggatgacccacagcaattcacaaaattaacagagcccctcaagagaattgtgcccttagattaaagcacaacttccttgcattacagtctttattgacctaagattctaagt

SEQ ID NO: 75477 - DNA, 600 bp, Chicken  19866894359284_2
ctcgctaacagaaactgtcgtctgttatgaaacataagctatagatgtttcttctgtgtatatcagttttcttgcattttttttttttaatcattttcttcactgtagggctgatgagtttggtgagttttttgttaatgctcaaattattacagagcaagaagaagtattttggtaatatccataaccatactgtctgttttacatagtcaactagagatgcattttcattgctatgcttttcattattttcarcttggttagaaattatttacatttcttttttcctaagtgaaattkccagctcccacagaagagatccttctctaggtataaacactcagctgtggttgcgctggtaggagagaaaaggcaaaatgtaccactgaattcaaatgacgtaattcagcctctgagctctgttgctcttgctaagctgctcaggatgacccacagcaattcacaaaattaacagagcccctcaagagaattgtgcccttagattaaagcacaacttccttgcattacagtctttattgacctaagattctaagttttctattgcagcttaatagcagaagtccacagaacttcttttaa

SEQ ID NO: 75478 - DNA, 600 bp, Chicken  19866894359286_1
tttttctccctctggagacaaacaaagttgttgttttttgttttgttttggtttttttttcccccacaatagatgcagaaaaactgcattttgttccctctctattatctgggctttctatctgctgttaggactgtttatcagatctaatggccgttctttttctctgcacaacaggaacgctgctgtactctgagcagttgcacagcccagcagagatcctgctcccagagctgtgcccgcacagagactgctgctgtctcagctcatttacccccctcttgttgtccagaccccttyytacagcactgatacaaccaggtctaaaaaccttccctttttgcccccaaattgatattacatatagctgattgcacattcggaagcaaaattcagattcatctccctgtcctatttaagcctctgaacaggatgccccgagagctgtgggtgccccatccttggggtgctcaaggccaggctggacaggccctgagcagcctgagctggtgggcacagccagccyatggcatggrttggggctgggtgggctctaaggtctcctccaacctcagccattccatgtgtctatgattccat

SEQ ID NO: 75479 - DNA, 600 bp, Chicken  19866894359286_2
ttttctccctctggagacaaacaaagttgttgttttttgttttgttttggtttttttttcccccacaatagatgcagaaaaactgcattttgttccctctctattatctgggctttctatctgctgttaggactgtttatcagatctaatggccgttctttttctctgcacaacaggaacgctgctgtactctgagcagttgcacagcccagcagagatcctgctcccagagctgtgcccgcacagagactgctgctgtctcagctcatttacccccctcttgttgtccagaccccttyytacagcactgatacaaccaggtctaaaaaccttccctttttgcccccaaattgatattacatatagctgattgcacattcggaagcaaaattcagattcatctccctgtcctatttaagcctctgaacaggatgccccgagagctgtgggtgccccatccttggggtgctcaaggccaggctggacaggccctgagcagcctgagctggtgggcacagccagccyatggcatggrttggggctgggtgggctctaaggtctcctccaacctcagccattccatgtgtctatgattccatg

SEQ ID NO: 75480 - DNA, 600 bp, Chicken  19866894359286_3
cccagagctgtgcccgcacagagactgctgctgtctcagctcatttacccccctcttgttgtccagaccccttyytacagcactgatacaaccaggtctaaaaaccttccctttttgcccccaaattgatattacatatagctgattgcacattcggaagcaaaattcagattcatctccctgtcctatttaagcctctgaacaggatgccccgagagctgtgggtgccccatccttggggtgctcaaggccaggctggacaggccctgagcagcctgagctggtgggcacagccagccyatggcatggrttggggctgggtgggctctaaggtctcctccaacctcagccattccatgtgtctatgattccatgacctgcagtgaggcctgcagcaggcccagccccgcagcgacttgctctgctggcttcaaggacagacggagcaggcgcctgcccacccccaggaaaagcttgggctgctaaaaagcaagttggctaaagtaaaatatttgttctcaatttcctgttaaaattggcaggaacaatgatttttttttcccccttgcagtattttattaggagatagggagttaatgg

SEQ ID NO: 75481 - DNA, 600 bp, Chicken  19866894359286_4
tgcccgcacagagactgctgctgtctcagctcatttacccccctcttgttgtccagaccccttyytacagcactgatacaaccaggtctaaaaaccttccctttttgcccccaaattgatattacatatagctgattgcacattcggaagcaaaattcagattcatctccctgtcctatttaagcctctgaacaggatgccccgagagctgtgggtgccccatccttggggtgctcaaggccaggctggacaggccctgagcagcctgagctggtgggcacagccagccyatggcatggrttggggctgggtgggctctaaggtctcctccaacctcagccattccatgtgtctatgattccatgacctgcagtgaggcctgcagcaggcccagccccgcagcgacttgctctgctggcttcaaggacagacggagcaggcgcctgcccacccccaggaaaagcttgggctgctaaaaagcaagttggctaaagtaaaatatttgttctcaatttcctgttaaaattggcaggaacaatgatttttttttcccccttgcagtattttattaggagatagggagttaatgggaaagcccag

SEQ ID NO: 75482 - DNA, 600 bp, Chicken  19866894359289_1
tagtgatcaaaagccaaactttcacaatatttttttatcagtcactcttaaagactaaaatacatgataaatatatacaaacttcttaattatcaagtctcttaggaagaattactttgtacaatcagccactccactgggggcctgcaccttataatgcactttcttgccactgatgctcatgttgtgctgaactaggcctttctccccaagctgtgtattaccctgcaggaagagcctacagcctgggaactgggtagctttttcagtgcaacattgagcccaggctgatatgtcctscttctcatgaatcttatcttctcagtgaagcttactagctcaggcacagagctgtgtttaagtaatgttgttctagaggtagctgtgccagcccagtgtgcactgtagataggactgctgctgctgagggggaggtcagatgaattacacagcgwtacatatttggaatctgagatactgtctcctccttgccaaatttctattctgagtaaaggctgtgtgtctattctagataacttggaggtctgcaaataaaaatgtagttgttttatatatcctataagaagttagcaaaataat

SEQ ID NO: 75483 - DNA, 569 bp, Chicken  19866894359289_2
aatgcactttcttgccactgatgctcatgttgtgctgaactaggcctttctccccaagctgtgtattaccctgcaggaagagcctacagcctgggaactgggtagctttttcagtgcaacattgagcccaggctgatatgtcctscttctcatgaatcttatcttctcagtgaagcttactagctcaggcacagagctgtgtttaagtaatgttgttctagaggtagctgtgccagcccagtgtgcactgtagataggactgctgctgctgagggggaggtcagatgaattacacagcgwtacatatttggaatctgagatactgtctcctccttgccaaatttctattctgagtaaaggctgtgtgtctattctagataacttggaggtctgcaaataaaaatgtagttgttttatatatcctataagaagttagcaaaataattctgcaaaattacttggctttgcatgcaaaacttgaacatatttgcatgtgagaatttattaagtagtaagtcactctgaaatacattactttctactgatgaatgatcctttcttctactaat

SEQ ID NO: 75484 - DNA, 600 bp, Chicken  19866894359297_1
gtcttttaatgttggtagacgtgattcagaccaaatgttgctctttccacgaattacagagatttcaaaactctctactgttgttctcaggtcagcatagtgtatctcaaaagcagtactttaagaggtcacctaaagacacatcagccaaagggatatttactgtattttgttttgtgctgattaaaataatgcattgataaagagctgcagtttaaaaattcttctttcctggaaaatgcattaagctcatcctgaccttcactgacctgtgtaatgagaagcgaactataagtctcycactgtttcaaagctgttgtgcttcattgtaaagacaattgctttrtgtgctttaagagttttaaaagaaatcaaaataattttaactgaattgccacatataagtccagattttaaaactgcatttgcccactttaaacaggatttttttgtgtgccatttacttaacatgctaagatagctaaattgaaaaagatgttttaaagcagatggaagagctgtgtgagtcggcagatcctcttcttccacttcaagctctccacgcaaactcaaagcctatccagtctgcttccaaagtcc

SEQ ID NO: 75485 - DNA, 600 bp, Chicken  19866894359297_2
ccacgaattacagagatttcaaaactctctactgttgttctcaggtcagcatagtgtatctcaaaagcagtactttaagaggtcacctaaagacacatcagccaaagggatatttactgtattttgttttgtgctgattaaaataatgcattgataaagagctgcagtttaaaaattcttctttcctggaaaatgcattaagctcatcctgaccttcactgacctgtgtaatgagaagcgaactataagtctcycactgtttcaaagctgttgtgcttcattgtaaagacaattgctttrtgtgctttaagagttttaaaagaaatcaaaataattttaactgaattgccacatataagtccagattttaaaactgcatttgcccactttaaacaggatttttttgtgtgccatttacttaacatgctaagatagctaaattgaaaaagatgttttaaagcagatggaagagctgtgtgagtcggcagatcctcttcttccacttcaagctctccacgcaaactcaaagcctatccagtctgcttccaaagtccccagctgggaaaataagatcttgaaaataagatgtctcctggtgtt

SEQ ID NO: 75486 - DNA, 600 bp, Chicken  19866894359299_1
tcattctcatccctggagacattcaaggtcaggctggacggggctctgagcaacctgatctagctgtaggtgtccctgttcattgcaggagagttggacccggtcaccctcaagggttccttccagttcaaacaattctatgattctacggtcttttccagtgaagtgaagaactaatgaagaactgctgttctggctaattgtatgtgagcaacacaggagttttaaccagccctgtgatacagagccttgggactctacgaagtcatcttcaggcattactattgtttgaagtgactrtaaagccatgaggacatttggattagataaagggacttctgaaactccctgcattcaggtgataatcaactctctgtgtcagcagacatattctcaagcagtttacttatcctggcaaatcccagtgaggtatcttggctttgaactatgaaattgattattttgatcttttgtctagggactccaaaggacaagaactaattaaacaaccggggagtgagattgacatgcttaaatttttttttttatttttaccattatctaatgggaattttttaattcttgctgaaaaaaataaat

SEQ ID NO: 75487 - DNA, 600 bp, Chicken  19866894359304_1
atatacaaatacagcacctcattttcatgtctcggttactgcagctctactcaccaaacatgttttctttcttctgtgcaggtaatccaggagaccagtggtctgcagtgtgaaggaggcagtgaaggcaaccagtacatcccagactcacagcgtctcaattacccaaaggtacacttgatctctacagataggataaatagcactgtagggatgacattcctaccctgtgccttttagtaacagttctgagtacattaattttgcctgagcagagactgatacaaatgtaatcagccytctgtgctaaaaaggagcgttattggaacaatcttactttcctttgaaatcttgctgcaaatttcccccagaattgtttaaacactkggctcccttctatacaggggaacggctgctgtcttatcccaaagggcagctgtgcttagcaggagttttggaagggatgtaaacccctgaatgacaggactagagaccatctcttgtccatgttaaggtggtgctgccctggtagcagcttgttcymaaaacagtggaaggagaaagaaaccttcatgttggacagccagaatgggcttgttg

SEQ ID NO: 75488 - DNA, 600 bp, Chicken  19866894359304_2
caggagaccagtggtctgcagtgtgaaggaggcagtgaaggcaaccagtacatcccagactcacagcgtctcaattacccaaaggtacacttgatctctacagataggataaatagcactgtagggatgacattcctaccctgtgccttttagtaacagttctgagtacattaattttgcctgagcagagactgatacaaatgtaatcagccytctgtgctaaaaaggagcgttattggaacaatcttactttcctttgaaatcttgctgcaaatttcccccagaattgtttaaacactkggctcccttctatacaggggaacggctgctgtcttatcccaaagggcagctgtgcttagcaggagttttggaagggatgtaaacccctgaatgacaggactagagaccatctcttgtccatgttaaggtggtgctgccctggtagcagcttgttcymaaaacagtggaaggagaaagaaaccttcatgttggacagccagaatgggcttgttggggcatctggccgtttcctctgcccatgtcctcttttaggggcttagaaatgtgtgatctcaaatctgtgacatgtctggtttactg

SEQ ID NO: 75489 - DNA, 592 bp, Chicken  19866894359304_3
cagttctgagtacattaattttgcctgagcagagactgatacaaatgtaatcagccytctgtgctaaaaaggagcgttattggaacaatcttactttcctttgaaatcttgctgcaaatttcccccagaattgtttaaacactkggctcccttctatacaggggaacggctgctgtcttatcccaaagggcagctgtgcttagcaggagttttggaagggatgtaaacccctgaatgacaggactagagaccatctcttgtccatgttaaggtggtgctgccctggtagcagcttgttcymaaaacagtggaaggagaaagaaaccttcatgttggacagccagaatgggcttgttggggcatctggccgtttcctctgcccatgtcctcttttaggggcttagaaatgtgtgatctcaaatctgtgacatgtctggtttactggcatcgtcgaatcctaagctgtaggtttcctacctgaacgttccctgccagaaaagaaattccccggggtgaatgcttactggaagggcaggctgtgtgcgtctgcagagctgatgtcctgtgcttgttggcaggtggacctctccga

SEQ ID NO: 75490 - DNA, 591 bp, Chicken  19866894359304_4
agttctgagtacattaattttgcctgagcagagactgatacaaatgtaatcagccytctgtgctaaaaaggagcgttattggaacaatcttactttcctttgaaatcttgctgcaaatttcccccagaattgtttaaacactkggctcccttctatacaggggaacggctgctgtcttatcccaaagggcagctgtgcttagcaggagttttggaagggatgtaaacccctgaatgacaggactagagaccatctcttgtccatgttaaggtggtgctgccctggtagcagcttgttcymaaaacagtggaaggagaaagaaaccttcatgttggacagccagaatgggcttgttggggcatctggccgtttcctctgcccatgtcctcttttaggggcttagaaatgtgtgatctcaaatctgtgacatgtctggtttactggcatcgtcgaatcctaagctgtaggtttcctacctgaacgttccctgccagaaaagaaattccccggggtgaatgcttactggaagggcaggctgtgtgcgtctgcagagctgatgtcctgtgcttgttggcaggtggacctctccga

SEQ ID NO: 75491 - DNA, 600 bp, Chicken  19866894359314_1
gagagggaaaacataatcacatatggtgacatacacaacaggttagaaagattgttacattaccctcccttccacaactattaccttcacttcatcctctttctcaatgcctactcagcatatttataattaatatttgttaatcagccttccagaattgaagtggattaaaaaagaattaaactggatgctgtaatagcattgaaggaaaccagacggtaaataaatgatttccaaagttaaatctcagcgttgattagttattttgtgtgatcaaggggccatgaaaaattaaccttstataagtggagaacagtagattatcttctgaaagttcttatttaattactatgaaacactggttcattttaaagatatagtgtactccttgtctttctgagccttgagggtatggaatttgcttgttatttgtacctgtacagagtgcttgtatccatgccttgtttcttttttggattcctgtgatcacagaaagtgattatttctatgtgttctcagtatagaagttgtaatggatttgcatctctgtttgggaatattgacatcctacattgccagtcagtgcatagggaccagagg

SEQ ID NO: 75492 - DNA, 600 bp, Chicken  19866894359321_1
tcactgcagagcttcatgcccaatattctgaaaggacactcaaatttttacagagcctggtaattgctgtttcacctgatgtgtgcattcacttgcagcaccgctgctagagaatgacagaatgaatttcaatggcagcagcaccggaggaatacacgtgttttatagaatatgatacttccagagggaacaggtccttgcaaagtgatggcaagcagaaacaatggctagaaaaattccagacctgataaactggtctgctttaacttaattgcctctcttgtgattttcttcaccacrttcccatgctcatattgaaaacaagcctggattttgattggaaacatacaaattttgtagatacaaatatgcgatagaaaagctcagttgaccacctgtattaacaygccaatctcgaaaaygagaattccacaagacattaataagatggatctgccagagccaagagacgtagattaaaataatgttttcttaaggcgtcaggcatttwgaacataaattttacaagctcaagtccaaagacagatccctaaatgagtaaaaaatgaagtatttcaattggatttgtgagaattgtca

SEQ ID NO: 75493 - DNA, 600 bp, Chicken  19866894359321_2
tagagaatgacagaatgaatttcaatggcagcagcaccggaggaatacacgtgttttatagaatatgatacttccagagggaacaggtccttgcaaagtgatggcaagcagaaacaatggctagaaaaattccagacctgataaactggtctgctttaacttaattgcctctcttgtgattttcttcaccacrttcccatgctcatattgaaaacaagcctggattttgattggaaacatacaaattttgtagatacaaatatgcgatagaaaagctcagttgaccacctgtattaacaygccaatctcgaaaaygagaattccacaagacattaataagatggatctgccagagccaagagacgtagattaaaataatgttttcttaaggcgtcaggcatttwgaacataaattttacaagctcaagtccaaagacagatccctaaatgagtaaaaaatgaagtatttcaattggatttgtgagaattgtcaaggttttgattttggcaaatacgtatcttccagaaaatgggacaataacctccaatgctctacacgtttcctcatgtttgacctcagcctgaagcagacccatgtct

SEQ ID NO: 75494 - DNA, 600 bp, Chicken  19866894359321_3
tgaatttcaatggcagcagcaccggaggaatacacgtgttttatagaatatgatacttccagagggaacaggtccttgcaaagtgatggcaagcagaaacaatggctagaaaaattccagacctgataaactggtctgctttaacttaattgcctctcttgtgattttcttcaccacrttcccatgctcatattgaaaacaagcctggattttgattggaaacatacaaattttgtagatacaaatatgcgatagaaaagctcagttgaccacctgtattaacaygccaatctcgaaaaygagaattccacaagacattaataagatggatctgccagagccaagagacgtagattaaaataatgttttcttaaggcgtcaggcatttwgaacataaattttacaagctcaagtccaaagacagatccctaaatgagtaaaaaatgaagtatttcaattggatttgtgagaattgtcaaggttttgattttggcaaatacgtatcttccagaaaatgggacaataacctccaatgctctacacgtttcctcatgtttgacctcagcctgaagcagacccatgtctacattttctcctcag

SEQ ID NO: 75495 - DNA, 544 bp, Chicken  19866894359321_4
caagcagaaacaatggctagaaaaattccagacctgataaactggtctgctttaacttaattgcctctcttgtgattttcttcaccacrttcccatgctcatattgaaaacaagcctggattttgattggaaacatacaaattttgtagatacaaatatgcgatagaaaagctcagttgaccacctgtattaacaygccaatctcgaaaaygagaattccacaagacattaataagatggatctgccagagccaagagacgtagattaaaataatgttttcttaaggcgtcaggcatttwgaacataaattttacaagctcaagtccaaagacagatccctaaatgagtaaaaaatgaagtatttcaattggatttgtgagaattgtcaaggttttgattttggcaaatacgtatcttccagaaaatgggacaataacctccaatgctctacacgtttcctcatgtttgacctcagcctgaagcagacccatgtctacattttctcctcagagcccatacttctaggtacattttagatactca

SEQ ID NO: 75496 - DNA, 599 bp, Chicken  19866894359324_1
  misc_feature (1)..(38): n is any nucleotide
nnnnnnnnnnnnnnnnnnnnnnnnnnnnnnnnnnnnnntttttaaagtgaaggagtagaaacccaccacctcttaatgacatgtttctgttacagtgttgcaatgcatccatcctattttgttggggataagtttttgctaccatgggtgagtgcccaggatctgtgtgaatctccaagttcatctggagctggagctgcagcgttggcaccacagtgctggcacactactctggcatcctaggctctggaatgctcccgatcttttgactgtattcttcatactggcaatgcagaacartgaygtccaagggatgctactgcacttcaccaccaccctgctctcatagctgttgcagttgaggaaggacgtttgcatttgctcccagcacaggcatagccaaggtgaaggtgtgttactgctcttcagactgactgccttgcaattttgtttcaagctaactttcatttttcttagcgctattctgggttggtatctggtgatgaaatcattgcatctcatggcagcaggcacattcacatctggcacattccttggagcgtaacagtaaaagaacaggatgaactcagagagatttg

SEQ ID NO: 75497 - DNA, 599 bp, Chicken  19866894359324_2
  misc_feature (1)..(34): n is any nucleotide
nnnnnnnnnnnnnnnnnnnnnnnnnnnnnnnnnntttttaaagtgaaggagtagaaacccaccacctcttaatgacatgtttctgttacagtgttgcaatgcatccatcctattttgttggggataagtttttgctaccatgggtgagtgcccaggatctgtgtgaatctccaagttcatctggagctggagctgcagcgttggcaccacagtgctggcacactactctggcatcctaggctctggaatgctcccgatcttttgactgtattcttcatactggcaatgcagaacartgaygtccaagggatgctactgcacttcaccaccaccctgctctcatagctgttgcagttgaggaaggacgtttgcatttgctcccagcacaggcatagccaaggtgaaggtgtgttactgctcttcagactgactgccttgcaattttgtttcaagctaactttcatttttcttagcgctattctgggttggtatctggtgatgaaatcattgcatctcatggcagcaggcacattcacatctggcacattccttggagcgtaacagtaaaagaacaggatgaactcagagagatttgcacg

SEQ ID NO: 75498 - DNA, 600 bp, Chicken  19866894359328_1
acctgttggagaaagtccagagggtgccacaaaaatgacccaagggatggaacactttgcctacgagaacaggctgagagagctggggctgttcagcctgaagaagaaaaggctctggggagacctgatagtagccttccaatatgtaaagggggatttgaagaaagaaggggacaaactctttagcagggtctgctgtgataggacaaggggaaactgtttcaaactaaaggaggagagatttagatgagatataagggaaaagttttttaggataaaattgatgaggcagtggaatgkgttgcccagagatgtgatgcatgccctatccctggagacattcaaggtcaggctggatgaggctctgaagaatctaatctagatgtagatatctctgttcattacaggggtgttggactaggtggmctttaaaggtctatttcaactcaaatgattctgtgattctacttcctacccaaattatgtgatattagctagaaaatgataaaaaaaaaaaatactggagagaatgattccagtgtctcagtaagctaaaatttggacttgcattcagtcctgctgcttagaatcccaygaagg

SEQ ID NO: 75499 - DNA, 600 bp, Chicken  19866894359328_2
gatagtagccttccaatatgtaaagggggatttgaagaaagaaggggacaaactctttagcagggtctgctgtgataggacaaggggaaactgtttcaaactaaaggaggagagatttagatgagatataagggaaaagttttttaggataaaattgatgaggcagtggaatgkgttgcccagagatgtgatgcatgccctatccctggagacattcaaggtcaggctggatgaggctctgaagaatctaatctagatgtagatatctctgttcattacaggggtgttggactaggtggmctttaaaggtctatttcaactcaaatgattctgtgattctacttcctacccaaattatgtgatattagctagaaaatgataaaaaaaaaaaatactggagagaatgattccagtgtctcagtaagctaaaatttggacttgcattcagtcctgctgcttagaatcccaygaaggcaccagtggtgccacacaaacactgtgattaatacttagagagccgtggtttccagcagtgatcatttgcagttcctttccacaagtcacagcaggacattgttcacatcatgcatagatgtgaga

SEQ ID NO: 75500 - DNA, 600 bp, Chicken  19866894359328_3
aatgkgttgcccagagatgtgatgcatgccctatccctggagacattcaaggtcaggctggatgaggctctgaagaatctaatctagatgtagatatctctgttcattacaggggtgttggactaggtggmctttaaaggtctatttcaactcaaatgattctgtgattctacttcctacccaaattatgtgatattagctagaaaatgataaaaaaaaaaaatactggagagaatgattccagtgtctcagtaagctaaaatttggacttgcattcagtcctgctgcttagaatcccaygaaggcaccagtggtgccacacaaacactgtgattaatacttagagagccgtggtttccagcagtgatcatttgcagttcctttccacaagtcacagcaggacattgttcacatcatgcatagatgtgagaggtggtagttatcctggcatgccctgattgcagcctggctcaggctgcaaggtgggaaacaccaggagatgttttgctgcttgatctcttttaatttgatatattttttcttcccagggaagaagggaaagagagaaaaataaacccatatagctcccatggaaggtgc

SEQ ID NO: 75501 - DNA, 600 bp, Chicken  19866894359329_1
atgatgacaaatccacatgatgcgttctaattattttgcatactatcagatttttatatttaatcaatagttaaaactggcaagatcagcactgtagtggtttcggagcagaactgaggatttcttatgataaacaagtttaaaaaaatttattaaagtacaagctggaaaagaatgtagaggatgctaagtgttcaaagaatatgatatgaaagagcatttatctgatcactttgcttctctctcttccattttatccatatctctactggaagccaagtgtgggttttgttcctcaamataataatagaatatgtgaactaaaatatgtaaacttctgggtcacctgatcagtccatcatgcccaatgttatgcaatcacggtgacagtaaccaaagaagtataaggtaagcacatgagcctggtcacccttcgattcttttcccttccgtctgtccccagtttgctggtgcctcagggatatttgagggcatattcctatttagtattcacgtaaagacttgacgtccacagagtgaaacatatctggaagtcatctgtctccatttgaagacaggattagctatccttgacaaaat

SEQ ID NO: 75502 - DNA, 600 bp, Chicken  19866894359336_1
gatttctgaaggtatgccaagaagggtcagtgccaaacctgtcaattatatacttggttacactattcagataaagctctgtgcgatcttaatctacttacctggacctaacagcaagacagaaacaactacagcccatggctatcaaacgcatgcacggcagttgcagccattatacaagtatgctgcttttgatacttaagctaccaataatattgctaactttgcaagagttccatatcagtttgcaatcttccatatgcagtgtgggcatgctctagtggaaaaagctgttgttgmtttggctcactaggatcagtgctggaaatcttgccttcaaagctatggaagatagtagaacattcagcacagagatgtggactctgttccctatttcttgcatttggtggtgagatttattttcttgatagaaatatccaccctaccactgaagaggtagtgatataaaaatgcgtttaaaagattgcattaaaaaaatattaaaaaacatatataacaatagatttatgaagtgcaacagccctaaacctctctgtcagacgtgaaagatcagatttctaaaatcttaatgtgtttggc

SEQ ID NO: 75503 - DNA, 600 bp, Chicken  19866894359339_1
tagagcaagtagactgttgttttcacctactctaagcagagtactaagacaatgctattgtacataaaatgagtaatatgcttcaagtaactgacatttaccagcatgtcaagttcatcatttttacagtcgtagctgaaattgcatttgctaaattgctcttgtgaagcaggcttttcattctgatggattccctccttctcaaagtataattcgtcttcttgtaaaaacactgatcttaatccttagcctccgttcagattactagatcttccagttttaaggttctttatcttaacrctctctgtggtgacctatctgaccgcattctacttcttgtttcatgctgaggggtgccttacacactgcctactgccrgacataatgtaggtcggaccaaaaattcagtataattctgctttgtaacttagatggtatcattattttgtgaggtaaggttattcactgtaccacagagcagtcttctggtaccaggacctttgaagcaattatggaaatggagaaaaaacattctgtggatttgatgttgcacagagcaggtgctgaaatccttcttgttagaaacatgtaaatgaaaaa

SEQ ID NO: 75504 - DNA, 600 bp, Chicken  19866894359339_2
tgcttcaagtaactgacatttaccagcatgtcaagttcatcatttttacagtcgtagctgaaattgcatttgctaaattgctcttgtgaagcaggcttttcattctgatggattccctccttctcaaagtataattcgtcttcttgtaaaaacactgatcttaatccttagcctccgttcagattactagatcttccagttttaaggttctttatcttaacrctctctgtggtgacctatctgaccgcattctacttcttgtttcatgctgaggggtgccttacacactgcctactgccrgacataatgtaggtcggaccaaaaattcagtataattctgctttgtaacttagatggtatcattattttgtgaggtaaggttattcactgtaccacagagcagtcttctggtaccaggacctttgaagcaattatggaaatggagaaaaaacattctgtggatttgatgttgcacagagcaggtgctgaaatccttcttgttagaaacatgtaaatgaaaaacgatcaagaggaggataaataggagaagatggcgttcctttaacaggcaccgaactgtgttttatctaataaaagatg

SEQ ID NO: 75505 - DNA, 600 bp, Chicken  19866894359342_1
gcaaccacttatgatggggttgagttaggttttcactactaaatactagtggatgaaacacatcaacaaaagatcttttaacaatacaattgtagaaggtcaacacttaagcttaaatttttaccctccatgcttctacagcagcagttacttctcagaatcactcagtactaaagatatctttgaggtatgaaaaactcaagattacaatgattatgtttaagacaagaaagaattacaattgttacatatttgctaagctattgttcaaatattctgatcattttttatcttttcttyagctcctggctcagaagtggccttttggagattctgaatttgggcagtttctttgcaaattccttccctttatacagaaggcatcagtgggaatcacagtccttaatctctgtgcacttagtgtggacaggtatggtatatttcacactctggacagacactgttcttccccttgcagttttcgtgtaactgggagcactctctatattctcagtgcttacgctatagtctacatactgctttttgataccctggctataacaaaagaccacacctgtagttcaaattataataaattat

SEQ ID NO: 75506 - DNA, 600 bp, Chicken  19866894359343_1
atctgtttacaaaaatcaatatttgtacagaagccctttgctgctttctaaaggtgaaagtttcagcctggatgcattgtttctgctgtgttggtgtggctgtcggaacctgagtgagaccaagacaaataaaggcagtttggcccagaaacctcctccctttgtatttttaacctgcatttcctgttttttccccccctcccttgaggtcttacactgcataaggtgctgagaacttctgctggacttaggggtggcttgagaggaccctctgtgctgctggaggagctgcagcggctmcctcatgactgtggcattctaaacatcagggctgtattttggcagtgttggcagttcagtgtcagtggggggtaaaaatatgtaaaaggtcgctcagagttgcatgggattatcttggttgctttggaggagggcagaacagcacagctgtcttttcatctaaggctcacatctcttatcaatcttggttctaggtagcaaattttgtacaaggttttgtattttgttatatttcagtttgagatttttttttcttkatagggttgaaatgcagcctcaccaaaacattaagctttcctg

SEQ ID NO: 75507 - DNA, 600 bp, Chicken  19866894359343_2
cttgagaggaccctctgtgctgctggaggagctgcagcggctmcctcatgactgtggcattctaaacatcagggctgtattttggcagtgttggcagttcagtgtcagtggggggtaaaaatatgtaaaaggtcgctcagagttgcatgggattatcttggttgctttggaggagggcagaacagcacagctgtcttttcatctaaggctcacatctcttatcaatcttggttctaggtagcaaattttgtacaaggttttgtattttgttatatttcagtttgagatttttttttcttkatagggttgaaatgcagcctcaccaaaacattaagctttcctgaacagatcttccaggttaggagctgaaaccaagtctgttatgagacaggatttctcagtcccatcacagcagctgctcctccaactccatcctggcccagcacatggagctcgggctgcccctygggagctgctgtaggcagggctgtgtgacggctgtcacatggagtcctggttgggagagggccccgtgctgagacctgggaaccagttgtggccagatgctgcgtgagtgttatagggtgagtgtttaaacag

SEQ ID NO: 75508 - DNA, 514 bp, Chicken  19866894359343_3
tggaggagggcagaacagcacagctgtcttttcatctaaggctcacatctcttatcaatcttggttctaggtagcaaattttgtacaaggttttgtattttgttatatttcagtttgagatttttttttcttkatagggttgaaatgcagcctcaccaaaacattaagctttcctgaacagatcttccaggttaggagctgaaaccaagtctgttatgagacaggatttctcagtcccatcacagcagctgctcctccaactccatcctggcccagcacatggagctcgggctgcccctygggagctgctgtaggcagggctgtgtgacggctgtcacatggagtcctggttgggagagggccccgtgctgagacctgggaaccagttgtggccagatgctgcgtgagtgttatagggtgagtgtttaaacagcgttttcctttggatggagcattgctatttaattcccaccataacgctccaatgaaattttcatctgctatgatataactg

SEQ ID NO: 75509 - DNA, 545 bp, Chicken  19866894359348_1
  misc_feature (1)..(99): n is any nucleotide
nnnnnnnnnnnnnnnnnnnnnnnnnnnnnnnnnnnnnnnnnnnnnnnnnnnnnnnnnnnnnnnnnnnnnnnnnnnnnnnnnnnnnnnnnnnnnnnnnnnccttccaaaaaaaaaaaaaaaaaaaaaaaaaaaaccaagcaaattctcagtgtttttctcaacaaaacactatttttcaacatagtcaccaccattagctgatttgtgcatgatctgatcatgatgctcttcattttgtaatgtgacaactgtgcatggccatccagaacatggcttgtctttcatattgctgtcgccacwgctgaaatgcattgcccaccatctcactgtgttcacatgcacagtttggtctccattaacattcagcaagtgttaatgtatgtcaatgggtgtcatttttccactggagggaagtcagttgcatacctttgcttcatgcgcgcttccatgtcagatgccattttgtcagactgcctctctgctgccatctgtcacacagcaacaaaatgcaatggaatactggtgggaatgttcagcctctactg

SEQ ID NO: 75510 - DNA, 600 bp, Chicken  19866894359350_1
tgtctgcagtgttttaagtgggcagggtttttccttcaccctggcagctctttgccttatgaaatgtctgcttctgttttttttctttttttatgagagattaatgagaatttccatagaccagtgatgagtgcaagaagtctagcttgtggtagacctgcagctctgctcctagctggggtcaggcagtgccagatgtgcatgggacacggacttcaccactctttcgcaagcctgagaagacttttgagcaatcttttgagggatgagaggatcttgtactggatatttagacttcartttggggtatttatgtcttctgagtcctttagctttgcagaaaacccattcctaatgtgcaaattccaagctatttcagggccagcgcagatggaccagtttaaacrttattctggatttccagagtaaatcccagagctggtatttgcaatcctcattctgataaacaacaaattgtgtgatttgcccacattctgtcctctaggatgtaagttggracatggtctgagggtttcctctgtttgtgcatctaactcagcaaagcttgactgcaagattcaatagagtttgggcacttta

SEQ ID NO: 75511 - DNA, 600 bp, Chicken  19866894359350_2
gaatttccatagaccagtgatgagtgcaagaagtctagcttgtggtagacctgcagctctgctcctagctggggtcaggcagtgccagatgtgcatgggacacggacttcaccactctttcgcaagcctgagaagacttttgagcaatcttttgagggatgagaggatcttgtactggatatttagacttcartttggggtatttatgtcttctgagtcctttagctttgcagaaaacccattcctaatgtgcaaattccaagctatttcagggccagcgcagatggaccagtttaaacrttattctggatttccagagtaaatcccagagctggtatttgcaatcctcattctgataaacaacaaattgtgtgatttgcccacattctgtcctctaggatgtaagttggracatggtctgagggtttcctctgtttgtgcatctaactcagcaaagcttgactgcaagattcaatagagtttgggcactttatttattagtgcctgttacacaagttccagacaggcagtgttacttgactaataccacagacagtacaaccacagtctttcaaaatgtatttgatgtccctaagagag

SEQ ID NO: 75512 - DNA, 600 bp, Chicken  19866894359350_3
ccactctttcgcaagcctgagaagacttttgagcaatcttttgagggatgagaggatcttgtactggatatttagacttcartttggggtatttatgtcttctgagtcctttagctttgcagaaaacccattcctaatgtgcaaattccaagctatttcagggccagcgcagatggaccagtttaaacrttattctggatttccagagtaaatcccagagctggtatttgcaatcctcattctgataaacaacaaattgtgtgatttgcccacattctgtcctctaggatgtaagttggracatggtctgagggtttcctctgtttgtgcatctaactcagcaaagcttgactgcaagattcaatagagtttgggcactttatttattagtgcctgttacacaagttccagacaggcagtgttacttgactaataccacagacagtacaaccacagtctttcaaaatgtatttgatgtccctaagagagctttgtaagctcaatactgtatgcccaggctatgtacagaagttttaatttagaaaggctgctacttgcagttgtgtcaatattactttaaaaagtgtacaggcagaggca

SEQ ID NO: 75513 - DNA, 600 bp, Chicken  19866894359352_1
gttttactctttcaagaagcaaagccaatgcctggcaccaaagggttaactggaaacacggagggctggtggagtcgtgtgaaaagtcgcagggaagtcagtgggaatcggcagagagatggaggagagggctctggcacggagtgctgcctgtcagggcgggtaagcaccgaatgcctgacttgtgatattacacaaactttccacttgggccttcctgctatttttaacttttctcccagccaccctcagtaaccccagcccggcagctgccgagcccaacaaattcccccccccccrttttttttttaaatcattcttttatcagaaaaaaaaaagaacttgtactaatccatcatgcagccactcgcctctcccacagcctcctgacacgtcccaggctttcctcctgcttcacatcacgcctctgcagccatacctggctcactgctagaacccaacacaggagatccagccccactggagaggaaagcctcccttaacagctatctgtgctgtgagcaatgtgtatactgctgcaaacaaacataggcatgcacaaagtaccgcacacagctgcaggtttcgggctatgtcaaa

SEQ ID NO: 75514 - DNA, 600 bp, Chicken  19866894359363_1
ttttgaaaggacaaaattgcctaggtggatttgctcatgcagaaaaaggctctaaaattcaagacagaaagatagaattactcatgggtttgtgatggcattttcaagtaaaaagtgacattttttttactctaagttttgactgggaaagtttgaactctgatttcaagacctaatttctctgttccctttcaaactcacattatatcaatcaggttaatttttatttttgaaatctcatcttttgtggaagtgatgcaaggaggtaaatttttgggttgtgaaaatttgagatttcartttttctttcccattcagtktygtggggaaaaaactttcaaaatcttgaagttctcatgggttgggaaaaacatttcccacacatctccagtcaatgggagtgttaccataaacttcactgggtcttggatcaggccctgagagcatattggagattttgtcagcctcattgattgcacaaaccagccttgttatgaggaaacattcctgggccagacagcgttctgacatttgtctgtagttttcacatttaggagagattattgtctccagagagtcattcttaatgatttaaatctg

SEQ ID NO: 75515 - DNA, 600 bp, Chicken  19866894359363_2
ctaggtggatttgctcatgcagaaaaaggctctaaaattcaagacagaaagatagaattactcatgggtttgtgatggcattttcaagtaaaaagtgacattttttttactctaagttttgactgggaaagtttgaactctgatttcaagacctaatttctctgttccctttcaaactcacattatatcaatcaggttaatttttatttttgaaatctcatcttttgtggaagtgatgcaaggaggtaaatttttgggttgtgaaaatttgagatttcartttttctttcccattcagtktygtggggaaaaaactttcaaaatcttgaagttctcatgggttgggaaaaacatttcccacacatctccagtcaatgggagtgttaccataaacttcactgggtcttggatcaggccctgagagcatattggagattttgtcagcctcattgattgcacaaaccagccttgttatgaggaaacattcctgggccagacagcgttctgacatttgtctgtagttttcacatttaggagagattattgtctccagagagtcattcttaatgatttaaatctgaggtagatcgttttttctgg

SEQ ID NO: 75516 - DNA, 600 bp, Chicken  19866894359363_3
aggtggatttgctcatgcagaaaaaggctctaaaattcaagacagaaagatagaattactcatgggtttgtgatggcattttcaagtaaaaagtgacattttttttactctaagttttgactgggaaagtttgaactctgatttcaagacctaatttctctgttccctttcaaactcacattatatcaatcaggttaatttttatttttgaaatctcatcttttgtggaagtgatgcaaggaggtaaatttttgggttgtgaaaatttgagatttcartttttctttcccattcagtktygtggggaaaaaactttcaaaatcttgaagttctcatgggttgggaaaaacatttcccacacatctccagtcaatgggagtgttaccataaacttcactgggtcttggatcaggccctgagagcatattggagattttgtcagcctcattgattgcacaaaccagccttgttatgaggaaacattcctgggccagacagcgttctgacatttgtctgtagttttcacatttaggagagattattgtctccagagagtcattcttaatgatttaaatctgaggtagatcgttttttctggca

SEQ ID NO: 75517 - DNA, 578 bp, Chicken  19866894359363_4
gattattgtctccagagagtcattcttaatgatttaaatctgaggtagatcgttttttctggcagcgtgtgtgtaatctaatccatatattgttgaaaataattggaatgagcattgagttgctatatggatgtggtcagtttgtattgactgccttgaaacttgctgagtaggtggtataaattataagaggacctggtaaactgaaacaaaaaaaaaaggatattcatagcagggtaatgtggaagtagaaatgctttctactgagattactttgggagcaaacagtctgagctttaraaaatttgctcttgttaattacacgttggataacgttacctagaccatatgaccaagcctatgtaaagttattgtttgtttccttcacaaagcacttgacaatgactttaggcacatcctctgagggaggaatggtgcgtaaactgtaccacccaaggagcagccctgggaggcaggatgactcacagacatgctgttgagacaaaaatccctccctactttcccttggcttttaaggcggtgaaacacaaagattaggctgtttttctaccgtgaca

SEQ ID NO: 75518 - DNA, 600 bp, Chicken  19866894359365_1
taaggaaaggactttggcctgtttgaaattagcatcagcacctcaatgttaatctatcatttttttagcttgtttggtgtattttaatacaaatttaaagtgctaaaaaaaaaaagatattgacagaggaatcagtatgagaaaaactgatctcgtgctagtggatttcatttagactttactatcctgagtccacacagctccgccctgacaagttcatctccttactacacataactgacaaaatagacttcaaaacttacaatgcaaaaaagaggacaaataaataatagttacttmaagtgcttgtgcgttctccttgcaaaggtcatttcaacactgaacacacactaatgaatgagaattaggccagaaagttctcaaattttactgcaagccatttgacaaccatttcrtaagagacagttcaatggaaatacttgcaacagttgcaaagcatgttacaggatgacactcaaggtttgtttctgtgtagcacatcagaagagtatttcctgctttaataagagaaaaatgcaacttcttgtttctaaaaagattgtaccagcacagcttaatacagaagtaccaagtaatatt

SEQ ID NO: 75519 - DNA, 600 bp, Chicken  19866894359365_2
atattgacagaggaatcagtatgagaaaaactgatctcgtgctagtggatttcatttagactttactatcctgagtccacacagctccgccctgacaagttcatctccttactacacataactgacaaaatagacttcaaaacttacaatgcaaaaaagaggacaaataaataatagttacttmaagtgcttgtgcgttctccttgcaaaggtcatttcaacactgaacacacactaatgaatgagaattaggccagaaagttctcaaattttactgcaagccatttgacaaccatttcrtaagagacagttcaatggaaatacttgcaacagttgcaaagcatgttacaggatgacactcaaggtttgtttctgtgtagcacatcagaagagtatttcctgctttaataagagaaaaatgcaacttcttgtttctaaaaagattgtaccagcacagcttaatacagaagtaccaagtaatatttttattctccattttatagcttcatagcatgctcttcaatgctcacagtttaacaacttaaaaaactgaaaataaatacagaggtatttcagaataacatcaaattgatgcatcgg

SEQ ID NO: 75520 - DNA, 600 bp, Chicken  19866894359369_1
gtgtctgtagaggaaatgaaaaaaagactgcagtagtgaaaaggcaaagcaaagatggaatacgttttagtaaaaaaataacatttagatttaatataactttgctgttgtattaattacctgctgcagttaataactgctaactaatcacaacaacaccatcatctatctagaaaaggctataatgtctggtatttggaacacaacctttctgaattgttgcatgcatcttattctgcagaaacgcagagtaacagaggatagctgtcactcactattgattgtgaacagatttgctcrgtacctttcttctaaaattaaaatgytcattctctgtgtaacagtttgtggaaactggttatgcctttgctgaggaatacacaaaataaagtaatactactagtaatttaaaggctgtggttcattttttttgtctgggaaattcctcaaatatcagaggaaaatgttggatgctcaacttgcacatgtctaccaaaaaaaaaagttctcatattctgctaagaaatgtgttcaagattactgctaagatgtgcagcaactatgcccttgaagatgctaagtcaactgcctttgctggat

SEQ ID NO: 75521 - DNA, 600 bp, Chicken  19866894359369_2
actgcagtagtgaaaaggcaaagcaaagatggaatacgttttagtaaaaaaataacatttagatttaatataactttgctgttgtattaattacctgctgcagttaataactgctaactaatcacaacaacaccatcatctatctagaaaaggctataatgtctggtatttggaacacaacctttctgaattgttgcatgcatcttattctgcagaaacgcagagtaacagaggatagctgtcactcactattgattgtgaacagatttgctcrgtacctttcttctaaaattaaaatgytcattctctgtgtaacagtttgtggaaactggttatgcctttgctgaggaatacacaaaataaagtaatactactagtaatttaaaggctgtggttcattttttttgtctgggaaattcctcaaatatcagaggaaaatgttggatgctcaacttgcacatgtctaccaaaaaaaaaagttctcatattctgctaagaaatgtgttcaagattactgctaagatgtgcagcaactatgcccttgaagatgctaagtcaactgcctttgctggataactgtggttttcttaccaattttat

SEQ ID NO: 75522 - DNA, 600 bp, Chicken  19866894359369_3
ggatttgggattttggtggagccaaaaccacaaatccccaagacagtgtcctccagctaacatgtgctttctcatctgtataataaaaatacgtataaaaatgtctttacctgtcctcctcgggagagctgaatagagaaataaaacacaacagcaaaacctgttaaatcaatgttattattttcttaaggtctaactttaccaaatttgcttttgtattctacagggcacacaaatttcaaaatccatacagcaaaatgatttaaagttgcataataaactcctctgcttttacagaaytgagattcttcctattgatcacaagggatcagagcagaaccattgcgctgtggtgcaaataacacggtaaaattactgtcagtacacaagaaacaaggctccccaattctacctaaaggtagttcacaaacacgttgctggtcatgcacagcagagcacagaaagcagctttggtaccttgccagaaataccagccttttatttttattctgaaatgaagagagagcttgcaaatgtattagactgcaaacactgagatggaaggtttaacctcccaggcagagcttcagcagggttttc

SEQ ID NO: 75523 - DNA, 600 bp, Chicken  19866894359381_1
aagggacctttaagatcatgtagttccaagcccctgctatagacagggacacctccctggtgtccctggaccaggttgctcacagccccatccagcctggcattgaatgcttccagggaaggggcatccacaacctctctgggcaacctgttccagtgtctcacaagcctcacagtaaagtgtccttttcaaggtgttacatgcagggatttgagaagtgaggtggacactgcttcagctgtgtgctgtgcagagcagagcctggtgggacacggtgtgcctttgcttgtcctctatgcrtacactgcagagagaccaacagcggggctctcctcagctctgctctccctaattctccctctctcacctcagtgtgyttccagtccttccacatcttccaaaccgcatctcagccccgttactcaagtaacaaagttacagtaccttggcctcagctcaatatttgtctttgataattacaatttctgagtatgtaacaatagaagcatctctatgcaggccagtgcacagctggtttgcataaggagttggctaatcatagaatcattggatctttaaggggtggaaaagacctctaag

SEQ ID NO: 75524 - DNA, 568 bp, Chicken  19866894359381_2
gctcacagccccatccagcctggcattgaatgcttccagggaaggggcatccacaacctctctgggcaacctgttccagtgtctcacaagcctcacagtaaagtgtccttttcaaggtgttacatgcagggatttgagaagtgaggtggacactgcttcagctgtgtgctgtgcagagcagagcctggtgggacacggtgtgcctttgcttgtcctctatgcrtacactgcagagagaccaacagcggggctctcctcagctctgctctccctaattctccctctctcacctcagtgtgyttccagtccttccacatcttccaaaccgcatctcagccccgttactcaagtaacaaagttacagtaccttggcctcagctcaatatttgtctttgataattacaatttctgagtatgtaacaatagaagcatctctatgcaggccagtgcacagctggtttgcataaggagttggctaatcatagaatcattggatctttaaggggtggaaaagacctctaagatcatgtagtccaaccatcagcccatccccaccatgcccactaac

SEQ ID NO: 75525 - DNA, 600 bp, Chicken  19866894359395_1
tgatccaatgatccacgtcaaattggtgcccatcgcagcttaggtggaatactcaagccgtgcagcctttgttatctcaactgaggtgctcaccaccaacagttgttcagtatatgcactgtctgaaagcctttctaggcaggacagaacaaaatgtgacaaatcaaagctttatccttcgattttagctgcacttctttgtttgcattaaataaaattctccagctcttgtataaacagacctttccattgtggagctcattctataaataggaattacttcacttccttttacagcamgttaagaacatagtgctaaacacataaaggctgcaaccctcaaagaacgaggatgtgggatgattcagtgcgcgctagatctttctatttcaggtcagtcatttactgtgagtggtattcagctgcaatgcacagagtaaaagctttctacctataatacacatgaaaagctttctgcctttaagagagctgctatgcccaggaaacacacaaaccatctgtcttgaaagcctctgtgtacaccctacatgcagtaactaaatttagtgggtgatggggacaatgatggtgtcatttttt

SEQ ID NO: 75526 - DNA, 599 bp, Chicken  19866894359396_1
  misc_feature (1)..(88): n is any nucleotide
nnnnnnnnnnnnnnnnnnnnnnnnnnnnnnnnnnnnnnnnnnnnnnnnnnnnnnnnnnnnnnnnnnnnnnnnnnnnnnnnnnnnnnnnggcagagatgaatccaagtttaagatttaaaagaaggggaatccaaatttagagtattaataaaggtgggtgagaatagccctagctgaagggctgcatctagtgcagctaataaatacccctttatagcccatcaattttttcaaagctagcaaagccctagcactggggagatgagttaaaaaaaaaaaaaaaatcagggaaataacatyaaagtgttcctcatatgtatgcttgtcaaaatgatgttaaaacacagaccatatcatagctatactgtttcatgtacaggtagcagaattttcttccctctaaaaaaatagagagatgaattaatactttctgtagtattaaaatatmatattttaatacagwttaaaggtgtcaagccaaattttcatgatatagaacacttaattggtgtctatttttaatcaactttttcctctagttacatttaataaacagttttagaaaagcaacatgcatgtatgtgtgcttgaagagttcc

SEQ ID NO: 75527 - DNA, 600 bp, Chicken  19866894359396_2
taaaggtgggtgagaatagccctagctgaagggctgcatctagtgcagctaataaatacccctttatagcccatcaattttttcaaagctagcaaagccctagcactggggagatgagttaaaaaaaaaaaaaaaatcagggaaataacatyaaagtgttcctcatatgtatgcttgtcaaaatgatgttaaaacacagaccatatcatagctatactgtttcatgtacaggtagcagaattttcttccctctaaaaaaatagagagatgaattaatactttctgtagtattaaaatatmatattttaatacagwttaaaggtgtcaagccaaattttcatgatatagaacacttaattggtgtctatttttaatcaactttttcctctagttacatttaataaacagttttagaaaagcaacatgcatgtatgtgtgcttgaagagttcctctgagatggytaaagcagtgctaaagccaaaacacagagtagcaatggtgtggactcctggtaaaactgaaaacaatttaggcttaatgaacagcatggttcatccagctatgcccagttcagctctccgcagccctatcccatttat

SEQ ID NO: 75528 - DNA, 600 bp, Chicken  19866894359396_3
atagccctagctgaagggctgcatctagtgcagctaataaatacccctttatagcccatcaattttttcaaagctagcaaagccctagcactggggagatgagttaaaaaaaaaaaaaaaatcagggaaataacatyaaagtgttcctcatatgtatgcttgtcaaaatgatgttaaaacacagaccatatcatagctatactgtttcatgtacaggtagcagaattttcttccctctaaaaaaatagagagatgaattaatactttctgtagtattaaaatatmatattttaatacagwttaaaggtgtcaagccaaattttcatgatatagaacacttaattggtgtctatttttaatcaactttttcctctagttacatttaataaacagttttagaaaagcaacatgcatgtatgtgtgcttgaagagttcctctgagatggytaaagcagtgctaaagccaaaacacagagtagcaatggtgtggactcctggtaaaactgaaaacaatttaggcttaatgaacagcatggttcatccagctatgcccagttcagctctccgcagccctatcccatttatactaaataaagaata

SEQ ID NO: 75529 - DNA, 561 bp, Chicken  19866894359396_4
tcatatgtatgcttgtcaaaatgatgttaaaacacagaccatatcatagctatactgtttcatgtacaggtagcagaattttcttccctctaaaaaaatagagagatgaattaatactttctgtagtattaaaatatmatattttaatacagwttaaaggtgtcaagccaaattttcatgatatagaacacttaattggtgtctatttttaatcaactttttcctctagttacatttaataaacagttttagaaaagcaacatgcatgtatgtgtgcttgaagagttcctctgagatggytaaagcagtgctaaagccaaaacacagagtagcaatggtgtggactcctggtaaaactgaaaacaatttaggcttaatgaacagcatggttcatccagctatgcccagttcagctctccgcagccctatcccatttatactaaataaagaatacaaagaataccgcatataaaacctcctgcttttaatttgaaatttgaaattcatgcctctgttcttaacatggatctttaaaaaatcatctttttaatggagaatagt

SEQ ID NO: 75530 - DNA, 600 bp, Chicken  19866894359400_1
tgctctcaaggaaatgctgcattggatagaagagcgggaatggatctgcctcctggaatatggttcaaggtgtgtttggctcttcagttctgcaccgtgcaatggatggatggatggtgctttctaatcctgctgtagcagaccactgacagcgacagctatgcttgtcccttccaggaccttctcctgtatgctcttctcagctaaggattttactcctacccagaaaggatctctcagcttaaggcctctcacttgccagtctcacagtgatccgcatggagcactgtcagttttcartgcaccccaggacttgctgggttagaaatgacaaactgccatggagatttcacacgagctatagcaaaggatgctggatcacagccctcttcccatctccctgtctgtattttctgctgaagtctctcagtgctttcattctaaggttctctcggctgtaggctcaatgcctgcattgctgttgaagtttctgtctggtagataacaatarggaatctgttactcctgtcacaatgttgtgtgtatgcaaccccaggcttccacttgtggtcatctgatcagcccctgctgacagcccca

SEQ ID NO: 75531 - DNA, 600 bp, Chicken  19866894359400_2
tttactcctacccagaaaggatctctcagcttaaggcctctcacttgccagtctcacagtgatccgcatggagcactgtcagttttcartgcaccccaggacttgctgggttagaaatgacaaactgccatggagatttcacacgagctatagcaaaggatgctggatcacagccctcttcccatctccctgtctgtattttctgctgaagtctctcagtgctttcattctaaggttctctcggctgtaggctcaatgcctgcattgctgttgaagtttctgtctggtagataacaatarggaatctgttactcctgtcacaatgttgtgtgtatgcaaccccaggcttccacttgtggtcatctgatcagcccctgctgacagccccacatcaaaacacctgagcaaatgggagcccactctttgctctgggtggttttatgtgaatcacagccatcattttaaaagacgctgtgtctgtctgctgtggttcatgaattccattgtacctggagtcgcagctaccagacaacaaaatgcctcaatcattaattcggttcacccactgagcttctggagatagcagcttggtctcccaga

SEQ ID NO: 75532 - DNA, 600 bp, Chicken  19866894359400_3
gttcacccactgagcttctggagatagcagcttggtctcccagactgcacacatgttctgctgcaccttatgaaccaacgtaacaaagaaagcatccaaggcgagcagtaaacagactgcatgctaccagccagcagtagaacagagctgggaacctttcagcactgctgagtgcctcctggactcccactcacctctgcctgtcagtgcaaaggatacctgaaaataccaactgctgcagaatcaaaatgaaccgttcagtcagaatcacagaatggcctgggttgaaaaggaccacartgctcatacagctcccacccctgctaygtgcagggtcgccaaccagcagaccaggctgcccagagccacakccagcctggccttgagtgcctgcagggatggggcatccacagcctccttgggcaacctgttcagtgcatcaccaccctatgagggataaacttcctcctcatatccaacctaaacctcccctgtctcagtttaaaaccattcccccttgtcctatcgccatccaccctcacaaacagccattccccctcctgtttatacactcccttcaagtactggaaggacacaatg

SEQ ID NO: 75533 - DNA, 600 bp, Chicken  19866894359400_4
cagcttggtctcccagactgcacacatgttctgctgcaccttatgaaccaacgtaacaaagaaagcatccaaggcgagcagtaaacagactgcatgctaccagccagcagtagaacagagctgggaacctttcagcactgctgagtgcctcctggactcccactcacctctgcctgtcagtgcaaaggatacctgaaaataccaactgctgcagaatcaaaatgaaccgttcagtcagaatcacagaatggcctgggttgaaaaggaccacartgctcatacagctcccacccctgctaygtgcagggtcgccaaccagcagaccaggctgcccagagccacakccagcctggccttgagtgcctgcagggatggggcatccacagcctccttgggcaacctgttcagtgcatcaccaccctatgagggataaacttcctcctcatatccaacctaaacctcccctgtctcagtttaaaaccattcccccttgtcctatcgccatccaccctcacaaacagccattccccctcctgtttatacactcccttcaagtactggaaggacacaatgaggtctccccggagccttctctcctcc

SEQ ID NO: 75534 - DNA, 600 bp, Chicken  19866894359400_5
gaaccaacgtaacaaagaaagcatccaaggcgagcagtaaacagactgcatgctaccagccagcagtagaacagagctgggaacctttcagcactgctgagtgcctcctggactcccactcacctctgcctgtcagtgcaaaggatacctgaaaataccaactgctgcagaatcaaaatgaaccgttcagtcagaatcacagaatggcctgggttgaaaaggaccacartgctcatacagctcccacccctgctaygtgcagggtcgccaaccagcagaccaggctgcccagagccacakccagcctggccttgagtgcctgcagggatggggcatccacagcctccttgggcaacctgttcagtgcatcaccaccctatgagggataaacttcctcctcatatccaacctaaacctcccctgtctcagtttaaaaccattcccccttgtcctatcgccatccaccctcacaaacagccattccccctcctgtttatacactcccttcaagtactggaaggacacaatgaggtctccccggagccttctctcctccaggctaaaccagcccagttccctcaacctttcctcataggggag

SEQ ID NO: 75535 - DNA, 600 bp, Chicken  19866894359404_1
gcacaaattatctttaagaataataaaagatttttcacagtgtcacttgacattttatattgttcattcagtgaaagatagctctgaatcactgagagtagtgagcagttaaactagagaagcaacacagcattaagtaaacagattttcaccatacagtgtcttattcttatgtaactatttctattagcacactgcagatagtctattttcagatattctattttcagaatatctactggtaacatgaaactattgtgaatcaagtataccaaactctataaaatagaaatacaagakacattccatttgtgaatgtaactgcataaaactattaaaacaaggcaataggccatggcattgctttcgtaacatatcttcttatacgcaggtcacttcatttttaagaagtattacctaaagagaaagttactgcactttcacttttggttaaactatgaaaagataaatgtaatatgggagataggactttaagataaaaagagcacattatagaagagcaaaataacttgctcaaactcataatctgaactaggttgtctcataaggaaatgatgttgtattgcacagtgttcaata

SEQ ID NO: 75536 - DNA, 600 bp, Chicken  19866894359411_1
gtttgattccaagcactgtatttggattttatgctgtggctttactacaagtcttacttacatcttcatgtttattttaagtgtgttcagtcatctatttttgaagttcctatgtagattccctagaagattcccctcatttcccactacccttaatttaatttcttttttaaaaaagtttcttgtcagtagaagatcttaaaaatgtgttaaagacagaattgaaaagtaaatatattcccataacatagaaaagtctctttgagctcacaacttccccctctgagggatatggttacygctctttccattgcatcctaaacagggagagtacctgcaagcacgtcttataaaaagattaaaaaatgaaatgtggacacaataatatactcctgttcttttccctgcagccctatccagttgttcccttcaaccactgtaatccagaagtaaccctgattcttcatatctacaaatgtcagggagcagactctcactcatccagtgctacagtaaatgttattacatcccatcagtctccctttcactcagactatggactcattgcccaatacaatctgcctgagttttccttctcca

SEQ ID NO: 75537 - DNA, 600 bp, Chicken  19866894359411_2
cagttgttcccttcaaccactgtaatccagaagtaaccctgattcttcatatctacaaatgtcagggagcagactctcactcatccagtgctacagtaaatgttattacatcccatcagtctccctttcactcagactatggactcattgcccaatacaatctgcctgagttttccttctccactatattctttgccattggtggttgtaccttcattcaggaagattgtaattctgtcaaaagcacgattcttcatagaatcagaacagcctttgggtttgggctcacctgactgtcaycagtgatgctcatcatagcagcatctgttccctggagtcatrcactgtgccagcagaactttatgaatagctcgcagatgcgtagaggatgtggccacctcatctggcacaaactaacaagccatctggggcttagcctgagcatgtcgtgggcagattmtcatccctcgcatccatttccttcaataaatggtgaacagaggtcaattctgcccaggtcctgctccagcaaggaataggacactggttagtacacatgccattttcaggaacccagaagtcaccaaagctgaaagtatc

SEQ ID NO: 75538 - DNA, 600 bp, Chicken  19866894359411_3
ttcttcatatctacaaatgtcagggagcagactctcactcatccagtgctacagtaaatgttattacatcccatcagtctccctttcactcagactatggactcattgcccaatacaatctgcctgagttttccttctccactatattctttgccattggtggttgtaccttcattcaggaagattgtaattctgtcaaaagcacgattcttcatagaatcagaacagcctttgggtttgggctcacctgactgtcaycagtgatgctcatcatagcagcatctgttccctggagtcatrcactgtgccagcagaactttatgaatagctcgcagatgcgtagaggatgtggccacctcatctggcacaaactaacaagccatctggggcttagcctgagcatgtcgtgggcagattmtcatccctcgcatccatttccttcaataaatggtgaacagaggtcaattctgcccaggtcctgctccagcaaggaataggacactggttagtacacatgccattttcaggaacccagaagtcaccaaagctgaaagtatcccttctgtctcctatttattcttccttacatatatgtatatg

SEQ ID NO: 75539 - DNA, 600 bp, Chicken  19866894359411_4
tctgcctgagttttccttctccactatattctttgccattggtggttgtaccttcattcaggaagattgtaattctgtcaaaagcacgattcttcatagaatcagaacagcctttgggtttgggctcacctgactgtcaycagtgatgctcatcatagcagcatctgttccctggagtcatrcactgtgccagcagaactttatgaatagctcgcagatgcgtagaggatgtggccacctcatctggcacaaactaacaagccatctggggcttagcctgagcatgtcgtgggcagattmtcatccctcgcatccatttccttcaataaatggtgaacagaggtcaattctgcccaggtcctgctccagcaaggaataggacactggttagtacacatgccattttcaggaacccagaagtcaccaaagctgaaagtatcccttctgtctcctatttattcttccttacatatatgtatatgcacatttgcaaataagatccactctgaaaggactgcacatgagcacttccattagtcactgaggcagcttactcttcccagtatgcttcactctgctgtgtcacgactggtaaaactg

SEQ ID NO: 75540 - DNA, 600 bp, Chicken  19866894359414_1
gttataaaaacatatgcagtttaagttctacaatgcagaaataaaaaacagacaaacaaaaaactacataaaaacaaagaacaaattttaaatgacacagtttaactatctgaaactcagcttgaatctgaagtggtttgatctatgactacgattcttgatgtttctattctttttgaaagcttaaaatgttacgatttaagcttctcatgtcatgtttttattcattttacattattgtattttaaggttctccttttaccaatatctgtactgctgtctacaacattacactgacaygcttagtcttgagcaatgcaaacactcgctgtacacacagctgtgaatttacctgtttctcctgggccaacagtttggctatgaatcctgctaaagtcacgtaaactgtgcgtgcatcagaggactcttttggtttaaatgtgacatgtgtgggaaaggctactctttgagaatatgaaaggygtgattcacgttcataaatcacgtactgaattgtggttttctgaggacatggagatttctgtttcagccttctagggttcctcacagcagattgaaatggggatggcaattacacac

SEQ ID NO: 75541 - DNA, 600 bp, Chicken  19866894359414_2
ttaaaatgttacgatttaagcttctcatgtcatgtttttattcattttacattattgtattttaaggttctccttttaccaatatctgtactgctgtctacaacattacactgacaygcttagtcttgagcaatgcaaacactcgctgtacacacagctgtgaatttacctgtttctcctgggccaacagtttggctatgaatcctgctaaagtcacgtaaactgtgcgtgcatcagaggactcttttggtttaaatgtgacatgtgtgggaaaggctactctttgagaatatgaaaggygtgattcacgttcataaatcacgtactgaattgtggttttctgaggacatggagatttctgtttcagccttctagggttcctcacagcagattgaaatggggatggcaattacacacctttccctggagggcatccgtagctgcagcctttgtatgttgttcttttcttatttggtgtttaggagaggctgcccagcagtgctgcttttcctttgcccttgttgttgatgtgacttcagctgagctgcagccttggattatgcagcataagcctccctctgcagaggagccccaaataag

SEQ ID NO: 75542 - DNA, 600 bp, Chicken  19866894359416_1
gataatacagaaggatagaatggattaggtcagaagcacctacacggtcaccctgaggcgctgagcattttggggagtctgcctcctgcacaaggggcatcgggctgcaaggctgcaccaagctgctgcacaaaatttagcccattttcacctagttagatagaacagtgtacacaatgttacagtgttagcaaatggaatgcagatatctctttatgatgggcttgtttgcatctgcccactgtggcattttgcactgcgtggagctggatttgctcagcgccgctggacgatcctatragttaactgtgttgattcagtgggtgctacttccactgaatcattactgatagaccttgttgcaaatagtaagagcaaggatttaactgggagctcaatctgagctcagagacaagccctgacactgtctgaagttgcacgacttgctgcagctctatgagatggtttagtgggcatggaggtgatgggttggcaattggactagatgattctggaggtcttttccaaccttaatgattctatgtttgctgcctaacctattgcactgcattgctatccactgcccactcactcccatct

SEQ ID NO: 75543 - DNA, 600 bp, Chicken  19866894359424_1
tgcattttgattcagcttgtggctgagacactggctgaattttacagcgtgccaagtgatgtatgtatgtatgtatctggagacagagttgagccctgagaatgtggttacacaatatgacaagaaggagaaaacactgtggagctgtgaactcctctttgttggtggtgtctagaggtgggatcagaatagaagcttcaggcagaacatctgtaatgtggacagacagatgcagctgcaattctgaacttcaggttttccagaaattaaaatattttcatggtatctccttccctcttrtgataaaaaagaggtaatcttcccttaaagcatttcactcttctgttttactgtaaatggggaggtgggtgagatttatttgttaaacattgccataaatatttagcagagcaaggctgggtggagaagaggacatctaaacagattgctagtgagctaaccttggagattttccagatttctctctcttcctccatttttttttttccctttatagagaaactaaataaacatttgaaaggaagtgcatgactggaacaacccctccaataaataattcaaaagagaattaataggatt

SEQ ID NO: 75544 - DNA, 600 bp, Chicken  19866894359429_1
aggagggaaggatgaggctcacacctgcagggttcgtgtccccgcagcccaggggtgccaccccgccatcctcaccatcaccatcctgcacagccctgtgccagagcacattctgccttttcccatcacccaggaagcagtgacagctcgagcatttcatgcatttaacgagagcaccgcacaaacaagtggcacctactgactgggggccaggaggcagcactcgacccaagagagtgcattcattgatctctgtaggcaccagaaggtgggggatgcaaactgcagggcacgtggagmtgtgctttcggtaggcagcctgaaaacccaatagccggcttcaccgagaacacatctgcggaggtgtgacccagtgataaccgctgaaagatgtcactgcgaaggatctataaatactatatttccccttcttgatatattttcttttaactcatcagcagcttgacatcgtgctttcttacagcaagtctccgtgcagtttttatacttcccagaactgaagtaaaatgaaacaacccgcgggtgggagcgcagcccgccgggacagcgctgctctatcactgcacactcatggccgca

SEQ ID NO: 75545 - DNA, 600 bp, Chicken  19866894359430_1
atactgtgactgttggaaaagtgacccagttcatagcatggcatgcaatctgaaatatgttggcttaagttagtaggtagagctataaacagatgagtctgaggaaaagctatactgcctaacagctgttctcactgtggtaaatcacacttgagaaacagtccaaagtgtaaagtaattcttgatacagagcactttgcacttcagaaacattaagaccgtgttttctttacttccttgtactttaattttttgacttaatgtgtaacctgtgtaacatgttgtttagaaaaattctgraaagtaagcctcaaaggagaaatgatgtagataaattactactgcctacatgaaatacatggctgcttgtcttaaaatttagtgcaggtcagggagtaaaaacttcagagataaagaaataagtagctgtaaaaaaaggctggatgatagtgaagcaaaacaatgtgccccatcagtactaccttcacgttataactcagcagttggagctgggtttgtgaaatggggaattcaggaactgagttttgtcttctctgcagaacacagaatatctgctgcagtctatggctgtatgccagt

SEQ ID NO: 75546 - DNA, 600 bp, Chicken  19866894359440_1
aataagttctgagaagtattgcattaatgttttatttttaatagtaaaaattaggaaacttaaaaactagcaaaagcaatgatatcatactgtatttcatgattatagatttattgcagcatcgattacaagtgcatttttaatgaaaatgtagaaaaaaatcaatacagtctgcagaagaaaaagatacgattgttctctacagaggtgcttcaatggcaggcactggtagacctgacagaagcaggggaagggaggaacagagtcacttggtgtgaatttgcttttcactccttcaamagagtgaggatatcccctctgaggcaggaacagatcctgactgctggagcagctgcactgggggcaacttgtttccctgttgccttctgcagtcatcaaagagcttatctctgaacactgaagaaaaaaatatttttgagtgagcccatgaacttctcacctcagagatgtctcagcactctcttctgctcatgtgtgtatatttatgtgctcaaatacagcttaacatcagttaattttctaagacaattttcttagaaatctcccacgatatttctttcattaggaaactggttatta

SEQ ID NO: 75547 - DNA, 599 bp, Chicken  19866894359443_1
  misc_feature (1)..(80): n is any nucleotide
nnnnnnnnnnnnnnnnnnnnnnnnnnnnnnnnnnnnnnnnnnnnnnnnnnnnnnnnnnnnnnnnnnnnnnnnnnnnnnnnttctggaaatgtcaggctgttgtaacagtgcttcgtatggagaacattagctgttcctagatcagattcataaaacataaacaggttcaagattacaatcacgctaacaccaccttcccaacaagaagaaatttatctattcatcggtgtctgtaggagcttattacatgtgcttgtgttttgtaaagtctgtctgaaaatgcaatactctctgcggaaytgaaaaagtattgtcctaggagacgtcattgaagatcatcaggtatggtggtaatttagtatgaaaagtacgaacagatctactctgcaaataaacagccactttacatgctgatatcttcagcacaggtataggaatatgttttgtttatataattcccagtcaaaatkggagatcactagaagttactraagactgtattttttgtaatgtaaagttgtactgtgttgtatttgccttctttgtaggtagtttctgggattttttgttttgttttttaacaggtcgctaattaacat

SEQ ID NO: 75548 - DNA, 600 bp, Chicken  19866894359443_2
gattacaatcacgctaacaccaccttcccaacaagaagaaatttatctattcatcggtgtctgtaggagcttattacatgtgcttgtgttttgtaaagtctgtctgaaaatgcaatactctctgcggaaytgaaaaagtattgtcctaggagacgtcattgaagatcatcaggtatggtggtaatttagtatgaaaagtacgaacagatctactctgcaaataaacagccactttacatgctgatatcttcagcacaggtataggaatatgttttgtttatataattcccagtcaaaatkggagatcactagaagttactraagactgtattttttgtaatgtaaagttgtactgtgttgtatttgccttctttgtaggtagtttctgggattttttgttttgttttttaacaggtcgctaattaacattttatatttatttgacaatatagatttatatgagacagaagaaatggatagggtgaaaccattctgtatgagatgacrttgcgtagtcagaatgaaatgaactttgttgatagctgtatctttgtatgatgctcttaatatagactctgccttatagttttagatccttac

SEQ ID NO: 75549 - DNA, 600 bp, Chicken  19866894359443_3
accttcccaacaagaagaaatttatctattcatcggtgtctgtaggagcttattacatgtgcttgtgttttgtaaagtctgtctgaaaatgcaatactctctgcggaaytgaaaaagtattgtcctaggagacgtcattgaagatcatcaggtatggtggtaatttagtatgaaaagtacgaacagatctactctgcaaataaacagccactttacatgctgatatcttcagcacaggtataggaatatgttttgtttatataattcccagtcaaaatkggagatcactagaagttactraagactgtattttttgtaatgtaaagttgtactgtgttgtatttgccttctttgtaggtagtttctgggattttttgttttgttttttaacaggtcgctaattaacattttatatttatttgacaatatagatttatatgagacagaagaaatggatagggtgaaaccattctgtatgagatgacrttgcgtagtcagaatgaaatgaactttgttgatagctgtatctttgtatgatgctcttaatatagactctgccttatagttttagatccttactcatgtatggatctcrggatt

SEQ ID NO: 75550 - DNA, 600 bp, Chicken  19866894359443_4
atctactctgcaaataaacagccactttacatgctgatatcttcagcacaggtataggaatatgttttgtttatataattcccagtcaaaatkggagatcactagaagttactraagactgtattttttgtaatgtaaagttgtactgtgttgtatttgccttctttgtaggtagtttctgggattttttgttttgttttttaacaggtcgctaattaacattttatatttatttgacaatatagatttatatgagacagaagaaatggatagggtgaaaccattctgtatgagatgacrttgcgtagtcagaatgaaatgaactttgttgatagctgtatctttgtatgatgctcttaatatagactctgccttatagttttagatccttactcatgtatggatctcrggattggaggcacttttgagagctgtcctgagacaggcttttattattaytgtgcaccaactactttttgttcttctgtgtgccggcgtggctctttgaagacagttggccattactgctgtgcttcagctttgtaaaggtgcttgtgagggaaggctgtcaaaaaaagtcatgagatttgataatcctac

SEQ ID NO: 75551 - DNA, 600 bp, Chicken  19866894359443_5
tactraagactgtattttttgtaatgtaaagttgtactgtgttgtatttgccttctttgtaggtagtttctgggattttttgttttgttttttaacaggtcgctaattaacattttatatttatttgacaatatagatttatatgagacagaagaaatggatagggtgaaaccattctgtatgagatgacrttgcgtagtcagaatgaaatgaactttgttgatagctgtatctttgtatgatgctcttaatatagactctgccttatagttttagatccttactcatgtatggatctcrggattggaggcacttttgagagctgtcctgagacaggcttttattattaytgtgcaccaactactttttgttcttctgtgtgccggcgtggctctttgaagacagttggccattactgctgtgcttcagctttgtaaaggtgcttgtgagggaaggctgtcaaaaaaagtcatgagatttgataatcctacttgtaatctacttgagctacatctcaaagtagcttttgtgttacaagtgaaaatctgacccacgtgtagccacagagaagtatcttctcctgctgcttcctcagcaagc

SEQ ID NO: 75552 - DNA, 559 bp, Chicken  19866894359443_6
ccttctttgtaggtagtttctgggattttttgttttgttttttaacaggtcgctaattaacattttatatttatttgacaatatagatttatatgagacagaagaaatggatagggtgaaaccattctgtatgagatgacrttgcgtagtcagaatgaaatgaactttgttgatagctgtatctttgtatgatgctcttaatatagactctgccttatagttttagatccttactcatgtatggatctcrggattggaggcacttttgagagctgtcctgagacaggcttttattattaytgtgcaccaactactttttgttcttctgtgtgccggcgtggctctttgaagacagttggccattactgctgtgcttcagctttgtaaaggtgcttgtgagggaaggctgtcaaaaaaagtcatgagatttgataatcctacttgtaatctacttgagctacatctcaaagtagcttttgtgttacaagtgaaaatctgacccacgtgtagccacagagaagtatcttctcctgctgcttcctcagcaagctaaaatgat

SEQ ID NO: 75553 - DNA, 600 bp, Chicken  19866894359447_1
ttctggcaaccccagtttatatgttttctacctctgttgccaagcagcatataaaatagttctgacaatgatttagatcacactgacataaaagcaaatagcatgtttacatgtagccttttggctttaatggaacccagaggggacatcacagtctaagtcttaattatattctaatggcagaaaccctctcaaaagggcaatatctgccttgaagagccagtaaaataagtgtaaaataggtagagaaatctctgaaaacaatagcattgtgtactggcaagaaggaagaaactgtgrttgtttcaaacaaaggacctagtatttaatatagtttatttgattataaaccaatggagtaaaaaccattaatctatttggtttggtatggtattatatctgtttggtttgatattctcttttcactactttgtctttttttttcccttgtatgctttttttctgttgtgggaaagtagaagactgggaggggaagaagttaaagaaaataggaaatatttttggctgtgaacaattttttttcaaatgaaataggtgatattttaaatcaatgtgaagtatctacaatttttttctttc

SEQ ID NO: 75554 - DNA, 600 bp, Chicken  19866894359457_1
atcctatgcctggaggtgttcaaggccaggttggatgtcctgatcagggcaaactgagctagtggaggcgtcccttcccacagcaggggggctggaactgtatgatttgtaaggtccctttgaacccaacccattctatgattctgtgaaagtttttggttttttttttttcttttttttttccaagaggttatcattcaataaacacaagggagacaaagattcaattctttagaatataaattgctaaaataaatagtggcttgtatttaacaaaagctcttcaactacaaatcagcstgcaaggagaataatagtacttggctggtgcttggacaggttggtcacaacagctacatccagcactaacctgaatccagtatccaggatggtccatttagatccagcactggaactactatgttatgtataatattgtattgtgaaggtgcactcctcatgcacacagtaaggttcaaaagaccttgtccttgggaccggtaacagtcaagatttctccagagacagttaacaaccactatactgtctcaaactggttgctcagagaactgatgacacctagttcaatagatcacaaag

SEQ ID NO: 75555 - DNA, 600 bp, Chicken  19866894359472_1
gggaaaagaaaagaaatacaaaatcaaatttgctatactattccagaaaaggcaccatgaagagttcagggaaacaggaacaattctgagtctttggtcttggatacactggttactgcaactaatatgcagtgtgaaatcagatcaattagaattaaagaaacagattggaaacttcgggtaatacaagatttgtggctgctaatatcctaaagtattatctattatttaaagtatcatatctaaagtactggtaagtgctggattcctctgaggggaagagaatgcctccttgaatgyaactggcaaatcacgckctcagcacagggagcattcactgtctccatcgagagtgactgactgcaaaaaatgaaacacttctcaacagtaaaaggaagaaaataacccggaggtatcctgagtgaagagctgcctttccgggaagaggagctatttctgaaatattattccattagtactttctcaagttcttgctgactttgaatttcttttcatagatactcctgcatgtagaacaggatgaggttgagtccttatacctttcatatatggagggttgaaagtttgttagcaattcac

SEQ ID NO: 75556 - DNA, 600 bp, Chicken  19866894359472_2
acaaaatcaaatttgctatactattccagaaaaggcaccatgaagagttcagggaaacaggaacaattctgagtctttggtcttggatacactggttactgcaactaatatgcagtgtgaaatcagatcaattagaattaaagaaacagattggaaacttcgggtaatacaagatttgtggctgctaatatcctaaagtattatctattatttaaagtatcatatctaaagtactggtaagtgctggattcctctgaggggaagagaatgcctccttgaatgyaactggcaaatcacgckctcagcacagggagcattcactgtctccatcgagagtgactgactgcaaaaaatgaaacacttctcaacagtaaaaggaagaaaataacccggaggtatcctgagtgaagagctgcctttccgggaagaggagctatttctgaaatattattccattagtactttctcaagttcttgctgactttgaatttcttttcatagatactcctgcatgtagaacaggatgaggttgagtccttatacctttcatatatggagggttgaaagtttgttagcaattcactctatcaaaattttctt

SEQ ID NO: 75557 - DNA, 600 bp, Chicken  19866894359473_1
aaaatgtctgcgcaattgtcatgtgaaatagattatatcagagatggtgtggcccacacctccttttccaggccagtgctgagtaatcccatagtcactgggatcacacgtcagctggagtggtaattgaggttggatgcccagctggtcccctccttccctgctcccccctcacctccctgctctgctgggatctctttaaacttcctccagctcacctcaaatcccagcatccactctcatggagctctcagcttctcatgggaaccttgttggcgagactaaccacttatccaaagscctaacattcagcaagcaggttttgagctaactctggtctcttttaaattgtttctgcacttgtcataacaaatgcatggccagaaatggggcttttgaaatggaaaggggcgtagagcaaagcttgcagcacagagttgggtggaggtcttggcacaccgagctccatccctgtcagtgccacggctyggcctggcctggcctggcctggcctgatgtacagaggctgcaaactgtcctggaaagtcttctccatagagagataggaaaagagatgtgggtgttcctggtgaagggatc

SEQ ID NO: 75558 - DNA, 600 bp, Chicken  19866894359473_2
gggatctctttaaacttcctccagctcacctcaaatcccagcatccactctcatggagctctcagcttctcatgggaaccttgttggcgagactaaccacttatccaaagscctaacattcagcaagcaggttttgagctaactctggtctcttttaaattgtttctgcacttgtcataacaaatgcatggccagaaatggggcttttgaaatggaaaggggcgtagagcaaagcttgcagcacagagttgggtggaggtcttggcacaccgagctccatccctgtcagtgccacggctyggcctggcctggcctggcctggcctgatgtacagaggctgcaaactgtcctggaaagtcttctccatagagagataggaaaagagatgtgggtgttcctggtgaagggatcacccgatgaaaaactcaggagcagcagcaattggttcctttacagttctcctggcagcaaatttcagcagaaaggcagcgtttctctgaaaagcgccttctttctggtgatttcatgatttaatttttcagctgggggaggagatagcattattcacaaattacttagtgagaacatctacattcccta

SEQ ID NO: 75559 - DNA, 600 bp, Chicken  19866894359474_1
tacctgcacatttgtttcctgtacttattctcagttttatttcttcgttcatgccagcacccacacttcaatcagcccacccacttttcatctgccaagcaatcattctttgctccttaaaacatacagcttcttggcagaaaatcccaatactgttctccagggatactctcatccttccctcttttaaaagtgaaccagcatcatgaatgtttttataaatgctgtagtagaaagcttacagcagcagctccaaactggataaaactgcacccatgcaaagatggataatgagagcaygtagcgttgcctaaagagtgccatcattttttttttttttttaatgtatatttcttcccaaaaagccagatttagatcaggatttgtcatgaacacaatatgaagcaggaaaagaaagggactaaaaatatatttggaagaggatagagatttggaagccagtacagatgggctatccacctgatgccacactccacatcagtatctgtcttttattggaaaccagttttgttttacatcagtttcctacgatacattcacttcaaaagatttctgataagaaagaagaaactccctaga

SEQ ID NO: 75560 - DNA, 600 bp, Chicken  19866894359477_1
gggctgggttttgtaaacctccttccccggtttgcatcaaagcagagatggctccatcaaagcagagatggctgctgagggatggagggtcagtgggtctctccagtacggctggactgcccgttcaacaaagcgagtgtcattgccttgaggtagataggggacagaaagccaaacatgagggcagaaatgtcaaacataccccttggtgcttggagatcatgagggctttgaaaatactgatagtaactgcttgtaggaatctttgggtttggaataacctgctcccttttcacagtrgctacctctgcagaccaccctcaccytgctacagaaactttgccgtatacaccctcccaaagccactgcttgctgtctctttggtgctcttcctcacttttactgcatcttacaaactgttttcctgcctcatgctgcatgcccatcattatttgctgctcagtgcgaggttttgtaaagggttcactcctggtgcaggcatcctcaggaaggtaaacttctgagatctctgagtcactgaaagaataggggacaaggagggtctgccttgcccaggcagttgtatgggcatggggtacc

SEQ ID NO: 75561 - DNA, 600 bp, Chicken  19866894359477_2
ccggtttgcatcaaagcagagatggctccatcaaagcagagatggctgctgagggatggagggtcagtgggtctctccagtacggctggactgcccgttcaacaaagcgagtgtcattgccttgaggtagataggggacagaaagccaaacatgagggcagaaatgtcaaacataccccttggtgcttggagatcatgagggctttgaaaatactgatagtaactgcttgtaggaatctttgggtttggaataacctgctcccttttcacagtrgctacctctgcagaccaccctcaccytgctacagaaactttgccgtatacaccctcccaaagccactgcttgctgtctctttggtgctcttcctcacttttactgcatcttacaaactgttttcctgcctcatgctgcatgcccatcattatttgctgctcagtgcgaggttttgtaaagggttcactcctggtgcaggcatcctcaggaaggtaaacttctgagatctctgagtcactgaaagaataggggacaaggagggtctgccttgcccaggcagttgtatgggcatggggtacctcccatcttagggatttttgcatctc

SEQ ID NO: 75562 - DNA, 600 bp, Chicken  19866894359482_1
gtttaaaaaaaaaaaaaggaaggaataagttctttttaaggatttttagatctaaaaacactgaaggccagttgaaaagttactgctctttgtcggaacttccttagaagacagtgcattgtggacatggttttacatgtctgaccacatggacctgaagacaggttttatagattgcttaaaaaaaacaacctcccttcaattaagaagtctgaagacctaaaatgaaactaagattgaaaatagcttttattataaagtagggcactctaaaggctgccaaagagatcatgctccccytgtatataacctttcaagtagagcaataggcacacagtccaaaagccacagttcacaagaggctgaaatacactagggctataacatgttcctgccagcaaggaggtatcagttcaaagtctgtcctgtaacagtgcctcggctgtggaaggaagcaaggaagctgggaatgaagtggcaatgctgtcaggcaatccagcccactcctgccccattgaaacatgaagctgaggaacccagtccccctctaacatttcaatactgtcagtgcatccccttatcttctttatggttttccgc

SEQ ID NO: 75563 - DNA, 600 bp, Chicken  19866894359484_1
gaggagaattcaagcgagagagatattatgagtgttctggctgtgggaaattctccctttaaacttgttctttttgacacactggactgtctcagagttggatatgctctgtaagaatacaggcttcgttagttctgctgctcatgggactgcatgtttcacgatacacgaacctcagaaacagcccttgttatttaaggttggtctaaagaaaaatgctgaagaaagctgtacagctgttttttttcttccaccataaatgaggatgtttcacaatgttaattacctaagatgattacrtgacttcatgaattctgcttagactgatttaatcttttgtatgtttttaattttctggtgggtcattggccatagaacatgaagaaaagatcagcctgcagtcagtgctaaggagaggagattggaaggagctttcatttgcatttgcagactgatgatggcaggggctatccaacactactgtgcactgggttgctatgttgtactcatatgaaatgtgtatatgactgtcttaataggatcttttagaccaggcctaatgactacagcttccctttgggctgaagtgtacaaaagctt

SEQ ID NO: 75564 - DNA, 599 bp, Chicken  19866894359485_1
  misc_feature (1)..(146): n is any nucleotide
nnnnnnnnnnnnnnnnnnnnnnnnnnnnnnnnnnnnnnnnnnnnnnnnnnnnnnnnnnnnnnnnnnnnnnnnnnnnnnnnnnnnnnnnnnnnnnnnnnnnnnnnnnnnnnnnnnnnnnnnnnnnnnnnnnnnnnnnnnnnnnnnnncttcccttgcctgctctttcctacccttgccttccattgccttgccttgccttcctttcctttccctcttcctcttctctttccttcccttcttgtcttttcttgtcttgtcttttttggtgacagactcaataattccttttttgtttacctyattttactccactagttcttttagtgcctctatcctatccatccatctgttctgtctcataatttctcaccatttttctcatgacctgtactctcactgtcctctttcctgtcttctgacaatwtattcctctatttctttatgagttagcctttgcaatcttagaaatgtcatggttttacctacatttcctattatttcacttataattcccagctatcagctaattcttctctcatggtcttactacagcactcttrgaaattcctttccaaccaactctgttttctcttcttcag

SEQ ID NO: 75565 - DNA, 599 bp, Chicken  19866894359485_2
  misc_feature (1)..(22): n is any nucleotide
nnnnnnnnnnnnnnnnnnnnnncttcccttgcctgctctttcctacccttgccttccattgccttgccttgccttcctttcctttccctcttcctcttctctttccttcccttcttgtcttttcttgtcttgtcttttttggtgacagactcaataattccttttttgtttacctyattttactccactagttcttttagtgcctctatcctatccatccatctgttctgtctcataatttctcaccatttttctcatgacctgtactctcactgtcctctttcctgtcttctgacaatwtattcctctatttctttatgagttagcctttgcaatcttagaaatgtcatggttttacctacatttcctattatttcacttataattcccagctatcagctaattcttctctcatggtcttactacagcactcttrgaaattcctttccaaccaactctgttttctcttcttcagttttaaccttcttcagatccttataaaaccattatctgtaaaagccctacactcctgctgaatttcatgaggacatgattttcatctactctgacctgacacacagctcttctwagaatactgt

SEQ ID NO: 75566 - DNA, 600 bp, Chicken  19866894359485_3
ttttggtgacagactcaataattccttttttgtttacctyattttactccactagttcttttagtgcctctatcctatccatccatctgttctgtctcataatttctcaccatttttctcatgacctgtactctcactgtcctctttcctgtcttctgacaatwtattcctctatttctttatgagttagcctttgcaatcttagaaatgtcatggttttacctacatttcctattatttcacttataattcccagctatcagctaattcttctctcatggtcttactacagcactcttrgaaattcctttccaaccaactctgttttctcttcttcagttttaaccttcttcagatccttataaaaccattatctgtaaaagccctacactcctgctgaatttcatgaggacatgattttcatctactctgacctgacacacagctcttctwagaatactgtacatccaggtctccaacaattgtctctccacctgattaccaaagtaatcatccattcttcaaattactgtgtgggctttctgtccttgattcctttctttcttctctctacaccttttatctggtgtgatctcatca

SEQ ID NO: 75567 - DNA, 559 bp, Chicken  19866894359485_4
ttctgacaatwtattcctctatttctttatgagttagcctttgcaatcttagaaatgtcatggttttacctacatttcctattatttcacttataattcccagctatcagctaattcttctctcatggtcttactacagcactcttrgaaattcctttccaaccaactctgttttctcttcttcagttttaaccttcttcagatccttataaaaccattatctgtaaaagccctacactcctgctgaatttcatgaggacatgattttcatctactctgacctgacacacagctcttctwagaatactgtacatccaggtctccaacaattgtctctccacctgattaccaaagtaatcatccattcttcaaattactgtgtgggctttctgtccttgattcctttctttcttctctctacaccttttatctggtgtgatctcatcagcaaatacagaaccaacagtcatctgttcgccaatgactcacagatatactagtctactccagactaatctccttatgtccaaatgaaaactcagctgtctctccaacatct

SEQ ID NO: 75568 - DNA, 600 bp, Chicken  19866894359488_1
gacatgggctgcacaccctggcacagggtagggagcccaaaaccaaaaataaaaagaacagaatgaaaaatgaagcgtatttcacaggttttgtcactcattttgctgagattcacgaggtacagctatggctcagcttcctcaccttctgaccacgctgcagctcattcttcacgaggacatggaggatagctaagggctagttttttttttctgagtggtgtttactcatgctcgctggctggcctgtgttttctggaaggggtgagctaaatcctctgtcacattttggccatccakcatgaacagggctcamtggcaggcccagaaaggcataggacacgagcagaaagggccagcagtgctgggtatcrtggctattgtcactcttgcacctggaaacagctttctgaagaaatttttgagtgatgccactctttgctaaaagatatcttctcctrtagttattaatgttattaattataatttcacgtggccctcagtgatttgggcagatgctgccactagctggggagtagrtaccatgcaggtagatgattttattttcatcttctcttatatctgtaacttttcctgttt

SEQ ID NO: 75569 - DNA, 600 bp, Chicken  19866894359488_2
cctggcacagggtagggagcccaaaaccaaaaataaaaagaacagaatgaaaaatgaagcgtatttcacaggttttgtcactcattttgctgagattcacgaggtacagctatggctcagcttcctcaccttctgaccacgctgcagctcattcttcacgaggacatggaggatagctaagggctagttttttttttctgagtggtgtttactcatgctcgctggctggcctgtgttttctggaaggggtgagctaaatcctctgtcacattttggccatccakcatgaacagggctcamtggcaggcccagaaaggcataggacacgagcagaaagggccagcagtgctgggtatcrtggctattgtcactcttgcacctggaaacagctttctgaagaaatttttgagtgatgccactctttgctaaaagatatcttctcctrtagttattaatgttattaattataatttcacgtggccctcagtgatttgggcagatgctgccactagctggggagtagrtaccatgcaggtagatgattttattttcatcttctcttatatctgtaacttttcctgtttagaagatagctgattt

SEQ ID NO: 75570 - DNA, 600 bp, Chicken  19866894359488_3
gcgtatttcacaggttttgtcactcattttgctgagattcacgaggtacagctatggctcagcttcctcaccttctgaccacgctgcagctcattcttcacgaggacatggaggatagctaagggctagttttttttttctgagtggtgtttactcatgctcgctggctggcctgtgttttctggaaggggtgagctaaatcctctgtcacattttggccatccakcatgaacagggctcamtggcaggcccagaaaggcataggacacgagcagaaagggccagcagtgctgggtatcrtggctattgtcactcttgcacctggaaacagctttctgaagaaatttttgagtgatgccactctttgctaaaagatatcttctcctrtagttattaatgttattaattataatttcacgtggccctcagtgatttgggcagatgctgccactagctggggagtagrtaccatgcaggtagatgattttattttcatcttctcttatatctgtaacttttcctgtttagaagatagctgatttcagtctctgtagatgaatgtcatgcagaaaggtattaagcagtgtaaaaattaatacg

SEQ ID NO: 75571 - DNA, 600 bp, Chicken  19866894359488_4
agctcattcttcacgaggacatggaggatagctaagggctagttttttttttctgagtggtgtttactcatgctcgctggctggcctgtgttttctggaaggggtgagctaaatcctctgtcacattttggccatccakcatgaacagggctcamtggcaggcccagaaaggcataggacacgagcagaaagggccagcagtgctgggtatcrtggctattgtcactcttgcacctggaaacagctttctgaagaaatttttgagtgatgccactctttgctaaaagatatcttctcctrtagttattaatgttattaattataatttcacgtggccctcagtgatttgggcagatgctgccactagctggggagtagrtaccatgcaggtagatgattttattttcatcttctcttatatctgtaacttttcctgtttagaagatagctgatttcagtctctgtagatgaatgtcatgcagaaaggtattaagcagtgtaaaaattaatacgccagggctctgaagctacctgtgtgtcattagcaacaaaggttcagaccagcagctgcttagtgagcagtcatgggaaggaatgaac

SEQ ID NO: 75572 - DNA, 600 bp, Chicken  19866894359488_5
gctggcctgtgttttctggaaggggtgagctaaatcctctgtcacattttggccatccakcatgaacagggctcamtggcaggcccagaaaggcataggacacgagcagaaagggccagcagtgctgggtatcrtggctattgtcactcttgcacctggaaacagctttctgaagaaatttttgagtgatgccactctttgctaaaagatatcttctcctrtagttattaatgttattaattataatttcacgtggccctcagtgatttgggcagatgctgccactagctggggagtagrtaccatgcaggtagatgattttattttcatcttctcttatatctgtaacttttcctgtttagaagatagctgatttcagtctctgtagatgaatgtcatgcagaaaggtattaagcagtgtaaaaattaatacgccagggctctgaagctacctgtgtgtcattagcaacaaaggttcagaccagcagctgcttagtgagcagtcatgggaaggaatgaaccacyctcagctgctgaagaggtccatcatcactcctctgtgcaccaaggctgtccagaggcaagcaatggtcataagtg

SEQ ID NO: 75573 - DNA, 600 bp, Chicken  19866894359488_6
tattaatgttattaattataatttcacgtggccctcagtgatttgggcagatgctgccactagctggggagtagrtaccatgcaggtagatgattttattttcatcttctcttatatctgtaacttttcctgtttagaagatagctgatttcagtctctgtagatgaatgtcatgcagaaaggtattaagcagtgtaaaaattaatacgccagggctctgaagctacctgtgtgtcattagcaacaaaggttcagaccagcagctgcttagtgagcagtcatgggaaggaatgaaccacyctcagctgctgaagaggtccatcatcactcctctgtgcaccaaggctgtccagaggcaagcaatggtcataagtgggacacttgcatgtttgcagctcatcaacagactgagcatggagtgctttgtgagtcagaatcacttcagttgttagagacagaggcacccaaaatcactcctcactttgaagataggccattgtgtgcacagagaaaaaatagtatcaacatatccttaagtgccagtccatctcttccttaccatctaggtcacaaacagtagattttttcagctagagttgg

SEQ ID NO: 75574 - DNA, 600 bp, Chicken  19866894359489_1
cacctactgcgtgtcctggagaggaaaagattcccaggatacatgcaaaaaaccctggtaatatttctacgaaagataaaggaactgtaatgctgcttttagcaggcagaaagcagcagcatgtctctctgctggcttcctgaatgggacattggcaccgggcaatggccaaacccaacaaccactgctcagcaggttaataatgcttcaaaaaacttcccagcaataccattttttgacataactttgaactgtcatcagtgagcagaaaggatgtgagtaaccttgtttttctcctcrcaaaataaaackctagcaaaacttgcctccaggtttgctttacttttacaccaggttcaattaataataaaaaacagaaagcagtaagctgttaaaactttrgtttggggagttggtacagagatgtgaatgaccccaacccctttgtttctgcacaaggcagcagccctgaaagcggctgccccccggccccaaacattcccatctgtcacttccagttatggggcttgcaatcagggcactcctctgaaagtaaattgcatgagaacagcccaggctgccacggacaagcgggagcag

SEQ ID NO: 75575 - DNA, 600 bp, Chicken  19866894359489_2
gtcctggagaggaaaagattcccaggatacatgcaaaaaaccctggtaatatttctacgaaagataaaggaactgtaatgctgcttttagcaggcagaaagcagcagcatgtctctctgctggcttcctgaatgggacattggcaccgggcaatggccaaacccaacaaccactgctcagcaggttaataatgcttcaaaaaacttcccagcaataccattttttgacataactttgaactgtcatcagtgagcagaaaggatgtgagtaaccttgtttttctcctcrcaaaataaaackctagcaaaacttgcctccaggtttgctttacttttacaccaggttcaattaataataaaaaacagaaagcagtaagctgttaaaactttrgtttggggagttggtacagagatgtgaatgaccccaacccctttgtttctgcacaaggcagcagccctgaaagcggctgccccccggccccaaacattcccatctgtcacttccagttatggggcttgcaatcagggcactcctctgaaagtaaattgcatgagaacagcccaggctgccacggacaagcgggagcagtttttgttgaca

SEQ ID NO: 75576 - DNA, 600 bp, Chicken  19866894359489_3
caggcagaaagcagcagcatgtctctctgctggcttcctgaatgggacattggcaccgggcaatggccaaacccaacaaccactgctcagcaggttaataatgcttcaaaaaacttcccagcaataccattttttgacataactttgaactgtcatcagtgagcagaaaggatgtgagtaaccttgtttttctcctcrcaaaataaaackctagcaaaacttgcctccaggtttgctttacttttacaccaggttcaattaataataaaaaacagaaagcagtaagctgttaaaactttrgtttggggagttggtacagagatgtgaatgaccccaacccctttgtttctgcacaaggcagcagccctgaaagcggctgccccccggccccaaacattcccatctgtcacttccagttatggggcttgcaatcagggcactcctctgaaagtaaattgcatgagaacagcccaggctgccacggacaagcgggagcagtttttgttgacagtcttctcaagagcctcagtactgcaacaacaacaaaaacaaacacccctaacacaagaggagggagttaccgtggcagggggtaaggtg

SEQ ID NO: 75577 - DNA, 599 bp, Chicken  19866894359490_1
  misc_feature (1)..(104): n is any nucleotide
nnnnnnnnnnnnnnnnnnnnnnnnnnnnnnnnnnnnnnnnnnnnnnnnnnnnnnnnnnnnnnnnnnnnnnnnnnnnnnnnnnnnnnnnnnnnnnnnnnnnnnnntttcagaagctactcttgcttgtctcacaaagtcagttgacatagttacatacatatatgcactatactcacatgttgtatctagaaatatatctattttaaagaagatggatgaaagaacagtgcagcaaagaagaaccaatttctttttgcatctcagggaatactgtcagaatctactgaactgtaatgtggrgaagaataactactgatcaaagcagctgcaaaattgcatgtaaaccagggatcacagcatcaagaattggtatctttcaccttctttaatcttctctgggtaaagattaggactactcaggagagtgtactctcaggctgctccctcagaaagtttgcagtgccgcagaactaggggagtggctgtcacaccagagagccrtgcagctctgcagaaaaggccaacttggtggacaccatgttgaacataagccaggaatgcatccttgcagcaaagagggctaatggcattcttggctg

SEQ ID NO: 75578 - DNA, 600 bp, Chicken  19866894359490_2
tttaaagaagatggatgaaagaacagtgcagcaaagaagaaccaatttctttttgcatctcagggaatactgtcagaatctactgaactgtaatgtggrgaagaataactactgatcaaagcagctgcaaaattgcatgtaaaccagggatcacagcatcaagaattggtatctttcaccttctttaatcttctctgggtaaagattaggactactcaggagagtgtactctcaggctgctccctcagaaagtttgcagtgccgcagaactaggggagtggctgtcacaccagagagccrtgcagctctgcagaaaaggccaacttggtggacaccatgttgaacataagccaggaatgcatccttgcagcaaagagggctaatggcattcttggctgccttgggcamaatgctgccagcaggtgaagaaaggcaatcctttcccctctgcccagtactggtgagatcacacctggagtgctgagttcagttctgggctctccagtacaagagagacatgaacgtactggggagagtccagtgaagaatcacaaagatgataaagggactcatcactcacctctcatatgaggagaggct

SEQ ID NO: 75579 - DNA, 600 bp, Chicken  19866894359490_3
ctactgatcaaagcagctgcaaaattgcatgtaaaccagggatcacagcatcaagaattggtatctttcaccttctttaatcttctctgggtaaagattaggactactcaggagagtgtactctcaggctgctccctcagaaagtttgcagtgccgcagaactaggggagtggctgtcacaccagagagccrtgcagctctgcagaaaaggccaacttggtggacaccatgttgaacataagccaggaatgcatccttgcagcaaagagggctaatggcattcttggctgccttgggcamaatgctgccagcaggtgaagaaaggcaatcctttcccctctgcccagtactggtgagatcacacctggagtgctgagttcagttctgggctctccagtacaagagagacatgaacgtactggggagagtccagtgaagaatcacaaagatgataaagggactcatcactcacctctcatatgaggagaggctgagagagctaggtctgtttagccaggagtagaggcacaaggggatctcatcaatgtgcatgaatccctgaggagatggtgcagagaggattgagtcgggctcttttca

SEQ ID NO: 75580 - DNA, 600 bp, Chicken  19866894359505_1
atttcacgggtgcaatgataaatgaccttgcagtctacagcagggctgtacagtggaaacgtcaattaaacttctgggaaactgtcaaggaagtgtcattactctgggctacatttgagttaaacaaccaaaattatggggcctggccatgccacctacatccctacctcacactcttcctattagaaaaaatatcgttctcatttcctggagaaaagctaaagggcttctgtgctctcccttaacaggactgaagaacctaggagagatggaggctgtccatgcctctggcttggctcyggattttggtagtgaactcataaatccctggctaccagagcttcttcttggctgcagaagccttccagggagtccagacagagcaggaatagcacagagataaaatcgctgccttgtagtttttgctgtatgggcaggacatggtagtataaatggaatattttttaatatttctcctggcacagatagaaaagtttattctacrggaatgcggaaaactgatgaaaagctcagataaagtgttacagtaaaagctttattaaaaattgttaaggagggaggcaacctctgtttttagtg

SEQ ID NO: 75581 - DNA, 600 bp, Chicken  19866894359505_2
tcctggagaaaagctaaagggcttctgtgctctcccttaacaggactgaagaacctaggagagatggaggctgtccatgcctctggcttggctcyggattttggtagtgaactcataaatccctggctaccagagcttcttcttggctgcagaagccttccagggagtccagacagagcaggaatagcacagagataaaatcgctgccttgtagtttttgctgtatgggcaggacatggtagtataaatggaatattttttaatatttctcctggcacagatagaaaagtttattctacrggaatgcggaaaactgatgaaaagctcagataaagtgttacagtaaaagctttattaaaaattgttaaggagggaggcaacctctgtttttagtgcacacagttcatttaatccacttgatccatagaccaggccttttgtgagtttctgtgctccatctctgctgtctgtgggctttgtgttgctgttgggtcaacaaatctataaaataatgtaaggaaaaaaaatacattctctttctttgagtaaagctaaaggatctcttcatgtatgtccttattctcaaatggagaatcttac

SEQ ID NO: 75582 - DNA, 600 bp, Chicken  19866894359508_1
cagattttgatgagcacagcatgcagggctctcttgttcatcactggtgaaactgcataactaatagcggcacccatgttgaaaaatagtgttttgtagctgagaatttgttctatcaaacagtgttattgtactcttttatctgttgtagtttccgtggaaataaattgagtgcattacttttggaatgacctacgtacaacaagctgcaataggcaggtacgtacaaatactgcaaaaactacacagactctttgaggcaggtggtcacaatttggcctgaagtaataatactgtaamtctctattttcttactaaaattagcttacaacagcataaaaattgaacwtcggtttcaataaaacgaatcagacagtggtgatctcaaggcatttgcctaattacaaaatcattaaattctgtctctgctgtgcacctcaaagcacygataattcgccaacaatgccttaagcacarttctgtgctcagtgctgaaaatactgcttgtaaacattacaaaaaagaattaagtcaaccaccagccctgctagctgcctgcacacaagatcacaacctagtgagttgtgatccgctacggaa

SEQ ID NO: 75583 - DNA, 600 bp, Chicken  19866894359508_2
aaactgcataactaatagcggcacccatgttgaaaaatagtgttttgtagctgagaatttgttctatcaaacagtgttattgtactcttttatctgttgtagtttccgtggaaataaattgagtgcattacttttggaatgacctacgtacaacaagctgcaataggcaggtacgtacaaatactgcaaaaactacacagactctttgaggcaggtggtcacaatttggcctgaagtaataatactgtaamtctctattttcttactaaaattagcttacaacagcataaaaattgaacwtcggtttcaataaaacgaatcagacagtggtgatctcaaggcatttgcctaattacaaaatcattaaattctgtctctgctgtgcacctcaaagcacygataattcgccaacaatgccttaagcacarttctgtgctcagtgctgaaaatactgcttgtaaacattacaaaaaagaattaagtcaaccaccagccctgctagctgcctgcacacaagatcacaacctagtgagttgtgatccgctacggaagctcagctttatgaggatgatatatggagtaaactcaatgtccatttgt

SEQ ID NO: 75584 - DNA, 600 bp, Chicken  19866894359508_3
gtagtttccgtggaaataaattgagtgcattacttttggaatgacctacgtacaacaagctgcaataggcaggtacgtacaaatactgcaaaaactacacagactctttgaggcaggtggtcacaatttggcctgaagtaataatactgtaamtctctattttcttactaaaattagcttacaacagcataaaaattgaacwtcggtttcaataaaacgaatcagacagtggtgatctcaaggcatttgcctaattacaaaatcattaaattctgtctctgctgtgcacctcaaagcacygataattcgccaacaatgccttaagcacarttctgtgctcagtgctgaaaatactgcttgtaaacattacaaaaaagaattaagtcaaccaccagccctgctagctgcctgcacacaagatcacaacctagtgagttgtgatccgctacggaagctcagctttatgaggatgatatatggagtaaactcaatgtccatttgtaggtacactcttaaactaaaactcaagagcaggagctaacgttaggaagtttctgtaaggactcacgcatttatttaggtcttgactcccctagcatt

SEQ ID NO: 75585 - DNA, 600 bp, Chicken  19866894359508_4
tacttttggaatgacctacgtacaacaagctgcaataggcaggtacgtacaaatactgcaaaaactacacagactctttgaggcaggtggtcacaatttggcctgaagtaataatactgtaamtctctattttcttactaaaattagcttacaacagcataaaaattgaacwtcggtttcaataaaacgaatcagacagtggtgatctcaaggcatttgcctaattacaaaatcattaaattctgtctctgctgtgcacctcaaagcacygataattcgccaacaatgccttaagcacarttctgtgctcagtgctgaaaatactgcttgtaaacattacaaaaaagaattaagtcaaccaccagccctgctagctgcctgcacacaagatcacaacctagtgagttgtgatccgctacggaagctcagctttatgaggatgatatatggagtaaactcaatgtccatttgtaggtacactcttaaactaaaactcaagagcaggagctaacgttaggaagtttctgtaaggactcacgcatttatttaggtcttgactcccctagcattcctcatggagtatgaaaatcaggcttagcc

SEQ ID NO: 75586 - DNA, 599 bp, Chicken  19866894359511_1
  misc_feature (1)..(194): n is any nucleotide
nnnnnnnnnnnnnnnnnnnnnnnnnnnnnnnnnnnnnnnnnnnnnnnnnnnnnnnnnnnnnnnnnnnnnnnnnnnnnnnnnnnnnnnnnnnnnnnnnnnnnnnnnnnnnnnnnnnnnnnnnnnnnnnnnnnnnnnnnnnnnnnnnnnnnnnnnnnnnnnnnnnnnnnnnnnnnnnnnnnnnnnnnnnnnnnnnnaagatctgtgtattgcagatggcaaggtaagttctgtctccaacagaaggtcatagtagcaagatcagtgttacaacttgaaagaaaatatgggggttgtagattkttttggttttgttttttagtccacatagcttggtttctgttcaaagtgtaaaaatttctttctcatgtaagaaataagtatatgtgttcaagtggccagtgctttcttagatattgcatcatttacttagctgctctaatacctcatgtgcscaaaccttttttggtagcttgcttgggtgttatactgtgatatcatatgtctggactacgatgggaacatcttggatgccagtacctttgctttgttagcagcactgaaaaatggtaagtcttctgtggagtaaaacactctgacta

SEQ ID NO: 75587 - DNA, 599 bp, Chicken  19866894359511_2
  misc_feature (1)..(42): n is any nucleotide
nnnnnnnnnnnnnnnnnnnnnnnnnnnnnnnnnnnnnnnnnnaagatctgtgtattgcagatggcaaggtaagttctgtctccaacagaaggtcatagtagcaagatcagtgttacaacttgaaagaaaatatgggggttgtagattkttttggttttgttttttagtccacatagcttggtttctgttcaaagtgtaaaaatttctttctcatgtaagaaataagtatatgtgttcaagtggccagtgctttcttagatattgcatcatttacttagctgctctaatacctcatgtgcscaaaccttttttggtagcttgcttgggtgttatactgtgatatcatatgtctggactacgatgggaacatcttggatgccagtacctttgctttgttagcagcactgaaaaatggtaagtcttctgtggagtaaaacactctgactactgctgctggcagaagtggtcactaattgaaatgtcttaccttgatcatcttcccttgttcatccattttgtgtaggcagaataaattgggggctttcttgtttggcagaatacagtattccaagcttaatgcattatagtttgaaataaat

SEQ ID NO: 75588 - DNA, 600 bp, Chicken  19866894359519_1
tttactctctcccttcagtatggcttttatgctactgccccatgcctaaggctctgtgttgcatcccttttcttgtggcacataccctgctagcaaaggctctgggaattgcccaccagtttcctgctctttcctactgcttcagaagactgtttgctcttagccctgcttgctcctcaatgctcagcttcttttcatttcccttataagctgaaaatattctgcttataaacttcagactcccattacagagagagggtgtagaaacaatagacaacagtcagtcatcacttgcagaasctagcaatactcatctcctttctccttctcccccctacagtcaagagttttgattcttgcccaaagtagtaagatttcattcactgaaatgggcacattctataaaatgttagagctcagttggatgcagatgtcaaaarctcccccactacaaacacatatgcaacctggatgacagcaatttgcagccacgtcctttaagaactacccctcccttctccatttaaatccgggcaagtaggagcctctatctgttttttttttggtgtcttcatttcttctgactccaaacagatgcct

SEQ ID NO: 75589 - DNA, 600 bp, Chicken  19866894359519_2
ttcagaagactgtttgctcttagccctgcttgctcctcaatgctcagcttcttttcatttcccttataagctgaaaatattctgcttataaacttcagactcccattacagagagagggtgtagaaacaatagacaacagtcagtcatcacttgcagaasctagcaatactcatctcctttctccttctcccccctacagtcaagagttttgattcttgcccaaagtagtaagatttcattcactgaaatgggcacattctataaaatgttagagctcagttggatgcagatgtcaaaarctcccccactacaaacacatatgcaacctggatgacagcaatttgcagccacgtcctttaagaactacccctcccttctccatttaaatccgggcaagtaggagcctctatctgttttttttttggtgtcttcatttcttctgactccaaacagatgcctttctctttcagctaatatttcaatatatatatattccatattcccagatattcccatgcattttaccaaaactatttcacttgcagtatttgtgttaataatgttgaggctgacaaagaaaggaggaaggtctgactatc

SEQ ID NO: 75590 - DNA, 600 bp, Chicken  19866894359519_3
aggctgacaaagaaaggaggaaggtctgactatcattcgtttcactagtctatagtcattttaaattaggttcacatggggttttaatggaattttatgtaagttctagatgttcaatgaccttccagattggagaaatattaaaggtgtttaccttttcacagagaatcaaaaacacacagagtttattttcctgcccttttagacctagttattcagaaactcctatcttgcagtaaaaacttgtaaaaatataaatatatatatatattgtcatgctcccgtaagaaggaattctgkgtgcaagtgagctcattagctccttgacattttttccttgcagaaaagcagataacaaatgagagggcagtctacttcaactaaaacacagatcatttatcttcctgacatacaaagttttactgcttcagacaaatacttgcaaaccacagagagcaaagtaagaaaataaagcactgatgcactgacctaagagcaatatttacctctccagtgcctgaagagaacccacaagcactaggctgcagcatgatttgttattgctggtcaccttgcactaacttctatgcatggaaattg

SEQ ID NO: 75591 - DNA, 599 bp, Chicken  19866894359522_1
  misc_feature (1)..(94): n is any nucleotide
nnnnnnnnnnnnnnnnnnnnnnnnnnnnnnnnnnnnnnnnnnnnnnnnnnnnnnnnnnnnnnnnnnnnnnnnnnnnnnnnnnnnnnnnnnnnnnaaaacgtacacaccacgttatcagatggatagctgttatcttaagaaagacttaaaacatcattatcaggcaaaagacctgcaatatgacagacattatgaagtcagagggaaatttcagatggaatctgcgtggagagatgacggaatagtgatgatttacatctgcggtcactttggcacagtgacactgatttactttttagyagagaaargaatggtctcttaccaacaggagaatgttgtgttagaagatgcagctgtttggccagagtgacattctcctgcataccttctggggctttcacggaccatccttcatcaaactacatcactttgatgcaaggaaagtggagcagagggacagcgtccccagagaggctgtgacctccctgccctgggggctttcaagacctatgggggtaaagccctgggcacctgggcctgattttagagctgaccaaaatatctcttgatctgatttgttacaactggaataattggta

SEQ ID NO: 75592 - DNA, 599 bp, Chicken  19866894359522_2
  misc_feature (1)..(86): n is any nucleotide
nnnnnnnnnnnnnnnnnnnnnnnnnnnnnnnnnnnnnnnnnnnnnnnnnnnnnnnnnnnnnnnnnnnnnnnnnnnnnnnnnnnnnnaaaacgtacacaccacgttatcagatggatagctgttatcttaagaaagacttaaaacatcattatcaggcaaaagacctgcaatatgacagacattatgaagtcagagggaaatttcagatggaatctgcgtggagagatgacggaatagtgatgatttacatctgcggtcactttggcacagtgacactgatttactttttagyagagaaargaatggtctcttaccaacaggagaatgttgtgttagaagatgcagctgtttggccagagtgacattctcctgcataccttctggggctttcacggaccatccttcatcaaactacatcactttgatgcaaggaaagtggagcagagggacagcgtccccagagaggctgtgacctccctgccctgggggctttcaagacctatgggggtaaagccctgggcacctgggcctgattttagagctgaccaaaatatctcttgatctgatttgttacaactggaataattggtagttcctcy

SEQ ID NO: 75593 - DNA, 572 bp, Chicken  19866894359522_3
rgaatggtctcttaccaacaggagaatgttgtgttagaagatgcagctgtttggccagagtgacattctcctgcataccttctggggctttcacggaccatccttcatcaaactacatcactttgatgcaaggaaagtggagcagagggacagcgtccccagagaggctgtgacctccctgccctgggggctttcaagacctatgggggtaaagccctgggcacctgggcctgattttagagctgaccaaaatatctcttgatctgatttgttacaactggaataattggtagttcctcytatttattatggggcttcttaaaaatgtgaacggtttactccatcttccattaacagaagagctttgaaagtgagttagatatagttggtataaatcatactgtaaacagtgagactgaggtctggcatctcagtttcataaagaaggtttcttactcagctaaatccacatggattaccaaattattgatttttgatagaaaagccagtgaaagaggccagggacactgaaggagcctctcagtgaatgctcaagtctgcaggaaaccaag

SEQ ID NO: 75594 - DNA, 600 bp, Chicken  19866894359527_1
cataatatttaagcataacggctctcaagaagacactgtccctttctccctgtatttcttctctgaaaatgccagtctgattgcatcgttcagaaacaagggaaggatgagaggggtttgcattagcgccttttcttaaccatcgccccgttttccacttgagaagtggaagtattctgattcgcacaggggccctgtaagatacactgcaatggcaggctgactaggtgcctgcttttatggaaacagagggaaaagtgcctatttctatacttggtatttatttcatgattaaacaaygatgtggctgggagcattgttcccattgtccaccagtgtctgtaaggggcacccgagataagtccctctcctgagcagagctggaatcaccactcgctgtctcctctagtaattttgttttgcaaaaaagtgcaattaaagactttccaggcaatggaggcctcataaacatatcatttcagagcacagctaatgcacaagctgatttttgttcatatatatatacacacacacagtgtatgcgacatgggtggtttttcatgtttacacagagatataattatgaatgacatgaaggct

SEQ ID NO: 75595 - DNA, 600 bp, Chicken  19866894359536_1
tgcagcaatgtagacacgtggatgtatgagtatgaatgtctagttaatgtaattattcccctaactatcaatcttacagactgaacgttaggttaattataggcccttgaagcatctttagaacgtacttacatctgtgaaatggcacactatggtccttctctttttcacaattagagtttgattactctacagctttcagcagagttgtagcacgtcaaaagttttaaattccagtgaagacagaacataaacgttgcttcaggatgggagtaaatcaacatctttttaccccttcartatttttaatggcgagtgttgtacggtgtgtaattaatctaagctagagtttaatgcaagtaggtggaaacactctatttaaatattttcacataatcacagaatatctgagcctggaggtaccactgactctaactctgccccagcagggcagccagagcagggtgcccagcaccatgtccagggtcttttggacacctcaaaggaggtgatcctgaaccctctctgggttcctgtgccagtgttccagcacccacacagcatagaagtgctgcctgatgatatcttgcccaaagtgtg

SEQ ID NO: 75596 - DNA, 600 bp, Chicken  19866894359537_1
ggaaaacatgttcttatttttatgtcttgtagaactgctgcatgaattgaagcgtattctcagtgttactgaaagtttccaggctcatgcttaaaaaaaaatatctatttctgtccataatcctattagatgtgatggagtctctagtagccacttataagaaagttggtcacttcaaaacccctgaaaagacagggacagaattcaaaataaagcaaacagagctgtttgaagtacagaaagaatatagcacctatttcaagactgcagctaaaagtaaactgctgttctgacagaagyatccaacctggtcagtctcaagcaaggatgctgagagctaagatctgcagcagctgaaaaccagaagtggctaataaagcctggttattggctgtagtttgttacaacactttaacacacacamaaaaaggctgaccttacaggctgaaatttctttagaaaccatctatcatctttttgcattgccactaatgctttgcagcacttagctaatgattaggaattcctctggttttcactgtcactgtatgaatcatttggttttaatgtagatatcctaaccaggtctgaacaattctg

SEQ ID NO: 75597 - DNA, 600 bp, Chicken  19866894359537_2
attagatgtgatggagtctctagtagccacttataagaaagttggtcacttcaaaacccctgaaaagacagggacagaattcaaaataaagcaaacagagctgtttgaagtacagaaagaatatagcacctatttcaagactgcagctaaaagtaaactgctgttctgacagaagyatccaacctggtcagtctcaagcaaggatgctgagagctaagatctgcagcagctgaaaaccagaagtggctaataaagcctggttattggctgtagtttgttacaacactttaacacacacamaaaaaggctgaccttacaggctgaaatttctttagaaaccatctatcatctttttgcattgccactaatgctttgcagcacttagctaatgattaggaattcctctggttttcactgtcactgtatgaatcatttggttttaatgtagatatcctaaccaggtctgaacaattctgatggaatcagcaaattaattacttcatttaatcttctcagacacgtttcctaggaactgtggtacagatatttagaacattagtcagaaccttgtagaagtgtaaaggtcagtgaaattaatgg

SEQ ID NO: 75598 - DNA, 600 bp, Chicken  19866894359540_1
acgccatctccatcagggtcaagagcactgactgtagctaccaatgtatttgggcctgcatcttcagaaacaaagctcctgtagctgttaaacaaaattatgatcatttatgaaatttagacagaaaaaaaatatgcacaggacttctacttactacgtgtataaagggtactgcagagatctctaatttattactgtaattacactactaagtaatataccactttgtaagtagtaaatgatagcactgatgactcatccaaccttccacatctcacgtctttctgtggttacctcctrtagatttccattgtaaacttccagcattgctgacattctcaagcttagcttcacaaggtttgggctaaacgcaaaacttgttgatttattttgttcatttcagttataccattcacagaatcaaagcaaatatttactatatttaaaaacactgcctgttacagcataytgtgtttttgagacacgttgatacagtagtttcagtgcagtctttgcagcagcaggacaaagatcagatcyggagggtatgtgcataatgccagttttgcaaagatctctcctcaggaccaggcacatcac

SEQ ID NO: 75599 - DNA, 600 bp, Chicken  19866894359540_2
tactgcagagatctctaatttattactgtaattacactactaagtaatataccactttgtaagtagtaaatgatagcactgatgactcatccaaccttccacatctcacgtctttctgtggttacctcctrtagatttccattgtaaacttccagcattgctgacattctcaagcttagcttcacaaggtttgggctaaacgcaaaacttgttgatttattttgttcatttcagttataccattcacagaatcaaagcaaatatttactatatttaaaaacactgcctgttacagcataytgtgtttttgagacacgttgatacagtagtttcagtgcagtctttgcagcagcaggacaaagatcagatcyggagggtatgtgcataatgccagttttgcaaagatctctcctcaggaccaggcacatcactgacactgtaagctcttaagaggcattatcagcctaagcttaatgctcttggttgtagaaaagccctctgctttagcaaagtcccaaatacttattattttctctgactggattgggcataggctgggctaagcgtacaacagaccagcccacggtggatatcccaaag

SEQ ID NO: 75600 - DNA, 600 bp, Chicken  19866894359540_3
gatagcactgatgactcatccaaccttccacatctcacgtctttctgtggttacctcctrtagatttccattgtaaacttccagcattgctgacattctcaagcttagcttcacaaggtttgggctaaacgcaaaacttgttgatttattttgttcatttcagttataccattcacagaatcaaagcaaatatttactatatttaaaaacactgcctgttacagcataytgtgtttttgagacacgttgatacagtagtttcagtgcagtctttgcagcagcaggacaaagatcagatcyggagggtatgtgcataatgccagttttgcaaagatctctcctcaggaccaggcacatcactgacactgtaagctcttaagaggcattatcagcctaagcttaatgctcttggttgtagaaaagccctctgctttagcaaagtcccaaatacttattattttctctgactggattgggcataggctgggctaagcgtacaacagaccagcccacggtggatatcccaaagctcagacacaacagtgagttacagctggctctgtccaacagcatagataaaacacatgggtatcactgcac

SEQ ID NO: 75601 - DNA, 600 bp, Chicken  19866894359551_1
cacagttatcacaaacataagccattcaaatgttgttttcatccattaaaaaaaaacaacaaaacaacagagcaatgtgtgaaccatcacatatttcttctgatcattacatctccaccactgtattgtgcagatcaacaaaaacagatatctaaatcagatttttattgaggtggaaatactcctctgatagagtaatctctatggggattgttaagtcagatccctcaaattattattttaatgcttggtggagctctgctttgaggaagaaatatttaccttaggctgattgacatwtgggaggcatagctcattctctccctaggaacaatagaaagaccatttctgacctgatcatttcaaacagaattatttctagtaaaaataagggagaagaaagcacagcaggggcttttggaaatcaagaaggattgttgagagtaatacttaataaaagaaaatccttctatgtgggcttaaaagactccacttgttttacttttgtttttccractgaagagagtttctatagtgggcagacaacaaccaagatccccaaagtatgagaaccttctcttcaaaaggggcacagggagt

SEQ ID NO: 75602 - DNA, 600 bp, Chicken  19866894359551_2
aagtcagatccctcaaattattattttaatgcttggtggagctctgctttgaggaagaaatatttaccttaggctgattgacatwtgggaggcatagctcattctctccctaggaacaatagaaagaccatttctgacctgatcatttcaaacagaattatttctagtaaaaataagggagaagaaagcacagcaggggcttttggaaatcaagaaggattgttgagagtaatacttaataaaagaaaatccttctatgtgggcttaaaagactccacttgttttacttttgtttttccractgaagagagtttctatagtgggcagacaacaaccaagatccccaaagtatgagaaccttctcttcaaaaggggcacagggagtgggatagaaccaatctccagactgattgctcctcttactctgccctctgttcttacagaacttcaaaatacctgaattttagaatcaatggtacttccattcatttcactgagctttgggtaaggttgcaagcttcctgcccttatctttaccctgctctcttcaatccaatctttgcttgtcctgaagccttagcagcatcttcccctagagtc

SEQ ID NO: 75603 - DNA, 600 bp, Chicken  19866894359555_1
ggataatctcgggaaccatcatggatcaattaaaggtcaaccagggggtcaggcccagacagcatgagtttatgagcagatcctgccaggtagatcctgtttgacaaacctggtttcgttctatgacaaggtgacgagcttagtggatgaaggtaagactgtcaatgtggtctacctggacttcagtaaagcctttgatgctgcccccactgcatccttgtggagaagctggctgcccacggtctggataggcatatgctatgctgtgtgaaacactgtctagcccaaagagttgtggtmaatggggttaaatccagttgacagccagtcacragcagtgtcccccagggcccagtactggggccgcttctatttaacatcttcattaacgatcttgatgaggggattgaatgcatcctcagtaagtttgcagacaacaccaagttgggagggagtgttgatctcccagcggggagaaaggcactactgaggggcctgaatagactggatcgataggccaaggtaaattgtatgagtttcaatagggctaagtgttgggtcctgcattttggtcacaacaatcccaggaaaccctacagg

SEQ ID NO: 75604 - DNA, 600 bp, Chicken  19866894359555_2
aggtcaaccagggggtcaggcccagacagcatgagtttatgagcagatcctgccaggtagatcctgtttgacaaacctggtttcgttctatgacaaggtgacgagcttagtggatgaaggtaagactgtcaatgtggtctacctggacttcagtaaagcctttgatgctgcccccactgcatccttgtggagaagctggctgcccacggtctggataggcatatgctatgctgtgtgaaacactgtctagcccaaagagttgtggtmaatggggttaaatccagttgacagccagtcacragcagtgtcccccagggcccagtactggggccgcttctatttaacatcttcattaacgatcttgatgaggggattgaatgcatcctcagtaagtttgcagacaacaccaagttgggagggagtgttgatctcccagcggggagaaaggcactactgaggggcctgaatagactggatcgataggccaaggtaaattgtatgagtttcaatagggctaagtgttgggtcctgcattttggtcacaacaatcccaggaaaccctacagggttggagaggagtggctggaaagctgcctgatg

SEQ ID NO: 75605 - DNA, 526 bp, Chicken  19866894359556_1
gacgaattagcacatgccagaaccaggccttccccctctggaagcggatgttgttagccgtgagagaaaaacacccctttaaagatgatctcatgcctgagaaaaggcaatggactgatatggaaaaaggcatccgttatttgagagaatgcgccatggtggaaatgatatacagccctgatttcatccctgacgagccagaccaagagcatgatcctgagagagtctggtgtacaccaaatatgtggtgcacattcactaagactgcaccagaaaggtatgccagtacatttgcagcamtgtatggcagaggggaaagaagaccccttatagatgatttggttaatagactccaagactttgagttgcatttaaatcctctacgagccttgtgtttcagccatcacaaggatagttgaaaggctagacagaatagagagcaaacaagaggatataatagacaaactgtctatcatacgtgatgctggatggatccatggtggacgaggaccacaattcccaaaac

SEQ ID NO: 75606 - DNA, 600 bp, Chicken  19866894359563_1
atcagtgatgcttcccagtacaggctatcatttggcacaaatggtataaaaacctaagtataaaactagttagttcctacatgtacctcagcgtttcacactgcatacactgctactccaagactaagaagtggaaagacatccagattttgtactagttttatctcttttgctggaacacagatgggaaatgttgaagtctgaaagcatgtgatacaagtagacatgtaaaatctcagtgcagttataatcctgtcactatgcgatatctaataattatatgcaagtcccaagcatccmaatgatgtgacacggaataaaaggaatgatttttctgcagtaaataaaccatgtaaatgaaactgagaaaaaaaagttctgttgaactacttatagatatctatgagagtgatcacatactagtggaactaatgttgggtaagattgagtgcttggaaataaagccctgattttctcagtaagtaatagcaaattaggttgttttcataatcacatcctcacagaaattagaatcactactaaatttaaaaaattagatttaatcatgtttttgggaatcagtgaggaaccttaaaagga

SEQ ID NO: 75607 - DNA, 449 bp, Chicken  19866894359563_2
gcttaaatgggataggtactgtgaataagaaattgtacttttttgtagcttaaaattcactttcctgttatacttgccaaggcaatattatcatggtctagtctaaccttggtcataaatcttaatctctaacaaaacttaaaactgcagattagacttaacatgcatgtcttcagctactgtacaaggagatactctcaggagcatttccaaaaatgaataatgtgcacaagtgagaagctcttttcacattttgcaccactaaagacacttggaatttgaacatactgcctggtgaarcgttattgttaggtaacttgactgagatgatatttatcgaaactataagtcayacgagttgggctaatgagacatatttatgtacattttatgccctgctgaaccaaattgtaataaacttcatagtgcatccagtagatataccttct

SEQ ID NO: 75608 - DNA, 396 bp, Chicken  19866894359563_3
aattcactttcctgttatacttgccaaggcaatattatcatggtctagtctaaccttggtcataaatcttaatctctaacaaaacttaaaactgcagattagacttaacatgcatgtcttcagctactgtacaaggagatactctcaggagcatttccaaaaatgaataatgtgcacaagtgagaagctcttttcacattttgcaccactaaagacacttggaatttgaacatactgcctggtgaarcgttattgttaggtaacttgactgagatgatatttatcgaaactataagtcayacgagttgggctaatgagacatatttatgtacattttatgccctgctgaaccaaattgtaataaacttcatagtgcatccagtagatataccttct

SEQ ID NO: 75609 - DNA, 599 bp, Chicken  19866894359567_1
  misc_feature (1)..(52): n is any nucleotide
nnnnnnnnnnnnnnnnnnnnnnnnnnnnnnnnnnnnnnnnnnnnnnnnnnnntgtataactcttcacacagccactgcatggagtgaagcttagagttaggacaggaaagaaagaagaggccagggccaggtgatttctccaggtctcctcaccctgaccaggacacattgtgtccccagaaggcttgacatacacacgctctccagttcagtggctgctcatggtcagtgctccatttctcagctctcaataaaacacaggggccttcacaattaactcctagggaatattactaattktgagagccaaaattaattgtatttatgtctaagtttttatacccttcctctgcaaccctctgcattatgctcatctacaggctgagttctgaggctgttagaaaagaaacagccttccagctgacaaacgctctcactgctcagcagtgtcagccagtgcgtggtcctcctgttcctgctggtggcacccagtctgctcgctccctacctgttttaaacacagcacctggaacagattcatgtatttgtcaaaggaagatgtaagagagcaaggaatggaggagacatctcatgtctaa

SEQ ID NO: 75610 - DNA, 600 bp, Chicken  19866894359574_1
aagctccttacaaggaccacacaatgtcttcaattatacctagagagagcaccatagtgttactctgtacacatcagttaccaacaagaatactataccacagtataataaaatatagccaaacacattaacaatgaacatctccagacactgtctttcttctaacagcagcagaaagcatttaaccttttaactcctggtgccctcccctcaagtgctttttcctcccccaaaaaatctaggctttaagagtgaccgactattttaaacatttccaactcctggttttgcatgcagtakgtcatgctgctcccccaaaagtcttgcaatcttatcgtgaagcagcactacttatgttttcttcaaattcacgtttttgctgtataggaagtttcagaaagtatgcattccctcgtctgattaaaataaaataaaataaaatactctccccacccacgagaggaactgctaaccctatatccaggcatccacgctggagcccaccgacccagagaaagcccctgcagaagtgacagccccgagcaaaagccagcctgcccccgacctgcggagcgctggggacgagcgcggtgcaggagc

SEQ ID NO: 75611 - DNA, 600 bp, Chicken  19866894359584_1
gaagctgctcacttcaggcagctccaaccaaatcgggattgaagtggtgtattgacttatcagcagcgtgtaattaaccatcaatcagcgaactctataaggaggatcaatatcagcaacgcagtggataaaccacaatagtgggcacctacgcattgctgatcttcaactatggattacttaacagccttctataaatgatccctccgtggtggtcttacctcgatggttgttttgcccaggatgggctctgtataccccaccagacctcctggtccccttgggcatgattcagcggcrtagcacatcctcagtattagcgctgtacctctgcactgctgatctgggatccctgtaaaaagagaagcacctgcatccctcttggggcgggggggcaggcggggccccagggwagagctccctgggctgcccaccttctgacctgctcctgggggaggggggtatctgtactgagctggaatttcccagctgaagtccattttgtgcctttttttcttttttgcatctggaacaggtgagatattaagtgtctctacctttggttggtagacatatagcagagctccccgggagagtaca

SEQ ID NO: 75612 - DNA, 600 bp, Chicken  19866894359584_2
cagcaacgcagtggataaaccacaatagtgggcacctacgcattgctgatcttcaactatggattacttaacagccttctataaatgatccctccgtggtggtcttacctcgatggttgttttgcccaggatgggctctgtataccccaccagacctcctggtccccttgggcatgattcagcggcrtagcacatcctcagtattagcgctgtacctctgcactgctgatctgggatccctgtaaaaagagaagcacctgcatccctcttggggcgggggggcaggcggggccccagggwagagctccctgggctgcccaccttctgacctgctcctgggggaggggggtatctgtactgagctggaatttcccagctgaagtccattttgtgcctttttttcttttttgcatctggaacaggtgagatattaagtgtctctacctttggttggtagacatatagcagagctccccgggagagtacagccagtactgtagcatataatgtttggcaaaaaaggtggaaaaagcagaattacattggagtaatagtttgggggggggtcggttttttgggtttttttgttgttgttgttgt

SEQ ID NO: 75613 - DNA, 600 bp, Chicken  19866894359592_1
ataacccatttaagcttctgctctacagatgtttaagtctatacagatgcttggcagcagacagcatatttactgcatacctgcagctagcagggaccaaagtcactaaatctgcaaaatgtggtaagagagaacacagattttctagctggtgtccagtgttgcacagatgctatgcaatgaaattgcaaagttacttagtcctgcctgtggaggcataaattagccaagtgagagtaacccacagatgcagctagtcttgctttcagattcaagctgtgtctgcagcttgtctgtgtscctcagtgttgtagttttctgcaatttcaatttggaggccagtctttctgttaaatgtataaactgtttgaagtgtaggtttagaaaagaaagcaactaaagtaaaagaaaatgcatactttagaatgtgtagttttacctgtgttaaaagtgaggctgtgtacaatggactgtaaaagtacagcaagcaatgacaaggtctcagctgatattttctatgggaaataaaacccagcagaatctcatctggctgtcagaaacagcccagacattatacacatggctgttgcagctaagaac

SEQ ID NO: 75614 - DNA, 600 bp, Chicken  19866894359600_1
ctgttactgcacttctgaaattatcttctgattttccccacctgctctgctttggtttgccctttggagaagtcataacaaagatggactcaacctagatgaaactaaaccagagatgcatacctcatggtatatgcatatcatgcatagcctcatggacacttactgcaaaggatcagacttgactacaccacagggaaaaaatctctgtagaatggatggatatgagtgtcaactccttatccttagttgttttggtctccagctctaattgttccatttcactacttgctagtgtakacaaagcctaagcaatttgctcaaggccatagagtatatgtcaacagcactgggaagacagatcagcccttctgagtctcttttaatctcttcaagacattcagtgcaatcacatgtgcagctatatataacccactgcatccaaacagctcaggctagatataacctcatgtcaggatgcacatctgctctgccaccagctgtggtcagatgagatgccccccctttgcatgggcctatccctcacatctttcttttccacagtaaagtgcctttccttccatcagtgagtaccacaat

SEQ ID NO: 75615 - DNA, 599 bp, Chicken  19866894359607_1
  misc_feature (1)..(49): n is any nucleotide
nnnnnnnnnnnnnnnnnnnnnnnnnnnnnnnnnnnnnnnnnnnnnnnnntttctgaaaatattttttccatggtttttgttcctcttgacatttaatactacgagagttagaaagctatacccaaggccagtctgggccctgggttgtaaagacagggaaggcaaacccatggggttgtcctggatcaagaaaagacagctaagatcaagagatctgcttagatagacaatcaagagtagactttcatgcagaaggattaacaccacaggaacgagtttcctactgtgcaggctttttgraaagttccacacttctgagcacagtggttcaccagaatgacaaggaaggatgcattgggtgagggactgggtgagcttaggtcctgctgcagcatacagcagggtcaaatggatggcctttgaaagccaatacaaagtcaagataactgaaaaggcagttctacttaaaccattcagctctcctctatgtcagttaactgctttctgggcagctaaagcagacaccacagttcctacatttggcagaacactttgaagccaaccaaccagccaagaataaaccaggagaaaagatgggt

SEQ ID NO: 75616 - DNA, 600 bp, Chicken  19866894359631_1
aaaggttttattatatttatatatatgtatcattattctctaacagagggtaggaaggagaggaaactgaagttaatattagctgactattaaataagatatcaatatagccatttcctgcatatttgctctagtttataaggtaaaactaaaagctgcattaagtaccttaagtgggagactttctgcttctgtgatatgttattccaagcatgaagagttcatctcagaattaaaacatgggtggaggattaaagcaaagagaatactaaaatatagacactttcataaatcagagtwatgatacagtttaactgcattcaatgcagtgtatgatattacttccaaagtttcaatttttcctaccttcacaaagagaaaaaccataactgatacaaaaaacatagtttcaatacagatgtggcaattagggcattttttttatataaaatagatgtaaatatgctcctgaatacctgttatgttttctttttctatagcaatgataagaggagttcagagatgatgtggagtagtgacacagccaagcactaacgtgttcatagagagsacaggaataatttytctacatcacaataa

SEQ ID NO: 75617 - DNA, 600 bp, Chicken  19866894359631_2
aaatatagacactttcataaatcagagtwatgatacagtttaactgcattcaatgcagtgtatgatattacttccaaagtttcaatttttcctaccttcacaaagagaaaaaccataactgatacaaaaaacatagtttcaatacagatgtggcaattagggcattttttttatataaaatagatgtaaatatgctcctgaatacctgttatgttttctttttctatagcaatgataagaggagttcagagatgatgtggagtagtgacacagccaagcactaacgtgttcatagagagsacaggaataatttytctacatcacaataaatgcaagtcaaggtcaaattagcatcagagtttgagtgattcacacagcatgaataatttatttaatatgtagtgtttttccttacttgttacaaatgcacaagcagattcgtttccacatgtcatatttgcatttgtcatactgatttaaattgcctatgatcttcataaaagttaggtttgttatctcatggttattagtcaaataacatacgttgttattcacagcccaattagatacatgcagaaatgctcccaggatgagtgcccg

SEQ ID NO: 75618 - DNA, 600 bp, Chicken  19866894359631_3
tcataaatcagagtwatgatacagtttaactgcattcaatgcagtgtatgatattacttccaaagtttcaatttttcctaccttcacaaagagaaaaaccataactgatacaaaaaacatagtttcaatacagatgtggcaattagggcattttttttatataaaatagatgtaaatatgctcctgaatacctgttatgttttctttttctatagcaatgataagaggagttcagagatgatgtggagtagtgacacagccaagcactaacgtgttcatagagagsacaggaataatttytctacatcacaataaatgcaagtcaaggtcaaattagcatcagagtttgagtgattcacacagcatgaataatttatttaatatgtagtgtttttccttacttgttacaaatgcacaagcagattcgtttccacatgtcatatttgcatttgtcatactgatttaaattgcctatgatcttcataaaagttaggtttgttatctcatggttattagtcaaataacatacgttgttattcacagcccaattagatacatgcagaaatgctcccaggatgagtgcccgtatttttaagtttt

SEQ ID NO: 75619 - DNA, 600 bp, Chicken  19866894359636_1
tttgtgagtcctataattgaataattaaaagctttacttaaatggttcagataattttccacttgtgtgaattttaagtcaagcagtaaaattcaagtaattcagcataagtgtgtttcaaggctgggcttcctctcttctcccctttcctgtctgccttgtggtagtcacagtgcctgcatcagttcctgtactccataaaactgctcacatttaagtgaaaacagtcttatcttaacctgggcttgcacatcacacaacagtggaggagactcggtgggaatgctgtcaggcagttgsgctgaacagggtgggctgctaagacaaagtggataccaaatcagcagcatcaaggagaaaactgtgaccatgctaacaggtcacaagactggagccttaaagcacaaattgttatgaacaacaccagttttaaaagattaataataacaattagaattggaactgtttgggagggttcttgatgtgattggaaatgagaagcctggagagacagggcattagggactgagaaagaaggaagcacagaagtagagctgccatcagtacaatgatagatgcgtggattggcatgcaaagaaa

SEQ ID NO: 75620 - DNA, 600 bp, Chicken  19866894359638_1
ctcctcttccctgtacccttgcaagctgagaaaggaaaagcttgtgcgacgcccagcttaaattttacagcacctgtgctacctcattccacacacatcctccagtacagaaatgaattttggaagcattatgctggcattgaagcatggttgttggtgctggcttcttgccaagcctaagaatccaataaattaaggaatatccttcactacattcagaagaaacattccagctgcagtagacaaacaaccctatctatagatactaaggaaatatttgtcattagtttttaaaagagytaactctcttctgctaaacttctaaaccaaccaaggtgatttgtttgactggaaagcagagtggcacgttacctcttaacatcatttagtttagtaagtcagatktcattctaaacaaamagtgacagctattaataaacacaattcttttgcatgcactgaagtcagctggagctttacaatctactccagtttctttgtcctrggaacccccgtgttgctcagccctctccctygggtgcccacagctggagcagctctgtgcctactctgctcctacttggttctgggatgcacttc

SEQ ID NO: 75621 - DNA, 600 bp, Chicken  19866894359638_2
tacagaaatgaattttggaagcattatgctggcattgaagcatggttgttggtgctggcttcttgccaagcctaagaatccaataaattaaggaatatccttcactacattcagaagaaacattccagctgcagtagacaaacaaccctatctatagatactaaggaaatatttgtcattagtttttaaaagagytaactctcttctgctaaacttctaaaccaaccaaggtgatttgtttgactggaaagcagagtggcacgttacctcttaacatcatttagtttagtaagtcagatktcattctaaacaaamagtgacagctattaataaacacaattcttttgcatgcactgaagtcagctggagctttacaatctactccagtttctttgtcctrggaacccccgtgttgctcagccctctccctygggtgcccacagctggagcagctctgtgcctactctgctcctacttggttctgggatgcacttctttagagtggcttgctcttatgaagttgtccaagtatgacaaaacaaacaaacaaacaaaaaaaacagctgtgtctttttcagctctctattctcttgccatcag

SEQ ID NO: 75622 - DNA, 600 bp, Chicken  19866894359638_3
tggaagcattatgctggcattgaagcatggttgttggtgctggcttcttgccaagcctaagaatccaataaattaaggaatatccttcactacattcagaagaaacattccagctgcagtagacaaacaaccctatctatagatactaaggaaatatttgtcattagtttttaaaagagytaactctcttctgctaaacttctaaaccaaccaaggtgatttgtttgactggaaagcagagtggcacgttacctcttaacatcatttagtttagtaagtcagatktcattctaaacaaamagtgacagctattaataaacacaattcttttgcatgcactgaagtcagctggagctttacaatctactccagtttctttgtcctrggaacccccgtgttgctcagccctctccctygggtgcccacagctggagcagctctgtgcctactctgctcctacttggttctgggatgcacttctttagagtggcttgctcttatgaagttgtccaagtatgacaaaacaaacaaacaaacaaaaaaaacagctgtgtctttttcagctctctattctcttgccatcagtcttgcctggaccat

SEQ ID NO: 75623 - DNA, 600 bp, Chicken  19866894359638_4
ttcactacattcagaagaaacattccagctgcagtagacaaacaaccctatctatagatactaaggaaatatttgtcattagtttttaaaagagytaactctcttctgctaaacttctaaaccaaccaaggtgatttgtttgactggaaagcagagtggcacgttacctcttaacatcatttagtttagtaagtcagatktcattctaaacaaamagtgacagctattaataaacacaattcttttgcatgcactgaagtcagctggagctttacaatctactccagtttctttgtcctrggaacccccgtgttgctcagccctctccctygggtgcccacagctggagcagctctgtgcctactctgctcctacttggttctgggatgcacttctttagagtggcttgctcttatgaagttgtccaagtatgacaaaacaaacaaacaaacaaaaaaaacagctgtgtctttttcagctctctattctcttgccatcagtcttgcctggaccatgagacaacttccattccagcctctgtgttgacttgttttcttaaatgtggattcttgatgcatcaggcctgcgtgtgcccaagga

SEQ ID NO: 75624 - DNA, 594 bp, Chicken  19866894359638_5
cagtagacaaacaaccctatctatagatactaaggaaatatttgtcattagtttttaaaagagytaactctcttctgctaaacttctaaaccaaccaaggtgatttgtttgactggaaagcagagtggcacgttacctcttaacatcatttagtttagtaagtcagatktcattctaaacaaamagtgacagctattaataaacacaattcttttgcatgcactgaagtcagctggagctttacaatctactccagtttctttgtcctrggaacccccgtgttgctcagccctctccctygggtgcccacagctggagcagctctgtgcctactctgctcctacttggttctgggatgcacttctttagagtggcttgctcttatgaagttgtccaagtatgacaaaacaaacaaacaaacaaaaaaaacagctgtgtctttttcagctctctattctcttgccatcagtcttgcctggaccatgagacaacttccattccagcctctgtgttgacttgttttcttaaatgtggattcttgatgcatcaggcctgcgtgtgcccaaggatgaagcactgcactccatctcctct

SEQ ID NO: 75625 - DNA, 600 bp, Chicken  19866894359639_1
gaaagcacatgtggcccagcattagaaggtgcctacaaaaccatggccaaaattgtttcctcttacataaactacagtcaaatgacctagttcatgtgctgattgccttatttgtatgtttgcattcgagctatgtgtgatagattctacaccaagcatgatattactctcccaccaccctgctaatactgttcgtttgggttagtgccttagttgggctttgtacaaactgattattaagcagcctgtggagcaacaggccatattcatatcccaatgaagatttcttaagcactgtayggtgtctcytacatcactcagtgtacatatgacacccactttggctttggagataccaaaacattaggtagaggccaggtgtgatgtgctatggtgcatacaaaggtcttcaatacaagaccactaaaatgctttgctggcttcaggaaagaaacaaagttttaagcctctcaaaccccttttccagcaagagaagagcctaacgaaaatgcagcaactacaggagttccagaaaaagagtttgcctcatgattgttctttctcctgttaactcacttctaaatgcagagccctcatgaa

SEQ ID NO: 75626 - DNA, 600 bp, Chicken  19866894359639_2
tgtggcccagcattagaaggtgcctacaaaaccatggccaaaattgtttcctcttacataaactacagtcaaatgacctagttcatgtgctgattgccttatttgtatgtttgcattcgagctatgtgtgatagattctacaccaagcatgatattactctcccaccaccctgctaatactgttcgtttgggttagtgccttagttgggctttgtacaaactgattattaagcagcctgtggagcaacaggccatattcatatcccaatgaagatttcttaagcactgtayggtgtctcytacatcactcagtgtacatatgacacccactttggctttggagataccaaaacattaggtagaggccaggtgtgatgtgctatggtgcatacaaaggtcttcaatacaagaccactaaaatgctttgctggcttcaggaaagaaacaaagttttaagcctctcaaaccccttttccagcaagagaagagcctaacgaaaatgcagcaactacaggagttccagaaaaagagtttgcctcatgattgttctttctcctgttaactcacttctaaatgcagagccctcatgaacacatagaa

SEQ ID NO: 75627 - DNA, 600 bp, Chicken  19866894359641_1
gaagtaaaaggtaaacgacaaatctggaaattctagtttctagtgctattggtgataccaggaccttctaaaattttccagaggcaagaaacagactaagttccgatgacttaatgaacttaattaaactgcagttattatagaaaaatgcaatgtgtgacaccaaaaaaataaaataaaatgatccaacagcagtgcttataccagtcgttttgcagaaactcaatccaccctaacttactggggtttgacattaatttctatcaactgatatcactgacagcactgttcagcagctcraaaggataaaaaagctaaatttagacattagtttgccttccaggaaaaaatcaagtcttaatacacccttataaaacagcagcaaatgcactgcttagagatgtggatcccaaggatccagccaatgtttcacacccaacacagaagtcaccctggctaaatacaaaacacggtagtagcttctctctgaatgaaatacagacctgagcttaaccctgatgcaagatttccacattccacctgctaggttaacagtggtcgatttgggttgccaaactcaccagctcagcctacggaccg

SEQ ID NO: 75628 - DNA, 600 bp, Chicken  19866894359642_1
ccaaaaaaacctaagttcaaacagatcgccttaactgtacgagtgtgtgtgtttggaggggggcttaaagggggggtgataaaattttgtggcctgcatgattttaaggtaaaaatgctttactcatcaaaatcacttgccttagtgtattacctgtgctgcagttaccttcttttaccccacttaagctaaggtaaggtgaggaaaaatgctcatattggaaagagaacccctttcgcagttgtgccatcattgtgcagacttatagccaggctagaacttgagcagagcttctgtgargyttggaagctctgcagcagcctttcagcacagggccatatacattttgatgtargttgccatcattttctggaggctggcccttttggatgagattgcttctaacaccctaacattgttatggttttgtattgggcttccgagaaaactagtgctattttttctcctttgtgtactgtgtgcatggctaaggccctctaacttaggggtgagaatgtcaaactaactggctctgtcgcatgccccagtgctgccaggtgataccgtgttacattctccaagcccagtgaagggactgcc

SEQ ID NO: 75629 - DNA, 600 bp, Chicken  19866894359642_2
aaaaaaacctaagttcaaacagatcgccttaactgtacgagtgtgtgtgtttggaggggggcttaaagggggggtgataaaattttgtggcctgcatgattttaaggtaaaaatgctttactcatcaaaatcacttgccttagtgtattacctgtgctgcagttaccttcttttaccccacttaagctaaggtaaggtgaggaaaaatgctcatattggaaagagaacccctttcgcagttgtgccatcattgtgcagacttatagccaggctagaacttgagcagagcttctgtgargyttggaagctctgcagcagcctttcagcacagggccatatacattttgatgtargttgccatcattttctggaggctggcccttttggatgagattgcttctaacaccctaacattgttatggttttgtattgggcttccgagaaaactagtgctattttttctcctttgtgtactgtgtgcatggctaaggccctctaacttaggggtgagaatgtcaaactaactggctctgtcgcatgccccagtgctgccaggtgataccgtgttacattctccaagcccagtgaagggactgcctt

SEQ ID NO: 75630 - DNA, 600 bp, Chicken  19866894359642_3
gaggggggcttaaagggggggtgataaaattttgtggcctgcatgattttaaggtaaaaatgctttactcatcaaaatcacttgccttagtgtattacctgtgctgcagttaccttcttttaccccacttaagctaaggtaaggtgaggaaaaatgctcatattggaaagagaacccctttcgcagttgtgccatcattgtgcagacttatagccaggctagaacttgagcagagcttctgtgargyttggaagctctgcagcagcctttcagcacagggccatatacattttgatgtargttgccatcattttctggaggctggcccttttggatgagattgcttctaacaccctaacattgttatggttttgtattgggcttccgagaaaactagtgctattttttctcctttgtgtactgtgtgcatggctaaggccctctaacttaggggtgagaatgtcaaactaactggctctgtcgcatgccccagtgctgccaggtgataccgtgttacattctccaagcccagtgaagggactgcctttatcttactttttaccttaagggcagtgctgctatataaggaactcctagctg

SEQ ID NO: 75631 - DNA, 524 bp, Chicken  19866894359644_1
agtttttaaattatgcaatgcccaccatatgtaattagctaagtaagctgctttctcttaacctcaaatgtttgtaatgcttataatcccggttaggtgtctgtataaaggagctccttgttaagggcagaggggaggaattttcttctataaggaaattaggcccttgaccgagatgtaaagccgaaggtttgaaagattgcttttgtttggccagtgtttgagggtcccagtgtttaaattaatcagcaagtcatcactgggcgctagctgcctatgcaaagcaacttgcccatggcragtcctgtcccagtgagctatgggcatcctcgctatttttcttcctagtccctccttactcctgtttcagcaagtttaacaccagcatcaagtgctttcctgggatgaagaactgggagttcgtcagccaagatggattttcgcttttggcccatttcccaattgggaaagctgaacgtttcgatgctcttggtggttcttggcatgtttcttttgattattga

SEQ ID NO: 75632 - DNA, 599 bp, Chicken  19866894359647_1
  misc_feature (1)..(123): n is any nucleotide
nnnnnnnnnnnnnnnnnnnnnnnnnnnnnnnnnnnnnnnnnnnnnnnnnnnnnnnnnnnnnnnnnnnnnnnnnnnnnnnnnnnnnnnnnnnnnnnnnnnnnnnnnnnnnnnnnnnnnnnnnnnttcaacaagaaaactcaaaaaaataaagatggtgcagcctgttttctctcagaagaattatggaattcatcctaacctagctcctcatgcaggccactgtctctgacttgacatgagagcagtttcctcaaacagaaaaggcaccacatgcacaaacaattgcttaaaaaaatccarctgtattttctcttgatatccttgagttgtactatggaaatgttattgtttctcacttagaggaaagtgatttcttagagaagttgttggttttgaaggaaattcactcatatgaacaagaacatacatgtgagaccaagaaaaaactgagcaaaaacatgtcagacctccaaggaggatrccrgatttggawaaaaaaagagctaacctacatgcattcttaaatagttattgcttctgtgactacaaagtttaygtactaacttattagcaaagctctgcagacatcattattctca

SEQ ID NO: 75633 - DNA, 600 bp, Chicken  19866894359647_2
tatggaattcatcctaacctagctcctcatgcaggccactgtctctgacttgacatgagagcagtttcctcaaacagaaaaggcaccacatgcacaaacaattgcttaaaaaaatccarctgtattttctcttgatatccttgagttgtactatggaaatgttattgtttctcacttagaggaaagtgatttcttagagaagttgttggttttgaaggaaattcactcatatgaacaagaacatacatgtgagaccaagaaaaaactgagcaaaaacatgtcagacctccaaggaggatrccrgatttggawaaaaaaagagctaacctacatgcattcttaaatagttattgcttctgtgactacaaagtttaygtactaacttattagcaaagctctgcagacatcattattctcaaaagagaaaaaggttacttcagaagagttatgtcatgttgtgcagccattatgtttattatgcagccattttcagaaacatttccacacacactacacctgacaacaagagaaggcaagccttgtgttttttcaatctattcagccatttgcttttactttcattttgcagctacaagcatg

SEQ ID NO: 75634 - DNA, 600 bp, Chicken  19866894359647_3
ggaattcatcctaacctagctcctcatgcaggccactgtctctgacttgacatgagagcagtttcctcaaacagaaaaggcaccacatgcacaaacaattgcttaaaaaaatccarctgtattttctcttgatatccttgagttgtactatggaaatgttattgtttctcacttagaggaaagtgatttcttagagaagttgttggttttgaaggaaattcactcatatgaacaagaacatacatgtgagaccaagaaaaaactgagcaaaaacatgtcagacctccaaggaggatrccrgatttggawaaaaaaagagctaacctacatgcattcttaaatagttattgcttctgtgactacaaagtttaygtactaacttattagcaaagctctgcagacatcattattctcaaaagagaaaaaggttacttcagaagagttatgtcatgttgtgcagccattatgtttattatgcagccattttcagaaacatttccacacacactacacctgacaacaagagaaggcaagccttgtgttttttcaatctattcagccatttgcttttactttcattttgcagctacaagcatggtg

SEQ ID NO: 75635 - DNA, 600 bp, Chicken  19866894359647_4
cctaacctagctcctcatgcaggccactgtctctgacttgacatgagagcagtttcctcaaacagaaaaggcaccacatgcacaaacaattgcttaaaaaaatccarctgtattttctcttgatatccttgagttgtactatggaaatgttattgtttctcacttagaggaaagtgatttcttagagaagttgttggttttgaaggaaattcactcatatgaacaagaacatacatgtgagaccaagaaaaaactgagcaaaaacatgtcagacctccaaggaggatrccrgatttggawaaaaaaagagctaacctacatgcattcttaaatagttattgcttctgtgactacaaagtttaygtactaacttattagcaaagctctgcagacatcattattctcaaaagagaaaaaggttacttcagaagagttatgtcatgttgtgcagccattatgtttattatgcagccattttcagaaacatttccacacacactacacctgacaacaagagaaggcaagccttgtgttttttcaatctattcagccatttgcttttactttcattttgcagctacaagcatggtgggaaaacac

SEQ ID NO: 75636 - DNA, 600 bp, Chicken  19866894359647_5
agaaaaggcaccacatgcacaaacaattgcttaaaaaaatccarctgtattttctcttgatatccttgagttgtactatggaaatgttattgtttctcacttagaggaaagtgatttcttagagaagttgttggttttgaaggaaattcactcatatgaacaagaacatacatgtgagaccaagaaaaaactgagcaaaaacatgtcagacctccaaggaggatrccrgatttggawaaaaaaagagctaacctacatgcattcttaaatagttattgcttctgtgactacaaagtttaygtactaacttattagcaaagctctgcagacatcattattctcaaaagagaaaaaggttacttcagaagagttatgtcatgttgtgcagccattatgtttattatgcagccattttcagaaacatttccacacacactacacctgacaacaagagaaggcaagccttgtgttttttcaatctattcagccatttgcttttactttcattttgcagctacaagcatggtgggaaaacacacgtggctgtcatttccactgttggctgtccccatctcaaaatggacaagtgcagcatttttt

SEQ ID NO: 75637 - DNA, 600 bp, Chicken  19866894359649_1
actccacccactggccttccccggcctggttgcctagcactgagtgttgggaactgcaatacttagtcttagagtgctgtgctcacccacagcctgctctttgttacagcagtttggccctctgcttcatgcaaatatagagtaaatgtggctcttgggtggaaaggttcgcagctttcctctacgccctgcaaagctggacaaaaaacttccttttgttcccattgaatgcacccgactgcactcggaaagccctgatactttcaaccacagctccccatttcctatgtaaaatgcacrtgttgttaaatcatcattccagctggctggtgccagattcgcacagtctctgagaatcgtgcttgttaagatcagggatgttcaacatgaaaggcataaggaggatttttgtgggatgtgcagccactggcttccctgccccttaattttgtaatgatgaacaggagcttttgagcaacacaaacaaaccaagacatttagcagctgcaggactacctctgcatcaccagagtgttcttccaaaactttcagcccagcccttggttcacatatcagatccaactggcacaggaaggaaca

SEQ ID NO: 75638 - DNA, 600 bp, Chicken  19866894359663_1
cctggccttgaatgcctccagggatggggcatccacaacctccttgggcaacctgttccagggcgtcaccaccctctgggtgaaaaacttcttcctaatgaaaaacttcttcctaagaaaaagttagggtgaaggtatttagtaacagcctatcttggtgagtaataccttttcaaaatcttgtgttgtagagtagatccctacctttctcaccccctgcttttcactgtgcctggagggtatgcagtgagaggttgagttgctcttcaagaagcagcgtctgctggaagaattgcaatrtggtgttgtccaacagaccctatctcatgtgtgtcatgctgttcctggtgtagctatcttcagtatccattcattgtgaaggaaactaagcacaactgagtcttctgttgagagttacgatgacttcattgaatggcacttgaaaaataaatactgtctgataccactgaaaagttctgtgcatggtagtgcttagagaaatcctcmtttgggaatttttttcttatttttttcctctcaagcaaaattacgagtgctgcaagaaagaaaaaaactttctgagtatttaggatataattg

SEQ ID NO: 75639 - DNA, 600 bp, Chicken  19866894359663_2
tctcaccccctgcttttcactgtgcctggagggtatgcagtgagaggttgagttgctcttcaagaagcagcgtctgctggaagaattgcaatrtggtgttgtccaacagaccctatctcatgtgtgtcatgctgttcctggtgtagctatcttcagtatccattcattgtgaaggaaactaagcacaactgagtcttctgttgagagttacgatgacttcattgaatggcacttgaaaaataaatactgtctgataccactgaaaagttctgtgcatggtagtgcttagagaaatcctcmtttgggaatttttttcttatttttttcctctcaagcaaaattacgagtgctgcaagaaagaaaaaaactttctgagtatttaggatataattgcaggttattattatagacatctttcctttggggatctgaaactacartacatttcattctgattaaattaaagagaccaaccagcaattcccagctcatggcagtcagtttctcttgcttataatgccgctgagatcaatgggattccccacagagtgaggcactttttcacctgagtggagctaccactacctgagcttgttacag

SEQ ID NO: 75640 - DNA, 600 bp, Chicken  19866894359663_3
gtgtagctatcttcagtatccattcattgtgaaggaaactaagcacaactgagtcttctgttgagagttacgatgacttcattgaatggcacttgaaaaataaatactgtctgataccactgaaaagttctgtgcatggtagtgcttagagaaatcctcmtttgggaatttttttcttatttttttcctctcaagcaaaattacgagtgctgcaagaaagaaaaaaactttctgagtatttaggatataattgcaggttattattatagacatctttcctttggggatctgaaactacartacatttcattctgattaaattaaagagaccaaccagcaattcccagctcatggcagtcagtttctcttgcttataatgccgctgagatcaatgggattccccacagagtgaggcactttttcacctgagtggagctaccactacctgagcttgttacagcacctraagcatctatatccacctctatccactgctgcctgtgccatgagggtgaatgtaagtgttggagagttcctaaccccaggtatttgctatacactggcagatttcttctccagaaaagacactaaatagggaac

SEQ ID NO: 75641 - DNA, 562 bp, Chicken  19866894359663_4
aatttttttcttatttttttcctctcaagcaaaattacgagtgctgcaagaaagaaaaaaactttctgagtatttaggatataattgcaggttattattatagacatctttcctttggggatctgaaactacartacatttcattctgattaaattaaagagaccaaccagcaattcccagctcatggcagtcagtttctcttgcttataatgccgctgagatcaatgggattccccacagagtgaggcactttttcacctgagtggagctaccactacctgagcttgttacagcacctraagcatctatatccacctctatccactgctgcctgtgccatgagggtgaatgtaagtgttggagagttcctaaccccaggtatttgctatacactggcagatttcttctccagaaaagacactaaatagggaaccagctgttccacatgctagcttgcaaaacctgtgaacagcagggggaagtcacaggagggaacactgtgttttgtcagacttttttccaccccaaatgtttccgctggttgaacacctaggacactat

SEQ ID NO: 75642 - DNA, 600 bp, Chicken  19866894359677_1
gtaagcatttcagcgggattagttgctataagaagaaatacttggcaatatgctatgacaagataaaatctgctagtatccaaacaacaaaaaaattaacctatacataaaatccaagtcaagttgctcactgtgccataacagtagtggaatctgatttgtttcatcattatgatttgtttaccctgcaaaagggtgctctgagttttacatcagtgtagtttcccattggtttacatagtgttaatgctattttagctgtgactggatgccatttcaggtgtctttcttcttcatgcygagggaaacatccagaattgcatcttttcctttccctggcaaccagcatgaggtcaacgaaacaccactaccactgaacttcacagatctgttgggttcccatcttggaatgttagatgacaatgaagtgtatttttcctgtcacttctttttgaaatactaattacggtgtgtttatacatgaataagcgcatgattattgattctgtacatacactcaagatgttactggttttaactctgtcatgactggcatttgattacatacatacacaaacacatgcttggtgtgtgtatagc

SEQ ID NO: 75643 - DNA, 599 bp, Chicken  19866894359694_1
  misc_feature (1)..(58): n is any nucleotide
nnnnnnnnnnnnnnnnnnnnnnnnnnnnnnnnnnnnnnnnnnnnnnnnnnnnnnnnnntagtccattacaagaaaaaagctgtgtgaaaattaaagtaagtgagacttctcattttcttgtaaaatgtttacagttatcaagattggattccactatactcaacaaagaagaactattaaatgtgatagtaaaggggcctctgtcaataggattaactcatgcaggtaatgattgtgcttaatgacaaagtttgaatcagtagaccattctcatgaaagtaatttcaaaagatccagccrccttaacttgtgggaggaaatattcccaacattttcttcatagatttaatcctatctatttagtcaaaagggaaaatggggacagaatttccmccacatccatgtaatgtcacaagacagaatgacagccccgaaagggatcaggaaaagactgggcaaacaggatagaagccctctgtttgtgggcttcctcataatttcctgaaagttaatggagtgaaacacgaatgctcrggataagaaagaaaacttcagacatacagagcaagttaattcactgggaaatccaagtatgctta

SEQ ID NO: 75644 - DNA, 600 bp, Chicken  19866894359694_2
aagtaagtgagacttctcattttcttgtaaaatgtttacagttatcaagattggattccactatactcaacaaagaagaactattaaatgtgatagtaaaggggcctctgtcaataggattaactcatgcaggtaatgattgtgcttaatgacaaagtttgaatcagtagaccattctcatgaaagtaatttcaaaagatccagccrccttaacttgtgggaggaaatattcccaacattttcttcatagatttaatcctatctatttagtcaaaagggaaaatggggacagaatttccmccacatccatgtaatgtcacaagacagaatgacagccccgaaagggatcaggaaaagactgggcaaacaggatagaagccctctgtttgtgggcttcctcataatttcctgaaagttaatggagtgaaacacgaatgctcrggataagaaagaaaacttcagacatacagagcaagttaattcactgggaaatccaagtatgcttatggagaatgccagcagcacatatgttttatttgtgtagtctcaccttaaaagttcacatctattggggtccttttgatcataaatagtgagttt

SEQ ID NO: 75645 - DNA, 600 bp, Chicken  19866894359694_3
gtgcttaatgacaaagtttgaatcagtagaccattctcatgaaagtaatttcaaaagatccagccrccttaacttgtgggaggaaatattcccaacattttcttcatagatttaatcctatctatttagtcaaaagggaaaatggggacagaatttccmccacatccatgtaatgtcacaagacagaatgacagccccgaaagggatcaggaaaagactgggcaaacaggatagaagccctctgtttgtgggcttcctcataatttcctgaaagttaatggagtgaaacacgaatgctcrggataagaaagaaaacttcagacatacagagcaagttaattcactgggaaatccaagtatgcttatggagaatgccagcagcacatatgttttatttgtgtagtctcaccttaaaagttcacatctattggggtccttttgatcataaatagtgagtttcaatattctgcttaaatgaagtggaagccaacacaaggcaaaaacaagtaccaggcagaacacagtcttggccacctcgcgtctctgaaaatgaaaattggaaagaacaacattatagttattgtgtctctcttgatggtt

SEQ ID NO: 75646 - DNA, 600 bp, Chicken  19866894359697_1
acagaacagttgaaaatttcacattctgtgatatgtgaaggaggcacaggatattaaaagccctctggactttaaggattatgtgggcacagtttgtgtatgtgtaggacactgctataaatgaagaaaattctagctctttttatttacaagaatacgagaaatttaatctggaggtatctgacagacagacagaattaacattgtgcacccgtgctctgcccaacagagggcagtgggtagacacagtcctgcctgcaagtgcagggaatacatgaccccactgtctggaccttcatragcttttccagtgcagatgtgcaaattcatcacctgagcagcttgctggggcagccacagcccctgtttggatttgcagtaactccttgacaaatatgttttcttgcagcctggctgagatggatcagaagttccagcaaatcctggcttggcaacagatggatcagaacaaagctgttagtcagatcttacagcaggtaggcaagagagcagattgcatgcagggagagactgaagaaacgcagaaggattcaaaagcagagttgggagtgacagggatgggagcaatggttgcagggc

SEQ ID NO: 75647 - DNA, 600 bp, Chicken  19866894359697_2; identical to SEQ ID NO: 75646

SEQ ID NO: 75648 - DNA, 600 bp, Chicken  19866894359697_3; identical to SEQ ID NO: 75646

SEQ ID NO: 75649 - DNA, 600 bp, Chicken  19866894359697_4; identical to SEQ ID NO: 75646

SEQ ID NO: 75650 - DNA, 600 bp, Chicken  19866894359697_5; identical to SEQ ID NO: 75646

SEQ ID NO: 75651 - DNA, 600 bp, Chicken  19866894359711_1
ttttaaagcaacgctattcccccttttgtgggtgcaagcaaattgcatcgtgtctctgtggataccagcccagctcctcactgactggctaagctgaggatgaaacctgatttgagctgaaatttgacattgccccgtgaggcagcagccaagaacatttttcttcagctacctcaaatgatctgtttactctgaggaacttactctgtcactcaaaagctgcacaaaagcagctgggaggagtgtgctgtgggtgttaagaagtaaagcccaaaatttgggtgcttatcccttttaccraggttttaaataagctgacagacatagacacatatacatrcatgcatttgctccatctgaatttgttccccttcatgtgatattaagtatttctagcctgaggggaaggatattcagctcatcrgttcggccctgctgagcagactccttgacttaggaagaagcattagctgaaatgctcaataaatactcaacaagtagaccatgaagctattccagtcacctgtggcaagcccgaagtggaacataagaaagtaggaaaagctacaagcatgctggagtgcactgagaacatgtagc

SEQ ID NO: 75652 - DNA, 600 bp, Chicken  19866894359711_2
aattgcatcgtgtctctgtggataccagcccagctcctcactgactggctaagctgaggatgaaacctgatttgagctgaaatttgacattgccccgtgaggcagcagccaagaacatttttcttcagctacctcaaatgatctgtttactctgaggaacttactctgtcactcaaaagctgcacaaaagcagctgggaggagtgtgctgtgggtgttaagaagtaaagcccaaaatttgggtgcttatcccttttaccraggttttaaataagctgacagacatagacacatatacatrcatgcatttgctccatctgaatttgttccccttcatgtgatattaagtatttctagcctgaggggaaggatattcagctcatcrgttcggccctgctgagcagactccttgacttaggaagaagcattagctgaaatgctcaataaatactcaacaagtagaccatgaagctattccagtcacctgtggcaagcccgaagtggaacataagaaagtaggaaaagctacaagcatgctggagtgcactgagaacatgtagcatagtggaactgatgcaatgcttttacttccttttgtgcc

SEQ ID NO: 75653 - DNA, 600 bp, Chicken  19866894359711_3
tgacattgccccgtgaggcagcagccaagaacatttttcttcagctacctcaaatgatctgtttactctgaggaacttactctgtcactcaaaagctgcacaaaagcagctgggaggagtgtgctgtgggtgttaagaagtaaagcccaaaatttgggtgcttatcccttttaccraggttttaaataagctgacagacatagacacatatacatrcatgcatttgctccatctgaatttgttccccttcatgtgatattaagtatttctagcctgaggggaaggatattcagctcatcrgttcggccctgctgagcagactccttgacttaggaagaagcattagctgaaatgctcaataaatactcaacaagtagaccatgaagctattccagtcacctgtggcaagcccgaagtggaacataagaaagtaggaaaagctacaagcatgctggagtgcactgagaacatgtagcatagtggaactgatgcaatgcttttacttccttttgtgcccttgtaaaccatattgccttagatttccagaagtgcagctcccctgctttctcaccttctctgccgcataccaaagcaagctca

SEQ ID NO: 75654 - DNA, 600 bp, Chicken  19866894359722_1
gaagtttacagcgagcttgggcaacacctccggttgcgcgcgtatcgcaggtgctgctctcagcaggaagctgaaggcacccagtaatcaccttaaggccaaatatagcgcttgcagagctgcaacatccagcccagattactgcccgcaccggcatctgctctggggtcgggcgggatgatgggtgaaccactgccctgctgcaggacagcggcaggcattcgcatgcactttcattggcacgtgtaaaaatagagccgtggctgcaattctaggatggccgctgctgctgccacagcrattgatcgttatgaaataagtggaatgatgccatttaataatgacagcgaaatgacatcatcctcgggctaaattagcaacaaacgacgctgcccgcttctaatctgtattaataaatcctcaccaacgacrgagatacggatcctcagccccattcccacttaaaggcgttaaccgtattccatttaacttcagtgggctttcagcaaattccttcctttatttttagctgcctacaagcctgagctgtgattcaacaaagctgtcagctgcgcaagcaggactgggtacccacacgca

SEQ ID NO: 75655 - DNA, 600 bp, Chicken  19866894359722_2
cccagattactgcccgcaccggcatctgctctggggtcgggcgggatgatgggtgaaccactgccctgctgcaggacagcggcaggcattcgcatgcactttcattggcacgtgtaaaaatagagccgtggctgcaattctaggatggccgctgctgctgccacagcrattgatcgttatgaaataagtggaatgatgccatttaataatgacagcgaaatgacatcatcctcgggctaaattagcaacaaacgacgctgcccgcttctaatctgtattaataaatcctcaccaacgacrgagatacggatcctcagccccattcccacttaaaggcgttaaccgtattccatttaacttcagtgggctttcagcaaattccttcctttatttttagctgcctacaagcctgagctgtgattcaacaaagctgtcagctgcgcaagcaggactgggtacccacacgcacgttctgctyggcccaccccatagaaaaggcagcctcgagtgtccctttatggctgggaaagcagcaagctcccaaatcagccagggaacagcaaacacgacacgtgctgcctccatcccaaacgtgtggtg

SEQ ID NO: 75656 - DNA, 600 bp, Chicken  19866894359722_3
atgaaataagtggaatgatgccatttaataatgacagcgaaatgacatcatcctcgggctaaattagcaacaaacgacgctgcccgcttctaatctgtattaataaatcctcaccaacgacrgagatacggatcctcagccccattcccacttaaaggcgttaaccgtattccatttaacttcagtgggctttcagcaaattccttcctttatttttagctgcctacaagcctgagctgtgattcaacaaagctgtcagctgcgcaagcaggactgggtacccacacgcacgttctgctyggcccaccccatagaaaaggcagcctcgagtgtccctttatggctgggaaagcagcaagctcccaaatcagccagggaacagcaaacacgacacgtgctgcctccatcccaaacgtgtggtggggaggaggagcgagacagcactcagagaatcacagaatatccccatttgggatatcgggacccacaaggaccatcaaagcccaactcctggctgcacgttgggatcactcagaattgaaaccctatgtctgagagcgttatccaaacactgcttgagctctggtactcaagggctgt

SEQ ID NO: 75657 - DNA, 600 bp, Chicken  19866894359734_1
aattctgaaagaacactgttctttcacagaagatagaatcagaccaaactctgaaattcagaaaagtgttacggccagagtacgttggaattttggcttactttttctaaatgaatacattgcttgcataactgttgagtaacatacagtgaatcttattgaatgcaggaaaggtcataaagttagagaaaatgtctgaaacatcaactgaactcacacgattgaaatgcagaaaaggtttgtgtgagcacagacaaagctacacttgaaagagctttcatgttaagcattaggctgtgygctacaggttatgatcccacttttaatcctgaaattaaagtttaggattacacacagtctgattaacaacagcacaatacacttcacactcagagatgctggtgattttttaccatgtattttgcacccaaatgtgctcatacatttttcccttctgatttactctgtaatccttagaagtcaactgttgctttacttctgcactctgtttcaacagcttggagcatttatactgtgctttgatgtgtcagttgtatatgcaattcgcaagggctgtgatgatcaacaagtattaatatg

SEQ ID NO: 75658 - DNA, 599 bp, Chicken  19866894359747_1
  misc_feature (1)..(211): n is any nucleotide
nnnnnnnnnnnnnnnnnnnnnnnnnnnnnnnnnnnnnnnnnnnnnnnnnnnnnnnnnnnnnnnnnnnnnnnnnnnnnnnnnnnnnnnnnnnnnnnnnnnnnnnnnnnnnnnnnnnnnnnnnnnnnnnnnnnnnnnnnnnnnnnnnnnnnnnnnnnnnnnnnnnnnnnnnnnnnnnnnnnnnnnnnnnnnnnnnnnnnnnnnnnnnnnnnnnttgtgccccatgcctactcattctgccaaccccaggtgatgtccagtactcaacaaagagaggtcccatgatgtgggttgctgcacccygggcttgcagcaggatctggtggatggggacagtcctcactgcattattgtcaccaggctccgcccaccctgcaggatgcagaagtacccagcagccaccttctccttgtgcatccctacatcaccagctgtgtttgggatattctggggacactgtggccacgggactccctccagcactgctgccacgtcatgtgcttaattccatcacacagcatcacctccccatccacagccttcactctgggcatggagatgaccttagtccatctgtggggacatccccatggccctgtgga

SEQ ID NO: 75659 - DNA, 600 bp, Chicken  19866894359748_1
gctactcctccctacagtttctctcctatagctacaaagtctaccagaaaagaaggcagagctgattatcacacagccaccaccagaagggcctaagagccagagtaccctgccagcacacacaagcccagaaaccactgcatgcagacagcttcacatgaaaactgctcaacgctaactgttagcatgagcctgtcagaagagggagacagctccatacacagccagcacatctcagtaatctctctgtgcagcaaacatttcacacggacaccacatgctacccagaagcctccagcmcagaagcaaatcccttacagcaatggcaactttgtgctgttcgggcaagaatctaacaaatggaaaacttctcacaagcaagcatagcaaatttaaaaccccaccaattctgtgatagtagttaaactcataatctaacaaaagaaagaaacaaaaaaaaakgaagcttcacagttcaagctgcaagttacaccttytgcttctctgcctgagcttcacttaagagcaaagcagcaagctgtccatcacacacraagcactgcacgagctccgctgcactgcaccatccctggacattgt

SEQ ID NO: 75660 - DNA, 600 bp, Chicken  19866894359748_2
aactgctcaacgctaactgttagcatgagcctgtcagaagagggagacagctccatacacagccagcacatctcagtaatctctctgtgcagcaaacatttcacacggacaccacatgctacccagaagcctccagcmcagaagcaaatcccttacagcaatggcaactttgtgctgttcgggcaagaatctaacaaatggaaaacttctcacaagcaagcatagcaaatttaaaaccccaccaattctgtgatagtagttaaactcataatctaacaaaagaaagaaacaaaaaaaaakgaagcttcacagttcaagctgcaagttacaccttytgcttctctgcctgagcttcacttaagagcaaagcagcaagctgtccatcacacacraagcactgcacgagctccgctgcactgcaccatccctggacattgtgtcaccagagtcttcatggaatccaccagtggagctctgagagggaagctcttaggctgtcacagtgtgacagtcggtgcagcagctctcagatttgcagaattagcttcagtttcacctgtactgcctcagcactcagcctttaatgtcagcatgaagttt

SEQ ID NO: 75661 - DNA, 600 bp, Chicken  19866894359748_3
agaagagggagacagctccatacacagccagcacatctcagtaatctctctgtgcagcaaacatttcacacggacaccacatgctacccagaagcctccagcmcagaagcaaatcccttacagcaatggcaactttgtgctgttcgggcaagaatctaacaaatggaaaacttctcacaagcaagcatagcaaatttaaaaccccaccaattctgtgatagtagttaaactcataatctaacaaaagaaagaaacaaaaaaaaakgaagcttcacagttcaagctgcaagttacaccttytgcttctctgcctgagcttcacttaagagcaaagcagcaagctgtccatcacacacraagcactgcacgagctccgctgcactgcaccatccctggacattgtgtcaccagagtcttcatggaatccaccagtggagctctgagagggaagctcttaggctgtcacagtgtgacagtcggtgcagcagctctcagatttgcagaattagcttcagtttcacctgtactgcctcagcactcagcctttaatgtcagcatgaagtttattgtgcaacacttaagtacattgttggatatgtc

SEQ ID NO: 75662 - DNA, 600 bp, Chicken  19866894359748_4
caaacatttcacacggacaccacatgctacccagaagcctccagcmcagaagcaaatcccttacagcaatggcaactttgtgctgttcgggcaagaatctaacaaatggaaaacttctcacaagcaagcatagcaaatttaaaaccccaccaattctgtgatagtagttaaactcataatctaacaaaagaaagaaacaaaaaaaaakgaagcttcacagttcaagctgcaagttacaccttytgcttctctgcctgagcttcacttaagagcaaagcagcaagctgtccatcacacacraagcactgcacgagctccgctgcactgcaccatccctggacattgtgtcaccagagtcttcatggaatccaccagtggagctctgagagggaagctcttaggctgtcacagtgtgacagtcggtgcagcagctctcagatttgcagaattagcttcagtttcacctgtactgcctcagcactcagcctttaatgtcagcatgaagtttattgtgcaacacttaagtacattgttggatatgtcagcctcagaagaactggggattcagcagccaagtaagagacaaatgagtttttgttt

SEQ ID NO: 75663 - DNA, 600 bp, Chicken  19866894359759_1
caccccttactatagattttgtcacttatccttcttatcttgtaactgtatgcttgttgcacagcgattttgataaactggattttatattaagccattgtaaaaactaagtggcaatgaagtgtttaaggataagatagatcaccgaaaaagaaagtagaggatgaacaacaatttggcaggacacagaagtgtatgtgctacatttgtaaacaaggatcatgtgtgaactttcctacagtattaattataaactttttgtcttcatgtaggagtgttgtagtaccaccgaagaaatcraacatttcctctactacggctgctatgggtattcctgcaaatgctgtcagtgtggtttcttctttagattcagcacaagccccagatttgtcaggagaatctcctggtgagtaagagtagcccttccatatttgcttccctttttcccaccatccattgtgaatgcagatgaacaagtttttatgtaatttcctaataaaggtgagttcttccatgcattaaatcaccatagacgagtagatgaaaataactatttcagacatgaaattatcaattacattcaggtgtaatactgacata

SEQ ID NO: 75664 - DNA, 498 bp, Chicken  19866894359770_1
ctcgcccagccagcttattctaattacccagaggtatgaaaagcaatagattgtcttcactactaaatcagtttgatcagcaaaggcttctcatagcagagtgcaactgtaattatctctgctttgaagaataatcatatgagagaaatatttcatatgccaacatgataacacccccatacctaaactgatgaggcttgtcagcaccccagcacccagcagagatataatcttgagggaataggcaggacgttgccatcccagagagaaagcagctggctcagaatagctgtctcattyataacctttaacaagtaaatatcaaataaccaccctatcaaatcagacaaagacaattctctgtatctcttttcccatatactaagtagagaagaggaaacagtctagctggatttaaacctgagctatgtttccagcacctgaaactcaactgacatttttcagttatttacataaaacatttcagatgccacccag

SEQ ID NO: 75665 - DNA, 600 bp, Chicken  19866894359777_1
caacaaatgaaaggagaaacttgcatgcggctatgtcctgctgatgctcaactgatggaaaacatttaattgtacaactatagaattttaataagtattgattgtatccctgtctagagaagactgtggatcttgtcaaaccaaagtgagcacaggttaatgcaggtttttctactgacccatttgtctctgtactaagtccatttattctctgtctattggaaaagcaccaaacgatgcaaacatattccaaagatttgtaaattatgaatgcataataacactcactggttgatgtgraataaaagtctcaacagtcacatactgctttatgtcaggcagtaaaaagttaagctagtaaacacttctcaagatgcagagaatgccaggggagaggagaaaagaaagaattttgtcattcctaaacctatacgaagggtttttctggatttgtgtgctgcattcctgaaatacaaagataggcctacaaaattgctcaataaccctgtacgcaaaaggaagatggtgacagctgaaaaagatgtttgtacaaaggattagggccagtatttatcttcttggcaagaatatctacatgaa

SEQ ID NO: 75666 - DNA, 600 bp, Chicken  19866894359779_1
gaagtttagcacaataaaatgtgccttgaggtactcaaaatttagtttttcatccaagcatcatccaagcatgaattgtgctccctctgtgacagaaccaatggagagaaggagatttatttagttatcagatggctcgtgaagatacctgtgctgaggcactctctatagtgcctctaattccgcactgatgatggatggtgcccagataagtggtgtgtgcttacactacatctgaagaggggatataggagcacctccatgggctatggatcagctggatagctgcagcaggcatgrgcactgtggtacattttggacaggtccttgattcagcagtatgggaaccagagccttgggagcatgaggtcatgcctccgctgcttggttgtctgaaacatggggtatgacacagcaaattcttcctcaaatgtacagctcacactgacctagacctgatgagccatccagttgaaccatgcagatgacagatgataccyatgtgcaaagtgtgcctcgatactttcccatgaygcattcaagcatctgaagcggtagaactgaatcaagaccagcattttgcatgcttgaggatattca

SEQ ID NO: 75667 - DNA, 600 bp, Chicken  19866894359779_2
gtgcccagataagtggtgtgtgcttacactacatctgaagaggggatataggagcacctccatgggctatggatcagctggatagctgcagcaggcatgrgcactgtggtacattttggacaggtccttgattcagcagtatgggaaccagagccttgggagcatgaggtcatgcctccgctgcttggttgtctgaaacatggggtatgacacagcaaattcttcctcaaatgtacagctcacactgacctagacctgatgagccatccagttgaaccatgcagatgacagatgataccyatgtgcaaagtgtgcctcgatactttcccatgaygcattcaagcatctgaagcggtagaactgaatcaagaccagcattttgcatgcttgaggatattcactcgagaagcaggacccaaatgagcaatgcttccactgcatgcgagttctccagagtagagaaccactttgggctcaagaggagsaggaatacctgtgtggcctcaagtctttctgaataacctgttagcaaaccttctacttcaaatataatggcagtaaaagtgaataaatgcagcctactacatcccatcgccacta

SEQ ID NO: 75668 - DNA, 600 bp, Chicken  19866894359779_3
ctgaagaggggatataggagcacctccatgggctatggatcagctggatagctgcagcaggcatgrgcactgtggtacattttggacaggtccttgattcagcagtatgggaaccagagccttgggagcatgaggtcatgcctccgctgcttggttgtctgaaacatggggtatgacacagcaaattcttcctcaaatgtacagctcacactgacctagacctgatgagccatccagttgaaccatgcagatgacagatgataccyatgtgcaaagtgtgcctcgatactttcccatgaygcattcaagcatctgaagcggtagaactgaatcaagaccagcattttgcatgcttgaggatattcactcgagaagcaggacccaaatgagcaatgcttccactgcatgcgagttctccagagtagagaaccactttgggctcaagaggagsaggaatacctgtgtggcctcaagtctttctgaataacctgttagcaaaccttctacttcaaatataatggcagtaaaagtgaataaatgcagcctactacatcccatcgccactatatttcaccagcagagcagttaatcagtgacacc

SEQ ID NO: 75669 - DNA, 573 bp, Chicken  19866894359779_4
tggttgtctgaaacatggggtatgacacagcaaattcttcctcaaatgtacagctcacactgacctagacctgatgagccatccagttgaaccatgcagatgacagatgataccyatgtgcaaagtgtgcctcgatactttcccatgaygcattcaagcatctgaagcggtagaactgaatcaagaccagcattttgcatgcttgaggatattcactcgagaagcaggacccaaatgagcaatgcttccactgcatgcgagttctccagagtagagaaccactttgggctcaagaggagsaggaatacctgtgtggcctcaagtctttctgaataacctgttagcaaaccttctacttcaaatataatggcagtaaaagtgaataaatgcagcctactacatcccatcgccactatatttcaccagcagagcagttaatcagtgacaccatgaggctaacttcataaaatacagggaatttcatacaaactgtgttcagacaacgtaaatgtgtaatataattgtataaagacccaaacttctgttctcttcattttctcctgagataaatat

SEQ ID NO: 75670 - DNA, 600 bp, Chicken  19866894359785_1
cctgctgcaatactctgtgctgacacagccctctgagtgaatcaggagatcttccccggcttctgaataccagtggttgaaaatacattgtaggttgagccatactaggtcagagatgcataatcaaaccctcttcagccatgcaagcaaattctccttcatacatcatatatccttcaggctgtaccagctttatactcatcttgaaaaccctgagacagttgcttcttgggtaggcagaggctgaaaaattctagactcgctcattttgcctctgcttcacaccagatcagctctaayggcagatagatgacaaaaagaaaaaacaagactgagagtacatgaagctctaatatagaagcaattcctgtgaaatactgcttaacctggtacacgctacactatggaatttttctcatatggctgcacacagagcacttgaaaataacagacattacagaggtgtttgtaggtatgactgctacattgcaaaaggtctatacggctctgctaaacccacaaggattccttcctcagttgccatgggactggtttaagtgaaaaatcatttccatgttacaagacagatgctccctgtgg

SEQ ID NO: 75671 - DNA, 600 bp, Chicken  19866894359792_1
agccagcttgccttcctggatggtgggaataacagggttcttgtaagcaaaacagttcttaaggaattaagtaacctgatttttgaagtatgccatatagtgtgcaagttctcttgggtgcctgtattttaccaatgtttttatgggaggcttcaaggacaaagagacaatgctcagggccattgactgagatttttagggttcttagtttaagtttttgtagcatccaggagaaaattacttcatgtgtaccacttttccattaccaaattggttgatgtcatcagcacgtacaacccrctgaggtcagaggagmttaggttgtgcttatctatacgttcagtgcagctcatgttatktaattcttaattcacattcctaattttgcagcctgatacatagcagtttttcactctttgtaatctcactgtgttgaccaaagttcagggctgatctcaaggtttgtgggtgaggccatagaaatggaggcatttgaatgcatctgtaacagaaatggatctaaaattttaaaactttcttcatagggaaaaaaatttgctagagaaatggacttctgcttcagtagcatttccaaagtga

SEQ ID NO: 75672 - DNA, 600 bp, Chicken  19866894359792_2
tggatggtgggaataacagggttcttgtaagcaaaacagttcttaaggaattaagtaacctgatttttgaagtatgccatatagtgtgcaagttctcttgggtgcctgtattttaccaatgtttttatgggaggcttcaaggacaaagagacaatgctcagggccattgactgagatttttagggttcttagtttaagtttttgtagcatccaggagaaaattacttcatgtgtaccacttttccattaccaaattggttgatgtcatcagcacgtacaacccrctgaggtcagaggagmttaggttgtgcttatctatacgttcagtgcagctcatgttatktaattcttaattcacattcctaattttgcagcctgatacatagcagtttttcactctttgtaatctcactgtgttgaccaaagttcagggctgatctcaaggtttgtgggtgaggccatagaaatggaggcatttgaatgcatctgtaacagaaatggatctaaaattttaaaactttcttcatagggaaaaaaatttgctagagaaatggacttctgcttcagtagcatttccaaagtgaagatattaatttctgc

SEQ ID NO: 75673 - DNA, 600 bp, Chicken  19866894359792_3
taaggaattaagtaacctgatttttgaagtatgccatatagtgtgcaagttctcttgggtgcctgtattttaccaatgtttttatgggaggcttcaaggacaaagagacaatgctcagggccattgactgagatttttagggttcttagtttaagtttttgtagcatccaggagaaaattacttcatgtgtaccacttttccattaccaaattggttgatgtcatcagcacgtacaacccrctgaggtcagaggagmttaggttgtgcttatctatacgttcagtgcagctcatgttatktaattcttaattcacattcctaattttgcagcctgatacatagcagtttttcactctttgtaatctcactgtgttgaccaaagttcagggctgatctcaaggtttgtgggtgaggccatagaaatggaggcatttgaatgcatctgtaacagaaatggatctaaaattttaaaactttcttcatagggaaaaaaatttgctagagaaatggacttctgcttcagtagcatttccaaagtgaagatattaatttctgcatttgctttaacttgattgagccacagtacagttttctcattt

SEQ ID NO: 75674 - DNA, 600 bp, Chicken  19866894359793_1
attttcactgctgtattttttgactattgaggatccccagcacaacgaggctgctggggaccacaaccttgtctaacttttggaaggaaagaaacctgtagcttgtgactgtggtgcaaatggaagcctatccagcccttgcccgtgctacaaagttgaatgaaaacaccactggtgtcaggttagtctgtatcaacaactcacctctttcccaatctcattagcgatgatgttcataaactcagagtcaccctctttcctgcatggacaggtaaaaaggcacttcagagaaaaaaaaawatatatatatatatatttacaccagagtccaaaatattaataacaaatggcaggaaatgactctccaagcccagtttttttcagttttccattttgtgtgcttaagactaaaattgccaccaatatcagagaagttgaaaggtaagatccgcaagcacagcctatgattgtgcctgaggttttgatctcttgcaatcaggctgcagattattttctttccatacatataagttattttttggtaatttcctgtggatatactaggaattattgaagtgtttaagaaatcgagctccacag

SEQ ID NO: 75675 - DNA, 600 bp, Chicken  19866894359796_1
ttaccattgctaccacaagccactaaaccatatctcgtagctccccatccagatgcctcttgaacactgccagggacggcgactccaccacctccctgggcagccattccagtgcctgaccactctctgagagaaaaaggttttccttatgtctaacctaaacctcctctgggacaacttgtgaccatttcctcgggtcctgtttgtagcctgggagaagaggccaaacccctcctcatcacaacctcccttcaggaagttgtagagtgcaatgaggactcccctaagcgtcctcttctycagaataaacaatcccagctccctcagctgctcctcctaagacttgtgctccagacccctcaccttagggcttgcctgtacttgtacagtctgtcacacattycagtttagaaactcatctaaaaacattcatacaccctgaatacagacactaacagtgatttaagagtaattgtacctgctctgttttatttatcaccaggtagcctattgtgggaaaagtccattcagtgaaaatgttaccatattaacaaatgcttcagtattaggcagtacccaggttgccatcagttatgaaac

SEQ ID NO: 75676 - DNA, 578 bp, Chicken  19866894359796_2
ccattccagtgcctgaccactctctgagagaaaaaggttttccttatgtctaacctaaacctcctctgggacaacttgtgaccatttcctcgggtcctgtttgtagcctgggagaagaggccaaacccctcctcatcacaacctcccttcaggaagttgtagagtgcaatgaggactcccctaagcgtcctcttctycagaataaacaatcccagctccctcagctgctcctcctaagacttgtgctccagacccctcaccttagggcttgcctgtacttgtacagtctgtcacacattycagtttagaaactcatctaaaaacattcatacaccctgaatacagacactaacagtgatttaagagtaattgtacctgctctgttttatttatcaccaggtagcctattgtgggaaaagtccattcagtgaaaatgttaccatattaacaaatgcttcagtattaggcagtacccaggttgccatcagttatgaaactgcaaagttatgtgagttagcaatgggtaccaccactaccattactgaaaataagatgctgaattaattggtaagctagat

SEQ ID NO: 75677 - DNA, 599 bp, Chicken  19866894359799_1
  misc_feature (1)..(221): n is any nucleotide
nnnnnnnnnnnnnnnnnnnnnnnnnnnnnnnnnnnnnnnnnnnnnnnnnnnnnnnnnnnnnnnnnnnnnnnnnnnnnnnnnnnnnnnnnnnnnnnnnnnnnnnnnnnnnnnnnnnnnnnnnnnnnnnnnnnnnnnnnnnnnnnnnnnnnnnnnnnnnnnnnnnnnnnnnnnnnnnnnnnnnnnnnnnnnnnnnnnnnnnnnnnnnnnnnnnnnnnnnnnnntggccttgagcacctccagggaggggcaccacagctctctgggcagctgtgccagggcctcaccgctctgagtaaagartttcctcctaacttctaacctaaatctcccctctttaattataaaaccactcacccttgtcctatcactatctacctgtgtaaaaagttgatttccctcctgcttagtagcaaccttgctgctttagaaattgactgtaatgagtgcaatgactggaccctatcttacaaaaaaattacagagtaatgaccataaccatacgtacagcaccttgaacgatgaaacctaaatcccattaaaatgctttagaattgatcaggttttatgctagtgtgaaagatgtcaagcaacaatagcaa

SEQ ID NO: 75678 - DNA, 599 bp, Chicken  19866894359805_1
  misc_feature (1)..(6): n is any nucleotide
nnnnnnctctgcttcttatttgaagtttgtttttccaattttgttacgtttaacagtggtaagattgtgtttgtgggttatctgttgcttgatagaccattttgtcttgcacaaaggatctgaattgcaggtgactgttgtacagttttcagttttactgcctggctaatagcgtattctttttacttagattgtttttcagtactttcttctgaattgatatgcaccttggagagccagtttatagtcgaagattctcaacatttgtattagcaattcaccaccaatgttacctactcytcccagctgtcacagacatatcactagcattgcccatcacagatcagaagctacgtgatggtattttgtcagttacattttagaggcagttagagaaatctgttttgtccttttctttatattcaggcaaagtgtggtacaatgtttgatatctccagctttgtaggtgaatttcacttctgtggtctgttgtttgagaagtaatattatttgatgagtttacattgtcttcactatacaaataaagacttagagctttgtctattcgttaaaatattatagtgcttgattaattggtt

SEQ ID NO: 75679 - DNA, 600 bp, Chicken  19866894359810_1
ggcccgggcgattcattgttgttaacgctctgagacttcaattttttgaggacaaaagcatctgctgaggctccctggctcgggagtacaggcatttgggaacgggcgtgtcttttgtgagggattttgtgcatctctgctaataaatggccactgtcatagaatcgtaaaatggcttgaggtggaagggaccttaaagatcactgagattcaacgattttgctaaggacagggttaccagccactggatcaggctgcccaagaccccatccaacctggacccagggatggggcggggcrtccacagcccctctgggctgcctgttccagtactcagcactctctccctaaaatttttcccctgaaatctaatctragtcttcccttttagtttaaagccattcccccttgtcctatcattatccatctgtgcaaatagttgttttccctcttgtttttaaactccctttaaatactggaaagctgcaatgaggtcttccttggagctttctcgtctccagactgaacaagtgcagcttcctcagcctgtctttataagagaggtgctccagctttctgatcatctatctttatgatgct

SEQ ID NO: 75680 - DNA, 542 bp, Chicken  19866894359810_2
ggctcgggagtacaggcatttgggaacgggcgtgtcttttgtgagggattttgtgcatctctgctaataaatggccactgtcatagaatcgtaaaatggcttgaggtggaagggaccttaaagatcactgagattcaacgattttgctaaggacagggttaccagccactggatcaggctgcccaagaccccatccaacctggacccagggatggggcggggcrtccacagcccctctgggctgcctgttccagtactcagcactctctccctaaaatttttcccctgaaatctaatctragtcttcccttttagtttaaagccattcccccttgtcctatcattatccatctgtgcaaatagttgttttccctcttgtttttaaactccctttaaatactggaaagctgcaatgaggtcttccttggagctttctcgtctccagactgaacaagtgcagcttcctcagcctgtctttataagagaggtgctccagctttctgatcatctatctttatgatgctcctccagacccattccag

SEQ ID NO: 75681 - DNA, 600 bp, Chicken  19866894359811_1
tgcatcttcaccttcaggatagaagagggttctgtctcacttgtgtgttttttttaaccctagggtttatttacttatccaagacaagtcaaacaccaggaaaaatgataacatgagatttatcagttgtctgacagctaaagcattgtttcaaatacatggattcatactacttgtggaaagagcacacatctgactctgcccgcatcagggcatcattcaactatgtgaaagctcgtattaagaaggtcagatgcagatctcctattgacacaatagaagtataaagcccaaactttygggtgaagaaacgtgaaaggatacacagcgtaaaatgatggctgtccatgctccccctttcctccacaagtttcctctgttgctccactagccagctcagctctcactaattaggtctttggtgctccactccctccgcctaccaagtttcccagactttccaaagccacctgcagcaacaacatgggagtcgtgggatttctgacagtgtgaacatccctgcaatcacttacttttggatgagaatctttcctgctacactgaagtgatacgaagaaaaatagacattttccaccttct

SEQ ID NO: 75682 - DNA, 600 bp, Chicken  19866894359815_1
tctcctatctctggagcggccgaaggtgctttttttattgtaatcccccctcggtacctccagctgcctgccgaggctggtgggcgagcggagaagagggagctttgttcccgtgtagaagctcttatcaaatattagcagcattttctcacagacacattccaaaaatacaaagagctcctttgagtgatgagcagggagagatcgccttcatgcagagggttccctgctggacgtggtgctttggcggcgaggctctcctggaagcagaacgccgatgttgttctgcaggtctggttsttgtaggtggatttgctgtggtgtcctccatgcgaacagctgggggtcctccagaaacaccactgactataaatatcgtcaagagatgttgtgcaggaggggtgcccccaggaaaggcacaacctgatggcaaaaggtctcaggtgtaagcgtcacagtacttagaaaaggtaattctgtcttagtgaggctcataaaagcaaagcrtacttagaaagcttggctagtgagaaatagccaggaaggtctgttcttggtgttgaagttgctgctagcagtgtagtggtaccctggcatggg

SEQ ID NO: 75683 - DNA, 600 bp, Chicken  19866894359815_2
ccttcatgcagagggttccctgctggacgtggtgctttggcggcgaggctctcctggaagcagaacgccgatgttgttctgcaggtctggttsttgtaggtggatttgctgtggtgtcctccatgcgaacagctgggggtcctccagaaacaccactgactataaatatcgtcaagagatgttgtgcaggaggggtgcccccaggaaaggcacaacctgatggcaaaaggtctcaggtgtaagcgtcacagtacttagaaaaggtaattctgtcttagtgaggctcataaaagcaaagcrtacttagaaagcttggctagtgagaaatagccaggaaggtctgttcttggtgttgaagttgctgctagcagtgtagtggtaccctggcatgggtgatacaggaaccttttggcaaaaatcctgctgactccagtgaaatactagactgtgggctcgataaaatcgctgccttccacttgtgccttgcataagtagctactctctgtttagacacaaatgtttcttccggtgctgtctgccttgaaattccattttctggactcagtgaagcaccctttagtgcctttttttgttgctctt

SEQ ID NO: 75684 - DNA, 600 bp, Chicken  19866894359819_1
actggagatgaaatttggcaggcaatatgttcataatatgatctaatcatgtttggtagtgtgcggagggaaataaagaaattggctgagagaggattgcttaaaaattggcagctttgcaaaaactgtgacttctctatggaaatctcatcagaatgatgagccagccagcttttcagagcctgtccagaatttttcctttcaaaatatttgtgcacaagtgataatggataacttctattagtgggtggctgttgcagcgcacttcaggactgaccctgaagtatcccctgctatttyagcactggactccaacagctcttccaaaaagcctcgctcctcactccctgcttttctttcaggcttaggggttcataagtctgctggaatattgtcaggcctcataagactgaataacctctttgtgtagcatcctgccagaaatgacccagaccacgtatttcaacagatacgactataaaatcatttggataacctgctctagcacacagcctcatcctgttctccactgataaagagtagttcaactcctaaagtatttatgacttagcatttattatcctaggtgcttgctatcta

SEQ ID NO: 75685 - DNA, 600 bp, Chicken  19866894359820_1
caatattgtgtgatggtgctggacagcagcaaaagatggagttcaccacagtgatttactgaagataaaaaagccccatatgtgaaagtacattctgctccacatgtaaacagaatcttcatattctgtctcagtaatttcttctgcattgccacctgccttcccatcgtcactgtagaactgttaggtcacggcttgaattgctactgagcacccggtgaatggatgtggcctgaagaagtggacccagggcggagacactctgggctcatatgaaggctagtcactgaagggaacatmtctcttagatctcaaggatctaggatgctttttgagaaggcgtgctgcatagctggaaagccccttcaccagtggggtgagttcaactcttctttctacatatgattattggcctacctgtgaatgttttacctgtcagaaacaattttgcttctttctgagcagaacatttggtgtagttggcaggataccagggaaagcatcttaaagacagaaatagcatttgtaaagagtattcctggggtccatcagaagaggggtggccagcaaggacagggaggtgattgtccctctctattc

SEQ ID NO: 75686 - DNA, 600 bp, Chicken  19866894359821_1
cttgtccccaaagaaaataagcagatttttttctgtgagcattcattaaatgcttatcaggcataatgtaagtgacagcagagcttcaagacacaaatcactctcatctattctcatgttggatctttcatttaaatatgcacttgtctctttatttttaatgatgccttttctgttgcaagaagagatgtttgattgctctttacaggtaaattttttaaccctcttttaaaatcattaacataatagaagagtaacatttctccatttaaattatgcataaataagacagaatttgtraagaagtttttgctcttgttcttttaatggaaataattttttaaaacaaactgcttgaagttaaaagatgttattactccctcccccaagtaaacttttctttacgaggaaaacgtgaatrtaaatgaaatcttttagtctacagagaacgagcaaaactagataaattgaatgaaagtggactattaacggaaattaggagcatatgctgctttttttgaaaaggctcaaacagtagctataagtctttcaaattgtctgattgttggcggaagaatgaaatgaggtaggcatgatatg

SEQ ID NO: 75687 - DNA, 600 bp, Chicken  19866894359821_2
gatctttcatttaaatatgcacttgtctctttatttttaatgatgccttttctgttgcaagaagagatgtttgattgctctttacaggtaaattttttaaccctcttttaaaatcattaacataatagaagagtaacatttctccatttaaattatgcataaataagacagaatttgtraagaagtttttgctcttgttcttttaatggaaataattttttaaaacaaactgcttgaagttaaaagatgttattactccctcccccaagtaaacttttctttacgaggaaaacgtgaatrtaaatgaaatcttttagtctacagagaacgagcaaaactagataaattgaatgaaagtggactattaacggaaattaggagcatatgctgctttttttgaaaaggctcaaacagtagctataagtctttcaaattgtctgattgttggcggaagaatgaaatgaggtaggcatgatatgcataaagcagactcaaaatgcattactgcattcatcacatgagagctgaagggaaccgcaaggtttctcctaaaaggaaaatgaggcagggagaagcatttacattgcctgatgtggagaa

SEQ ID NO: 75688 - DNA, 600 bp, Chicken  19866894359821_3
ttttttaaccctcttttaaaatcattaacataatagaagagtaacatttctccatttaaattatgcataaataagacagaatttgtraagaagtttttgctcttgttcttttaatggaaataattttttaaaacaaactgcttgaagttaaaagatgttattactccctcccccaagtaaacttttctttacgaggaaaacgtgaatrtaaatgaaatcttttagtctacagagaacgagcaaaactagataaattgaatgaaagtggactattaacggaaattaggagcatatgctgcrttttttgaaaaggctcaaacagtagctataagtctttcaaattgtctgattgttggcggaagaatgaaatgaggtaggcatgatatgcataaagcagactcaaaatgcattactgcattcatcacatgagagctgaagggaaccgcaaggtttctcctaaaaggaaaatgaggcagggagaagcatttacattgcctgatgtggagaaaaggatgacataaattccatttagaggtcagtctgtcattgccctacctcagctgctcagggaagggggggcttagtgcagtctttctcctt

SEQ ID NO: 75689 - DNA, 599 bp, Chicken  19866894359823_1
  misc_feature (1)..(39): n is any nucleotide
nnnnnnnnnnnnnnnnnnnnnnnnnnnnnnnnnnnnnnntaaagaataaaacaaagaaaggacggtgctttctgatcactcagatgttcacccaaaattatatggttattttccaaagggtctaaaacctgctgaatgatatacagcatccagcagcctcagtaaaaacaaacaaataaataaaaaggtgcacaaaatccaataggatgagaataatcacagttcaaaatgaaaggtggctgcaatggaaatgaataattctaggaaaaaatgaaatcagcataagggacagtacaaaayggtcgatgtggagagacagcacctaagtaatattagatgcctgcataactacaagtgtgatgcggggatttatttgcaaatactatgacatacaagaatctaacagctgaaataatatacatgccaaataattaaaatttaaaattttagctcctaatgttataagtacaggatacagaagcaacgtgaagtacacgcagtaagtcttatactaccatatgagctgtaactagctgttatgtacatttgcattcagatctccttagctgctcctactaaagaaaaccaggcagagctga

SEQ ID NO: 75690 - DNA, 600 bp, Chicken  19866894359829_1
gggcacaaaatacaaggtataggcagagaatggattgagagcagcgctgcagagaagggcttggagtactgtcacatgaaaagcagagtgcacctgcagcccagaaaagctgatcatcttggactgcatcaaaaggaggccagcaggtcaagggagatgattgtcattttctattctgctctcatgagaactccaggttgagtactaccttagttagggaggcagtattcccctcttgaaggctatcgaccatctgtgtaagaatctaattataatccaatcatttatgcaaatgcaagkagaagcaccatctagttacttttgacctacaaaactttcacgtatagcaaggccaatggattttatgtgttatactgaaggacttgtaaaaatgttcagtcggtgtgcccaaactaatgacaatatcrtctttacaactcaatcyacaattattatcacagccaaccacacaaattgttacagaagttaatctggcttacagatacacagtatgaactaaaagcatggaagacataatagctgtaatcatgtcagcgctgtgcaagtatctgctttagtaaggcaaaacaagctaccaat

SEQ ID NO: 75691 - DNA, 600 bp, Chicken  19866894359829_2
tcaaaaggaggccagcaggtcaagggagatgattgtcattttctattctgctctcatgagaactccaggttgagtactaccttagttagggaggcagtattcccctcttgaaggctatcgaccatctgtgtaagaatctaattataatccaatcatttatgcaaatgcaagkagaagcaccatctagttacttttgacctacaaaactttcacgtatagcaaggccaatggattttatgtgttatactgaaggacttgtaaaaatgttcagtcggtgtgcccaaactaatgacaatatcrtctttacaactcaatcyacaattattatcacagccaaccacacaaattgttacagaagttaatctggcttacagatacacagtatgaactaaaagcatggaagacataatagctgtaatcatgtcagcgctgtgcaagtatctgctttagtaaggcaaaacaagctaccaataatttgctgtgcatggatttatagtgccattaaacagaatcttcctttcatgcattttttcctcattaccacctgttgttaaaatgtgttttcctggtctgtggttagatccaagcaagtggactgca

SEQ ID NO: 75692 - DNA, 600 bp, Chicken  19866894359829_3
ggtcaagggagatgattgtcattttctattctgctctcatgagaactccaggttgagtactaccttagttagggaggcagtattcccctcttgaaggctatcgaccatctgtgtaagaatctaattataatccaatcatttatgcaaatgcaagkagaagcaccatctagttacttttgacctacaaaactttcacgtatagcaaggccaatggattttatgtgttatactgaaggacttgtaaaaatgttcagtcggtgtgcccaaactaatgacaatatcrtctttacaactcaatcyacaattattatcacagccaaccacacaaattgttacagaagttaatctggcttacagatacacagtatgaactaaaagcatggaagacataatagctgtaatcatgtcagcgctgtgcaagtatctgctttagtaaggcaaaacaagctaccaataatttgctgtgcatggatttatagtgccattaaacagaatcttcctttcatgcattttttcctcattaccacctgttgttaaaatgtgttttcctggtctgtggttagatccaagcaagtggactgcaaatgtgatgtgaatgac

SEQ ID NO: 75693 - DNA, 600 bp, Chicken  19866894359838_1
tgttttacatcaagctgcatagccaaaccggagagctgtgcagactgcagacatgcaacttacactgagagagacatatgctcttaagttcaaacacaaacacacccacactcagccaaatgcacgcccccacatacatatttcccagtaaaatgaaactgaaggctctcagttcagtggaagttttataagccctaaagaaaaacatgggcgcatatgcattgcattgacactatctgggctgaagaggaaaagctattcagtctttgatgagacttccttttgtttctcctctctccraaagtgtactaacttattcagattacttttgatatgggcagttgctgccataatggaagctgtgcagtatgcagtatggctagaccttgccacttgatgtgaaagcatgagaagcagcagatgctacacaagggcaggagatggaaagttgtggccctttcagacttcatctccagctcaagatcatccattttttacaaaacggaatcaagaaggacctttgaaacccatttcataagttttcttctcttgtagctttctcaaacatgttccacacatagcgcaggagatgttgactgt

SEQ ID NO: 75694 - DNA, 599 bp, Chicken  19866894359840_1
  misc_feature (1)..(204): n is any nucleotide
nnnnnnnnnnnnnnnnnnnnnnnnnnnnnnnnnnnnnnnnnnnnnnnnnnnnnnnnnnnnnnnnnnnnnnnnnnnnnnnnnnnnnnnnnnnnnnnnnnnnnnnnnnnnnnnnnnnnnnnnnnnnnnnnnnnnnnnnnnnnnnnnnnnnnnnnnnnnnnnnnnnnnnnnnnnnnnnnnnnnnnnnnnnnnnnnnnnnnnnnnnnnattaatattgtatatggaacagctgaagggttgcgaagaaacctgcccactacaggcccctggcagatggaacaacatgcacaggcacacacacamaaaaaaacttttaacaaccctttgctcgctctcgggcgcgccccttctccccgatttggtcggttccttcccaaagaggcaacgcctttgtctgacccacatctagagccttttacttccctaacgagcaacaattggagcaatcaccgtcgtttgtggagggcacctgcattaccccagcactttctctttgtgcctcggttaatgcgggagctaaaacacatccaggcacgagccaaccttacatttggtaacaccccaccctcaccccttcatcgcagaacagaaaacaaacaaac

SEQ ID NO: 75695 - DNA, 600 bp, Chicken  19866894359840_2
catctagagccttttacttccctaacgagcaacaattggagcaatcaccgtcgtttgtggagggcacctgcattaccccagcactttctctttgtgcctcggttaatgcgggagctaaaacacatccaggcacgagccaaccttacatttggtaacaccccaccctcaccccttcatcgcagaacagaaaacaaacaaacaaaacagaaagccaacaacaacaaaaagaaaaaccatctgaacagaagtggcagaaaacaggatttttttcccctcatccccccaccccttcccttctcrtgctttgcagttagccgaaacgcgcggtagcgggacaaagccccacagcagcagccccggagccgcacacgaccccacgcacccgcagcccttcggggttgagcccagagcaaaacgaacggggaaggagcycaagacttcgcctgttaaacgcgaggacaggaaacccgcgctctgaaacacgctctccactgcatcattagagggggaaaaaagccccccaaaacaaggggagctttgtggggccgccatccccctcagctcaccgagcccctgtgccgaggcgtggcttgggcagag

SEQ ID NO: 75696 - DNA, 515 bp, Chicken  19866894359840_3
cgagccaaccttacatttggtaacaccccaccctcaccccttcatcgcagaacagaaaacaaacaaacaaaacagaaagccaacaacaacaaaaagaaaaaccatctgaacagaagtggcagaaaacaggatttttttcccctcatccccccaccccttcccttctcrtgctttgcagttagccgaaacgcgcggtagcgggacaaagccccacagcagcagccccggagccgcacacgaccccacgcacccgcagcccttcggggttgagcccagagcaaaacgaacggggaaggagcycaagacttcgcctgttaaacgcgaggacaggaaacccgcgctctgaaacacgctctccactgcatcattagagggggaaaaaagccccccaaaacaaggggagctttgtggggccgccatccccctcagctcaccgagcccctgtgccgaggcgtggcttgggcagagcgaggctgctcgagtgcttcggaagggaaacaggaggaacccaacaa

SEQ ID NO: 75697 - DNA, 600 bp, Chicken  19866894359842_1
tttcctgaagtcatagcatttataattacaaccagtttccagaagcaaaaatgaccgtctgttcctactgtgagctcacaactcaagccataccttttactgatcaacagaccccctccagaatgacttttgtgtacagttctgctaagtattaaaagcctagtaatcttcataggtactgctcagatgtagagaagacaatatgcggaagtttacaagcatcaagaccttacctttcttctcagatttttctctttcaaatctgtttccgtcttttataatacatgtacatgaggactmttaaaatatagtaaacagcatactataatcctcctagttttatgatagcaaaataaaacatttgacatacgcataaaattctaccagcaaaaccaaaaaacattaatgacaaaagcgagatgaattgagaccttcatattatttgttctgaaatgaaaaggaaattgatactaactgcaacaacaatctcatamttattttcaatattcagagctagagaaagggaagaatttatgacttactgtgtacagtaagtaaactattcctttctggacaaacaggagttatcaaggtgaggca

SEQ ID NO: 75698 - DNA, 600 bp, Chicken  19866894359842_2
aagacaatatgcggaagtttacaagcatcaagaccttacctttcttctcagatttttctctttcaaatctgtttccgtcttttataatacatgtacatgaggactmttaaaatatagtaaacagcatactataatcctcctagttttatgatagcaaaataaaacatttgacatacgcataaaattctaccagcaaaaccaaaaaacattaatgacaaaagcgagatgaattgagaccttcatattatttgttctgaaatgaaaaggaaattgatactaactgcaacaacaatctcatamttattttcaatattcagagctagagaaagggaagaatttatgacttactgtgtacagtaagtaaactattcctttctggacaaacaggagttatcaaggtgaggcatgtctatttaactttgaattattagtctttggcctttcatggcagacatgactttgaatatacttatgtacagatgtttatgttcttataaatatctatacctacattagtctctctttacttcaagaaagatggctatctcctcacttagtactggttccccatctgcttaatttccgtaagtcattatccag

SEQ ID NO: 75699 - DNA, 600 bp, Chicken  19866894359851_1
gtttgtaactgtgtactgaactcaatttattcttttactgtcctgttacttctataaacttctatgtgtcctggtttctacaatgtaacccatgtgttctggtaaaacatagttcaggatgtagttcatagttcatatagatcatagttcaggattcttcatataacaagagtagagttagtgttggcgtggagcttttagctgtatctcctgcaccaaaatgacagaactttttatggcaagaatctgttggcagcagtagaatttgttaataggacacattttttgccttgagagatrcacagccgcaacactattgccatagaaatgtcttctaatgtacatttttacatacacagtgagtatgactagtatggtgtctttcaaaactattttctgaattgaacataactaatactacacagtttttgagattaatatgagctttaaacaattggcaatgggattgtgaattgaggctgggaattttaagatgctcaatactttgtgcttttctcaaataggacggtgggtttcagaacacagaactgaaactcttcacttgaaaactgagtatttttgttttttcaactttttttt

SEQ ID NO: 75700 - DNA, 600 bp, Chicken  19866894359853_1
ttctggggaatcctttctagtgaatagctgcaagtgacaatacctgcctcgacaaatgctggattttgcaactcttgaaaagatgtttgtgctgttggagttgtattttcctgttgcttcctcctgtcttactctcttaaaggaaaatttgatttacttgtaagacacatagtacagacagttgcgctgctatttcaacttagggctgagagctctgaaatgccaactttagtttttgtgaaaacctcaggctgtggttccaagcctggcataaatgcgatattattcctggcacatcarttgtrtttttgacaacagaatcacggccgttcagagctctgcagctttatccagaagcctgcctccattctagcccacaggctgcaatgcaaatatgtacaggggttttctcatacaatgggtaattgctcagccaaggaagggagagtattttcagctgtttgaaagtttctgagcatgacactattttgagggttgtataaaagagagctggatggggtttttatgaaagagagctggaagatttcatactattcatactattgctatttcatactatggctatttcatactattgct

SEQ ID NO: 75701 - DNA, 600 bp, Chicken  19866894359853_2
gggaatcctttctagtgaatagctgcaagtgacaatacctgcctcgacaaatgctggattttgcaactcttgaaaagatgtttgtgctgttggagttgtattttcctgttgcttcctcctgtcttactctcttaaaggaaaatttgatttacttgtaagacacatagtacagacagttgcgctgctatttcaacttagggctgagagctctgaaatgccaactttagtttttgtgaaaacctcaggctgtggttccaagcctggcataaatgcgatattattcctggcacatcarttgtrtttttgacaacagaatcacggccgttcagagctctgcagctttatccagaagcctgcctccattctagcccacaggctgcaatgcaaatatgtacaggggttttctcatacaatgggtaattgctcagccaaggaagggagagtattttcagctgtttgaaagtttctgagcatgacactattttgagggttgtataaaagagagctggatggggtttttatgaaagagagctggaagatttcatactattcatactattgctatttcatactatggctatttcatactattgctatttc

SEQ ID NO: 75702 - DNA, 532 bp, Chicken  19866894359862_1
tcagccacagagttcatgcatttctgcctcctgggacagctatctttgactctcagcattacttgacatgctagcaaaggaaaagtgaaaataatcacctcaactagcacctcatgtcccacgtggccgaagagcactcaaattctgcactcctgcatatagcacatgtctaggagacttctggtgaacaacatttgaggagcacatgtactgtaagaaaacagaaagccatgaggataaaaataatcaatttctgaggctaatcttaagcaacagatacgttacatgaccagtgagacycaagacacacagactgaagggggaagagaacatggaaaattgccagaggataagtctgaaattcattttatgtgcaatgttatgtatcaccttataaaaactaacagggcctcatcatcatctctatagccagagtttttctcctcatctccaaaagatttttttctcatattttccctgattgtttttaaagtgacactatgaattttatgctggttgtaaatgtatgatg

SEQ ID NO: 75703 - DNA, 600 bp, Chicken  19866894359864_1
gatgtagtttcagagttccctgcactgtgtcacaattcatacattttaaaatatgtagggattcgcaatctatgtgacagtgtctgctagagtcaatcttttttttccatttaattttaagctgtcttaataatcagaaactttttaaaaattcaaatggtaattctcattctgtaaagttataaattctgagtcctgtacataactaatgggattttagagaaataattagaatacattcaaaaataatttgcaaattagttgaaagataataaacagaatcctagtggtagcaaaaarcacctaacattcaagaaacagagaaatagagtttctaagcagtctttccagggacatgttcctaattgatgtatccggtaattgcagtttttttatagtacaggaaaattaaaatgattcaccaattttattcagtcatttaaagaggatctggagtggttagtgctattaacatatccaactgttggggccacatgaacacgggagagatacctgctgggtctgatttacaggcacctactgagaggaaataaagaacacggtcatgtcctgatttatagtgatctgctgcaggagcga

SEQ ID NO: 75704 - DNA, 600 bp, Chicken  19866894359866_1
ccagtcattcttaaataggctgagcagagagacatggaaggtcctagagaccatcgaagtctttagtgcaaatatggcatttgtagttcccttataccttttctcattagtaatatcagtaaaactgcttttagagatttttcccctgaaaacatttttgctttgtcaaagatagtgcatttagatgaaacctcatttaactgaaaatgttccaattttagttctgaaagaagattgtatttagtcgttcagtggcaaaagaaaatttcactgcatgaagacttgatgtttaagtggacrtggaagatgcatgcagtaaataaaaaacttctgttatatagttacaaaaaaactaacaatggaactcttttctgctgcggactggtgttgttttcagtgaagytggttattagaactgaaaggaaaaaaatattccagcagcacggcagtgaggataaaaaaaaataaaaaaaataaaggagggcatgcttcagaatagaatgtcttattgccaaaaataagtatctcagataatttacaaccttatacgtagaaaattaaacaaagacaatttttttgaagtcagattttattatctcc

SEQ ID NO: 75705 - DNA, 600 bp, Chicken  19866894359866_2
tcattagtaatatcagtaaaactgcttttagagatttttcccctgaaaacatttttgctttgtcaaagatagtgcatttagatgaaacctcatttaactgaaaatgttccaattttagttctgaaagaagattgtatttagtcgttcagtggcaaaagaaaatttcactgcatgaagacttgatgtttaagtggacrtggaagatgcatgcagtaaataaaaaacttctgttatatagttacaaaaaaactaacaatggaactcttttctgctgcggactggtgttgttttcagtgaagytggttattagaactgaaaggaaaaaaatattccagcagcacggcagtgaggataaaaaaaaataaaaaaaataaaggagggcatgcttcagaatagaatgtcttattgccaaaaataagtatctcagataatttacaaccttatacgtagaaaattaaacaaagacaatttttttgaagtcagattttattatctccaattccattggtgtatatgctgaaaattagagatagttttggaattgcacatcataagagaatcggatttgaatgcataatttgtattgaagagcaggaatta

SEQ ID NO: 75706 - DNA, 600 bp, Chicken  19866894359880_1
tcatgggcacctaaaagctataaatactatggttcacagacatctaaataatgtaaaaaatagattattaaatatatatatgttgttggaatgccataaaatattctacctttaaaatgactgaaaaaaagatactggaaatatttcacatatccgagaaaagaagaaaatacatttgtctgagcaggtgcattacccagcagatgaaaaacttactgaatggtatgactgaaaaccttgtctgagataccctgatcaagataatttatggaattttagaatctacaaagttgataagcwgataaacaaaggtgtcagagacctgttaaaatgaagttagatttagatatggtataagtgaaaakgtggccatacaaagtacttgaacaaccataggartttcctaagagtttcttaaccttaaaaaaaagctaaaaaattgttcctcatattcactttgtgactgcaaggaaatacctatctgattatttatttatgtattatattatttgagcttcatggaaggaaattatttcctccttgagcatgcatgtcattatattaatgatcataagatcatttattgtcacattctgtatt

SEQ ID NO: 75707 - DNA, 600 bp, Chicken  19866894359880_2
tattaaatatatatatgttgttggaatgccataaaatattctacctttaaaatgactgaaaaaaagatactggaaatatttcacatatccgagaaaagaagaaaatacatttgtctgagcaggtgcattacccagcagatgaaaaacttactgaatggtatgactgaaaaccttgtctgagataccctgatcaagataatttatggaattttagaatctacaaagttgataagcwgataaacaaaggtgtcagagacctgttaaaatgaagttagatttagatatggtataagtgaaaakgtggccatacaaagtacttgaacaaccataggartttcctaagagtttcttaaccttaaaaaaaagctaaaaaattgttcctcatattcactttgtgactgcaaggaaatacctatctgattatttatttatgtattatattatttgagcttcatggaaggaaattatttcctccttgagcatgcatgtcattatattaatgatcataagatcatttattgtcacattctgtattttaattcttgatttctaagatagaaattgctatcctgaatgtcagtagaatttaaaaaacaaaat

SEQ ID NO: 75708 - DNA, 600 bp, Chicken  19866894359880_3
aatattctacctttaaaatgactgaaaaaaagatactggaaatatttcacatatccgagaaaagaagaaaatacatttgtctgagcaggtgcattacccagcagatgaaaaacttactgaatggtatgactgaaaaccttgtctgagataccctgatcaagataatttatggaattttagaatctacaaagttgataagcwgataaacaaaggtgtcagagacctgttaaaatgaagttagatttagatatggtataagtgaaaakgtggccatacaaagtacttgaacaaccataggartttcctaagagtttcttaaccttaaaaaaaagctaaaaaattgttcctcatattcactttgtgactgcaaggaaatacctatctgattatttatttatgtattatattatttgagcttcatggaaggaaattatttcctccttgagcatgcatgtcattatattaatgatcataagatcatttattgtcacattctgtattttaattcttgatttctaagatagaaattgctatcctgaatgtcagtagaatttaaaaaacaaaatctgaatcctctgtttgactatctcacatgaatta

SEQ ID NO: 75709 - DNA, 600 bp, Chicken  19866894359880_4
gagtagatcccctgtgcagtgaaccttttcttgaactaactctgacctctgttctaaatggaacctggcacataacacaaaaaatagaaaaaagtaacctgatattctgaaaatgcatttgatttgtaacaacaaaagtgctctcgtcaaacaaaataatgtattcaatcatttcctttgcagtcatgcacaaatgctttgataattaaagaagtgtaactggtatgcagaaaaacaaagggagaaactttgaagatgagacaccaaaaaacacatgttgaaatgttctcaaatcttccrttttttttttttctctgacattttagcacatttttcatttttaaccaacatgaatgcctcctaagaaagagctttctgtgttttgaaagaggtagccttttatttcagtctatctttaatcttactagggtaaccctactcattgcagaaccacaattaacattgctataaaagctcattatcatctcacataaaccaaaacaatgcaattagggtttctattgcttggtggaagtagacacaccatgtgcccttccaagatataacttctaagatatctaatgatggcaagggatgatt

SEQ ID NO: 75710 - DNA, 600 bp, Chicken  19866894359883_1
tggaagcatatatgaagaaaggttatgtcactgaattcctccttgtggaaaaaattgcatccattgagtggatctgactacagtgaggtgatgggtggtgtgttccagcagtggcaacagtgacagtggttgaccattgctggcacagatttttcaagcacagcatgcagactcttgttcatcactggtgaaaatgtgcagctaatggtagagactgtgctgaaaaactatgttttgtagctgagaatttgctttatcaaattgtattactgtgttctgtgtatctgttgtgctttctakggaaatacatrggagggatttctttcggagcagcctacatatataaatgccaaaccccccaaacctgttttatcatcatctacaagtgctttgatactgctgcttcctctataacaccagtggcttactaggaaagtcgtcacctatccagtcaaattatgaatatgaaatccatctcactgaaacttctcatgcaggtgaacagagaagtgcctgcaaaagtgccagaaaactgaattgggaatggatttctgtcaactgaagagaaattatttgctcatctcttcctaccaaactcag

SEQ ID NO: 75711 - DNA, 600 bp, Chicken  19866894359883_2
atgaagaaaggttatgtcactgaattcctccttgtggaaaaaattgcatccattgagtggatctgactacagtgaggtgatgggtggtgtgttccagcagtggcaacagtgacagtggttgaccattgctggcacagatttttcaagcacagcatgcagactcttgttcatcactggtgaaaatgtgcagctaatggtagagactgtgctgaaaaactatgttttgtagctgagaatttgctttatcaaattgtattactgtgttctgtgtatctgttgtgctttctakggaaatacatrggagggatttctttcggagcagcctacatatataaatgccaaaccccccaaacctgttttatcatcatctacaagtgctttgatactgctgcttcctctataacaccagtggcttactaggaaagtcgtcacctatccagtcaaattatgaatatgaaatccatctcactgaaacttctcatgcaggtgaacagagaagtgcctgcaaaagtgccagaaaactgaattgggaatggatttctgtcaactgaagagaaattatttgctcatctcttcctaccaaactcagtttaagcagct

SEQ ID NO: 75712 - DNA, 600 bp, Chicken  19866894359884_1
cctttaagtttgtgggaattttcctgttagctgcagaaggaaaaggatttcagcctacggatgctttttgaccagaaaagttatcagtcttctcaaggctgtaaagtccttggtgcaagaggaaagatttaatgtggtgcaaagggaaggaggcacgagtaatgacatgcaatccaaagaaaggaacagtacctcagaacaacaggataatttttttgattgggggaattataagactgttgaagactgtcccaagaaatatcccagagaactaattccttctgaaattcacagtgaagmggggtaatacactgaaaacagtcctgagctggccacacagagagcaatacttctaatttccatgatttcattacattcagggcagctgccagcatatttaagaatgtcttgtataacattcctgatgtcagttccaagaaggagcatttgtctagcgttttcattagaacagtgtatcaaccaattttgtgtaatcaaaaaggcattcaattaaaagtgactgaggggaagcaggctrgaaggtgactgacgaaagggtaaaagccaaagcagcagcaaagcaatactctacatgctaca

SEQ ID NO: 75713 - DNA, 600 bp, Chicken  19866894359884_2
gttgaagactgtcccaagaaatatcccagagaactaattccttctgaaattcacagtgaagmggggtaatacactgaaaacagtcctgagctggccacacagagagcaatacttctaatttccatgatttcattacattcagggcagctgccagcatatttaagaatgtcttgtataacattcctgatgtcagttccaagaaggagcatttgtctagcgttttcattagaacagtgtatcaaccaattttgtgtaatcaaaaaggcattcaattaaaagtgactgaggggaagcaggctrgaaggtgactgacgaaagggtaaaagccaaagcagcagcaaagcaatactctacatgctacaaaatgaatccgtggctgctgcgagaaacctatcatttacaaacacctttcatatccttcaattacagatacgagttcctaacaaccaccacctgaaaacgagttattccctccagttcatactgatgtttgaattcacagctgctgaacacataatctgcttttatcttctcctgtccaagcaggatttttctttaatgcagcaccactcagaaagctgcatttgtcctaaagccccc

SEQ ID NO: 75714 - DNA, 600 bp, Chicken  19866894359886_1
aaaacaggaggcattactttcagatcagccattgtaccttcccaggccataaagggaagggatctaaaaacaagggaagttcttcagtggaaacttaatgaacagtgaagctctaaaagaaatcctagactaatttaatatttgagcagtggataagtcagtgaaaattcttaaaatttggtagttatgcatcatttacatgtacagcagtgagtgttttgtgcaaggtttttaagtgtaaagactgagtgacatatttttctgtgtggaataagtctgacagtagaatcagtgcagtgyatcgttaaccaaaaccttacagtcaaaaacatgtaacaaaagcaaatgtttcatacctcccactatcacaggttactgctgttttttgataaattgtcacagacaggccttaccaggttcatgaaaaagctgagagtcagcctcgctttcctggcaaatcaggagcaagcactgtcttaaccctaatctacttaagagtagggggagaaagaaagaagaagaattaatacaacaaatcccctgtgttctctcagtgactttctttaagcccagggacctaagataactcctgtggctccc

SEQ ID NO: 75715 - DNA, 600 bp, Chicken  19866894359892_1
agcacaggggtggcgtggccagcgctacgcatggggcacagccagaccccacagcagccccagtctcctgctcctgcaaagcttggcttctgctctcaggctgccttctggggaaggagcccctggttgttgtgaaatcctgtctgccttgcttccccctcaaagaaatcgagcaaaggaaactcaccagagatggagcgctggaagcagaaaaggggcgcaaagcttgcggcagaagcaggtgacaggaatatcaaggcagagcaacgctgcgagctgctcgttttgctgatgggaagrctgggtttagcgttcccacagctcagtacaaatcccttaggcaattctctttctgactaccagtaaaaagcccgtaaaccgtcatttgtatctaatctcacaaaggaatcggagccaaatctgccacttctgcctcagacgcaaagcgcagcgcatcagcggatctccaggctaacaagaccccaagagatgctcagagataaacagtacctttttaagcaagtggccggcagcgcagcgagtcccttgcacatctcgctcccaaggtcgggtccgtattccaggaacaaaataaccaca

SEQ ID NO: 75716 - DNA, 591 bp, Chicken  19866894359892_2
accgtcatttgtatctaatctcacaaaggaatcggagccaaatctgccacttctgcctcagacgcaaagcgcagcgcatcagcggatctccaggctaacaagaccccaagagatgctcagagataaacagtacctttttaagcaagtggccggcagcgcagcgagtcccttgcacatctcgctcccaaggtcgggtccgtattccaggaacaaaataaccacaaggcgggaggcagcaggggctgtgcaggtcctttgctggctgcagaattcggtctgcctgtgagccagttgcttggygtggctctgttttatagcctagcccagccagcccagcagcgctcggtgacccagtcagcagccagcacagcagctgcaccgtcccccttctgcccacccaagaggaagagggtgacgtatragctgagacaaacggctgagtgggactgaaagccttaccagaaatgaagcggggtggctgcagaggtaggttctttgcaaaggatggaaaaagctccaggggctttcccctgttgcaaaagatggtatggtgcagataaaagctggggggaagatttcagaggggagcag

SEQ ID NO: 75717 - DNA, 470 bp, Chicken  19866894359892_3
gataaacagtacctttttaagcaagtggccggcagcgcagcgagtcccttgcacatctcgctcccaaggtcgggtccgtattccaggaacaaaataaccacaaggcgggaggcagcaggggctgtgcaggtcctttgctggctgcagaattcggtctgcctgtgagccagttgcttggygtggctctgttttatagcctagcccagccagcccagcagcgctcggtgacccagtcagcagccagcacagcagctgcaccgtcccccttctgcccacccaagaggaagagggtgacgtatragctgagacaaacggctgagtgggactgaaagccttaccagaaatgaagcggggtggctgcagaggtaggttctttgcaaaggatggaaaaagctccaggggctttcccctgttgcaaaagatggtatggtgcagataaaagctggggggaagatttcagaggggagcag

SEQ ID NO: 75718 - DNA, 600 bp, Chicken  19866894359894_1
caaagagagtcccatctgaaacatcttttgtcaaatcacagtaattttacaggattgccacataaccaaagatttttccttctgtggttactgtggaatgttcttcctactgaagtataaagaagcaagataggaaggaagcagcaggaagggagagaggattttgctgcacaagaatcagagaggaaggcaagcaaaaccttgttcaagggcactactcactttctgaaacagcaaaatcgattgacagcatctatgcagctttcttcatacgcaacagtttgaacctaggggcaaatytgcttgctgtgtttttccctgttatttctcatacacatatggaacagcaactcctaaattttatgattttatgattttttatttatgatttatgatgggttttatgattcctttaaatgcttttagggctcattcaggttctttgctcttttctattgtttgatttcactcttaatcagattttttttatctccataaccagatatttccagagaagtatgcttcagtattggctaatttataaactatataaatgcatgaggcacaagtaatagcaaaaatattgacaccctcgagaat

SEQ ID NO: 75719 - DNA, 600 bp, Chicken  19866894359904_1
ccagtccttgcacgtaaatggccctcagcagggctgggagggcagctgccacgtcctctcatccttgtgcctctttcctcgctctggtgtgatgggtttctcctcagggaagacgatggtggcatactcggtctgctcggctgggcaggtctcgaggggcacctggctgtgtgggtcccgttggaactccagcacaccgtagtccacagtgggcacaggcaccacgggtggcttcacctcctgcagagcaaggataccccatcaaggcgattcatccaccatccagcggcaccatccatyctcagcacgatatcccgtgtacagcaattgccaaaagcagcgtttcaggagggtgagagcaatgcgaaggacagcatttgcatggggaaatcagactgtgagccttggggtcgcccacaggcatttcaaggacccattttccacctctccgttgtacatcagtggctcaggatgagcttgggactgctcattccagagaggggagagtgaaggggaccagcttgctgtcctcagctacctaaaagggctggagagaaggcactcctccacrcagtgcccagcaaaaggaagacagggaac

SEQ ID NO: 75720 - DNA, 600 bp, Chicken  19866894359904_2
tcatccaccatccagcggcaccatccatyctcagcacgatatcccgtgtacagcaattgccaaaagcagcgtttcaggagggtgagagcaatgcgaaggacagcatttgcatggggaaatcagactgtgagccttggggtcgcccacaggcatttcaaggacccattttccacctctccgttgtacatcagtggctcaggatgagcttgggactgctcattccagagaggggagagtgaaggggaccagcttgctgtcctcagctacctaaaagggctggagagaaggcactcctccacrcagtgcccagcaaaaggaagacagggaacaagcccaagatgcagcaagagaatcatagagtagcctgggttgaaaaggaccacartgatcgtcaagtttcaaccctcagaaattctagctgaatatacgggagcacagaggggaatcttctcccattttctatggcaacacaatccatcaacaaatagaaccctgcttggagcaagggttggaccagggaggtcctgtcctgccacaggcagttctttgattctgtgatggggctgtgccacgggtgcagagcagcagtggttgatgtgc

SEQ ID NO: 75721 - DNA, 600 bp, Chicken  19866894359904_3
gagcaatgcgaaggacagcatttgcatggggaaatcagactgtgagccttggggtcgcccacaggcatttcaaggacccattttccacctctccgttgtacatcagtggctcaggatgagcttgggactgctcattccagagaggggagagtgaaggggaccagcttgctgtcctcagctacctaaaagggctggagagaaggcactcctccacrcagtgcccagcaaaaggaagacagggaacaagcccaagatgcagcaagagaatcatagagtagcctgggttgaaaaggaccacartgatcgtcaagtttcaaccctcagaaattctagctgaatatacgggagcacagaggggaatcttctcccattttctatggcaacacaatccatcaacaaatagaaccctgcttggagcaagggttggaccagggaggtcctgtcctgccacaggcagttctttgattctgtgatggggctgtgccacgggtgcagagcagcagtggttgatgtgcaggagagattgagcagcaccaggggagataggagaagtgagaggcctgcaaagctctgataaaggcagggaggcagcgaggcagg

SEQ ID NO: 75722 - DNA, 599 bp, Chicken  19866894359906_1
  misc_feature (1)..(122): n is any nucleotide
nnnnnnnnnnnnnnnnnnnnnnnnnnnnnnnnnnnnnnnnnnnnnnnnnnnnnnnnnnnnnnnnnnnnnnnnnnnnnnnnnnnnnnnnnnnnnnnnnnnnnnnnnnnnnnnnnnnnnnnnnntctagacagcaaggtaagactttgaaccagctcttaggatttgttctgttttctggctcatcttgcagcttataagtctgctaccaactctttgttccaaatctgtgtgtttggttttaggaggttgtattttgtttgtttgttttttaacttcagaaccacttagttcaacaaaaartttacagttcatcgcttatttattcacaaatgkgaagaacagagagaaacaatcacttaacagagctgctccttcacattgtgcatgcttaagtgttttcctcagtcagtttcctggatgaggggaccgatttaaactgaaaactaaagatttttgcctggttaggaaactgatcaagctgaaaagtaatctgtctctttgtagagctgtgtagattttagttctgcctgcaaaggagctgctgtatgcgagtggagaaggtgaagactgctacttcagtttcagatgttgacttttta

SEQ ID NO: 75723 - DNA, 599 bp, Chicken  19866894359906_2
  misc_feature (1)..(89): n is any nucleotide
nnnnnnnnnnnnnnnnnnnnnnnnnnnnnnnnnnnnnnnnnnnnnnnnnnnnnnnnnnnnnnnnnnnnnnnnnnnnnnnnnnnnnnnnntctagacagcaaggtaagactttgaaccagctcttaggatttgttctgttttctggctcatcttgcagcttataagtctgctaccaactctttgttccaaatctgtgtgtttggttttaggaggttgtattttgtttgtttgttttttaacttcagaaccacttagttcaacaaaaartttacagttcatcgcttatttattcacaaatgkgaagaacagagagaaacaatcacttaacagagctgctccttcacattgtgcatgcttaagtgttttcctcagtcagtttcctggatgaggggaccgatttaaactgaaaactaaagatttttgcctggttaggaaactgatcaagctgaaaagtaatctgtctctttgtagagctgtgtagattttagttctgcctgcaaaggagctgctgtatgcgagtggagaaggtgaagactgctacttcagtttcagatgttgactttttatgtggggttgaagtgattctgtgttagcggcct

SEQ ID NO: 75724 - DNA, 585 bp, Chicken  19866894359906_3
gatgaggggaccgatttaaactgaaaactaaagatttttgcctggttaggaaactgatcaagctgaaaagtaatctgtctctttgtagagctgtgtagattttagttctgcctgcaaaggagctgctgtatgcgagtggagaaggtgaagactgctacttcagtttcagatgttgactttttatgtggggttgaagtgattctgtgttagcggcctgtggctttctagcagaattcagctttgtgcagtgggagttgtgactggggaataggctgaaaggagtcagctggtgcacaagcragcagcaggcatagatggaagcactgggtcttgaagcacatctggatgtggtccagctcaatatagctcgtctcctgttagtacatttcagtgcgtgctttcaattagtgttgctcttggatgaaagtactgagataatagttgtcaagtaaaccttaggagctgctagcagaaataagtcttgcttaacagattaaaaagactatttctgttgcttatctaaactcacagtagtactgttttaaaattttaatgacagatatgatttaacatcagtattgataa

SEQ ID NO: 75725 - DNA, 600 bp, Chicken  19866894359914_1
ttttttttttttttgtggaaatcttttgattttaggaatcagaattacctggtattacattttaatttctaatcaggttcaaggtcattattgcagaatacactgggaaagtacaaggagatttaaagtggaaagtgaaatactagagaagacctctcattgaagtatgttgaacgggaatcctgtaggtagtacaaatgaatgccaaagtccctcattcacagacaagaagagagaaataagagatgatcattttacaaataaaagggaaaaaaatcttccaaatccctcactctctcyctctttctacagactacagaaatacacatgtcaatgtgtcatcttgttaatactgctgccggtgtgtacgcaaacacatctgtcttctttatttattcagtcatcaaaattccaagtctgcaagctagtcataattatgccttccaaagaggcaggcacctgccatttactgtacctttttcaattacatctaattgaagacttgagctcaaatagaggaagggagacaagagttcttcaaactgtctaaacactttctgctgaataggaagaaaaaagtagtctcctactccasctcaa

SEQ ID NO: 75726 - DNA, 600 bp, Chicken  19866894359914_2
tctcyctctttctacagactacagaaatacacatgtcaatgtgtcatcttgttaatactgctgccggtgtgtacgcaaacacatctgtcttctttatttattcagtcatcaaaattccaagtctgcaagctagtcataattatgccttccaaagaggcaggcacctgccatttactgtacctttttcaattacatctaattgaagacttgagctcaaatagaggaagggagacaagagttcttcaaactgtctaaacactttctgctgaataggaagaaaaaagtagtctcctactccasctcaaaataagccctccaacatgactggcactataaagaactgggatatgagacaccttgccttcatttaagcaccccacaccacacagatgctttttgcatggttgatggctcacagccagaagaaaagtcccctagccttcccattcactgctgaagctaagctatgaatgcatatcctgggtacaagaacttgtcctggctgctccagtaatttcttttgttgaaaagcaaggatagggggcaataagttagaaatggcaaaaaagaaaaggaaaaaaaaccacaagtttaccagca

SEQ ID NO: 75727 - DNA, 600 bp, Chicken  19866894359918_1
attttatgttaatgacatcttttggtcacagaaaagttacacagtattttatttgccagatgtgaaagctaattcttacatagccatatcatggttatgcaaaataaatttttagttcatcacacagctcttacttgccctagaaacatctttttgtactgcagggctatagagagccatgcaagatctccagaaagccattcaaaactctcataaacctgcaagaagttccacccagacttcagcattgttcatttgtagtcaaaggatttatcagattgcttaagtttagtacattcmgtgtgaggccatacttctgtttgcatgtcatgcttccctgcagctagatttatgcagttctgcagcccttcttgcaatccatcccccactgctgatgagtcctttggctactgatgagctgcatggcactgtggggattggatctgccatacttacagaggaggtcagcaaactagtgggcttctccaactgcagcttaacactgcagacccttcagtcaaggaataccatggccgcagagaaacaagatgttgaggtacacctcccaggcaatcctgggcgcatygccttggagctgcc

SEQ ID NO: 75728 - DNA, 600 bp, Chicken  19866894359918_2
gtttagtacattcmgtgtgaggccatacttctgtttgcatgtcatgcttccctgcagctagatttatgcagttctgcagcccttcttgcaatccatcccccactgctgatgagtcctttggctactgatgagctgcatggcactgtggggattggatctgccatacttacagaggaggtcagcaaactagtgggcttctccaactgcagcttaacactgcagacccttcagtcaaggaataccatggccgcagagaaacaagatgttgaggtacacctcccaggcaatcctgggcgcatygccttggagctgcctccagagtagaatggggatctcacagagcaacaaagcaagcttggagattcatggttgtatctggytccaagaaagatcacagaaagaagtaattactttgcaactttgagaaggctgtaactattgaccaggaaccagagattttcttgcctcagttccttctttgctgaatccatcattctggtctgcctacctctctctagtcacatatcacatagcctcatcaggccagagactgactctagtgatctagctgactaagccacattattatccaaagcttac

SEQ ID NO: 75729 - DNA, 600 bp, Chicken  19866894359918_3
ccttcttgcaatccatcccccactgctgatgagtcctttggctactgatgagctgcatggcactgtggggattggatctgccatacttacagaggaggtcagcaaactagtgggcttctccaactgcagcttaacactgcagacccttcagtcaaggaataccatggccgcagagaaacaagatgttgaggtacacctcccaggcaatcctgggcgcatygccttggagctgcctccagagtagaatggggatctcacagagcaacaaagcaagcttggagattcatggttgtatctggytccaagaaagatcacagaaagaagtaattactttgcaactttgagaaggctgtaactattgaccaggaaccagagattttcttgcctcagttccttctttgctgaatccatcattctggtctgcctacctctctctagtcacatatcacatagcctcatcaggccagagactgactctagtgatctagctgactaagccacattattatccaaagcttactctcacatcaaatcagccactcatttctgtyctctcccagaccacactacagagatgaagtccccacagaatcatagaat

SEQ ID NO: 75730 - DNA, 600 bp, Chicken  19866894359918_4
atctcacagagcaacaaagcaagcttggagattcatggttgtatctggytccaagaaagatcacagaaagaagtaattactttgcaactttgagaaggctgtaactattgaccaggaaccagagattttcttgcctcagttccttctttgctgaatccatcattctggtctgcctacctctctctagtcacatatcacatagcctcatcaggccagagactgactctagtgatctagctgactaagccacattattatccaaagcttactctcacatcaaatcagccactcatttctgtyctctcccagaccacactacagagatgaagtccccacagaatcatagaatcagcaaggttggaaaatacctccaagatcatccagtctaaccattcacctaccaccaatatttccctactaaaccatgccccttagtacaatacgtaaacacttcttgaacacctccaggacggtgatccaccatctctctggacagcctgttccagtgctgactactcttttggagaagaaatgtttcctaatattcaacttgaacctctcctggcacaacctgaggccattccctctagttctattgct

SEQ ID NO: 75731 - DNA, 600 bp, Chicken  19866894359926_1
tctctgcaaagtgattagagctactgatggtaaaaaataaaataaaaaaaaaaaattgtcccacttgcatcttctacaccttatctttgaggctgtaaatacagctgaaaaaccttttcagtgtagaatttcaccttaagaaacatagtaaacataattgtggaagctagaaagataaacagatacaagttccagcactttgtttagctaatctacatttggttagtttacatgtgtgtttgtgcttcagcatgttaccagcgtcaaataacactgttccaattactctttcacttactyggtccattcttctggagtgagcaagcacccttcactagcttcagtggaatctgtgttagacgcagtattgatggagtggaaaatgaagataatttatctttattagcaaccccactagacatatactgcagtaacaggttacatgaatacacttttaacaaagaacggagtcagagtagaatttcagattattaatgaataaaacaaatgtttcgatgatgtaattagagggttaattgggataactacttatagtttgcagcaatgcagttatgattttgccactttagcttagcaaca

SEQ ID NO: 75732 - DNA, 600 bp, Chicken  19866894359930_1
gtcctacttgtagagcaaggctacactgtacttctgagtgctaatgagctcagagcaaaaagacatcgtgttcttcaaaatgcttgaattttgtgtttaaagcataaaggcaacccaatatcttgctcagataggggaaggaatgagagtttcttttagtgtagtggctggtgaactctgtggatcaattacttgggtttagttgttttgcagacaatattttgagaagtgatctgtagaaagttacagagaattatttctgagagaaggaaaaaagaaaaaaagaaaatttccagtgtrcgatacaagggcctattaattgatttttgacttgttcagttaactgtagcttacaatactkctaacgtgctggtcttcactgattgttttgtgtcttccaggcaacaggttcaggagaaaacatggacaaatattgatagcctgtgcttggacctatgcagcaatatttgcctgttcaccccttgctcactggggagaatatggagaggagccctatggcacagcttgctgcattgactggcaatccaccaaygtagacgtcatgtccatgtcttacactgtcgttctctttgttctctg

SEQ ID NO: 75733 - DNA, 600 bp, Chicken  19866894359930_2
gacatcgtgttcttcaaaatgcttgaattttgtgtttaaagcataaaggcaacccaatatcttgctcagataggggaaggaatgagagtttcttttagtgtagtggctggtgaactctgtggatcaattacttgggtttagttgttttgcagacaatattttgagaagtgatctgtagaaagttacagagaattatttctgagagaaggaaaaaagaaaaaaagaaaatttccagtgtrcgatacaagggcctattaattgatttttgacttgttcagttaactgtagcttacaatactkctaacgtgctggtcttcactgattgttttgtgtcttccaggcaacaggttcaggagaaaacatggacaaatattgatagcctgtgcttggacctatgcagcaatatttgcctgttcaccccttgctcactggggagaatatggagaggagccctatggcacagcttgctgcattgactggcaatccaccaaygtagacgtcatgtccatgtcttacactgtcgttctctttgttctctgttttattctcccctgtggagtaattgtcacttcctactcacttattctggtaactgtgaaa

SEQ ID NO: 75734 - DNA, 600 bp, Chicken  19866894359930_3
ttatttctgagagaaggaaaaaagaaaaaaagaaaatttccagtgtrcgatacaagggcctattaattgatttttgacttgttcagttaactgtagcttacaatactkctaacgtgctggtcttcactgattgttttgtgtcttccaggcaacaggttcaggagaaaacatggacaaatattgatagcctgtgcttggacctatgcagcaatatttgcctgttcaccccttgctcactggggagaatatggagaggagccctatggcacagcttgctgcattgactggcaatccaccaaygtagacgtcatgtccatgtcttacactgtcgttctctttgttctctgttttattctcccctgtggagtaattgtcacttcctactcacttattctggtaactgtgaaagaatccaggaaagctgtggagcagcatgtctctggtcccaccaggataaacaacgtgcaaaccattactgccaaggtatctacaaattagtctttgagaaagtgcttttgctgcaattgggcagtaccattcaagaaacaaaaaatttcagagaagacaataaagaagggaaaatcagtccttgccatattt

SEQ ID NO: 75735 - DNA, 600 bp, Chicken  19866894359939_1
cacctcccagcagccaggctcagccgcccacctctcctcctggagacagttagtctaaacagcagggctggtgtttatcctcagggccgcgactccatcaattcacccagtttacattggggagtggcagtaaaatgtgatgcttggaagaattctggctgcatgcactgccacgtaggaagccaagaaatgccttgtgatccctcacggggtgggtagtggagaccaccccagtgtgagggtcggggcctgggggtgggtgatgtgctctggctgccgagttctcaatgcagtcagctkctgggatgggggggacgcatctaccagggctggaggctgcagggaggtggtggcagcagaaaggactccctggaagggaatgggagaatgaaagggtgctgaaagaaaagggtgaggatgatgagactggaggggaggcctgacatcgaagcccttctcaytgtgtccttgtgtggagtggtgtgaaggtgaaacctcctgctgctgaaatgctaattgcaggtagcagtgctgcagcactgattggaacatcccagtgatgcttgctggggactgatgtcacacctgcagccgtaatgg

SEQ ID NO: 75736 - DNA, 600 bp, Chicken  19866894359939_2
catgcactgccacgtaggaagccaagaaatgccttgtgatccctcacggggtgggtagtggagaccaccccagtgtgagggtcggggcctgggggtgggtgatgtgctctggctgccgagttctcaatgcagtcagctkctgggatgggggggacgcatctaccagggctggaggctgcagggaggtggtggcagcagaaaggactccctggaagggaatgggagaatgaaagggtgctgaaagaaaagggtgaggatgatgagactggaggggaggcctgacatcgaagcccttctcaytgtgtccttgtgtggagtggtgtgaaggtgaaacctcctgctgctgaaatgctaattgcaggtagcagtgctgcagcactgattggaacatcccagtgatgcttgctggggactgatgtcacacctgcagccgtaatggtgaaaagtgaagctggcagctggcccagaggctccagcaggtgggaatcccttyrtgtggacagaccaaaacaggtttttagagacgattcatgaagtactaagagttcagatcagtttttctccagccatccctctgctgatagagctctgtagctgctc

SEQ ID NO: 75737 - DNA, 430 bp, Chicken  19866894359939_3
agcagaaaggactccctggaagggaatgggagaatgaaagggtgctgaaagaaaagggtgaggatgatgagactggaggggaggcctgacatcgaagcccttctcaytgtgtccttgtgtggagtggtgtgaaggtgaaacctcctgctgctgaaatgctaattgcaggtagcagtgctgcagcactgattggaacatcccagtgatgcttgctggggactgatgtcacacctgcagccgtaatggtgaaaagtgaagctggcagctggcccagaggctccagcaggtgggaatcccttyrtgtggacagaccaaaacaggtttttagagacgattcatgaagtactaagagttcagatcagtttttctccagccatccctctgctgatagagctctgtagctgctctgtgtcctgctatttccttgggg

SEQ ID NO: 75738 - DNA, 429 bp, Chicken  19866894359939_4
gcagaaaggactccctggaagggaatgggagaatgaaagggtgctgaaagaaaagggtgaggatgatgagactggaggggaggcctgacatcgaagcccttctcaytgtgtccttgtgtggagtggtgtgaaggtgaaacctcctgctgctgaaatgctaattgcaggtagcagtgctgcagcactgattggaacatcccagtgatgcttgctggggactgatgtcacacctgcagccgtaatggtgaaaagtgaagctggcagctggcccagaggctccagcaggtgggaatcccttyrtgtggacagaccaaaacaggtttttagagacgattcatgaagtactaagagttcagatcagtttttctccagccatccctctgctgatagagctctgtagctgctctgtgtcctgctatttccttgggg

SEQ ID NO: 75739 - DNA, 600 bp, Chicken  19866894359942_1
tccaggtcatcaataaagatattaaacaggacaggccccagcaccaaccccctggggaacaccactcgtgaccggtcgccagctggatttaactccactgaccaccactctctgggcccggtcctatagccagttccttacccagccaagagtatatctgaccaagccacttactgccagcttctgcacaagaataccatgggaaacagtgtcaaaggctttgctgaagtctaggtagactacatcaacagcctttccctcatccaccagacaggtcactagatcacagaaggagatcargttggtcaagcaggacctgcccttcatgaacccacgctggctaggcctgatcccccagttgtcctgcacatgcygcatgatctccctcaagacaatctgctccataatcttccccggcaccgaggtcaggctaacaagcctgtagttccccggatcctccctgcagcccttcttgtagatgggagtaacattggcaagcctccagtcttctgggacctcacccgtcaacaaggagtgctgatagatgatggaaagcggctcagctatcacctctgccagttccctcagcaccctcgggtg

SEQ ID NO: 75740 - DNA, 600 bp, Chicken  19866894359942_2
gtcgccagctggatttaactccactgaccaccactctctgggcccggtcctatagccagttccttacccagccaagagtatatctgaccaagccacttactgccagcttctgcacaagaataccatgggaaacagtgtcaaaggctttgctgaagtctaggtagactacatcaacagcctttccctcatccaccagacaggtcactagatcacagaaggagatcargttggtcaagcaggacctgcccttcatgaacccacgctggctaggcctgatcccccagttgtcctgcacatgcygcatgatctccctcaagacaatctgctccataatcttccccggcaccgaggtcaggctaacaagcctgtagttccccggatcctccctgcagcccttcttgtagatgggagtaacattggcaagcctccagtcttctgggacctcacccgtcaacaaggagtgctgatagatgatggaaagcggctcagctatcacctctgccagttccctcagcaccctcgggtgaatctcatccggtcccatggacttgtggcagtccagttggagtagcaggtctctgtttccgcctgaattgtggg

SEQ ID NO: 75741 - DNA, 600 bp, Chicken  19866894359961_1
acgggggctgccgtgccgctgccctttggtccgcagaggaagtttgtttgcggaagtcctgtcaggcccctcttgctcaatgaggcagctttgccaatagagggaagagtggctgcaaaacccacaaatgaatccgccttgagtgccctcagtgtgcttcagtgatcagaggaagagaccgttgccctggtgctttccttataggacaaatgggagtgaaatgacacatggcctaaaccgtatcagtcctcgggaacctcgtttgctacctttttgtgtttttcagggctctctctcccrcccagccaccttgactcygtgctcctgtccccgctgatggcagtccacccgcagtcatgagctggggggcttgctcccctgtcgaaaggaaaggggatgcagtcgtttccgagaggaaatgagagctcagactgggaacggagccacagcacatggcgagagctcccgaagggcacccagggggccccttcctccctcctcaggccaccgtgctctggctctgccagaaaacagccgcttcctccctgcatggaagaagagccaggacggtggggatcctgccccaggaaatgggtgttc

SEQ ID NO: 75742 - DNA, 600 bp, Chicken  19866894359961_2
ctgccctttggtccgcagaggaagtttgtttgcggaagtcctgtcaggcccctcttgctcaatgaggcagctttgccaatagagggaagagtggctgcaaaacccacaaatgaatccgccttgagtgccctcagtgtgcttcagtgatcagaggaagagaccgttgccctggtgctttccttataggacaaatgggagtgaaatgacacatggcctaaaccgtatcagtcctcgggaacctcgtttgctacctttttgtgtttttcagggctctctctcccrcccagccaccttgactcygtgctcctgtccccgctgatggcagtccacccgcagtcatgagctggggggcttgctcccctgtcgaaaggaaaggggatgcagtcgtttccgagaggaaatgagagctcagactgggaacggagccacagcacatggcgagagctcccgaagggcacccagggggccccttcctccctcctcaggccaccgtgctctggctctgccagaaaacagccgcttcctccctgcatggaagaagagccaggacggtggggatcctgccccaggaaatgggtgttcccctgtgataggggcaga

SEQ ID NO: 75743 - DNA, 599 bp, Chicken  19866894359965_1
  misc_feature (1)..(79): n is any nucleotide
nnnnnnnnnnnnnnnnnnnnnnnnnnnnnnnnnnnnnnnnnnnnnnnnnnnnnnnnnnnnnnnnnnnnnnnnnnnnnnntagcattaaagaactgaaactcaacatttgatagcactgttccttattctcagttttccataaagccaacagacctcaaaggataccatcttggctttctttcagcagtcaggtaggcaacttgaagattttggaccagctggtaaaaatcttctcattacagccacccctcaggcttctcaggccacaggcatttatctaataacctcactcagcctcarcacatagatctgaagtaggaactaattcaggaaaaaattcagagaagtcaggaaaggagggcaagtataacaaagatcaaatcggattatcttgatgcctattgcaagctggaagtagatcgtacaattaacaaatgtacagttagaagagtggtgtggttagggtgatactgtactggttgatggttagaaagtttatcctggtggaaagagacaatcaaaaataaatgaaatactcacttgtgtcctaagcttacagtagaaaacttcaaaggaaggaatcacgagaaaaagatccc

SEQ ID NO: 75744 - DNA, 600 bp, Chicken  19866894359966_1
caaaacctcagagggagggcagagcagaatctgtatgagaggtgggcagctccaaaggctgaattaagcacctggcagagcttcagagagctcctgctctcacctccagtcaatcccgcaaccttcgcgcgacccctatgaaattacctccattaaagagccgctctgagtgctccatttgcattcctcaagaaacgtcgggagaagaataagtcgcacgttaagcacggggtgatacgagcgcgtcgtcattaagggggacaacttcattagcaagtgcgagcaatagcagcatcacckctcctgccatcgcagtgctacgcagagcccacaggagcgttcctgcagcactgccccccccggtgcccttaaacctgctccaaactggcctgagagcttcctttaagttcaargaaagtacggtttaattaaagctaatgtagtgagaacaaactaataggcagcagaagggtacgttaaagccctacagcgatttatggcgctttgcgtgttgtaaggaatgtgttctaagggggaaaagggcgcacggctgtgacctgcwctccccccctggaatggggcacctatggaccttccccc

SEQ ID NO: 75745 - DNA, 600 bp, Chicken  19866894359966_2
tcccgcaaccttcgcgcgacccctatgaaattacctccattaaagagccgctctgagtgctccatttgcattcctcaagaaacgtcgggagaagaataagtcgcacgttaagcacggggtgatacgagcgcgtcgtcattaagggggacaacttcattagcaagtgcgagcaatagcagcatcacckctcctgccatcgcagtgctacgcagagcccacaggagcgttcctgcagcactgccccccccggtgcccttaaacctgctccaaactggcctgagagcttcctttaagttcaargaaagtacggtttaattaaagctaatgtagtgagaacaaactaataggcagcagaagggtacgttaaagccctacagcgatttatggcgctttgcgtgttgtaaggaatgtgttctaagggggaaaagggcgcacggctgtgacctgcwctccccccctggaatggggcacctatggaccttccccctctgcagcagccgcagataaagcaccaaaatcattgatagtccttaagaaacgttatcgtatgaaaacgtcatgaaaaattttcacctaatcgactttaataacccaacaggg

SEQ ID NO: 75746 - DNA, 600 bp, Chicken  19866894359966_3
aacttcattagcaagtgcgagcaatagcagcatcacckctcctgccatcgcagtgctacgcagagcccacaggagcgttcctgcagcactgccccccccggtgcccttaaacctgctccaaactggcctgagagcttcctttaagttcaargaaagtacggtttaattaaagctaatgtagtgagaacaaactaataggcagcagaagggtacgttaaagccctacagcgatttatggcgctttgcgtgttgtaaggaatgtgttctaagggggaaaagggcgcacggctgtgacctgcwctccccccctggaatggggcacctatggaccttccccctctgcagcagccgcagataaagcaccaaaatcattgatagtccttaagaaacgttatcgtatgaaaacgtcatgaaaaattttcacctaatcgactttaataacccaacagggggacctctgtgcattggagacagcccaataatttcttaaaatacgagctgtcgttttccatcagtcctaaggaggcaaaggaactcggcacatggcttcatcgtggctcccagttcatcaccctaacgccctacaaccagcagtgccac

SEQ ID NO: 75747 - DNA, 599 bp, Chicken  19866894359971_1
  misc_feature (1)..(110): n is any nucleotide
nnnnnnnnnnnnnnnnnnnnnnnnnnnnnnnnnnnnnnnnnnnnnnnnnnnnnnnnnnnnnnnnnnnnnnnnnnnnnnnnnnnnnnnnnnnnnnnnnnnnnnnnnnnnnnttccggtgcagttcactagtcacaagttaagactgagtgtggctccatttgaatttgtcctgatttagctaatgctcagtgggattgtcttaatgatgggaaagtacatctcttgggagctgtgagcaaaggactgccttgttggaaaatggcaattctggcttggggagctctgaatggagtagatggkgtatttcaacatcatcttgtgagaggaaatggtgcagttctgtttgtgtcccctgtgtcctgcaacaactctgcctgttttgctgggttcagtgtgtcagtgtacgtgcagaacaggaagggaaaactaaaaagaagtgtattgtgccccagaggggaaggatggcttaggctgaaccgctgcctccttctcccatgggtataatgtgtggtagtgactgatctcctgcattattcatcacctctggctgctgctgtggtgtgggtgtttatcacgtgagtagtgatgctatggattgc

SEQ ID NO: 75748 - DNA, 600 bp, Chicken  19866894359979_1
ttctgtcaccaccatgctttacaaaagtgggaagggtgggatgctttggcaaagctgtaagtacccaaaaagaacaacccaggatctgtatagcaaagaccgtcttaaacagcgcctatgtttcacacgcactgttgagtcctttaaatgtcagaagaaacacacagttttattaaaagaaaaacatgccatgcaccactaattgagtaaatcaataaacagagaaagccacaaaggaaatgaaatgtttttgacgcatacaaacagttgttttcaatgtgcattactctgccctttacrctttaattaaggcagcctyagaacaacagggtgaaatattttttcccctgcaccctctgcaccactctgctcttaactccctgctgtctgaccattaatagcagtcaaaagcccatggacacaaactgagtccctgccatytctcagaagggattcaagtactgtatgggtcctcactatgctctggagacagcctcaagtattcctggagtgcacaatgcactgtcgccataacagaagcttgttattcactgtatctcacagagtccaattgaagcctttatttttcatttacaaatt

SEQ ID NO: 75749 - DNA, 600 bp, Chicken  19866894359979_2
tacaaaagtgggaagggtgggatgctttggcaaagctgtaagtacccaaaaagaacaacccaggatctgtatagcaaagaccgtcttaaacagcgcctatgtttcacacgcactgttgagtcctttaaatgtcagaagaaacacacagttttattaaaagaaaaacatgccatgcaccactaattgagtaaatcaataaacagagaaagccacaaaggaaatgaaatgtttttgacgcatacaaacagttgttttcaatgtgcattactctgccctttacrctttaattaaggcagcctyagaacaacagggtgaaatattttttcccctgcaccctctgcaccactctgctcttaactccctgctgtctgaccattaatagcagtcaaaagcccatggacacaaactgagtccctgccatytctcagaagggattcaagtactgtatgggtcctcactatgctctggagacagcctcaagtattcctggagtgcacaatgcactgtcgccataacagaagcttgttattcactgtatctcacagagtccaattgaagcctttatttttcatttacaaatttctgtattttcttagagat

SEQ ID NO: 75750 - DNA, 600 bp, Chicken  19866894359979_3
ctttaaatgtcagaagaaacacacagttttattaaaagaaaaacatgccatgcaccactaattgagtaaatcaataaacagagaaagccacaaaggaaatgaaatgtttttgacgcatacaaacagttgttttcaatgtgcattactctgccctttacrctttaattaaggcagcctyagaacaacagggtgaaatattttttcccctgcaccctctgcaccactctgctcttaactccctgctgtctgaccattaatagcagtcaaaagcccatggacacaaactgagtccctgccatytctcagaagggattcaagtactgtatgggtcctcactatgctctggagacagcctcaagtattcctggagtgcacaatgcactgtcgccataacagaagcttgttattcactgtatctcacagagtccaattgaagcctttatttttcatttacaaatttctgtattttcttagagattttaaaatgtctttgtccccaaaaaggccttccaagattattctaacatgtctttttcagccaaatgacttacacatgcagcaatttatgcagacatctctctccagaacctttgtctgggc

SEQ ID NO: 75751 - DNA, 600 bp, Chicken  19866894359980_1
ctgaaaaatgcctttaatttggaaacaaattaaatttggcaaagaattactacataaaacagcccaattgcacttctgtaatttgaaaaaaattaaaaacagataagatactgtgaagtaaaaataacttctgcacattaaattctcatgaactttcattaagatttgtattacttgtcccaaatgtacaattcaatgttgtaatacactagatcgctttatttataaaatacctttaaagctactgtaagttagagccagaaaagtgacaatataaaaatattatcttctcacattacmgcttcatttccaatgtatttaaagaagaaacgcagtctccatttcaatatttcaaatgcagaactgaactttctaaaagttcagtgccagttgaatccatgtataattcaggcatatctgtttattttactgataaaacctggtgtcaaagctgagacagcactttatgagatatagctggattctcctctaattcgtgaattagaacaaggctaactacagactaaccactgtcctatggttgcagttcttctttatgcatgatgaatgaatgaatcagaagggacttattctgatgtt

SEQ ID NO: 75752 - DNA, 600 bp, Chicken  19866894359982_1
gttgtctcctgttgtgtgtgtatggggtctgacagtggaggctgtgggaagccgggcctcactcccttcagccacacgttgaaggtcttctctgaagcaggacaggctgcagaagaggacatcttgacatggctgcatgggaaccctttccagcaggagcctggggattaggattataggccctgtgtaggaacagaggctctgcaaatcttactggagccgggctgaaggcattatccacggctgttcccttgcaggctaacacctcttgctggcagcggtggctgccgcacgctgggytctgtctctctcccttaatcctgttaactgtggaaccttctctcgggcaccgctctggygcacatgaggatctgccacatacatcctcccgtgtcgtgctgctcaggaagcaagcagactttggcaacgctcaggctccccattgccattctcccagcttctgtacccattgcccttctgtgccctggggagagctccaggctttgtttctttggtatggcccggctccccactggctcatcatcctcatcagctctccctttgttttcttttctgctcgtttttccccctctcaacgca

SEQ ID NO: 75753 - DNA, 600 bp, Chicken  19866894359982_2
cactcccttcagccacacgttgaaggtcttctctgaagcaggacaggctgcagaagaggacatcttgacatggctgcatgggaaccctttccagcaggagcctggggattaggattataggccctgtgtaggaacagaggctctgcaaatcttactggagccgggctgaaggcattatccacggctgttcccttgcaggctaacacctcttgctggcagcggtggctgccgcacgctgggytctgtctctctcccttaatcctgttaactgtggaaccttctctcgggcaccgctctggygcacatgaggatctgccacatacatcctcccgtgtcgtgctgctcaggaagcaagcagactttggcaacgctcaggctccccattgccattctcccagcttctgtacccattgcccttctgtgccctggggagagctccaggctttgtttctttggtatggcccggctccccactggctcatcatcctcatcagctctccctttgttttcttttctgctcgtttttccccctctcaacgcagttgaaaatgcagctggagcagaatgaggcactgatggagaaggagcaagagctgaggc

SEQ ID NO: 75754 - DNA, 600 bp, Chicken  19866894359985_1
cacaatgaagatttctttaatgagctactacagcgatagtctgtttatatgtttcctgattatactgtagtaattgccaaaaattgaagagatcacctcaaggcaaaaaataactattaattctaaggataacatcattaaaatgtccttgaaaatcagtagtgaagacactaaagataacagccatgatgatgttgactatcagtacaaatttctattcaaggttaagtaacactggttagatacatccactgtttcttttaaaacatgttcttactttttaaagtatcttaaaaaatsttaaaataggaccagtggcataatttcacttcatatttcattagaggtacaatataatattgctagcttttgtttctctcaagtcatggaaaaggtctgacgaatggcagtcctaaaaacagaattaaaataaaaatgattgctagtggcttttgttgtgtgattatgacagaaagtactactttctaaacacagcaaataacaacaatgaaataattgcattttagttgaatcagtgaaccaatcagttagatggtgtccacttttaaaactgatcataaacctttccagggaattacg

SEQ ID NO: 75755 - DNA, 599 bp, Chicken  19866894359987_1
  misc_feature (1)..(26): n is any nucleotide
nnnnnnnnnnnnnnnnnnnnnnnnnnatgccttccagttcatgcatttgagtacttttattggcatggacccggtggctcagaccaaagtgtttcctcattgcattcccacaggtgagctggacatggccagtgagcagccagcatgtggaaaccacagcccagcaggtgtgagaggtactgcacagccctatggggaagagcagggctgggacacagaggggacatgctcagcctccatccatctgtgtgcagatggttttcttctgctctgctcttttctgagcagcaaattggcagwgagcaggggctgagcacactgctgggctgccctgtgaggccccggggacatctgatgagatgcattgttttttccaagtttttctcacttctgtgttttttcttcccctttgtatttgtatctagtgactgctatcactgactttggaagaactcctgttctamactcagtatgcagaagcaaaccccaacagcacacasaggcaacattcctgtgtgacacccccatcatcaagcccagatgctctggtggagcgcagatgtcccacagaggtccaatctaatgcgctgaagtgacag

SEQ ID NO: 75756 - DNA, 600 bp, Chicken  19866894359987_2
caggtgtgagaggtactgcacagccctatggggaagagcagggctgggacacagaggggacatgctcagcctccatccatctgtgtgcagatggttttcttctgctctgctcttttctgagcagcaaattggcagwgagcaggggctgagcacactgctgggctgccctgtgaggccccggggacatctgatgagatgcattgttttttccaagtttttctcacttctgtgttttttcttcccctttgtatttgtatctagtgactgctatcactgactttggaagaactcctgttctamactcagtatgcagaagcaaaccccaacagcacacasaggcaacattcctgtgtgacacccccatcatcaagcccagatgctctggtggagcgcagatgtcccacagaggtccaatctaatgcgctgaagtgacagagaatctgctgcatcctcaggtaaattgttccagtggttagttaattgccttaactgctctgcaccgagaacaattttatgtctctgtagaaatgcctttggtttccagccactggatctcaatatgcctttgcgtcagattaaagagcctcatcctattactcc

SEQ ID NO: 75757 - DNA, 600 bp, Chicken  19866894359987_3
agcagggctgggacacagaggggacatgctcagcctccatccatctgtgtgcagatggttttcttctgctctgctcttttctgagcagcaaattggcagwgagcaggggctgagcacactgctgggctgccctgtgaggccccggggacatctgatgagatgcattgttttttccaagtttttctcacttctgtgttttttcttcccctttgtatttgtatctagtgactgctatcactgactttggaagaactcctgttctamactcagtatgcagaagcaaaccccaacagcacacasaggcaacattcctgtgtgacacccccatcatcaagcccagatgctctggtggagcgcagatgtcccacagaggtccaatctaatgcgctgaagtgacagagaatctgctgcatcctcaggtaaattgttccagtggttagttaattgccttaactgctctgcaccgagaacaattttatgtctctgtagaaatgcctttggtttccagccactggatctcaatatgcctttgcgtcagattaaagagcctcatcctattactcctrtctctggttgggcacttgttgaccactctcaagt

SEQ ID NO: 75758 - DNA, 600 bp, Chicken  19866894359987_4
tcagtatgcagaagcaaaccccaacagcacacasaggcaacattcctgtgtgacacccccatcatcaagcccagatgctctggtggagcgcagatgtcccacagaggtccaatctaatgcgctgaagtgacagagaatctgctgcatcctcaggtaaattgttccagtggttagttaattgccttaactgctctgcaccgagaacaattttatgtctctgtagaaatgcctttggtttccagccactggatctcaatatgcctttgcgtcagattaaagagcctcatcctattactcctrtctctggttgggcacttgttgaccactctcaagtcacctcttcaccttcccggggacagactaaatggactgaatgcctctggctccctactatttatcagtctactcccattctccttgcttctgctggctgaaacatctccagtctcctctcagtttcctctccagctgatgcaacagggctgatgtggttgttaatgtcttgtattgtacttaaagagctgctggctggttgctgagccttggcccactgtgcatcccaaggccaagcttgtcctrgggttgtatggagctcttggt

SEQ ID NO: 75759 - DNA, 600 bp, Chicken  19866894359987_5
agcctcatcctattactcctrtctctggttgggcacttgttgaccactctcaagtcacctcttcaccttcccggggacagactaaatggactgaatgcctctggctccctactatttatcagtctactcccattctccttgcttctgctggctgaaacatctccagtctcctctcagtttcctctccagctgatgcaacagggctgatgtggttgttaatgtcttgtattgtacttaaagagctgctggctggttgctgagccttggcccactgtgcatcccaaggccaagcttgtcctrgggttgtatggagctcttggtcctgctttgatgtctccgtgagagtgagatggggagtttggagagggatgccttgagctcaggatcagcctgctatgacccagaggcctatgtgcctctggttggacacctgtcttgtcaatggaaaaggaaagttctgagacaggtagctgtgctgggcagggggaaagggacaagggagtgggctgctgtttgaactctgctcatgcaatgcagttcacctgactccaagtgagcataattgtagagacaaagtaggagcagcttgaaaatcatggg

SEQ ID NO: 75760 - DNA, 600 bp, Chicken  19866894359990_1
gttgacaaaggctggtgaaggcttatccagtggtccttctgggtaggcctgtttctgtactgtgttggttactgtcccagtacacaagctcagtgaggtccttcacatagaagctcctgatgagttcctgatgtattttgtgcctaaatggactgttaattctgtgcctgttgcacattccttataaacctttaacatacccctagggcagagcaaaattctcttttttgctcttaaagatgcttaaacttgttaagccctctacatatgctgcatctcagttagtgcctcgtgatctcmcttctgggcttggaggaactcaaggcagtggggtgcatctgcaatttgagaaaaagccctgggattcattggtgaggttggatgtagaaagcttcatccatggtagatatgttgcagcatccatagcaattttcaaaccattcacctgatgaccttttgatcagtacggtcttgtttggatgggctacctactgaatctaacctggaagagatatatgtgggtcagcaaatagctattattcgttcatctcatgttacaaagtcagagatttttaagtgaaagatattatttccatctat

SEQ ID NO: 75761 - DNA, 600 bp, Chicken  19866894359998_1
gtacttttggcagtcaactaaatgtgcttccaatacaaatggatctgtgttttctcaatatttatttctttaatgtgatgcagtcattacttctgacctgtcttttttttttcctaaatatttctggaaattatttctatcagcttccagtcattttttccacatgtctgtaggtgttctgtaaaacatgcttgcagttgcagatccagtagagacgaaggagacttctcccgtccatcttaggaagttgattgtcagctctgacatagaacccattttcacagacaatgaatgacatgkcttgacatagctcacaacatggtttagtaactttctttttaacttacaaagcaaaaaaattcctttctgtatgctgttaggaatctcattccttgtccttgccttgaggcaagtaaaacaatgcattgtagtctccccatccttattactaatccagaatttggcaatctaaatgtggattatattaaatgcagattatttctgttgtataatggaaatagctgggtgtttgtagctgctatttctgtaacaataactttaactagcccttgttaattatagtcttttcccatgtggatt

SEQ ID NO: 75762 - DNA, 600 bp, Chicken  19866894359998_2
gtaaaacaatgcattgtagtctccccatccttattactaatccagaatttggcaatctaaatgtggattatattaaatgcagattatttctgttgtataatggaaatagctgggtgtttgtagctgctatttctgtaacaataactttaactagcccttgttaattatagtcttttcccatgtggattatgagctgaatcattgcagtaactcgcataagactaaataacgtgagcttctgtaggctgtgctactttcttgattattccttttgcattttatgttattctattcccattrcttctctaaaggcattgtattttttggtattagggcagcttgaatgtagggacctgtaaggcactgaatgactgagaaaatgaatagtaggaagagggttgaaccgaactttcagaactgttcaaaatctgccatgatttatttctttttyctgattaggatcagagattaggaaagatagaggatggcccatctctttacaggtgtgcttgagaaggagagcttgtctttgaagcagatgcaagggaatgagagaagagagttaatatcattcaatacattaaattttcttgactttga

SEQ ID NO: 75763 - DNA, 600 bp, Chicken  19866894359998_3
tagcccttgttaattatagtcttttcccatgtggattatgagctgaatcattgcagtaactcgcataagactaaataacgtgagcttctgtaggctgtgctactttcttgattattccttttgcattttatgttattctattcccattrcttctctaaaggcattgtattttttggtattagggcagcttgaatgtagggacctgtaaggcactgaatgactgagaaaatgaatagtaggaagagggttgaaccgaactttcagaactgttcaaaatctgccatgatttatttctttttyctgattaggatcagagattaggaaagatagaggatggcccatctctttacaggtgtgcttgagaaggagagcttgtctttgaagcagatgcaagggaatgagagaagagagttaatatcattcaatacattaaattttcttgactttgactacatacgagggcacagctcctctgatgctacagactgaatactgtttgtccgggatcttgttagcgttaatgtagtaagacagatttctgtaacgttctaagtactgaagttgcagaaattgaagtgtaactattaaattacattctta

SEQ ID NO: 75764 - DNA, 557 bp, Chicken  19866894359999_1
gcagctcagctgaagcacctggctggggtcaaagatatccagctgctgccttcctgctgacaaatgagggatgagtttctgaaaggcatttaagtgcttaactgccccgattcctgcctcttcctctcatctgtgtaaatgacaaggtctgtactactttgatttcggtagcaactgtaatacagtaactgttacatccaactgaagatgagaagtgtgtgcatctcaccaagcagccctgggtttgtttgccctttaatcaaaggcaatgaggtatagtcaccaataaaaacaaatatstgaacagaagtaagagcaaaaaggctaatcatgatttaggagttctctgcccttagacagtgctccccttgggtaggtacgagctgggagagttgctcagctaataaggcaggataaccctaatatttcccagcagaggattctgtttttgttgacacgataaagcattactggatgtgatcacaatgtatatgcaggcacccaacctggcagtgctggaaaagatcattcagaactatgaggactacagaggtttt

SEQ ID NO: 75765 - DNA, 600 bp, Chicken  19866894360003_1
agcagggccataggaagtggctgcctgcatcagtccagggcaagacctgaacaaatgcctcaggatacatcgggacaggctttcatctgattggtcatcactcttagaggactcagttacatctaaataaagtggaaaaaaagcccttcttaagaccaataatttgttatttctgcacaactatattcagttataagttgaaataaatggttatttttaattatcttctaatgttgttcccaaatgggtttttatgaaccttagtataaaccctattatgtttagtgtagaccagcaatraattcaaattaaatgcgtattcaataattcactttataatgtgaccgaaagaatatgatggagttagtcaaactagttcctatgaattgacccaaaactttgtccaggatttataacttctttaaatttgcagtggcatgagtcagatgcaaaatatgaaacaattgagtatttttgaaaaaacatttaatgctacatttttcatttctctgaaacaatcacaactatacatttcctgcaggagacatgatttcccacactgtacagaaattacctctgggacttcattttactccagac

SEQ ID NO: 75766 - DNA, 600 bp, Chicken  19866894360007_1
gaggttgatcccatgcagctcctcgggcagcgtgctcgactggtgggaaggactcaacaggagcagccccggatcttgagcaggatggagcccatcccaccaaatgcactagtgaaacccaatgccaacgatgcccaagtcctcatgtggagacccaagcgaggccagcctatagttgttatacctcccaagtagcacagcactggggcacgcgctggtgtgtgcacatggggaccttggtgctcttggtgtggtgcacgtgagtgggattcctgagccaaagcagacctcttgggttcrcctgcctttgtagctggagttggaaattcctcagttggaaagagagcatgagcttggcctggctgtggagaggggttgccgagctggtggatttcccagaaagtggatttaagtgcttctagggcttgtggcttggaaaaaaggctgtcttatctaaccatttcctgcctccttgcagggaagtgtgaggagcaggagcatgatcaaaccgtgcctgtggcaaatgctgctttccaccccgttagccgtagtagaggagcccatgcctgccagacatggggggttgtgcagtcacccttc

SEQ ID NO: 75767 - DNA, 599 bp, Chicken  19866894360009_1
  misc_feature (1)..(277): n is any nucleotide
nnnnnnnnnnnnnnnnnnnnnnnnnnnnnnnnnnnnnnnnnnnnnnnnnnnnnnnnnnnnnnnnnnnnnnnnnnnnnnnnnnnnnnnnnnnnnnnnnnnnnnnnnnnnnnnnnnnnnnnnnnnnnnnnnnnnnnnnnnnnnnnnnnnnnnnnnnnnnnnnnnnnnnnnnnnnnnnnnnnnnnnnnnnnnnnnnnnnnnnnnnnnnnnnnnnnnnnnnnnnnnnnnnnnnnnnnnnnnnnnnnnnnnnnnnnnnnnnnnnnnnnnnnnnnnnnnnnnnctcccggtgtccctgagtctatwggtgggggctaggagaacaaaatctgtcccactgtaatagaacagcaagttggagaccacctcatcaggctgaatgtgcacaattctatgtggctagatgacatgcatcccagggttccgaaagaactggctgacgtggctgccgagctactcaccgttatatttgaaaagtcacggctgtcaggcaaagtcctgagtgactagaaaaaaaggaaaaaaatacccaaaaaatacccccatatttaagaaagggagaaaagaagacccttttctacaggctggtgggcctcacctccatg

SEQ ID NO: 75768 - DNA, 600 bp, Chicken  19866894360009_2
tggctgccgagctactcaccgttatatttgaaaagtcacggctgtcaggcaaagtcctgagtgactagaaaaaaaggaaaaaaatacccaaaaaatacccccatatttaagaaagggagaaaagaagacccttttctacaggctggtgggcctcacctccatgcctgggaagatcatggaacagatcctcctggaatctatgttaagacacagcaagatgaggaggtgatctgatgtaaccagcatggcttcaccaagggcagatcattcagaaccagtttggtggctttctatgatggmartggtagacagtggattggtagctgatgccatctgcctggacttgtgcaaggcctttgacatggtcccataccacatccttatctctaaattggagaggcatgtatttgaaggctggactacttggtggataaaagttagttgaatgatctcagacagagggcccgtagtcaacagctatatgtccaggtgaatgctggtgatgagtgggaccaagagcactagaaggacatggagctgctggtgcgggtccagatgagggaaacaaagttgatcacagggctggagtacctctctttg

SEQ ID NO: 75769 - DNA, 600 bp, Chicken  19866894360009_3
gctgccgagctactcaccgttatatttgaaaagtcacggctgtcaggcaaagtcctgagtgactagaaaaaaaggaaaaaaatacccaaaaaatacccccatatttaagaaagggagaaaagaagacccttttctacaggctggtgggcctcacctccatgcctgggaagatcatggaacagatcctcctggaatctatgttaagacacagcaagatgaggaggtgatctgatgtaaccagcatggcttcaccaagggcagatcattcagaaccagtttggtggctttctatgatggmartggtagacagtggattggtagctgatgccatctgcctggacttgtgcaaggcctttgacatggtcccataccacatccttatctctaaattggagaggcatgtatttgaaggctggactacttggtggataaaagttagttgaatgatctcagacagagggcccgtagtcaacagctatatgtccaggtgaatgctggtgatgagtgggaccaagagcactagaaggacatggagctgctggtgcgggtccagatgagggaaacaaagttgatcacagggctggagtacctctctttgaa

SEQ ID NO: 75770 - DNA, 600 bp, Chicken  19866894360012_1
gggagctctggttgcaggagggctcctgagttgcagctttgctagctctgctccaggtgcttcagctagagctgtgtttgagctgcaggtgtgagaaatgaggctcagcttcttctgagcaatgggatagagcttttgctttgacctgcagaacacaataactatagataaagagaaaaacttttcaaaccttaatctacagatttgcaaggtgaagtgtttctccctctggaattggtggcagcttacaggacttcagcaacctgtgtggaatagtgtgaaataaatgaacgaataacrgagttggtacagaaatgacatcaagcaaatccattcttatccaaagatctccaatttgggtcagatgaagaacaaggtggggctyttttctttgcctcagagcaaatctagrgttgatgaccacaaataatgagcacaggaaaygaagctttagggactgggttgggtagttgctggctggcaagctgtgcaatggtgaagtgaaacaatctgtgacaagacttgttctgtcctgtgtgctacctgaggggttaaacrtaagagccaggtccagccaattttctctcttgaaaaggtggc

SEQ ID NO: 75771 - DNA, 600 bp, Chicken  19866894360012_2
caggtgtgagaaatgaggctcagcttcttctgagcaatgggatagagcttttgctttgacctgcagaacacaataactatagataaagagaaaaacttttcaaaccttaatctacagatttgcaaggtgaagtgtttctccctctggaattggtggcagcttacaggacttcagcaacctgtgtggaatagtgtgaaataaatgaacgaataacrgagttggtacagaaatgacatcaagcaaatccattcttatccaaagatctccaatttgggtcagatgaagaacaaggtggggctyttttctttgcctcagagcaaatctagrgttgatgaccacaaataatgagcacaggaaaygaagctttagggactgggttgggtagttgctggctggcaagctgtgcaatggtgaagtgaaacaatctgtgacaagacttgttctgtcctgtgtgctacctgaggggttaaacrtaagagccaggtccagccaattttctctcttgaaaaggtggcagccagagggtgatgggctgggaaggcttcccttgtctgaaaattgaagcattctaaatccctgaagctcccatccacccttaaa

SEQ ID NO: 75772 - DNA, 600 bp, Chicken  19866894360012_3
ttctgagcaatgggatagagcttttgctttgacctgcagaacacaataactatagataaagagaaaaacttttcaaaccttaatctacagatttgcaaggtgaagtgtttctccctctggaattggtggcagcttacaggacttcagcaacctgtgtggaatagtgtgaaataaatgaacgaataacrgagttggtacagaaatgacatcaagcaaatccattcttatccaaagatctccaatttgggtcagatgaagaacaaggtggggctyttttctttgcctcagagcaaatctagrgttgatgaccacaaataatgagcacaggaaaygaagctttagggactgggttgggtagttgctggctggcaagctgtgcaatggtgaagtgaaacaatctgtgacaagacttgttctgtcctgtgtgctacctgaggggttaaacrtaagagccaggtccagccaattttctctcttgaaaaggtggcagccagagggtgatgggctgggaaggcttcccttgtctgaaaattgaagcattctaaatccctgaagctcccatccacccttaaaaagacaggaaaagataaagggaagctg

SEQ ID NO: 75773 - DNA, 600 bp, Chicken  19866894360012_4
cctgcagaacacaataactatagataaagagaaaaacttttcaaaccttaatctacagatttgcaaggtgaagtgtttctccctctggaattggtggcagcttacaggacttcagcaacctgtgtggaatagtgtgaaataaatgaacgaataacrgagttggtacagaaatgacatcaagcaaatccattcttatccaaagatctccaatttgggtcagatgaagaacaaggtggggctyttttctttgcctcagagcaaatctagrgttgatgaccacaaataatgagcacaggaaaygaagctttagggactgggttgggtagttgctggctggcaagctgtgcaatggtgaagtgaaacaatctgtgacaagacttgttctgtcctgtgtgctacctgaggggttaaacrtaagagccaggtccagccaattttctctcttgaaaaggtggcagccagagggtgatgggctgggaaggcttcccttgtctgaaaattgaagcattctaaatccctgaagctcccatccacccttaaaaagacaggaaaagataaagggaagctgaagcacaggaggaagcttctagtcagcagact

SEQ ID NO: 75774 - DNA, 600 bp, Chicken  19866894360012_5
gcaacctgtgtggaatagtgtgaaataaatgaacgaataacrgagttggtacagaaatgacatcaagcaaatccattcttatccaaagatctccaatttgggtcagatgaagaacaaggtggggctyttttctttgcctcagagcaaatctagrgttgatgaccacaaataatgagcacaggaaaygaagctttagggactgggttgggtagttgctggctggcaagctgtgcaatggtgaagtgaaacaatctgtgacaagacttgttctgtcctgtgtgctacctgaggggttaaacrtaagagccaggtccagccaattttctctcttgaaaaggtggcagccagagggtgatgggctgggaaggcttcccttgtctgaaaattgaagcattctaaatccctgaagctcccatccacccttaaaaagacaggaaaagataaagggaagctgaagcacaggaggaagcttctagtcagcagactgcagtggtggtgaataggattttcacagctcactaacctcttgagtgtttaataaatcccagagatccattccaaggataaggtggccctggtatctaagcagacagccattgc

SEQ ID NO: 75775 - DNA, 599 bp, Chicken  19866894360018_1
  misc_feature (1)..(6): n is any nucleotide
nnnnnnttgtggctgcaattatctgacgtgaatttaggcccctacaggtgagctacgtgtcaaacataccatcgcaattgatggatagttagctaaatgggtcactggaaccacatgtagatggttatattagcttaagtggtgtcagtcttgaccatattgatttcctctccactatcataggagcttgatatctaacacatacataagtaagttcctcaagctaagatgctgaatcctatcctgtatattctttacttactctctacattttccttggggaacgttattatctcagayccttaaatgcattttttcctgtaataagaaaactcagaggtgggtggaagtgcttagcaaatgaagtgagtgtgatggaaaattcagtcctccccagaccataattcactagtcttgctagggctgcttaacagatttgttgggcaattcgtgtgctttttttttttttttaaaaaaaaggtgccattttaacagcctgtctgcaccttaatagccattggttttggcttgcctcaaactttcagccttctgttaacttctcccaagcaaacaagcagatacctcgcattgactgaaca

SEQ ID NO: 75776 - DNA, 599 bp, Chicken  19866894360019_1
  misc_feature (1)..(200): n is any nucleotide
nnnnnnnnnnnnnnnnnnnnnnnnnnnnnnnnnnnnnnnnnnnnnnnnnnnnnnnnnnnnnnnnnnnnnnnnnnnnnnnnnnnnnnnnnnnnnnnnnnnnnnnnnnnnnnnnnnnnnnnnnnnnnnnnnnnnnnnnnnnnnnnnnnnnnnnnnnnnnnnnnnnnnnnnnnnnnnnnnnnnnnnnnnnnnnnnnnnnnnnntttatattctaaatcccgtttcttctttaactgcaataattaggtattaactccagttggaaatgtaactagcaaacattaatggtattttagacctatragtataaagacagctgcactaagactgctaagcaaacaagaaaaccattttaacaccataaaatagcagtagtacattttaaaggaattattgctattggtaggactctgaggaaataactttttaaggggtaaattcatgatacttcgcatctcagaggctttatttaacagtaaacaccgtgagtagaaaaatatagaaattacgcaattacattgcttgcttttccatttaccttgctcatattaaactaaaacactccatatattcatgtatgtgattaatgcctttatgtatgg

SEQ ID NO: 75777 - DNA, 600 bp, Chicken  19866894360019_2
agaaaaccattttaacaccataaaatagcagtagtacattttaaaggaattattgctattggtaggactctgaggaaataactttttaaggggtaaattcatgatacttcgcatctcagaggctttatttaacagtaaacaccgtgagtagaaaaatatagaaattacgcaattacattgcttgcttttccatttaccttgctcatattaaactaaaacactccatatattcatgtatgtgattaatgcctttatgtatgggttgctttcaacctccctgtctttcagagatgatattayttctctaacaatctaaatattttacatttcagaagttattttatttaaaaaaaattagcaaaaatccttctaatttatttaaaacgttcttattcccactataaggtacacaggtcaatttgtttttcctataattttaggaagcctacttcattttttcaactttttttttttttcaattctgcattcaatacaagttaacctcttttgagtagcatctctgcctcctttgctcttcctccttttaaccacactttatataaaaagagcatattgtataaatgactgcctgctactctc

SEQ ID NO: 75778 - DNA, 600 bp, Chicken  19866894360026_1
tggacatcatctgtcagcttctcctgtcaggtaggagctttaaggattttattttaaggaaaaagtcagctgaattcactggattgcaggagttaaaggcataagcagaggatcagacctcgtatagcttctgatcgagcaaacaaaaaaccaaacaacggaaaggaggtaaacctacactgagaagctgcatgcctgcacatggggcatcggtgcctttggaggcagtgggtaaaggcaggactgcagcactgctgacgttaaacacattacagctaggagacaaagtccgggtgcccmgtcccaaattctcytttaatgtatcagcccagaccttgaaggtggaccttaaaggaggcactgcacagcatgtcgtcccatggctgygtttggcttctggcactcctgcctggtggaaggcagctatgaggggttcgtagggttgtgctgtcttctgttcctcctttggccccccggttgcctgcaggatgggggcaggatcttctttggagaagagtaagagagtccactttctgagtgcggaggcccctggctgttgagagcaaatacgtgggacacaactgtgttcctgtttgttac

SEQ ID NO: 75779 - DNA, 600 bp, Chicken  19866894360026_2
cagcttctcctgtcaggtaggagctttaaggattttattttaaggaaaaagtcagctgaattcactggattgcaggagttaaaggcataagcagaggatcagacctcgtatagcttctgatcgagcaaacaaaaaaccaaacaacggaaaggaggtaaacctacactgagaagctgcatgcctgcacatggggcatcggtgcctttggaggcagtgggtaaaggcaggactgcagcactgctgacgttaaacacattacagctaggagacaaagtccgggtgcccmgtcccaaattctcytttaatgtatcagcccagaccttgaaggtggaccttaaaggaggcactgcacagcatgtcgtcccatggctgygtttggcttctggcactcctgcctggtggaaggcagctatgaggggttcgtagggttgtgctgtcttctgttcctcctttggccccccggttgcctgcaggatgggggcaggatcttctttggagaagagtaagagagtccactttctgagtgcggaggcccctggctgttgagagcaaatacgtgggacacaactgtgttcctgtttgttactgagtgagcaggga

SEQ ID NO: 75780 - DNA, 600 bp, Chicken  19866894360026_3
aggagttaaaggcataagcagaggatcagacctcgtatagcttctgatcgagcaaacaaaaaaccaaacaacggaaaggaggtaaacctacactgagaagctgcatgcctgcacatggggcatcggtgcctttggaggcagtgggtaaaggcaggactgcagcactgctgacgttaaacacattacagctaggagacaaagtccgggtgcccmgtcccaaattctcytttaatgtatcagcccagaccttgaaggtggaccttaaaggaggcactgcacagcatgtcgtcccatggctgygtttggcttctggcactcctgcctggtggaaggcagctatgaggggttcgtagggttgtgctgtcttctgttcctcctttggccccccggttgcctgcaggatgggggcaggatcttctttggagaagagtaagagagtccactttctgagtgcggaggcccctggctgttgagagcaaatacgtgggacacaactgtgttcctgtttgttactgagtgagcagggatcctctgcaacctgtgcgctgccgtccatgaaataactgtactcgggcacaaatgagacctccctggagaacc

SEQ ID NO: 75781 - DNA, 600 bp, Chicken  19866894360038_1
agactcttgcatacatggagttacatgggctctaactgtaacttgtttacatttcaacggggataacttttaaattgaagaagcacttgccacgagcagatatatcagtgcatttccagctgtgaatgtgggcacaatgttcgctacatcatggggttagatacaccccggctctgtttaagctgctcttcgatactgcagtgtagagctgaggggcacagctcccttgataagcaggatgccacagcccttggtggccttgcagcctccctgctgaagtgctgctggtcccagtgctgrgtggtactggcacagaatgcaggaggtatagccccygcttcagcatcagcacacccagcaagcagaggaccagatcctcagctagtgtaaatctacagagcaccattaaaacctgtggagaggccctgatttacagcagccgaacatctgggcccaagttctttttcttttggttaccagcagaattaaatagaagtacgtacaattatttattgtaggtgccgtggcagcatctcaaagctcgactgtaaatcaggacaccagtgtgaaagggaccgtgtgaacacataacaaaaagat

SEQ ID NO: 75782 - DNA, 600 bp, Chicken  19866894360038_2
tgtaacttgtttacatttcaacggggataacttttaaattgaagaagcacttgccacgagcagatatatcagtgcatttccagctgtgaatgtgggcacaatgttcgctacatcatggggttagatacaccccggctctgtttaagctgctcttcgatactgcagtgtagagctgaggggcacagctcccttgataagcaggatgccacagcccttggtggccttgcagcctccctgctgaagtgctgctggtcccagtgctgrgtggtactggcacagaatgcaggaggtatagccccygcttcagcatcagcacacccagcaagcagaggaccagatcctcagctagtgtaaatctacagagcaccattaaaacctgtggagaggccctgatttacagcagccgaacatctgggcccaagttctttttcttttggttaccagcagaattaaatagaagtacgtacaattatttattgtaggtgccgtggcagcatctcaaagctcgactgtaaatcaggacaccagtgtgaaagggaccgtgtgaacacataacaaaaagatagtccctgcctaaaggatcttacagcctaattaata

SEQ ID NO: 75783 - DNA, 599 bp, Chicken  19866894360041_1
  misc_feature (1)..(100): n is any nucleotide
nnnnnnnnnnnnnnnnnnnnnnnnnnnnnnnnnnnnnnnnnnnnnnnnnnnnnnnnnnnnnnnnnnnnnnnnnnnnnnnnnnnnnnnnnnnnnnnnnnnnccttctagtacctaaagggagcctacaaacaggaggggagtcaactctttacaagggtagataatagcaggtcaaggagaaatggttttaagttgagggagggaagatttaggttggatattagtgaaaagttctttaccaagacagtggtgaggtactagaacagctgcctaaagaggttgtggatgctccgtccctgraggtgttcaaggccaggttggatggggccctgggcagcctggtctggtactaaatgtggaggctggtggccctgcctggcattggggttggagcttcatgatccttgaggtcccttccaacccaagctgttctatgattctaagccacacagtgacagtacagcaggatgagcctgtgggtgttggggtgctgrggctggctttgcaacagcttgtccttacctgtattgatgtgcagatggtgtgtgcttgccattcccttgttgtagagtcagctaggtgttggttatgcttccgtg

SEQ ID NO: 75784 - DNA, 600 bp, Chicken  19866894360041_2
gagggagggaagatttaggttggatattagtgaaaagttctttaccaagacagtggtgaggtactagaacagctgcctaaagaggttgtggatgctccgtccctgraggtgttcaaggccaggttggatggggccctgggcagcctggtctggtactaaatgtggaggctggtggccctgcctggcattggggttggagcttcatgatccttgaggtcccttccaacccaagctgttctatgattctaagccacacagtgacagtacagcaggatgagcctgtgggtgttggggtgctgrggctggctttgcaacagcttgtccttacctgtattgatgtgcagatggtgtgtgcttgccattcccttgttgtagagtcagctaggtgttggttatgcttccgtgttgttctcctagtgagcctgaattggaggatcttggcagaaagtggctgctcaggagtgtatgatgctgttagacagcaacaaggctgttttgagttggctcaggaatggagggttatgtgtattcatgtgtgcatatatttgtgtgtgtgtgtgtgtgtctatcttaactctactttggttgctaaatccttaa

SEQ ID NO: 75785 - DNA, 600 bp, Chicken  19866894360043_1
agctgtcagttataagttctttctggagactgactgcttcactggaaagaatttgtgcataagcagaggcagctagtgacatagaaaagtcatttggtgctatgtcctttgatgaaacgtccacatagtagttaagaagcagcagaatgtagtcactggagaaaatttgagggaaccgtgtgtcataaatcagctgataacatgcagtctgtgttttttaactcttgtctttgcacccacatactatttaaagaatcttaaaagcaacctgtcactctaagctatcagatcctgtttcaktttgggaggggtaaagggaagagtttgacattcctcaggctcgcacttccatcaaatctaccctctgcttttcttctgggaattgatggttttttattggagaatgtcacagaagagcttatcagaaatttaagctggggccatttctttctcagagctgcaaatgctactaaattacacattgagaaataaaagatttatcgttaaaaacatgtgctacagatttaagtctagatgacctaaaagtctgtagaagaatatgtaactgggaagtaggtttgttttatctgctctgatctt

SEQ ID NO: 75786 - DNA, 600 bp, Chicken  19866894360051_1
atcaagccttagaatttaaaagaaattaaaaaacaaagaaatctatcaactgtgcagacacattgggtccatgaagtatatcatacatagaagtcaccacagaagaaattgcctctatgcaggagtgtcttttacttcagggagaaggatccatctccaccaaaacattaaaaacttccaaaaaacctttcaggcttatttccctgctgcattaagcaaagagagcacatgtgccaaaaccaagacctacatcagcatgggatgcaccatacacagcaaggacaagacacattgcacatycacatcctgaaacaaggatatacacatatcaggagaggaaatatactggtctggcatagcagccctcatctgcctatgcttttggcaatagcatgaataaaaaggacttacttcctacttccattgttaacctattatcattcttttatttttccttttttttttttcttcagaaagtgttaattaaataaagtaaactgataatactaattgagtagggggttagtactatgctcaaagtagatagaactctcccattttctttcatggaggctaataagaatactgatcaataactgc

SEQ ID NO: 75787 - DNA, 600 bp, Chicken  19866894360054_1
agcctccctcctgtctataagctccctttaagtgctggaagactacagtgaggtctacccggagcatcctcttctccaggctgaattatcccagctttctcaacctttcttcacagaagaggcactccagtcctttgatcatcttcatggccctcctctggaccctctctgacagcttcccactcctactgtactgtgagttccacacctggacacagtactccagatagggcctcacaagggtagagtagaaggtagcagtcacttccctcattcctctggccactcctcttttgatgmagctcaggatatggttggcctttcaggctgcaagtgcacactgtcggtttgcaacaagcttttcatccaccagaaaccccagccccctctccgcagtgctgctctcaatgagctattctcccagtctgaacacatatcttgggaatgctccaacccaaaagcaacaccttgcacttgtctttcttgaacctcattcagttcttatggatccatttgctatgcttgtccatgtccctttggatggcatcccttacttctcttgcaccaattgcaacacttagctttgtgtcatctgtaaat

SEQ ID NO: 75788 - DNA, 600 bp, Chicken  19866894360056_1
tgtagttcagactttgatgtcatgattttagggaaaatacttcaactatccctggagaaaatgctagttgacagattcaaagcaagagtaagtttttctaaactgtgcattaccttttatgagataggagtttaatcacactgctaaatcaagcaggttctcctgctcaggcaaacagataaagaatacacactacaactgctctctacttcattgtgtctacccagaaacaatgctgctcaagtcactacagttgtgcaccgtggagataattcctgttcaaaacttgcagagagtttyctctatctttcatctgaaattcttggttattctaactttgtccacaatgctgttcttacctcccctagtctgtctcctgtgcttccaactgggtcacwtgttcccccccccaaaacacagagcagccttaaatgttaacaactttgctgatcatggccaggggttaaattcataaaccatcttatgtgaaacaaaagaaaaagaaagaattgaaacaatgctgggccagtaacatttaactgagtttatatcttcactgcctaaatattactgtttcttaactgtctttatttttccccc

SEQ ID NO: 75789 - DNA, 600 bp, Chicken  19866894360056_2
taaactgtgcattaccttttatgagataggagtttaatcacactgctaaatcaagcaggttctcctgctcaggcaaacagataaagaatacacactacaactgctctctacttcattgtgtctacccagaaacaatgctgctcaagtcactacagttgtgcaccgtggagataattcctgttcaaaacttgcagagagtttyctctatctttcatctgaaattcttggttattctaactttgtccacaatgctgttcttacctcccctagtctgtctcctgtgcttccaactgggtcacwtgttcccccccccaaaacacagagcagccttaaatgttaacaactttgctgatcatggccaggggttaaattcataaaccatcttatgtgaaacaaaagaaaaagaaagaattgaaacaatgctgggccagtaacatttaactgagtttatatcttcactgcctaaatattactgtttcttaactgtctttatttttccccctaaagctctggtgacttgcagagacaatgatawgatgtaagaggcatcctcagaggcatccttcgaacttcattaaccagtcaacttcagcctgaaca

SEQ ID NO: 75790 - DNA, 495 bp, Chicken  19866894360056_3
aactttgtccacaatgctgttcttacctcccctagtctgtctcctgtgcttccaactgggtcacwtgttcccccccccaaaacacagagcagccttaaatgttaacaactttgctgatcatggccaggggttaaattcataaaccatcttatgtgaaacaaaagaaaaagaaagaattgaaacaatgctgggccagtaacatttaactgagtttatatcttcactgcctaaatattactgtttcttaactgtctttatttttccccctaaagctctggtgacttgcagagacaatgatawgatgtaagaggcatcctcagaggcatccttcgaacttcattaaccagtcaacttcagcctgaacagcagagagcaaaaaactccattccagtccagcagtatgtttgcttgaagccttgtatcctatgctaacatagtgaacaatgacttctcaataaggctgtggcaagtgttatacatggcaataaatgttca

SEQ ID NO: 75791 - DNA, 599 bp, Chicken  19866894360059_1
  misc_feature (1)..(189): n is any nucleotide
nnnnnnnnnnnnnnnnnnnnnnnnnnnnnnnnnnnnnnnnnnnnnnnnnnnnnnnnnnnnnnnnnnnnnnnnnnnnnnnnnnnnnnnnnnnnnnnnnnnnnnnnnnnnnnnnnnnnnnnnnnnnnnnnnnnnnnnnnnnnnnnnnnnnnnnnnnnnnnnnnnnnnnnnnnnnnnnnnnnnnnnnnnnnntttaattttcagatattttcttgtggtgaagttcactgttagtttttcttctccatgggtttctccctggctaatagatcttggctttcagttgctgattttttaagtctratgttacacatctcatcggtcccttctttgtgtttctgaaattytgacttgtttaaaattgtttttttttcaatgggctacatctgcatcaatgcaccagtaccttgtcttcatttttcttttcctgaaaaaactatttgctttccctagtaatttcttcagtcattccttcttcccataaactgatgatctgattcgggtatgtgatgactttcactaatcaagatttatagacaggccaactgcaaaagaaaaaaatgccccaatctayaggttcaatatattagtggagcagtgtg

SEQ ID NO: 75792 - DNA, 599 bp, Chicken  19866894360059_2
  misc_feature (1)..(145): n is any nucleotide
nnnnnnnnnnnnnnnnnnnnnnnnnnnnnnnnnnnnnnnnnnnnnnnnnnnnnnnnnnnnnnnnnnnnnnnnnnnnnnnnnnnnnnnnnnnnnnnnnnnnnnnnnnnnnnnnnnnnnnnnnnnnnnnnnnnnnnnnnnnnnnnnntttaattttcagatattttcttgtggtgaagttcactgttagtttttcttctccatgggtttctccctggctaatagatcttggctttcagttgctgattttttaagtctratgttacacatctcatcggtcccttctttgtgtttctgaaattytgacttgtttaaaattgtttttttttcaatgggctacatctgcatcaatgcaccagtaccttgtcttcatttttcttttcctgaaaaaactatttgctttccctagtaatttcttcagtcattccttcttcccataaactgatgatctgattcgggtatgtgatgactttcactaatcaagatttatagacaggccaactgcaaaagaaaaaaatgccccaatctayaggttcaatatattagtggagcagtgtgcaaataaacagctgtgattgtcacagctctttcacattcctgag

SEQ ID NO: 75793 - DNA, 600 bp, Chicken  19866894360059_3
ggctttcagttgctgattttttaagtctratgttacacatctcatcggtcccttctttgtgtttctgaaattytgacttgtttaaaattgtttttttttcaatgggctacatctgcatcaatgcaccagtaccttgtcttcatttttcttttcctgaaaaaactatttgctttccctagtaatttcttcagtcattccttcttcccataaactgatgatctgattcgggtatgtgatgactttcactaatcaagatttatagacaggccaactgcaaaagaaaaaaatgccccaatctayaggttcaatatattagtggagcagtgtgcaaataaacagctgtgattgtcacagctctttcacattcctgagagaggtcaatattaggtgaataagtctatgcaaaggagctagttcagctaggtttaatatattactatgtaatagaaacaaaacaccatcaaacaactcaagatctctgaaagaatgttaaccagcaagatttaaaatgtttttcaacacaaacaaggacaacttctgtgggatagactgtcaatatagtaattccaaggctgtggaatcagtgaaaaagttactaaa

SEQ ID NO: 75794 - DNA, 600 bp, Chicken  19866894360064_1
cagggccatttagtgcagcatacttcagaaagcaattagagattcccacgggcagcagtgcagctccactgcagcctacttcggacagcagcagtcaggcacggtcctgcttacacctcctcacccatctatctctgctgcgtgtttgtaggaatatggggcaggtggatcccttttgcatccctgttccctctccaccatgctcagtagactgcgctttccttccagccctcccagcaacacgtcaggagctttatttttccccaggtggcttttgtgtttcattcctgtttgatgctstttatcaggagcgacgcgggcaagcaccgtgtctggattcccatctctgtagcacctatgggaggtgggagaaggcagggtggaaacctccctcgctgcatttgctctgaaggttttgccattgtttaaaagcaaatctgaaaagtaataatctgagcgcagcagagggagaggcccctggaggcagctcagcagcagagccttgcagatctgcatgaatgagagcatatgagggagagaagcagagagagagggtgagatggagaagagygtgtgaaggaggctgctggggttgggacc

SEQ ID NO: 75795 - DNA, 600 bp, Chicken  19866894360064_2
cttttgtgtttcattcctgtttgatgctstttatcaggagcgacgcgggcaagcaccgtgtctggattcccatctctgtagcacctatgggaggtgggagaaggcagggtggaaacctccctcgctgcatttgctctgaaggttttgccattgtttaaaagcaaatctgaaaagtaataatctgagcgcagcagagggagaggcccctggaggcagctcagcagcagagccttgcagatctgcatgaatgagagcatatgagggagagaagcagagagagagggtgagatggagaagagygtgtgaaggaggctgctggggttgggaccatgctgggatctgcatgaacatccttggctctggtgctgtctgccgagctgtgggtgggagaaccacagcctgaygagtcccactgatggagtacgccctccttggccattctgcatgggtggccaggacagagggcttggttggtgagttcactaccgatggtgggcaactggaactaggtgatcctcccttccgacccaggccattctgagacattgtggttctgtgattctgtgattctatgatgagctctccatcctttgatggggc

SEQ ID NO: 75796 - DNA, 600 bp, Chicken  19866894360064_3
cagggtggaaacctccctcgctgcatttgctctgaaggttttgccattgtttaaaagcaaatctgaaaagtaataatctgagcgcagcagagggagaggcccctggaggcagctcagcagcagagccttgcagatctgcatgaatgagagcatatgagggagagaagcagagagagagggtgagatggagaagagygtgtgaaggaggctgctggggttgggaccatgctgggatctgcatgaacatccttggctctggtgctgtctgccgagctgtgggtgggagaaccacagcctgaygagtcccactgatggagtacgccctccttggccattctgcatgggtggccaggacagagggcttggttggtgagttcactaccgatggtgggcaactggaactaggtgatcctcccttccgacccaggccattctgagacattgtggttctgtgattctgtgattctatgatgagctctccatcctttgatggggcatgactgtggccccagtgcctgggaacagtgtcagctctgggtgctgagggctagctgctcaccccttccccaggtgcttaattcttgcagactttggggccgt

SEQ ID NO: 75797 - DNA, 600 bp, Chicken  19866894360066_1
agtatgagatccagtggatgcaagctgaagacaggcagatgcagtccacaaataaggtatatttttgtttaaaacagtgaaagcaattagccattaaaagaacctatgaagagatgcatcaggtctcccagctccttaagtcttaaacaaaagcttcttatgttagaaattatacatatcagtgggtctgaaattaaggcacctgctagagtttcccttcacacagaaagcaggatagctggtttataaaagacccacttaaaaatccacaaatttacttttgtttcctacaggcttccraatttctctttaacagctcttgccttccagccacgagttgtgcattgcgtggctacacatattctccacgggagaacgttaatcaggctcttaatcacctgcacacactcctcctctcccgctttggttttcaggggtcctatggtagctgtgacctccgctccacacctgtacatgactggaataacctgcctcctcttgtagtcagttcccacactactctcacactgttttctccccaaatctctttggtacttacattcctgcctcccccttggatcctctcagagcttgtggatg

SEQ ID NO: 75798 - DNA, 424 bp, Chicken  19866894360067_1
tagggtccccctaaggactcatgttttctatctcattatcctgataaagtggacaccaatgagcctcttaatgaggattaaactgtggactttagttgaatttgcatctcgcattcactatcgacgaacatctcctgaaatatgtcacatacactcactggtttctaattcaggattcaaaatgctgcatgaaaaatctgggtaaagacttccattgctctacccagcaactgtctaagtgaggaaatcagaatattttgataaatgtagtgttttcccatcctcaggccatcagtgagygtcttactgctacgtatctggcttaaaatgaacagctgctccagagatctggaaatactctctttagttttgaataggaggagaaactgaagcggaagcaggtgtttgtggctgtgtttgtgtg

SEQ ID NO: 75799 - DNA, 600 bp, Chicken  19866894360070_1
accaaaacaaacagcttatatctacacgtgtttgcagtgaggtcagcctgaactcacacagacgtaacacaatgcttgtggtgttgtcaatgaacaacaggctcataacaactgccctccacagcacagccttgggtaacaacacattcacccaccttgaagtttccttcttctatttgctgttcctaactggaacgaacatattattcaactccttcatagaaaattaaatgttatcctccaaaaagatgctggaagtaatagaattcttcagttccctcttacagtgaaaaattcgcrttcaaaattaaagaagtaagaaaatatagaacttcmaaaatgagtttttgacattttgggaagaattcttttcaaggggctggttataacatagagcaaaagtatatgctcaatttttatcctaacaacataaaacccattatactaaatcatttccccatggaaagatttcagtatatattaaactgtcaaaaatctccattatacacataaagggtactatgttacatacaaaaaaaaaaaagtaatataaaacctacagaggaatgggaaagataaatgaacatctaccacagaggc

SEQ ID NO: 75800 - DNA, 600 bp, Chicken  19866894360070_2
gtgaggtcagcctgaactcacacagacgtaacacaatgcttgtggtgttgtcaatgaacaacaggctcataacaactgccctccacagcacagccttgggtaacaacacattcacccaccttgaagtttccttcttctatttgctgttcctaactggaacgaacatattattcaactccttcatagaaaattaaatgttatcctccaaaaagatgctggaagtaatagaattcttcagttccctcttacagtgaaaaattcgcrttcaaaattaaagaagtaagaaaatatagaacttcmaaaatgagtttttgacattttgggaagaattcttttcaaggggctggttataacatagagcaaaagtatatgctcaatttttatcctaacaacataaaacccattatactaaatcatttccccatggaaagatttcagtatatattaaactgtcaaaaatctccattatacacataaagggtactatgttacatacaaaaaaaaaaaagtaatataaaacctacagaggaatgggaaagataaatgaacatctaccacagaggctgggcaattcctaaatgtcaaagggtcagaaaaaaa

SEQ ID NO: 75801 - DNA, 600 bp, Chicken  19866894360074_1
cttctcacttctgtgcttttccccagttactttgaatgatcttttctatatttatcagagtaagaaaattaaacagagacatagatgaaaggaaagaaaataataccaaaaagagcttatagcctaaagtattatttttttttaaattcgagaatgattgaaattgagtcatgtttatattcattttccccaggtattacagcaaaaaattttactaggtaatactaagtgaacaattattttctggtaatactgaagacattcatgggaattgtttagaattttttcagactaaaactractttaagtgctacaaccatctaggcagtccatgaaaaataaactaaattttcctgagcttagctttaaaatcagttacatatcagttacatataaacgcatgcctaaaatctttctcaaaggaagaaacattctgttgaccagttatactgttccaagaaaatgaataccagatatgcaaactggaataactttagaggagaacataaaaatgtgtttgggaacaaaaaagattgactttccaggaaaagctttccatgcaaaaaccatttgattaaacaacactgactacacaactac

SEQ ID NO: 75802 - DNA, 600 bp, Chicken  19866894360075_1
aagaaaaaacatgttcagctaatcccatttaaatttagctgcatggaatttagttatctggttggtagctatttagttagtcatcttcattcctaaagagtgaatggagcaagatagtaagatgtggtgccttctggaggtgtctgtttctctacattgactctaaaggacgatcaggatggttgaattatactgattaatttgtaaatggtaaaatgaattcaggtgtctatgcttatgtcaaagtaaccctttcatcctttccaattgctgagtaaagatatatattttcagttcttyctgtctcagcctgttgggactctctgggtttactcatgatttataccacataaggaaaagtagaacctctcttgcgtttgctgaaagggtttttatatatacacgtagagcacaatgaatttgtacaactaggagaagagactagatacaaactactgagatatttggcttatgtgcacagagttcaaaacttactttttattgtttacaatgttatattatttataacgttaaaattggaaggttggatcccagcggtatacactgacttcagtaaaggatctggtttgtgttatttgg

SEQ ID NO: 75803 - DNA, 600 bp, Chicken  19866894360090_1
attttgatgaatttttccagactcaggccaagcaggaaaatgttgaaagtaactctttctgtgttgtcatagtcagctacttgcaattcttaagactggtaggaaaaatggttagataaatgggtagtaatattggagatagtcttgaatgtagataattacttccaactccttgtttatataaacacaccttgagcagagagggaattgtattaaaaactcatttaaaaccaattctatttgaaccaaagaggactaaaattcactcatgtagatgaccttctcagaatgaactaaacwgaatttttcagatgattgtgtttaaaatgccaagtttattttgtgttccaagggggtcatgtgtctgtactttagaatttcaggctttaaaggagtaagtgtactctagaaaaggccaatacccagctgtcgcatgtcagggtttctgtatttgcaaggtgtctgcaaatctctgtagcattaattctaacacattttttctgttgaagtgtggtgtttgtaaatgacattttgatggtttattcactgacttcaccttgagaacctttgctgttagctattgatgcaaaatgttaagtc

SEQ ID NO: 75804 - DNA, 600 bp, Chicken  19866894360100_1
tagttaaaataaatgaataatagcaaggatggagaggacattagaatctgtgtgaatatagcctgcagatgaaacagatggacatgaagaataaattattatttctgagatgacacgctgtagcaagcttagctactacaatggaggttccccagcaaagacaacttttttccttaccttttcttcagtttcttcactgcagctatagctgtctggaagcaggtctctcttctgtctcagacttgatgagaaggaatgacttcggcgaggctgcagtttctcatgagctggttctacagkgtcaagctctacatcactccagttctaatcaaaaatagtgatagatttcagaaatttacaccttttctcaaatttcaagttctcaaacttaagcaggagccttacacttagagaaaattacagttgctctaagacaggtctcactcaaaactctcatgagaagagatttgatttttgattttctcacttaccctggatttccttcccaaattaaaaaaaaaaaaaaaaaaaaaagattaaatcatctttcatcatttcaacagtaagttattcacccttcttctatctcattgcttgcac

SEQ ID NO: 75805 - DNA, 599 bp, Chicken  19866894360118_1
  misc_feature (1)..(121): n is any nucleotide
nnnnnnnnnnnnnnnnnnnnnnnnnnnnnnnnnnnnnnnnnnnnnnnnnnnnnnnnnnnnnnnnnnnnnnnnnnnnnnnnnnnnnnnnnnnnnnnnnnnnnnnnnnnnnnnnnnnnnnnnntttatcagatttttagttgtataatgtgttgtactatggaaagctcctggagcgtgagcttcatttttttgtaagtatttggtctcccaggatgaaaaataatactttttgactaacttcattaagtgtaatggcacagtaatgttgcattgcaattctaggttaatcagctgtatctrttctcagggagtatcagcagacagatagacttagtcccttatttgggaacagcagtaagaattcagatcacgtattaacgagcttacagtttcagcatctttctagtcttagtggactgcctatctggaataattaatacagatctgaagaaaataaaagtaaccagcatccttctgtatttggacatttaaatggggttatatgattattccccatgttttttattttctttttcaggaatatatctaattgcttgctttcccgagtatgattcctgtaaatatttgcacttttattt

SEQ ID NO: 75806 - DNA, 600 bp, Chicken  19866894360127_1
cagtgctctgaaataaggctgagagcagcatccaacttttgcagcataacacttcagtggcctcatatggacaaacagaatctgtaaaatgagcccatctgtatctgaagcaacgatcatacagaaatgttgctccaagcaaaaccacatccactgctagctggtacttttgcggcagagctaaaagatgagccccctttaaactgtggttaaaatcagctggctctcatgccactcgtgtgggcaaaacctggaacctcatctagcatctaatcaaatcacaaacgtcgtttgtggggrtccaatttagcaccaagtgtaaaagcaaagtactcaaaataggaactttccattggtctgcctggtgatagcaatgaagagttgrtttatgaatttggagacaagaaactcaaatgttccagaaatgtgattgctttttattgcatagtctgagtatgagtcttttcctgctgtttagtcccawtgtctacaatcacattttaaataccgttaattgcatgaggaagatcctcctcaccccctgaatggtagtctagacttaatttatcagaaatacaaggatgaatgagaggatgcatt

SEQ ID NO: 75807 - DNA, 600 bp, Chicken  19866894360127_2
aaaatgagcccatctgtatctgaagcaacgatcatacagaaatgttgctccaagcaaaaccacatccactgctagctggtacttttgcggcagagctaaaagatgagccccctttaaactgtggttaaaatcagctggctctcatgccactcgtgtgggcaaaacctggaacctcatctagcatctaatcaaatcacaaacgtcgtttgtggggrtccaatttagcaccaagtgtaaaagcaaagtactcaaaataggaactttccattggtctgcctggtgatagcaatgaagagttgrtttatgaatttggagacaagaaactcaaatgttccagaaatgtgattgctttttattgcatagtctgagtatgagtcttttcctgctgtttagtcccawtgtctacaatcacattttaaataccgttaattgcatgaggaagatcctcctcaccccctgaatggtagtctagacttaatttatcagaaatacaaggatgaatgagaggatgcattcaatctgctgcagctcagagaacgggcttctgtatgtgtaaatgaggatgactgcttctggggaaggttgttctgggataatacc

SEQ ID NO: 75808 - DNA, 586 bp, Chicken  19866894360127_3
aagatgagccccctttaaactgtggttaaaatcagctggctctcatgccactcgtgtgggcaaaacctggaacctcatctagcatctaatcaaatcacaaacgtcgtttgtggggrtccaatttagcaccaagtgtaaaagcaaagtactcaaaataggaactttccattggtctgcctggtgatagcaatgaagagttgrtttatgaatttggagacaagaaactcaaatgttccagaaatgtgattgctttttattgcatagtctgagtatgagtcttttcctgctgtttagtcccawtgtctacaatcacattttaaataccgttaattgcatgaggaagatcctcctcaccccctgaatggtagtctagacttaatttatcagaaatacaaggatgaatgagaggatgcattcaatctgctgcagctcagagaacgggcttctgtatgtgtaaatgaggatgactgcttctggggaaggttgttctgggataataccaaggtacttgtggtattgcttgggaattttgttaagaattcacttgtaactcttgcattattatatgcagatagtctaaaagctg

SEQ ID NO: 75809 - DNA, 600 bp, Chicken  19866894360138_1
cttcacctggtctggcttaagtctatgtcatctcactgtctccagcaaacactgttttctctttatggtgaccttggatatcagaaggttctttaccagaaggcagcgggcatagaaaaacctccccctcaagctgttggagttcaaggagcatctgttctcatagagtctgatttttgggtggtccagttggactcaatgaaacttatgggtcctttccaacttatgacattcaacgttctctcaccttgtcccccatcttctctaccctaaaaagcctgaactcttttcacttcctaygtcagatactctatgtttttatcagagcagatggaatatcttttgtttctggctggagctcttctgagtaaaaacattaagggctcacggggaagtagcgtagtatggacagccatgtagcatttattctttcttaaactaatgccacctaccccacacaatgccactccatcattaatggtactactatgaccacatctcaccattccaccttggagaatggcagagccagcagaatcagagagttacatataaactttggatttcataagctaatgcctttgtcagtacagtctactt

SEQ ID NO: 75810 - DNA, 600 bp, Chicken  19866894360143_1
cagagtaacggctgaacctttaacaaactgcagtcagtggatgcaatcacagagcatatctgttaacagacattttgcagcaactagaactaatgaatgatttgaagatgcattagagcatggtgtgcattacccgctagcacagcagccaaacagtactgcatgtcagtgctgccttttcccaagccaagtctgtcctttctttgattcacgtttttgtcaggtgaaatcaacacctgtcacaaccattaccaacaaaacctgagcagcatagataacaaagttgcacatctgctttgratgtgcttaaacaagaactgctaggctgctgagtgcattctaagtgttttcatgccacttccattttataacacagttaacctcaaatatctcatagattggattcatggtacttgatactgaacaagagaggaacgccacaaaatgtgagctctcactctactgtaggaaatatttaaaattaacttcactgggatttacgggtttataaagagttgaaccacacataattacccaaagctttgccctagtgtcatggttttgtaattttgctattggtattccacatcatttttacta

SEQ ID NO: 75811 - DNA, 600 bp, Chicken  19866894360149_1
atatatatatatatgtttggatgctttcatcatgcattactttttttttttttacgcaaaacaagcatgaaataccacacagtcaaataaacgacttgtagctctctgtgttttctgcttgtatgttttaatcaaacaatctcaagcaaaatgttgctatgttactgctttgtctttgtctgcttgccttcaacaggactaattatttccaaagccgcaccatgctcatgccacactacaatatgctgtgtacatgtgccctaagcgagttagctgaagcatctctgcattctaaactgmtttaagaaaacagtaaagaagaggtacagctcctccattcctcactgaaaatattgtggaatttrcaacaatttcagaaattcttgcatgttgctggaggtggtttcagttttcacaccagaagtaatttaatttcagcacttaaaatccaaaaagctctaacatattgctagcgtgcaaaaattccatgtgtgctaaaaaacaacagcatatggttgggtggggtgtgaccaaaatgaacatagttatcacattgtgaactttctttttacagacttgattaaataagtgtggggggac

SEQ ID NO: 75812 - DNA, 600 bp, Chicken  19866894360149_2
catgaaataccacacagtcaaataaacgacttgtagctctctgtgttttctgcttgtatgttttaatcaaacaatctcaagcaaaatgttgctatgttactgctttgtctttgtctgcttgccttcaacaggactaattatttccaaagccgcaccatgctcatgccacactacaatatgctgtgtacatgtgccctaagcgagttagctgaagcatctctgcattctaaactgmtttaagaaaacagtaaagaagaggtacagctcctccattcctcactgaaaatattgtggaatttrcaacaatttcagaaattcttgcatgttgctggaggtggtttcagttttcacaccagaagtaatttaatttcagcacttaaaatccaaaaagctctaacatattgctagcgtgcaaaaattccatgtgtgctaaaaaacaacagcatatggttgggtggggtgtgaccaaaatgaacatagttatcacattgtgaactttctttttacagacttgattaaataagtgtggggggacatctaggacaagaacctggaatcctccaagagtctgcttttgcaaatgttgtgtggttaactgaa

SEQ ID NO: 75813 - DNA, 498 bp, Chicken  19866894360149_3
tgtgaccaaaatgaacatagttatcacattgtgaactttctttttacagacttgattaaataagtgtggggggacatctaggacaagaacctggaatcctccaagagtctgcttttgcaaatgttgtgtggttaactgaaaggttcatcttgcataaactgtggcttaaaataggagactgacatttcatctgaacatgaggaagatatagaatagaaaggtaaaaaggaggtgggatgtctatggggcaaactctttgagaggccagagcacaggctgaaggaaaaattcagtcctccytgtttactagtagaagacaaatagattaagattatttgctttytagttgtagcctattgcctgagcttgcattggatagaatgggctttaagtgggtttatttgttgggactgtatatttcatggtatttaaacattgtgtgcaattcttctcaacatagtttagtgcctgaggtaattgtgggcacagataactcat

SEQ ID NO: 75814 - DNA, 455 bp, Chicken  19866894360149_4
ttacagacttgattaaataagtgtggggggacatctaggacaagaacctggaatcctccaagagtctgcttttgcaaatgttgtgtggttaactgaaaggttcatcttgcataaactgtggcttaaaataggagactgacatttcatctgaacatgaggaagatatagaatagaaaggtaaaaaggaggtgggatgtctatggggcaaactctttgagaggccagagcacaggctgaaggaaaaattcagtcctccytgtttactagtagaagacaaatagattaagattatttgctttytagttgtagcctattgcctgagcttgcattggatagaatgggctttaagtgggtttatttgttgggactgtatatttcatggtatttaaacattgtgtgcaattcttctcaacatagtttagtgcctgaggtaattgtgggcacagataactcat

SEQ ID NO: 75815 - DNA, 600 bp, Chicken  19866894360158_1
caaatacatcagatttttcttcagcttcttttgaagagtgctaagctcttttggctgtttgcaccactctccttaacaccctataatcctgaccagaattatatattctcccttccaatggtgaaacttaaactacggggagtttgtttataaagttggatagatattaactactttaaagtaggctcatttgtgcatatccactgtacagccactatacattggaattagtgtctctctcttctgtaatagcttacagtagaacttaatgccacctataaactctattttatatagtayttgacttgttataatcatgttagttcccattataaagctgttatgcagcattatctctgtcaccagcacttcttaagcacttgcagaaaacatgctgtttctgttgctacatcctcagtcgtggcttgtgaagaactgacatcatcaataacaaagcagtaaaaaagtatccaaagttcactacaagtcattagatgttcaaaaagttgtatctactttcacagctgaagtactgagttcccacggtacaggaaaactgtgtagttcaacttacatcaaataattattgtttatcaagcc

SEQ ID NO: 75816 - DNA, 600 bp, Chicken  19866894360158_2
agcagtaaaaaagtatccaaagttcactacaagtcattagatgttcaaaaagttgtatctactttcacagctgaagtactgagttcccacggtacaggaaaactgtgtagttcaacttacatcaaataattattgtttatcaagccatagttacacagtaaaagtaaatggcttccctactccgcttttaagcttttcctgccttctcatataccctcctttccttttattccttttagttttgtactaatctggtaatactgggcagatgcggacacatgccagcagataatctttttyacacactggaagtgtttgctgggtttcattatcagtrgtattgtcagtatcactagtataatttttagtaccagtagtatttgtagatattattagaaggaatatttcttgtctccagtgattaaaggatcctattcttccttctgagtataccctgaatatattcagaattctatcataaatcagtattgtatgaaaggaacattgtatgtaacattttctgaaagcttatgaatatataaattgtgttagaggtacgattatctttgtagatcgtctacatggggttcaagctcatac

SEQ ID NO: 75817 - DNA, 600 bp, Chicken  19866894360158_3
tagatgttcaaaaagttgtatctactttcacagctgaagtactgagttcccacggtacaggaaaactgtgtagttcaacttacatcaaataattattgtttatcaagccatagttacacagtaaaagtaaatggcttccctactccgcttttaagcttttcctgccttctcatataccctcctttccttttattccttttagttttgtactaatctggtaatactgggcagatgcggacacatgccagcagataatctttttyacacactggaagtgtttgctgggtttcattatcagtrgtattgtcagtatcactagtataatttttagtaccagtagtatttgtagatattattagaaggaatatttcttgtctccagtgattaaaggatcctattcttccttctgagtataccctgaatatattcagaattctatcataaatcagtattgtatgaaaggaacattgtatgtaacattttctgaaagcttatgaatatataaattgtgttagaggtacgattatctttgtagatcgtctacatggggttcaagctcataccttactcagttacaccacagcagtcagtcctgaaggc

SEQ ID NO: 75818 - DNA, 600 bp, Chicken  19866894360158_4
atatattcagaattctatcataaatcagtattgtatgaaaggaacattgtatgtaacattttctgaaagcttatgaatatataaattgtgttagaggtacgattatctttgtagatcgtctacatggggttcaagctcataccttactcagttacaccacagcagtcagtcctgaaggccccaaattcctaggacagctaggctgaatacctggactatgcataaatgcatgattcttccctcaaagttggtcaacatcaagatctcaactgcagaattactttcatctgcagtatttgmagacatttcttcaagtacatgtacacttctatacttaactccaatgacagacagctaycaaagtactgaaaagcacagtggaaaagcatatttctttttcttcagacaactgaatccccacaaaatatcattttctctccggtaatcttcgtttgaaacagaacaacaaaaaactagaggaagttgggttcccactccaccagtagcccaggcagactttggtcaataagcaacctgagmactttcaagatgtaatatatcttgaaaattgtaatggctcaattctaaatttggggaaac

SEQ ID NO: 75819 - DNA, 600 bp, Chicken  19866894360158_5
ttttctgaaagcttatgaatatataaattgtgttagaggtacgattatctttgtagatcgtctacatggggttcaagctcataccttactcagttacaccacagcagtcagtcctgaaggccccaaattcctaggacagctaggctgaatacctggactatgcataaatgcatgattcttccctcaaagttggtcaacatcaagatctcaactgcagaattactttcatctgcagtatttgmagacatttcttcaagtacatgtacacttctatacttaactccaatgacagacagctaycaaagtactgaaaagcacagtggaaaagcatatttctttttcttcagacaactgaatccccacaaaatatcattttctctccggtaatcttcgtttgaaacagaacaacaaaaaactagaggaagttgggttcccactccaccagtagcccaggcagactttggtcaataagcaacctgagmactttcaagatgtaatatatcttgaaaattgtaatggctcaattctaaatttggggaaacaaaacctatgagctcttcagtgaaattttgaaattgagttccatttgggaaaagaaat

SEQ ID NO: 75820 - DNA, 600 bp, Chicken  19866894360158_6
ctcaaagttggtcaacatcaagatctcaactgcagaattactttcatctgcagtatttgmagacatttcttcaagtacatgtacacttctatacttaactccaatgacagacagctaycaaagtactgaaaagcacagtggaaaagcatatttctttttcttcagacaactgaatccccacaaaatatcattttctctccggtaatcttcgtttgaaacagaacaacaaaaaactagaggaagttgggttcccactccaccagtagcccaggcagactttggtcaataagcaacctgagmactttcaagatgtaatatatcttgaaaattgtaatggctcaattctaaatttggggaaacaaaacctatgagctcttcagtgaaattttgaaattgagttccatttgggaaaagaaatggcaaaaaatctctgccttttcctgccaaatacaatccatacttygctgcgtatttagctatcagatacggacaaaataccattaaacatttcttgcaagtcatatctaaggaataaaagggaactaaaataaaaaataccaacaaaactaccattatgttaacttcgacagcatttaagct

SEQ ID NO: 75821 - DNA, 600 bp, Chicken  19866894360158_7
agacaactgaatccccacaaaatatcattttctctccggtaatcttcgtttgaaacagaacaacaaaaaactagaggaagttgggttcccactccaccagtagcccaggcagactttggtcaataagcaacctgagmactttcaagatgtaatatatcttgaaaattgtaatggctcaattctaaatttggggaaacaaaacctatgagctcttcagtgaaattttgaaattgagttccatttgggaaaagaaatggcaaaaaatctctgccttttcctgccaaatacaatccatacttygctgcgtatttagctatcagatacggacaaaataccattaaacatttcttgcaagtcatatctaaggaataaaagggaactaaaataaaaaataccaacaaaactaccattatgttaacttcgacagcatttaagctgacaaagttgtaagctgtgagctgattcacaaggtatacactttgccaatttcatctaggaagaatgatatcatggtattgacatttgagacaacactacactgaactgaaatgcttgttcactgactgtgtttctgtctgcagaaatcctctgtactgcagt

SEQ ID NO: 75822 - DNA, 600 bp, Chicken  19866894360164_1
cttctgctgcatgttttgtactctgggactgcattactaaatcctcttttctgccatgatgatttcttgccttttctgcaactgctgtgttgtgcataacttcttaaggggcagtgacttcagtgagattcacctgacacagcagatgtgttgtatagttcacttatgggataaggttcttgggtaccttgatgtcacctgtagaatccatagagggtgaaagtggtgtggcaaggcacacaaggtaactctcttccaagaagctgtttgatgtggcctgttggctactagttgcttctraagctgaaatcatgtctgaactgaggcagcagaaagcattgacaggtgtgggagtgctgctcgttcttttttccccctcactttaaggtagttcttttagtgtttcaggtgttttgaaggtggaatcttaatagcttgaagagaaatattaaatgaaaagtagagggagactctccaatagttttccttttactagtatcagcaaatatgaaaactgtggtgaacgtttggaatgtaaggattttttttccacatcaaaccatcttatattactgttttattacttaaagatgaatggaa

SEQ ID NO: 75823 - DNA, 600 bp, Chicken  19866894360166_1
ttgtcatgtttctttcatcctaaatgatcaatataattttcagaacctttgagacaccagtgttcttctgtaaggttggattgtgtgaatctgttttttttgtgggcatttggttgctgcagttatgtaacacattttctgtgtgtttttttaaagaacaagggcttctgcaggatactgcaggaaatatcaaaaaacaggtgtttttcaaagggaattgtcagttatgcattttcaatttagcaaaaactagtaactgtctatacagtgaataaagaaaaacatggtttgaacatttcwaaagctattaaggtatcctatttacacttctctgtttagcttatcaaggggaagatgatgaaaaaattattaaaattgaatacaagttctttttccacatttcagtggcagaaatataacaagttttctgaaaagtgatatttgagacaaaaaatattttaattagattatattttttattttaaaaaatgactgattttaggcattgtcatccctcccatctcactcaggatattggatcatttagttccaattgttgttcctgacatttcgtgaattgtcatttagtctatcatgaat

SEQ ID NO: 75824 - DNA, 600 bp, Chicken  19866894360177_1
aagaaaaagtaattaacgcattggaagtttatgttaggagattaaacgttttgttattgacagatttgccatgtcattgaacccagaagtcaacgtttacaaaatccagagaagaatttagctagaaactgtgctgaagaactctctgacaagtggttttgcagaaaataatcttagcattaagaaaaagtaagccctaaatttagtataataatgtaatgattttttaaataacaaattggaagggatttataagggaacaaataattgcaggatgcgtggagttaccacttctctgcwtagtactgacaaatctttatttgaaataatatctccagtttgtgtgctgccactcaagatagacataaaccacttagaaaaagttcaaattgagaaaaaatacatttattgagaaacagcagataaatgatccatgtggaaatgctgcacagacttgttttttctcattaagaggaaagctaggagtctgaaaaagtttttaaaaacaaagaaaatcttttgataagaggaaaggagcaatctcttctatacatcttctgtagacaggacaaggcgtaagcaggattaagttacaagaaa

SEQ ID NO: 75825 - DNA, 600 bp, Chicken  19866894360181_1
attttttttctatcatagttggcaggatgacactgtgcaggacatgaagtgtttttgatgtttgtttgctagctatctaaggctcttcattgtgttgagtggctgagtggactttttctcctcggccttctgcatgaatatgcaaagcccaagaagtgctggaaacttctgtggttctaccacatgggtgaacaacatgcaaagcccgttcccctctttgcacgccacagagtagtgctccagaatgtatccctccagcagagtcaatctctgaacagcttgtaaaagaggggcaggaaktrgacctgtaaatgtgtgagttaggggtgtacttgtccacaaattgctagttgtggctctcgttacagcctacagtaaatcctcttcacgtgcctgtagaaaggctgtgcacacctctctgccttggagggtcttgcctctttctactttctctgtgatgcagatttctctctgaacatctgacattagatatcagctgattagccacatccagaaatattcttctaccaaacagttaactatgtgaaaaagggttcttggtgttgttgaccgagtacttttaatgcactgttgctgtag

SEQ ID NO: 75826 - DNA, 600 bp, Chicken  19866894360181_2
tttttttctatcatagttggcaggatgacactgtgcaggacatgaagtgtttttgatgtttgtttgctagctatctaaggctcttcattgtgttgagtggctgagtggactttttctcctcggccttctgcatgaatatgcaaagcccaagaagtgctggaaacttctgtggttctaccacatgggtgaacaacatgcaaagcccgttcccctctttgcacgccacagagtagtgctccagaatgtatccctccagcagagtcaatctctgaacagcttgtaaaagaggggcaggaaktrgacctgtaaatgtgtgagttaggggtgtacttgtccacaaattgctagttgtggctctcgttacagcctacagtaaatcctcttcacgtgcctgtagaaaggctgtgcacacctctctgccttggagggtcttgcctctttctactttctctgtgatgcagatttctctctgaacatctgacattagatatcagctgattagccacatccagaaatattcttctaccaaacagttaactatgtgaaaaagggttcttggtgttgttgaccgagtacttttaatgcactgttgctgtagct

SEQ ID NO: 75827 - DNA, 600 bp, Chicken  19866894360181_3
agtaaatcctcttcacgtgcctgtagaaaggctgtgcacacctctctgccttggagggtcttgcctctttctactttctctgtgatgcagatttctctctgaacatctgacattagatatcagctgattagccacatccagaaatattcttctaccaaacagttaactatgtgaaaaagggttcttggtgttgttgaccgagtacttttaatgcactgttgctgtagctcgtctctctgtaagtctctgtggcttaatgaagtgaattggaaagcaaacctgcttgggtgggatgctgtkctctgattccatgttagatagagtagggctaaggataggttgggaggaactgtcagctgtaatttctttgcatactgatgtagaaaagagcgttagtgcctggcctgcagctttgttgctttgggagagcagggcttcctgggccttcggaagtagatgtcagtgtatcccacctccacaccattccctggaagaagctgaagggatgttaaagagaagaggtgaaatactacccagattagatgaacttttttccccatctttcttttcccttctcaaactgggttttaattccattcc

SEQ ID NO: 75828 - DNA, 600 bp, Chicken  19866894360181_4
ggttgggaggaactgtcagctgtaatttctttgcatactgatgtagaaaagagcgttagtgcctggcctgcagctttgttgctttgggagagcagggcttcctgggccttcggaagtagatgtcagtgtatcccacctccacaccattccctggaagaagctgaagggatgttaaagagaagaggtgaaatactacccagattagatgaacttttttccccatctttcttttcccttctcaaactgggttttaattccattccttgatgtgaatttcaccatttagggaccatagaaacmtaaggttaggtagggtgtaaacataaacagtgatgattgagtaacaactttttggccatgcagaagtattcacgtatcttttcaagcatctttttaaatgtcagcgaaagagtatgtgtctgttttgatttttctaagcaaaagtgaaaaggggataaagagcagaagtagggctcgcactcrtctacccatttaggtagatgtgaggagctgtgattggaatctgactcacagtgtttctgtaacattagcttcagtggcaagtgcagcatgtagctaaacgctgttggaccttattca

SEQ ID NO: 75829 - DNA, 518 bp, Chicken  19866894360181_5
ggtgaaatactacccagattagatgaacttttttccccatctttcttttcccttctcaaactgggttttaattccattccttgatgtgaatttcaccatttagggaccatagaaacmtaaggttaggtagggtgtaaacataaacagtgatgattgagtaacaactttttggccatgcagaagtattcacgtatcttttcaagcatctttttaaatgtcagcgaaagagtatgtgtctgttttgatttttctaagcaaaagtgaaaaggggataaagagcagaagtagggctcgcactcrtctacccatttaggtagatgtgaggagctgtgattggaatctgactcacagtgtttctgtaacattagcttcagtggcaagtgcagcatgtagctaaacgctgttggaccttattcaccacagcactgctacagctgtacagtggtggctgatgcagggggggggggggggggcgaaaggagggaccatgcgttctttcttactcctccataggtaga

SEQ ID NO: 75830 - DNA, 600 bp, Chicken  19866894360182_1
aataataaggctgttctggcagagatgaatcaaaattacaatgtttgatatggtcaaagcagtataaggaagaatatctaaatcaaaattactaagataagatttattttaaatacatctaatccattttgactagaattcaaaccaaagaccttctcatgaaaatagaagacaaatctgagaagcttatgttttctttcaaaatccagctcacaaaagtggacctgtaattattctaaattattctgtgtcatttcttttttctgatgaactttcatagttttgcagttgtcacgctcrtacctgatggccaggagagtgtccaagagaaggaattttccacgttattcccgaaccttttcatcaggccaggggctgatcttatcaaccccttatctacttcttcacctgcaatatgtgtcttcatcattcactctctccatctcacagctgttcctgcatgtctcaatagcagtccaggaatcactcatacttttgcagttaaagataccctggtaaaaaaagaccctggtaaaaaagaaaagaccaagttcacaaccttcttcagaagtctctatttattcagttatgggatactct

SEQ ID NO: 75831 - DNA, 600 bp, Chicken  19866894360187_1
aatgtctctccagatcctcccactttgacctattgcagggtttaatcccacctgctattaaataaacagcaggattcccattgaaaagaagctaagttctcttgtccttgcaggaacaggagtatgcccagagaagtacatgttttttttctctcaaaatgctgcattaaacaaacccccatgttccaaatagcaataataatcaactacataaccctcccataaggtagatgaagtggtgtaggcaggggtcaatgcagttcatgcagctctaacttgggctgtgcagagttttcccaytgctgggcttggagaacaaacgtgaatgttatttatctgtcattttaattactgccatagcactggcacagtgaagaaaagcactgtgaagcagaaactggtagctgtatttcctgcagtactcctgtcttcaaaggacaaagaagtaaaacacaagatatgtttccggctcttccacaagcatctcccaatttccataggaaaaaaggctctttgccaagagttacaaaagtcttttttatgaccacatgtatattcacacatgtactctgaaattactgagaagtcagacacgaggaa

SEQ ID NO: 75832 - DNA, 600 bp, Chicken  19866894360187_2
aaaagcactgtgaagcagaaactggtagctgtatttcctgcagtactcctgtcttcaaaggacaaagaagtaaaacacaagatatgtttccggctcttccacaagcatctcccaatttccataggaaaaaaggctctttgccaagagttacaaaagtcttttttatgaccacatgtatattcacacatgtactctgaaattactgagaagtcagacacgaggaaaagtgatttttttttcaaaattagtagccagaattagaaatgggcaatagatgtccttactcagagccttcctttraacatcaggacacagttcaagcaagaaacactggtaaatttagcaagatttcccagacacattactgagctttgaggagatgtgttctttgtgaactctcagcagttcccttgtctggtaggcatctgcaacatgctgaaatgccctagtgctgctctgttctcacctaagcaatgtagctgacctttccatatcmgttcttgtgtgtagcatgatagctttaaccgggcaagacaaagaaaagccaacataacgtggctgcagtcacgttatctgtctgagagactttctttactgcct

SEQ ID NO: 75833 - DNA, 600 bp, Chicken  19866894360187_3
aaattactgagaagtcagacacgaggaaaagtgatttttttttcaaaattagtagccagaattagaaatgggcaatagatgtccttactcagagccttcctttraacatcaggacacagttcaagcaagaaacactggtaaatttagcaagatttcccagacacattactgagctttgaggagatgtgttctttgtgaactctcagcagttcccttgtctggtaggcatctgcaacatgctgaaatgccctagtgctgctctgttctcacctaagcaatgtagctgacctttccatatcmgttcttgtgtgtagcatgatagctttaaccgggcaagacaaagaaaagccaacataacgtggctgcagtcacgttatctgtctgagagactttctttactgcctctttagctgaacagtgaatgaatggcacttttgcagatttaacctttcctttatgttayttctcctttctctgagtcacgaggatttcattctctgttctgtagctcacctgcaaaaagtaccatttccttcttctgccacaaaacatgcgctcacagtgtagagacagaagaaacactgctatcatttccccttg

SEQ ID NO: 75834 - DNA, 600 bp, Chicken  19866894360187_4
cattactgagctttgaggagatgtgttctttgtgaactctcagcagttcccttgtctggtaggcatctgcaacatgctgaaatgccctagtgctgctctgttctcacctaagcaatgtagctgacctttccatatcmgttcttgtgtgtagcatgatagctttaaccgggcaagacaaagaaaagccaacataacgtggctgcagtcacgttatctgtctgagagactttctttactgcctctttagctgaacagtgaatgaatggcacttttgcagatttaacctttcctttatgttayttctcctttctctgagtcacgaggatttcattctctgttctgtagctcacctgcaaaaagtaccatttccttcttctgccacaaaacatgcgctcacagtgtagagacagaagaaacactgctatcatttccccttggccgatgtgaggagatcatgcagctaaaggcagcagtgtctgtgccgtgtttacattcctgctgagcaggtacagacagggcacagacccagatgtgtcaactggggcactgctgtgcacacacaaaaaaatcatcaagaaattgaagttctgccaaagggaa

SEQ ID NO: 75835 - DNA, 600 bp, Chicken  19866894360188_1
acattcatctatgcaacaacctccttttgacaggaattgcctttatctgtattttgtaaagctttgagcatattgccaggactttagaaataaaatatcatagggaactatatatttgaatattattatgaagaaaaaatgtgcatgttcacacagacatcttcaaaaatattgaatatgttatttaaagttgtatttgtgcataagcttgtaggtcaaatacagggcaaatcttttctgttacgctcaaaacatactttactgaactgaaagaaagtatataaactcttttaattttgratgctaaaaggtgcaagttctaaccagcgtttggatgggtgatttccccagggaaccccaggtgtcctgggcacaagccaagcagttattgctgaacactggggctgaggttcacctcacctaaccttagccatctgtctccctgtgggagactcgggcacttctagagggtgatacctggaggatggaatgaatcaccctgcccgagtctcacccctgactacagaggtggcccagactactcagataaccatgtaatttttgaataactgcagttaggtgagatgaatgccaaacgtg

SEQ ID NO: 75836 - DNA, 599 bp, Chicken  19866894360194_1
  misc_feature (1)..(225): n is any nucleotide
nnnnnnnnnnnnnnnnnnnnnnnnnnnnnnnnnnnnnnnnnnnnnnnnnnnnnnnnnnnnnnnnnnnnnnnnnnnnnnnnnnnnnnnnnnnnnnnnnnnnnnnnnnnnnnnnnnnnnnnnnnnnnnnnnnnnnnnnnnnnnnnnnnnnnnnnnnnnnnnnnnnnnnnnnnnnnnnnnnnnnnnnnnnnnnnnnnnnnnnnnnnnnnnnnnnnnnnnnnnnnnnnnatgctccaagcttcttggaaggaaacttgaagaagtttctgagcccatatctctacagagtgtgcaaaaatgtgraactaatttgacagcctccttgagttcaagaaaggataggaaggagtagaaaaaawtggaaattggctgtaccctttcatgtagcagcagccatctcctgctttttttcagtacggaacttggctctaatttacaccataggagcatggaagagccataaagccacactggctggattcccttcacacagggtgttcatgcaccgcaaagccagaacaagcaactccacatcattcctccctccctctggaggtgatgtaggcaaatgtcagcagcagctcacaattgcaattctccag

SEQ ID NO: 75837 - DNA, 599 bp, Chicken  19866894360194_2
  misc_feature (1)..(169): n is any nucleotide
nnnnnnnnnnnnnnnnnnnnnnnnnnnnnnnnnnnnnnnnnnnnnnnnnnnnnnnnnnnnnnnnnnnnnnnnnnnnnnnnnnnnnnnnnnnnnnnnnnnnnnnnnnnnnnnnnnnnnnnnnnnnnnnnnnnnnnnnnnnnnnnnnnnnnnnnnnnnnnnnnnnnnnnnnatgctccaagcttcttggaaggaaacttgaagaagtttctgagcccatatctctacagagtgtgcaaaaatgtgraactaatttgacagcctccttgagttcaagaaaggataggaaggagtagaaaaaawtggaaattggctgtaccctttcatgtagcagcagccatctcctgctttttttcagtacggaacttggctctaatttacaccataggagcatggaagagccataaagccacactggctggattcccttcacacagggtgttcatgcaccgcaaagccagaacaagcaactccacatcattcctccctccctctggaggtgatgtaggcaaatgtcagcagcagctcacaattgcaattctccagctgctggagcagctgcatggggccagtgccgatctggaaaatatcagaatactctt

SEQ ID NO: 75838 - DNA, 600 bp, Chicken  19866894360194_3
tggaaattggctgtaccctttcatgtagcagcagccatctcctgctttttttcagtacggaacttggctctaatttacaccataggagcatggaagagccataaagccacactggctggattcccttcacacagggtgttcatgcaccgcaaagccagaacaagcaactccacatcattcctccctccctctggaggtgatgtaggcaaatgtcagcagcagctcacaattgcaattctccagctgctggagcagctgcatggggccagtgccgatctggaaaatatcagaatactcttraatctgctttgaattatttcacaagctgaaccagctggctttactttccacagcagaccacgcttgaccctctcagacccactgtcaggattttcttttctacaactcaaatccttctgctcacagaaagaaaaccacaggtgcaggttatcttttccagaggacrgagctacaaggctgctgattaagtcagatactgaatgtgggggggagtgagggggaagattacctaggtgctgccaccagcatattttcttgtttcatgagcatatctttagcaagtgactgacagtgcttcag

SEQ ID NO: 75839 - DNA, 600 bp, Chicken  19866894360194_4
actccacatcattcctccctccctctggaggtgatgtaggcaaatgtcagcagcagctcacaattgcaattctccagctgctggagcagctgcatggggccagtgccgatctggaaaatatcagaatactcttraatctgctttgaattatttcacaagctgaaccagctggctttactttccacagcagaccacgcttgaccctctcagacccactgtcaggattttcttttctacaactcaaatccttctgctcacagaaagaaaaccacaggtgcaggttatcttttccagaggacrgagctacaaggctgctgattaagtcagatactgaatgtgggggggagtgagggggaagattacctaggtgctgccaccagcatattttcttgtttcatgagcatatctttagcaagtgactgacagtgcttcaggcactttaaccaactgctgccctcgtttagtgccaagtttgcccagatcctttgcttctgccaatcaagcctcaagtttgccttccaaagttttactcagagtaaaatgtgtagtttttgccacactcatttggaaagccatccgacagagctctcctgatcagca

SEQ ID NO: 75840 - DNA, 600 bp, Chicken  19866894360197_1
gatgtgccccgcagcacaaagcgtgccagctgccttaccactgccttacacacacacacacacacacacaggaggcagggcagatggtggcagtgggcattaatctcttctcaccacccagggaggtgtgccacagcccacagatgtgttctggagaaggcagatcctgtcccacccactgtgcagacagagaacagcccaggacaaagccagaaagtgctgtgaagcctcaccatgacttggttcccttgggaatcagcttccttcaggaggggtcccttggcaggcatctcctcatayttctgctcctgccactcgctgaacttcacagagtgctttggggtgtagctggatagatctgctgcaaggacaaagctaacgtgaacgcctctcaccaccccaaaaggaagaggggtcacgactgtcaggaacaggatggaagctgcccatctgcaggacgggcaaggaagctgttcctgctgcaggtacaaggctgtgccatgcctccagtggctgtcagttcccctgcccagagctgctggcagacactgcagcaccaacaaccccctcagcataaagggtatttctaagttctacatt

SEQ ID NO: 75841 - DNA, 600 bp, Chicken  19866894360204_1
cacttctgcttccatctgacatacagcaacattatgtaatgggatattgctgggaaggttcagcttctactgctataccatcaacatctgcctctgatgtcatgggctgacattataaaccagaaggcattactttcagagcagcccttctatttcaacaggactctaaaggcaccgtcagtgagtagagtgctgcccttctgtgggatacagatttgctaaaaataattaaaatggtagcagagaagacaaagcagattatgaggacgtttcctcaacaaacaaaatttgatgatacgytttatcatggttttgggtttgcagctacttgtaaaaatcctagattagaaatagataggagttcaccagaggtgagataactttttctgtttytttgtttcattccaaagttgaaaatacaaggccatactcagctagcaattatgtcgtgagctcagaactgtgaaaatacattcttgagataacatgtcctcccacacttttattatttttctcctttttcatgaccataattgctggcacatttcagagcttcatagctgtcataaataaaatgcaggaagtcaggtcaccaacgtc

SEQ ID NO: 75842 - DNA, 600 bp, Chicken  19866894360204_2
ctgatgtcatgggctgacattataaaccagaaggcattactttcagagcagcccttctatttcaacaggactctaaaggcaccgtcagtgagtagagtgctgcccttctgtgggatacagatttgctaaaaataattaaaatggtagcagagaagacaaagcagattatgaggacgtttcctcaacaaacaaaatttgatgatacgytttatcatggttttgggtttgcagctacttgtaaaaatcctagattagaaatagataggagttcaccagaggtgagataactttttctgtttytttgtttcattccaaagttgaaaatacaaggccatactcagctagcaattatgtcgtgagctcagaactgtgaaaatacattcttgagataacatgtcctcccacacttttattatttttctcctttttcatgaccataattgctggcacatttcagagcttcatagctgtcataaataaaatgcaggaagtcaggtcaccaacgtctgtttaccgatggataaagcaggtgaaatgcaatatattttcccacagaaagttcccgcttaaagcactttattatattttgatttcatttta

SEQ ID NO: 75843 - DNA, 599 bp, Chicken  19866894360210_1
  misc_feature (1)..(2): n is any nucleotide
nncaatttctgacctgttctggcagaggggtgttcaggatgtggttttaactgctctttgtagggagctcagctgcagtctcactgctctggagaccatgggccttctctgctgtaggaacggtgtgttgcttggcacgctgcagaagaggggaatggagcagattctctcagcctggctttttactgcaggtaaagatatacctgcctgcatttcccatggaaactgcacttgcgatgctggctttgtgccctctaagagtttacccttgggtggtatccttgagaacaggtgcagccyatggaaacagcccattttagcaaatagaatgtcttgagaaagtaatctttgagtgagaactcatgagagctgcgctgtggaggtgcacacatccaagtaaggaaaagaaggagcagcagggagctgcccacccagcccacgccatgcagcgtggccactgcacacaaacacgagtactctcttgatagatgcacaacaggcccaaaacaaagcaccagccttctccctgctgaatttcagagggtttgagcttttagccacggtgcaaacccccgtgaacctgggaaccaggaaaagcc

SEQ ID NO: 75844 - DNA, 600 bp, Chicken  19866894360218_1
atgatatgcaaagtctgctaacctcagagttattaataagtgggaccactactcactaccataagttattatggacaccacttaattgggacaatgtacatgatagcatagcctttccagtatccataggatctaaattttctcagctacttttttgaggaatattcattagtttcaatattactaattttttgttctctcaccacattgcatgactatcaaatcatgtgtagaagtttgcaaaccaaaaataatatattacagttcatttcttaatcagtatccacactttaaatctgyaattagttcttgtgaatattttgctgctccttttgtttccctttactgtctcctctgttcttctccagctttgttagaaatcacagtttcctggtgatgtctgataaataagtatatcacccagcttctaaagaaaggagggtgaagctttattttttttcttactgtatttaatatctacatttaaaaaattactttctgcatttactctctctctgacagctgagcattgagctcttaagttattatttgagatgattatgtgtgtagggtgaataagttgtcaccgaactctcaaaa

SEQ ID NO: 75845 - DNA, 600 bp, Chicken  19866894360220_1
gcaacagagctgcattaagcacactttgatttctaattgcttagacaatctggaagggaattatataaactaaaacagtcgagcagtctaatatgtttcacagatctaaccaactaaacacgtaccacatacctcagcatggctcagaccacttcaaccatttgccttagaagtcggctgaagccttgtgggcaatgctttgaagacacctctgcttagagataagtttcttatagggaaaggacagctatctgcttggatatattcacacaccctgccatcattctccattgtctatamgaactcagcagccaggggtaggcttgcaaaagtcctgagatacacagtaaaacacaaaggctgtggtcaagctaagaactagttaggcacttaaaaagcaaatcccttctttgagactattcaccagactgcttgctataaaaaaccagaattgtaaaatgtggttttcttttcattattatgcagtctcttacttattttcctttctccaaggagaaatgggtgagggaaacactgtaacttttgtttacagttcattttaattctgacctcagaggggagcacaagcaagatctagac

SEQ ID NO: 75846 - DNA, 600 bp, Chicken  19866894360220_2
agtagcaaactgcttgaactggttttttttttgaactcactgtgtaatgcagctgccatggttctctgtagccatgagggtaattgggtgaccttgtgtgcctcacagttcctcttacttgctcctctcctagccaccggaaagaagagaagaaggaaagatcagcttttccttattgtttcagtctgaccaggaaacgctcttctgagttttcttttagctgtttcttcatggcatagcaagttagtagggccttagggtctgataatattgtcctgggactatatctggaaagctcayggcctgtatggcaaaaccattgaggacccagaagtaacactgctggtttccagcccagtgcagcaaggcaaaggtgtaagcaccagctctgtttccctgcagcacgctgggctgtgcactgctctggagggcagaaggcacttcagggtccacgaagtcatctgcccaaacaacctgtgtgatacacgcagggaaaggcagctcaattcatggtgccactcacagtttactgcctacatgtaagacagaacccagttctgttcacgaagctgaaatgcagagacgcaccacctactcacc

SEQ ID NO: 75847 - DNA, 600 bp, Chicken  19866894360223_1
ttcatgctatagtgcttttctgaggagtgatcgatatatgaatggaatttttctaggctgagcaagatttggactggttttcctgaagtttttggcttcaaagattaccataaatgtatttcttcttgatcagatcctgaagtttactttcatagtttgaaggctctttgcaaaagtttctgattttttttttttgttttaaaacagattcttctcttccaaaatcaaatgtgagacaaccgtgtaagtaattcttcaacctatctcttttaagccttaaacctttgtctggtgttagaytaataaagaaaattatcttcaagctttctgaattatgtttgtgtgggtgagtttgttaaattctgggacaggagagaattctgattagtactgctaaaggcgttcccattgctctttagagaaaaggactgtaattgtatatatatttgaaaaatgaatttgggaaaacaccacttagaattgaagtcttaatgactttatttgccagtgtgtgttatttyccccaactctgtcaaggctaccacttcccaatacaagagcttcagcagcaatgccatcttaaggactttctgtacatat

SEQ ID NO: 75848 - DNA, 455 bp, Chicken  19866894360223_2
aaatcaaatgtgagacaaccgtgtaagtaattcttcaacctatctcttttaagccttaaacctttgtctggtgttagaytaataaagaaaattatcttcaagctttctgaattatgtttgtgtgggtgagtttgttaaattctgggacaggagagaattctgattagtactgctaaaggcgttcccattgctctttagagaaaaggactgtaattgtatatatatttgaaaaatgaatttgggaaaacaccacttagaattgaagtcttaatgactttatttgccagtgtgtgttatttyccccaactctgtcaaggctaccacttcccaatacaagagcttcagcagcaatgccatcttaaggactttctgtacatattgcaagcctcacttctacactgcactgcaattgctcatatcctcaattactctggcaccagcactcataggccatg

SEQ ID NO: 75849 - DNA, 599 bp, Chicken  19866894360226_1
  misc_feature (1)..(59): n is any nucleotide
nnnnnnnnnnnnnnnnnnnnnnnnnnnnnnnnnnnnnnnnnnnnnnnnnnnnnnnnnnnacctggctctggtagaaggagctcctcattttgtgcaggaaggctgggagtcaatcagctttaacaaatagccgatggcttctagagactcttgttggggtagttgtttcagcaggtcaaaggctttcatccctatttcatatgcctggagtgaaacagaaaagacaatgtaattgtgaagaatttggcttttctcaaagggtacttaaaatacctgtagagactcattgaaatggctgcrctggatctgatccaggctccaattgctcagccacctgtttcagagggtgacctgtacaagctgctttagaggggagagtaaagctgcccacagatatcatatttaggatccagtggtgcagacagaagagattaccaaccccagctcctcctgctggagagcattacctgccatctgacacaccagttcatctgaacattctgaaagccatttcaggaaaaaccagctgcaccgactcagtttgaactaaatccctcgtttcccttggtagcccttccagtgactagacattctcacaa

SEQ ID NO: 75850 - DNA, 599 bp, Chicken  19866894360228_1
  misc_feature (1)..(52): n is any nucleotide
nnnnnnnnnnnnnnnnnnnnnnnnnnnnnnnnnnnnnnnnnnnnnnnnnnnnatcattgagttcagtagcataagtggggaaaaaagcactctctagtcataggcttaactctgtactgtgctccatggttgtgtgggagacttagcacaactgctattcattctccagaagaaaacaagaagggctgcagggcattttgctgaagtttgtatgctaaggataccgactgtgtgaatgaaaattgtactagaatggatatgtgcggtttttggtggatcagtattcaggcttaccttgtrgtgaaataggtgggatttttttaaagaacagttatgtttaatttctaaactgtagttttcttgtcagaaagtacaaagtgatagctataactcaagtttaatatattggattttatatctcgtaattcaaaatgattttgtcatttgtttgtgacctcttctgttatttctaaaaagtagaaaggctgtgtgtattactcgggcattctatgtctgcatgttgacagtcatgaattcaggagaattcagctttcagtatgtgttctatattagtctactgcaaaatgtagaaggttgac

SEQ ID NO: 75851 - DNA, 599 bp, Chicken  19866894360229_1
  misc_feature (1)..(131): n is any nucleotide
nnnnnnnnnnnnnnnnnnnnnnnnnnnnnnnnnnnnnnnnnnnnnnnnnnnnnnnnnnnnnnnnnnnnnnnnnnnnnnnnnnnnnnnnnnnnnnnnnnnnnnnnnnnnnnnnnnnnnnnnnnnnnnnnnnnctgcagtatgaacatcttttaaggctgctgttcttctctcctgaatggcttctctggtttatttcacagtcattcctgacagtgtgattttcattaaggtgatggcgtgaccttgtttatcagccaatctctgagcacactaaatacatggaatgtgtgaaaaactgtrtttttttcctggtctgaaatgtcagctttttctagaacagcatatgttaggtgcggtttcctgggggatgtaatgatttaagtaactgaccatttcataaacaaatgtttgcatcttcccagaatctgcagaaggaaacatttacttttgtgcatttatgttccaaacacgctttgctttttctccgtagcagcatttgattgtgtggtgaaatagtcttcacaagattctgctgatcagcccttttttgctgtgttttatataattttaaaagccggcttgctgccatggtgagctgg

SEQ ID NO: 75852 - DNA, 600 bp, Chicken  19866894360231_1
ttaattaatgctaggtgctttccagctggaggaagcagggcatccctcagctcagcacacagccaaaagatactgggaggaaacacggggagagcagggaaatggggcagcttcttgtatgtgtgaccaaagtaaagggtctctgtgaaacttctgaaaaagaaacatggtcttgcagtgcgttctcagcactccaggggagcctccctctggtcctacagacaggtgacattaaatgtgcttcttattgaaaatcccttggttctgccaactgcaataacaaaaccattcttggttttktttttgccaaggggaaaggattaatcttccttatgctgtgccacggacactttctcatcagggagatgggcccttgaaggggattttaaaacaaatggaatgactgtraaggagagggctacagcctgtcctcctacaaccacttgttcctccagtaccttctgtgcaagctcagtccaaatcagactgagctgctgaaacccctttatattcattcagctgagcaacagcagcagctctggtgcagtccaccctttcctcctctaatctttactgtaccacattaccattatgaggaat

SEQ ID NO: 75853 - DNA, 600 bp, Chicken  19866894360231_2
agcttcttgtatgtgtgaccaaagtaaagggtctctgtgaaacttctgaaaaagaaacatggtcttgcagtgcgttctcagcactccaggggagcctccctctggtcctacagacaggtgacattaaatgtgcttcttattgaaaatcccttggttctgccaactgcaataacaaaaccattcttggttttktttttgccaaggggaaaggattaatcttccttatgctgtgccacggacactttctcatcagggagatgggcccttgaaggggattttaaaacaaatggaatgactgtraaggagagggctacagcctgtcctcctacaaccacttgttcctccagtaccttctgtgcaagctcagtccaaatcagactgagctgctgaaacccctttatattcattcagctgagcaacagcagcagctctggtgcagtccaccctttcctcctctaatctttactgtaccacattaccattatgaggaatgaagagttgtacggctcccagtacagcacagaacatttagaagcccacgaggacttggtttgtgagcagctatttctgcagtttctcttccccctttccagaaacaaa

SEQ ID NO: 75854 - DNA, 600 bp, Chicken  19866894360233_1
tcattttattttccacaaaacaagcacactgcatgtttgttgaggaagttgctaataaataacataattatgttactaatagatgacaatttgatatgttgtaagtaatctgacatctaaccttaatgtttcacttgtaaattcatctaaaaaaccaaaatgttgtttctaccttattttcagaagtctgcaaaactgatacaataatctgccaaattcataacaaatacatttatatgatttttttttcttgtgagaacccttaatgtttatgctatgagtactccagcccaacactcyatggttcggatcttactagtgtatccagagaagaactatctaacaggaacacatagtaaaggtagagtcatttggttctaattatctcactggcatgtgcctcatcctgtgcataacctccaacgctaaaaagcaccatgtcacatcattacaatttagacatgaagagtgtctacttaattttgttatacttttatcgagtctacagaaacatgcactatatgagagaagctactacaccagactgacaaactcattccttgcagttatattaacacaaagctacaccaagaatcctcc

SEQ ID NO: 75855 - DNA, 600 bp, Chicken  19866894360234_1
aaatctgaaaatacacatatttttattgtcatagacactgaagtgcttttattctttatcctgaactccagcagtaaatagcacagtgaaagacatcgaaagtgctccaccatttgtcagaaagcaaagccacattctaagaactccatctgctgttggagcaacaagtagtgatgaggaaggacccaccaaaaaatttactaaaaaaaaaactactcaatagcctaggttggttttggttggttgttcgcctgtttttttccactttttatggtgattttgtaatttattttgcaccgsggaagcaagttcccaatccacagctataaaaggataaagctgcagtgtaaactacttattcagcagttctcctttgaatcycatcctcccctccccaaagacttctgtcctttccactagtgagagccacagagactccaaagccttaccacacatctatccataagacttcaaataataaactagcttttgataccagacagtgcaggacattctaatttttcgcatgagagatgctcaggaaagaaaagggcttgactaagacactgttccagcagcttcactttattagctgtcctt

SEQ ID NO: 75856 - DNA, 600 bp, Chicken  19866894360234_2
cacagtgaaagacatcgaaagtgctccaccatttgtcagaaagcaaagccacattctaagaactccatctgctgttggagcaacaagtagtgatgaggaaggacccaccaaaaaatttactaaaaaaaaaactactcaatagcctaggttggttttggttggttgttcgcctgtttttttccactttttatggtgattttgtaatttattttgcaccgsggaagcaagttcccaatccacagctataaaaggataaagctgcagtgtaaactacttattcagcagttctcctttgaatcycatcctcccctccccaaagacttctgtcctttccactagtgagagccacagagactccaaagccttaccacacatctatccataagacttcaaataataaactagcttttgataccagacagtgcaggacattctaatttttcgcatgagagatgctcaggaaagaaaagggcttgactaagacactgttccagcagcttcactttattagctgtcctttcttctttaagtcacctcttaaatttatgagctttcaagttggtgcagatttttacgagcacagcatgcaggctcttgttc

SEQ ID NO: 75857 - DNA, 600 bp, Chicken  19866894360235_1
ctctctgaatggataataaatacgtctgacccaataatccaagtgttatctgtgtcccagctacctacgacacagctacgcacccgatgtaattttaataacagaagaccacaaagagcaatggagcacaatggtgaaggcagacaagggaacattgattttcagatcgcattctgctataaacatcaatctgctggtggcttatctgaaatataagcagacgcaagtgtagcaaaggagcctgaaagttcatgtgttttggctgagcagccctcaacgcgccaaccccagtgagtcccrcatgcaggctgcctctgcagacacaaacaaatattcttcattcaggatcaatgcgccttcaactgcccatacactaattgcagaagctggattttgacagcattcgtgcacatgtggtgctacacaggctcctgcctgcaggcagaaaactgaaacctcatttagcacagataatagcactttaccttaaggaatctactgaactcatgctccataaggtaagttccagcacctgagtgcctgcagctcccacggactttggcagtccccggaagctctgcaagatcagctgctgcgagc

SEQ ID NO: 75858 - DNA, 600 bp, Chicken  19866894360236_1
acacgtttgttacatgtggagagattttgattttcttttcttaatagctttcttttcatacagcttttgcctgatgatgttatttgtactgcacttctaattctggttgtgtttgttaacatatggaaacctacagctgttcttttgaagagacagttcagttttattaagatttgagtattctctggtatatatttttaactcttttcgtaggttattgagatctccttaggcttaacagttaatttactatgaagctgtagttatctggtagtgttactgatagctcttaaaggaggrtgcctgatgcaatgtaatttaaggtgtgcaaagtaatttcaatcaacaattcctgtaattttctaccggagaggttttggcaaatggagactttatgaagaaggtgtggtgagtgcaagatttggtccctatcctctgcttaaatgatgtaagggatctgcaggaagacaaggccactgttgaggcagcacacgtgcaccttgttttggccacctcactgtgtccatttctcagttctgaagccctcttttttagttttagccaggacttcttcccgtttttagctgcttgtagaaagtt

SEQ ID NO: 75859 - DNA, 599 bp, Chicken  19866894360265_1
  misc_feature (1)..(154): n is any nucleotide
nnnnnnnnnnnnnnnnnnnnnnnnnnnnnnnnnnnnnnnnnnnnnnnnnnnnnnnnnnnnnnnnnnnnnnnnnnnnnnnnnnnnnnnnnnnnnnnnnnnnnnnnnnnnnnnnnnnnnnnnnnnnnnnnnnnnnnnnnnnnnnnnnnnnnnnnnnagcagaataagtcaacatctgaattttgtcctcatcacttttttatggcatttggtgatgtttaccttgacaaacagattcttctagcccaaattgttgtaggagagagatttttgtctttaatttttctaatttgtgataactaraaggcctgatgaaggaacatgttgaaaaaaatcttcttggccctattgcccagaattagaacagaacagaggttcacccagatgaaactacactgattagataggaaagtggtaatgtatctgatcttaccttagaakattccatagcagatttcatatccagaatatatttgacttttgtccatattacaaagaaaaggtagcttctgccaggggaggccttcagtttttccatctgttgtgggaagaatttacttttgtgtgatctgtcagatcctactttatcaaacctcccttat

SEQ ID NO: 75860 - DNA, 599 bp, Chicken  19866894360265_2
  misc_feature (1)..(16): n is any nucleotide
nnnnnnnnnnnnnnnnagcagaataagtcaacatctgaattttgtcctcatcacttttttatggcatttggtgatgtttaccttgacaaacagattcttctagcccaaattgttgtaggagagagatttttgtctttaatttttctaatttgtgataactaraaggcctgatgaaggaacatgttgaaaaaaatcttcttggccctattgcccagaattagaacagaacagaggttcacccagatgaaactacactgattagataggaaagtggtaatgtatctgatcttaccttagaakattccatagcagatttcatatccagaatatatttgacttttgtccatattacaaagaaaaggtagcttctgccaggggaggccttcagtttttccatctgttgtgggaagaatttacttttgtgtgatctgtcagatcctactttatcaaacctcccttatgtaggattcccatccaataattttgaagcatggagttctttatggattgactgggtwaaccagtcagattttctttcttaattcatatattttcctaatgctactatttaaaaagtattaattacttaataatcattt

SEQ ID NO: 75861 - DNA, 600 bp, Chicken  19866894360265_3
tagaacagaacagaggttcacccagatgaaactacactgattagataggaaagtggtaatgtatctgatcttaccttagaakattccatagcagatttcatatccagaatatatttgacttttgtccatattacaaagaaaaggtagcttctgccaggggaggccttcagtttttccatctgttgtgggaagaatttacttttgtgtgatctgtcagatcctactttatcaaacctcccttatgtaggattcccatccaataattttgaagcatggagttctttatggattgactgggtwaaccagtcagattttctttcttaattcatatattttcctaatgctactatttaaaaagtattaattacttaataatcattttaaaggttaaatattaatattttccttgcctatccacaaacagatcaggtttttcatgcactgtagtacttcttacacccctttgacaaggaagtcaagrcacacagcatatgcgagattctatttttttctatattcatccttggtgaatctagatttgcatatttgaactttgagacttataaaaacaagtttgttatgagcacagaaaacagaaac

SEQ ID NO: 75862 - DNA, 501 bp, Chicken  19866894360265_4
gttgtgggaagaatttacttttgtgtgatctgtcagatcctactttatcaaacctcccttatgtaggattcccatccaataattttgaagcatggagttctttatggattgactgggtwaaccagtcagattttctttcttaattcatatattttcctaatgctactatttaaaaagtattaattacttaataatcattttaaaggttaaatattaatattttccttgcctatccacaaacagatcaggtttttcatgcactgtagtacttcttacacccctttgacaaggaagtcaagrcacacagcatatgcgagattctatttttttctatattcatccttggtgaatctagatttgcatatttgaactttgagacttataaaaacaagtttgttatgagcacagaaaacagaaaccacaataacatacagatcatttcaataagaagaaaagatttcttcggaatgtaatcattaactacagcataaaaacaaccac

SEQ ID NO: 75863 - DNA, 600 bp, Chicken  19866894360270_1
tttctgttaaatgctgtgtaactgctcaaaaggaaagactttttttttttaatgacattctgacattaatatgttgctctgccctgtgtctgcttcctgactcttcaacccctttttctgttctcagtatctgtagtctgtctactgttaaccctattcctatactgcatcatgaagactgcacgtgcctgtagcaacttgtgagaacatcgtgctgtctttagcaaggcaagactaggaaacatctatggaacagaacagcaaagtcaagagaaaacacaaaactttgtcgttgctggygtgaggaatgtgattttggaaactgcttagctttttcctttcttttccttccagctcattcaactgacttttcattaggggtgtaattgactgaacttgcccactctgcatcacaagaagaacagttaaacatattgaaaatatcttaaaaatcatgatgtgcaatctaataaagggatgggcagcrtagttccaattggtcagggaaggcagaacagagaaagggacatctgggtagatgagttcctggtgccggtggggtcaggtgatcgctcctataccacagcctgtctgctgctt

SEQ ID NO: 75864 - DNA, 600 bp, Chicken  19866894360270_2
cctgtagcaacttgtgagaacatcgtgctgtctttagcaaggcaagactaggaaacatctatggaacagaacagcaaagtcaagagaaaacacaaaactttgtcgttgctggygtgaggaatgtgattttggaaactgcttagctttttcctttcttttccttccagctcattcaactgacttttcattaggggtgtaattgactgaacttgcccactctgcatcacaagaagaacagttaaacatattgaaaatatcttaaaaatcatgatgtgcaatctaataaagggatgggcagcrtagttccaattggtcagggaaggcagaacagagaaagggacatctgggtagatgagttcctggtgccggtggggtcaggtgatcgctcctataccacagcctgtctgctgcttgtattcctcaagcccccgtaactgtaaattatagcctgaactcccgaggcattacagctctccctcaagagaggtgttgtcttaaatactgtgcaaaggacactatagctactgaatttatttccttacttatgaataaataagagacaaaatattctactgtcttcctgatggtagtgagaggaaa

SEQ ID NO: 75865 - DNA, 600 bp, Chicken  19866894360274_1
atatttcagcaatgtaattgagcagacatatgttcaaaatgactttgggtaccaaaatagtgcctcagcactctgaaggcactgaagtcttaaatccctgcttgcaatgtggggtctcctgcccaaatagagattgagttgtcctgaaaatcccctaggtgctcccatctgtgccccaaatgactctgggcaggtagaatgtccttagcctggacaggtgggatgtgcccaacatgggcaggtaggatgtacccacctgcctcttccatgggtgatgctctgaacacaggcaggataggrcagggaaactatttaggtctctggctcccaggaggatggagaaattcaatttcctacccttacttgggctagctcatggtacacctattccttgcctttctaatcagtgaattactacttaactaatcagcaaattatttgaccaaaaaatagttttgaattcaatttacgaggagcctgaattcccccatggttttgcagaggacatacccaggtaccaaaacctggttgaaactctgcctgcttccatccttccctctgcaggcagcagctaaagcaagtaaaataataacaatacaa

SEQ ID NO: 75866 - DNA, 600 bp, Chicken  19866894360277_1
ggaacaaaaaatgaacataaaccgccagctacagctaaacacactgaaatctacagaacctgcctacataaatgtgtgtcggtattgggaatccttctgtgcaataaaaagcagtgtatttattgtatttatctgctagtcagatgtgctaagggtttaaccagcatctttttctttagaaaataagaaaaaaccccaacaaatacaacacaagattaaaatgacttcagataaaagctttatacttattttaattagtaactgaaatcactaccactgatttaaatgaatatctcacakgggagctgcagataatttcttctctttctggagcagaagagaacgtaaacctgaataasgtrtcataattcatagacagcctttgtgaactggaaggcactgatgagctgcattgtgcccttatcaaggaattagttggactgcgtctgtatgggctttctggagagattaaactgcaagctggttttaaaatcttctaaatcatctaaaggcaattaaaaaaccaaacacagtgacttgagagtctaagttcccttgattttcagtaagacagaagcttcttggtctcttagacatttg

SEQ ID NO: 75867 - DNA, 600 bp, Chicken  19866894360277_2
ctgcctacataaatgtgtgtcggtattgggaatccttctgtgcaataaaaagcagtgtatttattgtatttatctgctagtcagatgtgctaagggtttaaccagcatctttttctttagaaaataagaaaaaaccccaacaaatacaacacaagattaaaatgacttcagataaaagctttatacttattttaattagtaactgaaatcactaccactgatttaaatgaatatctcacakgggagctgcagataatttcttctctttctggagcagaagagaacgtaaacctgaataasgtrtcataattcatagacagcctttgtgaactggaaggcactgatgagctgcattgtgcccttatcaaggaattagttggactgcgtctgtatgggctttctggagagattaaactgcaagctggttttaaaatcttctaaatcatctaaaggcaattaaaaaaccaaacacagtgacttgagagtctaagttcccttgattttcagtaagacagaagcttcttggtctcttagacatttggggtgaagtatgcctataattccatgtaaccccagtttaccaaattcagacaaataaaa

SEQ ID NO: 75868 - DNA, 600 bp, Chicken  19866894360277_3
cctacataaatgtgtgtcggtattgggaatccttctgtgcaataaaaagcagtgtatttattgtatttatctgctagtcagatgtgctaagggtttaaccagcatctttttctttagaaaataagaaaaaaccccaacaaatacaacacaagattaaaatgacttcagataaaagctttatacttattttaattagtaactgaaatcactaccactgatttaaatgaatatctcacakgggagctgcagataatttcttctctttctggagcagaagagaacgtaaacctgaataasgtrtcataattcatagacagcctttgtgaactggaaggcactgatgagctgcattgtgcccttatcaaggaattagttggactgcgtctgtatgggctttctggagagattaaactgcaagctggttttaaaatcttctaaatcatctaaaggcaattaaaaaaccaaacacagtgacttgagagtctaagttcccttgattttcagtaagacagaagcttcttggtctcttagacatttggggtgaagtatgcctataattccatgtaaccccagtttaccaaattcagacaaataaaaatg

SEQ ID NO: 75869 - DNA, 600 bp, Chicken  19866894360280_1
tcatcaagcacagttccttctttttttatttttaatatttttgaacatcagtgtgagaagaagtgcaaattccttccacatagcatggcatgaaagcacggggactccattgctatgagtatttagaacatgctttttatatatatagaccagggggcaagaggctggagagagccctgtagaaagggatgtgggggttctgtcaagttaaacatgagccagcagtgtgccatggcagcccaaagggccaaccgtgccacagcgtacgccaggcccagcactgccactgtgtgaggggaygggctgctctctgtgctccgcgctgtgaggcctcacctccagcactggttttggtttgggtcccacacagttagaaggacataaagctatcagggagtgtccaaaggagggctacgaagatggtgaggagtctggagggcaaggggtgtgaggagcggcagaggtccctgggtttgttcagcccagagcagaggagctgaggggaggcctcatggcggctgcagctcctcacagggagcggaggggcagcgctgagctctgctctctgtgacagcgacagggcccgagggagcgtttgca

SEQ ID NO: 75870 - DNA, 600 bp, Chicken  19866894360281_1
ccgggttatacagtgaagaaatgtacagtagaagtacatccagagcactaactgcatctagaattggtttcagctgcatcagttctttcacatggctcatcatttgcactaatgctggcaagagaatctgtggctgggggatggatgggggcgataacattccatatagatttaggggcacttgaatcaagttgtcattatggactaaataaatctatatgactttataaaatcttatattttaagtataaaaaaggcttagtatggaaaagtgcatcatgtcaagatgtttatcttctsatatttgtcttcattactattatactatgcctttaatgtcttccccagtgctmtgaatttcatatttttataattacttggtgttattattaatatttttccattttctgatgtctgtgcactcagacaggttttaagctttaagaacaacaacatatatttatattatatgtaatgatatgtttattatgcatataatgacctcatatgcctcagttgaagaaacctagagtaacagttttctttacttgattgaactgtgtaacttctagaaataccagtccttggtaaagctatatg

SEQ ID NO: 75871 - DNA, 600 bp, Chicken  19866894360281_2
gcatctagaattggtttcagctgcatcagttctttcacatggctcatcatttgcactaatgctggcaagagaatctgtggctgggggatggatgggggcgataacattccatatagatttaggggcacttgaatcaagttgtcattatggactaaataaatctatatgactttataaaatcttatattttaagtataaaaaaggcttagtatggaaaagtgcatcatgtcaagatgtttatcttctsatatttgtcttcattactattatactatgcctttaatgtcttccccagtgctmtgaatttcatatttttataattacttggtgttattattaatatttttccattttctgatgtctgtgcactcagacaggttttaagctttaagaacaacaacatatatttatattatatgtaatgatatgtttattatgcatataatgacctcatatgcctcagttgaagaaacctagagtaacagttttctttacttgattgaactgtgtaacttctagaaataccagtccttggtaaagctatatgctgcctctccatacgtctgaattttagagtgaaagtgtgaaataacatttgac

SEQ ID NO: 75872 - DNA, 599 bp, Chicken  19866894360282_1
  misc_feature (1)..(32): n is any nucleotide
nnnnnnnnnnnnnnnnnnnnnnnnnnnnnnnnaatatgctatcattagctataagtaccccagcatattcaattcccactgttataaacttacaaagattgcctatacacttgtctgttattcttgttggcagcaagattaaaaggtgtataaagaggggaaaaaaaataaagagcagtgcttacctcattccctttttagccagttttctagctatcctaattagaacctgcagtgaaaaaatccaggaaacagagtaaaaataactttaaatgcaattaattcaatatttcttctccrgtatcaaccccaggaaagatactgaggtaaagttagaacagcctgttcagaagctcagcatcacccaacttagctggaacttctcatcaaaagtgaatgtaaagaaataacattgagatgaacacaatcaacgtagttcccttctttcctgatagaaattcctcagawtttttaaacamgttgctagcatttgttaattagttttaaaatattttcatctatcaactgtactcacagctactagatggctttgctgtattttttcctctatattttctagtctacaacacaaatagcta

SEQ ID NO: 75873 - DNA, 600 bp, Chicken  19866894360282_2
taaagagcagtgcttacctcattccctttttagccagttttctagctatcctaattagaacctgcagtgaaaaaatccaggaaacagagtaaaaataactttaaatgcaattaattcaatatttcttctccrgtatcaaccccaggaaagatactgaggtaaagttagaacagcctgttcagaagctcagcatcacccaacttagctggaacttctcatcaaaagtgaatgtaaagaaataacattgagatgaacacaatcaacgtagttcccttctttcctgatagaaattcctcagawtttttaaacamgttgctagcatttgttaattagttttaaaatattttcatctatcaactgtactcacagctactagatggctttgctgtattttttcctctatattttctagtctacaacacaaatagctaaatataatgtagtttagtcctacagaatactgtacactgtatttcagtaagtttccgagttatgtctggctgagtcctcagcagcaygtcaacacacacggactgtgaacatacctgtttgacctcattaatggcaattaacatcagagagtatttgaaatcatactta

SEQ ID NO: 75874 - DNA, 600 bp, Chicken  19866894360282_3
gcttacctcattccctttttagccagttttctagctatcctaattagaacctgcagtgaaaaaatccaggaaacagagtaaaaataactttaaatgcaattaattcaatatttcttctccrgtatcaaccccaggaaagatactgaggtaaagttagaacagcctgttcagaagctcagcatcacccaacttagctggaacttctcatcaaaagtgaatgtaaagaaataacattgagatgaacacaatcaacgtagttcccttctttcctgatagaaattcctcagawtttttaaacamgttgctagcatttgttaattagttttaaaatattttcatctatcaactgtactcacagctactagatggctttgctgtattttttcctctatattttctagtctacaacacaaatagctaaatataatgtagtttagtcctacagaatactgtacactgtatttcagtaagtttccgagttatgtctggctgagtcctcagcagcaygtcaacacacacggactgtgaacatacctgtttgacctcattaatggcaattaacatcagagagtatttgaaatcatacttatttcatctaga

SEQ ID NO: 75875 - DNA, 600 bp, Chicken  19866894360282_4
tcaaaagtgaatgtaaagaaataacattgagatgaacacaatcaacgtagttcccttctttcctgatagaaattcctcagawtttttaaacamgttgctagcatttgttaattagttttaaaatattttcatctatcaactgtactcacagctactagatggctttgctgtattttttcctctatattttctagtctacaacacaaatagctaaatataatgtagtttagtcctacagaatactgtacactgtatttcagtaagtttccgagttatgtctggctgagtcctcagcagcaygtcaacacacacggactgtgaacatacctgtttgacctcattaatggcaattaacatcagagagtatttgaaatcatacttatttcatctagagttgtttagaattcaaattcaaaatagtttagaaggtcacccagcctggaataatggcttttcagtttatacatcagagggaggcaggtaccaacatttccttattaatcactctgagtccagtttccgtcacatatacttatatcacaagaagcaacattaagattaaaatatatatatatatatatatatgtatatatatatata

SEQ ID NO: 75876 - DNA, 600 bp, Chicken  19866894360286_1
gtatataactagattgcaaaatccaccagtttttgagcttatgtcctctgcctaaccttaagcatgctgctaggatcttctcaagcaccatctctgtacagttccttgcaaaagcttttactcacctcatctgcaattagcagctgcttttgaggcaactgtgcaagtggtatgcacacagaccaaggaaagaggacctgcctcatccaaaatagtttcaatcaactattgcagccccactgcaacagacatgatcccctctcccttccacgcaagtctttcagtaccaacttgaattcyttcctatttcagcagtcacccacaatttaaaaccattcaaagctttgcatctgcttgcttgcacaaaggctaccttcaagtgatctttccaaactgctacacccaaataygcctcactaagctasatctatgggactaaaaacaggatgcacatcagcaacttagctcaacaaatatttcatgccatcagaggctaaggttgttcactgcaagasaactgcaaaataaccagctttgaatatgacttytaggagctccctaatagtgtgtccacaagcaaaagtgcctgtacctacccca

SEQ ID NO: 75877 - DNA, 600 bp, Chicken  19866894360286_2
aaagcttttactcacctcatctgcaattagcagctgcttttgaggcaactgtgcaagtggtatgcacacagaccaaggaaagaggacctgcctcatccaaaatagtttcaatcaactattgcagccccactgcaacagacatgatcccctctcccttccacgcaagtctttcagtaccaacttgaattcyttcctatttcagcagtcacccacaatttaaaaccattcaaagctttgcatctgcttgcttgcacaaaggctaccttcaagtgatctttccaaactgctacacccaaataygcctcactaagctasatctatgggactaaaaacaggatgcacatcagcaacttagctcaacaaatatttcatgccatcagaggctaaggttgttcactgcaagasaactgcaaaataaccagctttgaatatgacttytaggagctccctaatagtgtgtccacaagcaaaagtgcctgtacctaccccataggatgctgcattatgtagaggtattaatccacctttgtcctgggcattaacatcagcaccatgctcaagaaggtattcagccacttccaaattgttgtaaccagctgt

SEQ ID NO: 75878 - DNA, 600 bp, Chicken  19866894360286_3
ctcatctgcaattagcagctgcttttgaggcaactgtgcaagtggtatgcacacagaccaaggaaagaggacctgcctcatccaaaatagtttcaatcaactattgcagccccactgcaacagacatgatcccctctcccttccacgcaagtctttcagtaccaacttgaattcyttcctatttcagcagtcacccacaatttaaaaccattcaaagctttgcatctgcttgcttgcacaaaggctaccttcaagtgatctttccaaactgctacacccaaataygcctcactaagctasatctatgggactaaaaacaggatgcacatcagcaacttagctcaacaaatatttcatgccatcagaggctaaggttgttcactgcaagasaactgcaaaataaccagctttgaatatgacttytaggagctccctaatagtgtgtccacaagcaaaagtgcctgtacctaccccataggatgctgcattatgtagaggtattaatccacctttgtcctgggcattaacatcagcaccatgctcaagaaggtattcagccacttccaaattgttgtaaccagctgtagaaaataaacagga

SEQ ID NO: 75879 - DNA, 600 bp, Chicken  19866894360286_4
tttcaatcaactattgcagccccactgcaacagacatgatcccctctcccttccacgcaagtctttcagtaccaacttgaattcyttcctatttcagcagtcacccacaatttaaaaccattcaaagctttgcatctgcttgcttgcacaaaggctaccttcaagtgatctttccaaactgctacacccaaataygcctcactaagctasatctatgggactaaaaacaggatgcacatcagcaacttagctcaacaaatatttcatgccatcagaggctaaggttgttcactgcaagasaactgcaaaataaccagctttgaatatgacttytaggagctccctaatagtgtgtccacaagcaaaagtgcctgtacctaccccataggatgctgcattatgtagaggtattaatccacctttgtcctgggcattaacatcagcaccatgctcaagaaggtattcagccacttccaaattgttgtaaccagctgtagaaaataaacaggaaattgagtattaggagaggttcagcaaacaaaaattgtaaggcagcgaaactaaagcattttttcaactgcaaaagctcttttttcctag

SEQ ID NO: 75880 - DNA, 600 bp, Chicken  19866894360286_5
acatgatcccctctcccttccacgcaagtctttcagtaccaacttgaattcyttcctatttcagcagtcacccacaatttaaaaccattcaaagctttgcatctgcttgcttgcacaaaggctaccttcaagtgatctttccaaactgctacacccaaataygcctcactaagctasatctatgggactaaaaacaggatgcacatcagcaacttagctcaacaaatatttcatgccatcagaggctaaggttgttcactgcaagasaactgcaaaataaccagctttgaatatgacttytaggagctccctaatagtgtgtccacaagcaaaagtgcctgtacctaccccataggatgctgcattatgtagaggtattaatccacctttgtcctgggcattaacatcagcaccatgctcaagaaggtattcagccacttccaaattgttgtaaccagctgtagaaaataaacaggaaattgagtattaggagaggttcagcaaacaaaaattgtaaggcagcgaaactaaagcattttttcaactgcaaaagctcttttttcctagtaaccatattaacaatatggttacaggtgccag

SEQ ID NO: 75881 - DNA, 546 bp, Chicken  19866894360290_1
gcccatcattttttgttattccccatgatgacccttctatccttcctccttccctccatttccataatgagccatttccatagtgagccatttcactttccttctttctgttcccacattttccttctcttgagctcttgcttcaagatcttgaactcctatgttccttggttcctcctgtatttttttccccagcttctgtcctctcccttatccttgtattacttcccactcaaactgtatctttccaaacagtactccgtcacattcctgggataggtgatggacttatggcctcargctgcaccagggaaggttcaggctggatgttaggaaatactacttctctgaaagggtggtcaggcactggaatgggctgcccagagaggtggtggagtcaccgagcctggtggtgttcaaagagcgtttggacgttgtgttgagggacatggtttagcgggaaccattggtgaagggcgaatggttggactggatgatcctgtgggtcttttccaaccttagcgattctatgattctacaacaggt

SEQ ID NO: 75882 - DNA, 600 bp, Chicken  19866894360304_1
accaaggtttttcaaagcctatgtctgtgtgacagtactggcaactcagttcatctatcaaattagtcagtgaaggcatgtctcaattctacactggagatacctgtatgtttttaattttgattgtggcaattccatatgctggaaaaaggatttgaaattatcagacttagatattgtattggcttttcttaatgaattggatatgaatattttgtgatgccatccaggcctttgatgaactttttaaatttaaagttaacagacatcttgtgtacctaagaatcactactacaaaartaaggagacttggaaagcaagaataaacatcaatacttgtaaatacagcaatgtagctttttcttgaccttgatttcttgatctctgccaggtactggtatagtctgtggtttggggccaagatttgtgtcacgcggctcatagatctgttttgtagacctgtgcaggacactcacagctcatttctagccttggatttgttccttgcttaggagaattggggataaaggcagcagctcatatattcatcttacagttaactaaataggtctactgatgatttccaatcatttttttctt

SEQ ID NO: 75883 - DNA, 600 bp, Chicken  19866894360304_2
ttgcttaggagaattggggataaaggcagcagctcatatattcatcttacagttaactaaataggtctactgatgatttccaatcatttttttcttctgctcacctgcatgtatgtaatttaccatcatcaagaactatcacaagaaaagaagacaaaagctcattcaatcctttttcacaaatagttctgtaagtaaattcccttgggtaaacttgatttgaacaggaactaattatatctcttcagtaaacaggaagagacggacaatcaagaatgcttcagctctgtaactggagcrcctttgaatcatggaggtttttttaggaagagcacatcctcttttcctgcaaggcttatgtagttatttggtcttatctagtttacaaggctgcttcctctgttttatcctgaggacctggttactttcttcttttacacctccgtgttctttgcgtaattttcatacctcatatctgtttgttctgtgagcaatctgggggtttatccttctaaagaaggacaaatctgtcatgtttatacaaattaaactggtataggaatctgaaaatctggttcaacatttttacatcatcagtaa

SEQ ID NO: 75884 - DNA, 600 bp, Chicken  19866894360306_1
ctaggcgaaaggtagttggtgaagctattaagtcctgtaggcttccccagggccactttctttataactccaagatcccttgagcaaccaggaaaacaaacaaatcagcacattctttttcagtaaatgaggaaatcgatgtctgcagctaaagttctaatgaagcaaaacgaactgttttggaattcaggaaaattatgtaggtaaaaacagacaaataaccccaaatgacattggtcaagcacatctgtgctcaggctaaactaaattcactgaatgtacagtggtatacacagcccyaggttttatgtctgagtctgcagttggtctcctgtggtatttaaaactcagatctccatcattaaaaaaaatccatggcactaaggaaagtgacctgaggaacaggaaatggagaatggattagggattgccattactgtaactgtttcagtaagctttctacggaggtgttattttgtccagagagaaagagtcagagattctgtcccggataaccttcaggaagctcttgctgttatcaagtgccataagcttaaaggacttgtctgttcccaaggccttctggtgtcccaagaactc

SEQ ID NO: 75885 - DNA, 600 bp, Chicken  19866894360306_2
aaactcacacttaaaactggccacaatggaaaacactataactaagtttcagggaccaccagggaaacacctagctttggagaacccaccagtaccaccatgtgaagaattgcatttgtaggagatatttcgatagccaccagtggaaagctgtcctagccacatgtgaggaggccattgaacttggagtcactggagatgctctgcactaccacagcaactggatcgatggggtcagggttgacgtgtctgccctcggtgcccctgctctgtatcacagatactcacaatgtgcctccrttgttgagtgaggcygagcttttctggcgcaggaatgccttcgcactgctgaatgccgagggctgggtttgctccaaagtggccttcaaggggtggaagagtgacactggtccgggctgtgaagaacaaaggatggttgtaagagatggagctgagtgtggagaggtcgcactgcgctaaccaagcatccccctgcacccccggacttgctgagtgcaatgcaccagtcactccagtgagaactgcccactgcttgagaagcagctgcaggacagggaggacacggagtggcatccccag

SEQ ID NO: 75886 - DNA, 600 bp, Chicken  19866894360306_3
actggccacaatggaaaacactataactaagtttcagggaccaccagggaaacacctagctttggagaacccaccagtaccaccatgtgaagaattgcatttgtaggagatatttcgatagccaccagtggaaagctgtcctagccacatgtgaggaggccattgaacttggagtcactggagatgctctgcactaccacagcaactggatcgatggggtcagggttgacgtgtctgccctcggtgcccctgctctgtatcacagatactcacaatgtgcctccrttgttgagtgaggcygagcttttctggcgcaggaatgccttcgcactgctgaatgccgagggctgggtttgctccaaagtggccttcaaggggtggaagagtgacactggtccgggctgtgaagaacaaaggatggttgtaagagatggagctgagtgtggagaggtcgcactgcgctaaccaagcatccccctgcacccccggacttgctgagtgcaatgcaccagtcactccagtgagaactgcccactgcttgagaagcagctgcaggacagggaggacacggagtggcatccccagtacctggcacaggcc

SEQ ID NO: 75887 - DNA, 600 bp, Chicken  19866894360307_1
gggtaagtagccaaggttttggttttttttctcccactgaatcattccaaatttctaatgatgtccttgggtttggactttctagagtattttattttggaataattaccaagtgttcacaatccctgcaggctttagcaagtacaatcttgggttttacagagaggcagactgatgtaacacctagaaaacatatattcaggatggtgaacaattacctgaattcaaaattaaagctggatgagtatgtaccacctgaaatccatggcttcatttaaaaaagcagctgttaacacttartgtttgataaggaagtctaagacttcagtttaccatgaaaataaatgagtagcacccccgtattaagaatttggcagcagtgacgaacactgacttttaacatgcatactattatgcgattataaaatattagcacaaacaaaatctttgccacaaacacatcttgttcactttggtcaccttcactttgggaatcctacacagaatagcctattttgaaagccaattaaattgctttcaattcagctgagagaaagaaagtggtagttcgttcaaatggcctatttggagaaacttcag

SEQ ID NO: 75888 - DNA, 600 bp, Chicken  19866894360307_2
caaaacaccagtttaacagaggagagaatcaaacctttcagttgttacaccttctgtcaagtgactagactaagtcactttaattgagttcctctcgctttcattgtgcagaaacaaaggaggaataaaatgagatcaaatagcccttatttggaaccaatataattacgttccctggagagaatggcaagcctgagattactgaaaggagatagattctgaatatataaacttgacaacaatgatactacagtgttttaataagaagaaaataggatataaagagtattttgtaacctktcatcattttgtaaccaaagtagctggtgtacattccagtgtccttttcactgttacatacgtcagttacgtttgcctttgatttcagcttgtagaattatgctgcattcacacattacttaaaaaatgtttctagcagaatgcagtagtttggaaatttttcattttctaatgaaatatcaagaattgttttctagtcttgtaaattctgttgttaggtttttatgaaatgggcaaatttgaagaatcggctgatagaagtcctcacctttaatttcaccactactacgcagtgatgaa

SEQ ID NO: 75889 - DNA, 600 bp, Chicken  19866894360315_1
actctgatataaccctcacttggtcaaatagtggaagaagtgtgggatgcagagagctccacggggctacaggtggagggggcagctcaggggaggtgatctagagagaaactagctttacccaaaagcatgtcaatggctactgctgcagcaggggaaagtgaaattactttagcacttcctactttatatgtgaatgaaaataattattttatgtagtttgaatgtgtttctacaacacaaatgaagcacaagtacaatacagtgagctcctcctaggtgtttgtagatctctcaagrgcatcccttctgtaaatggaatayagaagaacattgcattctgcatctcctgaagggcttctgagcaaactactggatcaagatcagtagcataaaattattccagaaacagtaattgagtgtctgaactgtgcagcttgggtgacgagttgtgtgagcttccttatcgagtccaacagacttcatggtcaacaccattccactgcatgcacgtttgttctccaaacagtcaagagagaaagtcatgttttcaaatgtcagrcacaattgccatgaaaaagtttcagctcagttttctcg

SEQ ID NO: 75890 - DNA, 600 bp, Chicken  19866894360315_2
caaatagtggaagaagtgtgggatgcagagagctccacggggctacaggtggagggggcagctcaggggaggtgatctagagagaaactagctttacccaaaagcatgtcaatggctactgctgcagcaggggaaagtgaaattactttagcacttcctactttatatgtgaatgaaaataattattttatgtagtttgaatgtgtttctacaacacaaatgaagcacaagtacaatacagtgagctcctcctaggtgtttgtagatctctcaagrgcatcccttctgtaaatggaatayagaagaacattgcattctgcatctcctgaagggcttctgagcaaactactggatcaagatcagtagcataaaattattccagaaacagtaattgagtgtctgaactgtgcagcttgggtgacgagttgtgtgagcttccttatcgagtccaacagacttcatggtcaacaccattccactgcatgcacgtttgttctccaaacagtcaagagagaaagtcatgttttcaaatgtcagrcacaattgccatgaaaaagtttcagctcagttttctcgatgacagaatctttcttttccaaa

SEQ ID NO: 75891 - DNA, 405 bp, Chicken  19866894360315_3
cagtgagctcctcctaggtgtttgtagatctctcaagrgcatcccttctgtaaatggaatayagaagaacattgcattctgcatctcctgaagggcttctgagcaaactactggatcaagatcagtagcataaaattattccagaaacagtaattgagtgtctgaactgtgcagcttgggtgacgagttgtgtgagcttccttatcgagtccaacagacttcatggtcaacaccattccactgcatgcacgtttgttctccaaacagtcaagagagaaagtcatgttttcaaatgtcagrcacaattgccatgaaaaagtttcagctcagttttctcgatgacagaatctttcttttccaaacttactggaatgaaaagactcaaatccactatgtcaaacatat

SEQ ID NO: 75892 - DNA, 599 bp, Chicken  19866894360316_1
  misc_feature (1)..(148): n is any nucleotide
nnnnnnnnnnnnnnnnnnnnnnnnnnnnnnnnnnnnnnnnnnnnnnnnnnnnnnnnnnnnnnnnnnnnnnnnnnnnnnnnnnnnnnnnnnnnnnnnnnnnnnnnnnnnnnnnnnnnnnnnnnnnnnnnnnnnnnnnnnnnnnnnnnnntattgctttgtccccctgtttacttttgctttttttccttgttttggtaaaactttctaagagttaaacaaaattataactgatactaaaaaaagacatttcctttagattctgcataaacaaatataacaaactatacaattctgctacayggccatcattgaaaatagcatttcyctatattacaactcgcatagtagtgattttgtttattggtgttctaaacttaatgttaactaaaatggactactggcagtagcartgccttctaaactcagcatagaacttcttttcaaagcagatgcaaactgtggatttctagctgctcaacactgaggaaaactgttctgccatactaagtatctatcatgtcccatgcacaagtatcctaaatggtgagtattattgcacggcatcttttaaataacatttgcactagtactgaaaacac

SEQ ID NO: 75893 - DNA, 599 bp, Chicken  19866894360316_2
  misc_feature (1)..(123): n is any nucleotide
nnnnnnnnnnnnnnnnnnnnnnnnnnnnnnnnnnnnnnnnnnnnnnnnnnnnnnnnnnnnnnnnnnnnnnnnnnnnnnnnnnnnnnnnnnnnnnnnnnnnnnnnnnnnnnnnnnnnnnnnnnntattgctttgtccccctgtttacttttgctttttttccttgttttggtaaaactttctaagagttaaacaaaattataactgatactaaaaaaagacatttcctttagattctgcataaacaaatataacaaactatacaattctgctacayggccatcattgaaaatagcatttcyctatattacaactcgcatagtagtgattttgtttattggtgttctaaacttaatgttaactaaaatggactactggcagtagcartgccttctaaactcagcatagaacttcttttcaaagcagatgcaaactgtggatttctagctgctcaacactgaggaaaactgttctgccatactaagtatctatcatgtcccatgcacaagtatcctaaatggtgagtattattgcacggcatcttttaaataacatttgcactagtactgaaaacactgtaggtacacaggttcctagattg

SEQ ID NO: 75894 - DNA, 599 bp, Chicken  19866894360316_3
  misc_feature (1)..(38): n is any nucleotide
nnnnnnnnnnnnnnnnnnnnnnnnnnnnnnnnnnnnnntattgctttgtccccctgtttacttttgctttttttccttgttttggtaaaactttctaagagttaaacaaaattataactgatactaaaaaaagacatttcctttagattctgcataaacaaatataacaaactatacaattctgctacayggccatcattgaaaatagcatttcyctatattacaactcgcatagtagtgattttgtttattggtgttctaaacttaatgttaactaaaatggactactggcagtagcartgccttctaaactcagcatagaacttcttttcaaagcagatgcaaactgtggatttctagctgctcaacactgaggaaaactgttctgccatactaagtatctatcatgtcccatgcacaagtatcctaaatggtgagtattattgcacggcatcttttaaataacatttgcactagtactgaaaacactgtaggtacacaggttcctagattgctcagtcttccccaaggaattattgtcagtatgcttggtctcawttgtgctatgtcaggtgctctaaacaatacagactccctga

SEQ ID NO: 75895 - DNA, 600 bp, Chicken  19866894360316_4
ctaaacttaatgttaactaaaatggactactggcagtagcartgccttctaaactcagcatagaacttcttttcaaagcagatgcaaactgtggatttctagctgctcaacactgaggaaaactgttctgccatactaagtatctatcatgtcccatgcacaagtatcctaaatggtgagtattattgcacggcatcttttaaataacatttgcactagtactgaaaacactgtaggtacacaggttcctagattgctcagtcttccccaaggaattattgtcagtatgcttggtctcawttgtgctatgtcaggtgctctaaacaatacagactccctgatttgtacatttgtttttaatttaccttctaaatacacatagttatgtattcatgyatatagtaaacctagaatgattttaagactatcattaaaaattctgagaaacacagttctgaactagagcatatgtgttcactcaagcattgtgtgcagtatataaagcatggctgcttcagagcatattagccatgaaatactgccaaaaaaaaaaaaaaaaaaagtttccattgtgcatttttgcccaaagctggttgttgt

SEQ ID NO: 75896 - DNA, 600 bp, Chicken  19866894360316_5
ttctagctgctcaacactgaggaaaactgttctgccatactaagtatctatcatgtcccatgcacaagtatcctaaatggtgagtattattgcacggcatcttttaaataacatttgcactagtactgaaaacactgtaggtacacaggttcctagattgctcagtcttccccaaggaattattgtcagtatgcttggtctcawttgtgctatgtcaggtgctctaaacaatacagactccctgatttgtacatttgtttttaatttaccttctaaatacacatagttatgtattcatgyatatagtaaacctagaatgattttaagactatcattaaaaattctgagaaacacagttctgaactagagcatatgtgttcactcaagcattgtgtgcagtatataaagcatggctgcttcagagcatattagccatgaaatactgccaaaaaaaaaaaaaaaaaaagtttccattgtgcatttttgcccaaagctggttgttgtcattttcttccttatatttttgtcattgtctcttgaaaaacagaaatgtggcttgtttattttagagagagatgctatatgattcatacctgaagc

SEQ ID NO: 75897 - DNA, 599 bp, Chicken  19866894360326_1
  misc_feature (1)..(141): n is any nucleotide
nnnnnnnnnnnnnnnnnnnnnnnnnnnnnnnnnnnnnnnnnnnnnnnnnnnnnnnnnnnnnnnnnnnnnnnnnnnnnnnnnnnnnnnnnnnnnnnnnnnnnnnnnnnnnnnnnnnnnnnnnnnnnnnnnnnnnnnnnnnnnatgaagcataagcaatgaaaataagtaagattgaaagctgttctgaaaatccagaacagttgccaccacgtgtagcaaagcagtgcttaaaaatatattttttgtgtcctttagatttgaaatcattttattgctgcatacaaggccctggtgcaaacraagctttcacagggtagcctttctcccttggtaggcagctctcattggttggtagcagctggagatctcatgccagtgcttttagccatagaggaggtgtgctccatgcttctgagaagctggtgccattggagggtgrtggtggaaacttggtcaatggagagagcctggatgctgttagtcaaaaagctgaagtaaaggccaggaatagatgaagtatttagaaccagtgaacaggaaatactagacaccagaagatagctaaaagtttaagctctgactatcgtgctgtatctttt

SEQ ID NO: 75898 - DNA, 599 bp, Chicken  19866894360326_2
  misc_feature (1)..(2): n is any nucleotide
nnatgaagcataagcaatgaaaataagtaagattgaaagctgttctgaaaatccagaacagttgccaccacgtgtagcaaagcagtgcttaaaaatatattttttgtgtcctttagatttgaaatcattttattgctgcatacaaggccctggtgcaaacraagctttcacagggtagcctttctcccttggtaggcagctctcattggttggtagcagctggagatctcatgccagtgcttttagccatagaggaggtgtgctccatgcttctgagaagctggtgccattggagggtgrtggtggaaacttggtcaatggagagagcctggatgctgttagtcaaaaagctgaagtaaaggccaggaatagatgaagtatttagaaccagtgaacaggaaatactagacaccagaagatagctaaaagtttaagctctgactatcgtgctgtatcttttgagattaaacagagcctcctcgcactcttgaggatgtttcagtgtgtctattcttcaaatgattttaattatgtcagacaaatgtagtgttggaacatcataattctggttaatgaagtgaagtcatttctttggcatc

SEQ ID NO: 75899 - DNA, 598 bp, Chicken  19866894360334_1
tgaccacctgaggtgagcaccgagtcagccgtgggagcacaggtgaaggcaattcacctgtgtgacctgaagatcacaggctccacctctcctagaccccacttaagggctgactgctactgaggaaggatctcttcctggagatcgctcctcatggagtttttacaagcctacaatactggtgagcacctttcatttatatctgattatcttttccaaccggtaatctgaccagcctaacttctctgtataacatctgtatacttatttactgtacataggtttcagtgaatatgtttwtaagtcaattgtttgcttttactccaagtgtactgtgatggcaaaatctttcagaatgctgggaaaatgggtttatgcatttactgagtggacaggagcattgctacattgattacgtatttgcaatttgcctttcactcttggaggggaaatagcagacatgagtttcatgtttgactccgcacagtgttttggtttgggtctgtttccttttcagagccatacagggggaagaatgaggtcatgcattttaaaagtacatcgctgtgtgaggattttctttatgcatagcttcttt

SEQ ID NO: 75900 - DNA, 600 bp, Chicken  19866894360344_1
gttcccatacttttcttccttacacattataaaaccgcaaaaagtgccacaattcctactctataagtaactctataagcctcattctcattattgtgcttcttatattatgatgtaaagaatgagaaagtagaattgtagaaatattagttagcatttgaaaatgattaagtctgaattattaaaagacatacccatttaaaaatatattcaagacaaaatattaaataatacacattgatgtcagttaaagcctgcaagaatcttaatactgtttcataagagtatcagtataaacaygggctgatgcaaattatttgcaattaattttaraaatgcacattctatgtatttacttttgcgccctgtaggcaacaaactgaactttaatcaaaggaaataatcaaattctagcctctgcctttaaattattggctcttgtagtgcttagagaacaacagctattgaacattttctggaaagagcacttgttggtaattcaaacacatgaattcctattgtgacaatttccatggcaccaattaaggacataaagttccatatatgtttgcgtttttgaagtagtcaaccacattttta

SEQ ID NO: 75901 - DNA, 600 bp, Chicken  19866894360344_2
accgcaaaaagtgccacaattcctactctataagtaactctataagcctcattctcattattgtgcttcttatattatgatgtaaagaatgagaaagtagaattgtagaaatattagttagcatttgaaaatgattaagtctgaattattaaaagacatacccatttaaaaatatattcaagacaaaatattaaataatacacattgatgtcagttaaagcctgcaagaatcttaatactgtttcataagagtatcagtataaacaygggctgatgcaaattatttgcaattaattttaraaatgcacattctatgtatttacttttgcgccctgtaggcaacaaactgaactttaatcaaaggaaataatcaaattctagcctctgcctttaaattattggctcttgtagtgcttagagaacaacagctattgaacattttctggaaagagcacttgttggtaattcaaacacatgaattcctattgtgacaatttccatggcaccaattaaggacataaagttccatatatgtttgcgtttttgaagtagtcaaccacatttttagcagtaacatcttcacaactagaagcatgacct

SEQ ID NO: 75902 - DNA, 600 bp, Chicken  19866894360347_1
gggtggtagcaaaggatggagaatggtgggttttggactactgagtgagggttgtcttaaggtgcaagctgcatgaagggtactgcatttagttcacagagttcctcctcagcgggtagcatgcatttcccttgttgctgcattagaaccgaatggaaaaacaaggaacttagcacagcaaaccaagtgtgcaatacatttgctgtttcttatagtttagatggagaggggggaggtgtggacagcattctcctggttgctgaggtatgcttaactttcagagcccatgcagcgggtcarataatgtccatggagaaaagatatcaatactagaaaaaaaaacccacaaataaacgagatgcacattttcatgctgaagtgatatgcacacactgaggccatatataggtaaaaacatatgtcaagtttcacaaatgcatctaagttgtattagaaatgatttctgaaggctggatccccatatttttgggtaacacattgccacagcagctgttccaccaacactcaaggcaccgcttgcagcatgagcagaggaagaaagatctgattatttttgccaaaatgctatttttctataaa

SEQ ID NO: 75903 - DNA, 600 bp, Chicken  19866894360352_1
aaaaaaccacaacagacaagctgggtccttttatgtgtccctttaataaagtacatttgcatagttatcttacaactttgtttcaacccaaagatgaacaattgcctcatgctaagcacagcctgcatttgcatgtccagacagtcatcctcacacattaatactccaactcaaagagaacaacagaagatattttaaggcagcacacactgttcagcagcagtttattggttcattacatggaagcagcgttgccccacagcagctcccaatgccactgcagggcacagtttgccagcrttcctacgagcagatctatgcacaggtggtgaaccccactcagaaacacacagggatacaatctgacaaagcaytgggatggaaaaaatackggctggtaggacacccagtwacacaacggcccccattttcatagaaaacagtactaagcaagtactgtgttgcaggcaatgccaccttttgctctcctggatggcttcagatttaattgttaatgtctcgttgctctgagaagcatttgggctctcagggccagagaggggatcagcagttcagcaggtatctcttgttttcaccctg

SEQ ID NO: 75904 - DNA, 600 bp, Chicken  19866894360352_2
actttgtttcaacccaaagatgaacaattgcctcatgctaagcacagcctgcatttgcatgtccagacagtcatcctcacacattaatactccaactcaaagagaacaacagaagatattttaaggcagcacacactgttcagcagcagtttattggttcattacatggaagcagcgttgccccacagcagctcccaatgccactgcagggcacagtttgccagcrttcctacgagcagatctatgcacaggtggtgaaccccactcagaaacacacagggatacaatctgacaaagcaytgggatggaaaaaatackggctggtaggacacccagtwacacaacggcccccattttcatagaaaacagtactaagcaagtactgtgttgcaggcaatgccaccttttgctctcctggatggcttcagatttaattgttaatgtctcgttgctctgagaagcatttgggctctcagggccagagaggggatcagcagttcagcaggtatctcttgttttcaccctgtcctcagctgctccaagaccaacgttcttcccccaaattaatacagctctatagctacaccttgttttaaaatc

SEQ ID NO: 75905 - DNA, 600 bp, Chicken  19866894360352_3
gatgaacaattgcctcatgctaagcacagcctgcatttgcatgtccagacagtcatcctcacacattaatactccaactcaaagagaacaacagaagatattttaaggcagcacacactgttcagcagcagtttattggttcattacatggaagcagcgttgccccacagcagctcccaatgccactgcagggcacagtttgccagcrttcctacgagcagatctatgcacaggtggtgaaccccactcagaaacacacagggatacaatctgacaaagcaytgggatggaaaaaatackggctggtaggacacccagtwacacaacggcccccattttcatagaaaacagtactaagcaagtactgtgttgcaggcaatgccaccttttgctctcctggatggcttcagatttaattgttaatgtctcgttgctctgagaagcatttgggctctcagggccagagaggggatcagcagttcagcaggtatctcttgttttcaccctgtcctcagctgctccaagaccaacgttcttcccccaaattaatacagctctatagctacaccttgttttaaaatccagcctttaatacaccct

SEQ ID NO: 75906 - DNA, 600 bp, Chicken  19866894360352_4
taagcacagcctgcatttgcatgtccagacagtcatcctcacacattaatactccaactcaaagagaacaacagaagatattttaaggcagcacacactgttcagcagcagtttattggttcattacatggaagcagcgttgccccacagcagctcccaatgccactgcagggcacagtttgccagcrttcctacgagcagatctatgcacaggtggtgaaccccactcagaaacacacagggatacaatctgacaaagcaytgggatggaaaaaatackggctggtaggacacccagtwacacaacggcccccattttcatagaaaacagtactaagcaagtactgtgttgcaggcaatgccaccttttgctctcctggatggcttcagatttaattgttaatgtctcgttgctctgagaagcatttgggctctcagggccagagaggggatcagcagttcagcaggtatctcttgttttcaccctgtcctcagctgctccaagaccaacgttcttcccccaaattaatacagctctatagctacaccttgttttaaaatccagcctttaatacaccctcggcacagcctttcctactg

SEQ ID NO: 75907 - DNA, 600 bp, Chicken  19866894360358_1
gtaataccatgttgcataacacttcccagggactttcctgaggtaccttcaatcagcaatggataaaatgatctctgtataaaacaagtgcagtgcacttcagtttataaaatggtatggatagttattaattatttgaatgccaacactgtgtttagtatggagcaaatatgataatgtatttcaaacaaagatgagctattagttttaattgtgaaatacgtgagaaagaaactgtccatgtgcctgccaatccttttgccattcagatctgctctgctggctctgcctgcacaaggwgagttacccagcagcttcaaacagaacatttggctgatagtttcagaacagtgtaacctgtrctttcrtgctcatcatgcctctttatgaaacaaaatgttctgaccctcagggagaacttttgaggacaagtttttttcctscagtgtttaatatggtttaacactacatttttgttgttaagcctcctattttgacattacttgactgaaccaatcatacagctttttctccaacataactaaaaatgcattatacattactctttccatgacataaattccatccttcacatataag

SEQ ID NO: 75908 - DNA, 600 bp, Chicken  19866894360358_2
ataaaatgatctctgtataaaacaagtgcagtgcacttcagtttataaaatggtatggatagttattaattatttgaatgccaacactgtgtttagtatggagcaaatatgataatgtatttcaaacaaagatgagctattagttttaattgtgaaatacgtgagaaagaaactgtccatgtgcctgccaatccttttgccattcagatctgctctgctggctctgcctgcacaaggwgagttacccagcagcttcaaacagaacatttggctgatagtttcagaacagtgtaacctgtrctttcrtgctcatcatgcctctttatgaaacaaaatgttctgaccctcagggagaacttttgaggacaagtttttttcctscagtgtttaatatggtttaacactacatttttgttgttaagcctcctattttgacattacttgactgaaccaatcatacagctttttctccaacataactaaaaatgcattatacattactctttccatgacataaattccatccttcacatataagcaaaaaaagtttgttcatttgcttattttattttattttatgcggaccactttagctcaatg

SEQ ID NO: 75909 - DNA, 600 bp, Chicken  19866894360358_3
tgatctctgtataaaacaagtgcagtgcacttcagtttataaaatggtatggatagttattaattatttgaatgccaacactgtgtttagtatggagcaaatatgataatgtatttcaaacaaagatgagctattagttttaattgtgaaatacgtgagaaagaaactgtccatgtgcctgccaatccttttgccattcagatctgctctgctggctctgcctgcacaaggwgagttacccagcagcttcaaacagaacatttggctgatagtttcagaacagtgtaacctgtrctttcrtgctcatcatgcctctttatgaaacaaaatgttctgaccctcagggagaacttttgaggacaagtttttttcctscagtgtttaatatggtttaacactacatttttgttgttaagcctcctattttgacattacttgactgaaccaatcatacagctttttctccaacataactaaaaatgcattatacattactctttccatgacataaattccatccttcacatataagcaaaaaaagtttgttcatttgcttattttattttattttatgcggaccactttagctcaatggttcca

SEQ ID NO: 75910 - DNA, 600 bp, Chicken  19866894360358_4
caacactgtgtttagtatggagcaaatatgataatgtatttcaaacaaagatgagctattagttttaattgtgaaatacgtgagaaagaaactgtccatgtgcctgccaatccttttgccattcagatctgctctgctggctctgcctgcacaaggwgagttacccagcagcttcaaacagaacatttggctgatagtttcagaacagtgtaacctgtrctttcrtgctcatcatgcctctttatgaaacaaaatgttctgaccctcagggagaacttttgaggacaagtttttttcctscagtgtttaatatggtttaacactacatttttgttgttaagcctcctattttgacattacttgactgaaccaatcatacagctttttctccaacataactaaaaatgcattatacattactctttccatgacataaattccatccttcacatataagcaaaaaaagtttgttcatttgcttattttattttattttatgcggaccactttagctcaatggttccagaacatgctgaaataataagttttgctatagtaagaaaacttctcctggggttgagtctgcggactacttttgca

SEQ ID NO: 75911 - DNA, 600 bp, Chicken  19866894360358_5
aaaataacttgtactaatattgatgttctctgttatctttctggctagtaaaagtatatgaaaattttcttctgagaacatgcctgtgttcatatgaattcttaaactgtgctcaggaattacttaggaagtgctagttatcttgagtcaaagctatatattccaagctataatgtcattagaagagcacaggcaattatgtttcactgcctaggtacatttcttcttactggtcaataatctagtactggtctaacagaaatctgttacatttctatttcttccccagttttcatctgyctatgcacaattgtgataacaatcttagtagtactattattttatttcaaagaactatactgttggaacctatttttcttatgtttcaatcttgaataatccagtgagctttttatctattcaaaagtcacaaccaatctgtcatttggagctgtcattattttatttttacctaactgacttgactaaacttcartgcagcttaacagttcaatatgctgctcagtgggttttttttgggtttttttttttttttttttttttttcagttttgtgcaaataagtaattttggatagctg

SEQ ID NO: 75912 - DNA, 600 bp, Chicken  19866894360358_6
ttatgtttcactgcctaggtacatttcttcttactggtcaataatctagtactggtctaacagaaatctgttacatttctatttcttccccagttttcatctgyctatgcacaattgtgataacaatcttagtagtactattattttatttcaaagaactatactgttggaacctatttttcttatgtttcaatcttgaataatccagtgagctttttatctattcaaaagtcacaaccaatctgtcatttggagctgtcattattttatttttacctaactgacttgactaaacttcartgcagcttaacagttcaatatgctgctcagtgggttttttttgggtttttttttttttttttttttttttcagttttgtgcaaataagtaattttggatagctgattctttcacctaaccagaattcatcaattctatgatgctgacttcccataaatagcrctaaattcatctttcatgtttttcattcctctttccccctttttttttcacttatctcttttgctcactgcttagaacaagtgcagtctaaaatcagcacgttcttttattccatatagcacagacaaggaattctaa

SEQ ID NO: 75913 - DNA, 600 bp, Chicken  19866894360358_7
actgttggaacctatttttcttatgtttcaatcttgaataatccagtgagctttttatctattcaaaagtcacaaccaatctgtcatttggagctgtcattattttatttttacctaactgacttgactaaacttcartgcagcttaacagttcaatatgctgctcagtgggttttttttgggtttttttttttttttttttttttttcagttttgtgcaaataagtaattttggatagctgattctttcacctaaccagaattcatcaattctatgatgctgacttcccataaatagcrctaaattcatctttcatgtttttcattcctctttccccctttttttttcacttatctcttttgctcactgcttagaacaagtgcagtctaaaatcagcacgttcttttattccatatagcacagacaaggaattctaactttggatacctaatcttgaacattgtgtcaccacatataaatataatcctgaactaggaataggctggtctaggattcagaagtttgtcattgctagtgataagaaaaactcctaaaacatattctgaacaattattttacagctcaggagagtccaaaaa

SEQ ID NO: 75914 - DNA, 404 bp, Chicken  19866894360359_1
actcacctgcgtcctgaaggttccttgctggaacctggactccttcaggtggtttccttgacctcatgaaagctatggaatagatcatagatcaagttttctgcttgcaggaaatgcctcctaattaattgccataatgaaaactgggctaaggacagactgatttaacacttgatcatgccattaatttctagggactggtagattgaatgagattcctgaacagtaacacaaaaatgcttcagtcacttccagccatcatttggagtaatgagcagtggcagctatgtgcagcctccmtcccatcccatgggctttgggctgcaggaggccagcagccctccttccagggccaccagggyaggcatatcaggccctgtgtccctggctggaggtaggttttt

SEQ ID NO: 75915 - DNA, 342 bp, Chicken  19866894360359_2
ctcatgaaagctatggaatagatcatagatcaagttttctgcttgcaggaaatgcctcctaattaattgccataatgaaaactgggctaaggacagactgatttaacacttgatcatgccattaatttctagggactggtagattgaatgagattcctgaacagtaacacaaaaatgcttcagtcacttccagccatcatttggagtaatgagcagtggcagctatgtgcagcctccmtcccatcccatgggctttgggctgcaggaggccagcagccctccttccagggccaccagggyaggcatatcaggccctgtgtccctggctggaggtaggttttt

SEQ ID NO: 75916 - DNA, 600 bp, Chicken  19866894360361_1
aacgggcagatcacaaactcctgcactcactgccatctgcagagtgctgcggtgactcttagagcactagctccctcctctgggagctgaatccatcgactgatggcttctatttcatcataactggaaacatcttcacccaaaaaacacacttcctattatcgtgcctcctgcatggccccatttctaagagtatagcaagcaaatacacaaagcagattgctctctggtattttaaaagaacacgtgtaatgtaaggggacaaggtttgtgttttccatcagttcggatacagtcaaytttaaacagagcacgcttctcagcaagtgcattggatttcctttaacaaagacctattcacctgccaagggcatggrgcaggtacgtactacgtctttatccttcccagagatacctggccaaagataactgctaacaattaacatcttgggaagttggagaacttctgtaatgctgcaagacaggtctgtgcctaagcactgcacaacaaggtggagatgacaaacacagcatagcaacagctgtgccactccagttaacccttctttgatatccctcatattcccctttattcaactt

SEQ ID NO: 75917 - DNA, 600 bp, Chicken  19866894360361_2
ctctgggagctgaatccatcgactgatggcttctatttcatcataactggaaacatcttcacccaaaaaacacacttcctattatcgtgcctcctgcatggccccatttctaagagtatagcaagcaaatacacaaagcagattgctctctggtattttaaaagaacacgtgtaatgtaaggggacaaggtttgtgttttccatcagttcggatacagtcaaytttaaacagagcacgcttctcagcaagtgcattggatttcctttaacaaagacctattcacctgccaagggcatggrgcaggtacgtactacgtctttatccttcccagagatacctggccaaagataactgctaacaattaacatcttgggaagttggagaacttctgtaatgctgcaagacaggtctgtgcctaagcactgcacaacaaggtggagatgacaaacacagcatagcaacagctgtgccactccagttaacccttctttgatatccctcatattcccctttattcaacttcttcacgtcttccagtgcaagaaaaaacagcaaggtattgtctttctgaacacccccgtgtccatatttagctcctg

SEQ ID NO: 75918 - DNA, 600 bp, Chicken  19866894360366_1
agattctagtgtatgaactatgaggaaagaaaaataacaagtcctgcacctcattatcaaacaattatagttttgttatgcagctgcactgtcattcttgtctacagggacagctgtggctgtaactcaaccttgagattcttactcttatgcttatatatgtattaacagggacaatcctgaatttttttttacctgctctgtatctgctttgttttgttgagatatcaacagacatacattgaaatgatagtaaaatatccttatcatggacatcataaaaaaatctgctattcatawactgcatggaaagcatggaattgatatttctgatgaatttttaagcccttgaataagctttgctttaaataagtagtatactttcaagtataaagtaggtaatataaaataattaaaattctatttaaatatgatttttatatcaataatatcaacttagtttatgtgatcatgatcagcacacaagggaaaagatattcacaagtcaaacaacagttaagaatagtctaagtattttgtttttaggatgtaaagaggaggaaagaggagaggatgaaaataatcagttatagaaacaaa

SEQ ID NO: 75919 - DNA, 600 bp, Chicken  19866894360372_1
gcataacaattatgatgttaattaattatctgcctggcagttaacaccatgcagaggcatggttgcggtcgacttcctgctgttctgctagcagtgagtaattaacctctcctcttccctgggattctctacaagatgatcagcgtgttgatgatataattattattaattcagtttctgtgtttcgttgacattgttaattacttgtcggtaatcagctaatgtttaatcttccttgctggatagcttcttaaaaggctgcttgaaatggctcagagagacttcccagcatattctcaktcctcactgcatcaagtgttggacagaactctactcagaataaattatctaaaaactacaaagagtctactgaagttgtggaattttggggtcaaattaaattgctgttttcactgttgtaagtgagaatatgtaaagcttttgtcaataaatcagggaaacaagtgggatccttttcgatgccaactttaaaaattgatctcacttacagaattgtcaatatcatttaaagagcaaaatttaatttagtgctgtttttttgtttttagaggattagtgattatcctgcaaataaatgtt

SEQ ID NO: 75920 - DNA, 600 bp, Chicken  19866894360374_1
ttaaggaaggaatgaaataacctgaatagagcaaaaacacaagtacaacacataggtcaatcaggtgataaaaatatgtggttgtaattaatgcagtgcaagacttaaaatgatgatgatgatgctggtgttactagaaccaaaagttctcatctagtactggcatgtgctgcacagctgtacggctaccaggtgcaagctggctgatgtgaaactgaagtgatttagagatgggctgggtaatgacctgacacagaaaatcaagagttgcttgtctttgtgaagtgtttgcaagtcttycttgtccccttgtctcagggacttggatttttttttttaatttaatgtgtttactacttgtaagctttggaagtcaggaattaagctattctgattactaggtttttttttgtgtactgatatttttattctgaactttatacatagagtaattatttgaaagttttgttcagcataagatgagctttttctgtcatgaacagaacttcccttcccccagcactcttcctttcagaagcaatgtggcttgaagttcattgcttaacactaaatttgcctttggaatgtgtccagcacaca

SEQ ID NO: 75921 - DNA, 600 bp, Chicken  19866894360375_1
cctgactgaaactatagggttcttgagttcttatcctggccttagttcagagatataataaatatttaattttaaaaaggtttgaaaatctcttacttctctatttgatctaatattatgctatgctgagtaagaaggatgttttcttaatagacagatggttctgcaaattaatggtcatctgactgtgtccctgtccatctcttacctctcagtgtgtcaaagcccctattggggtgcaaagttcttactccacagagtacatccaggagccagataccctccctacaaatgttcctyatgctacttttgtgttattttccttcccattttggagggaagtgagtgttgtgtcatttgtagcactccaagggccacatgcatctcctgaggggaaaaaagggtatcagatggccaggtgagtatcttgaaactgaataactggcatggaaaagctgcttttggagtctgttctgcttatgcattgtttggagtccattaygtaatggctgcatgtagcagcagaagagagcactttcttccaagtgaactcgtttggcaaataatcactgtgccaattgaagtgaaacttagcacaga

SEQ ID NO: 75922 - DNA, 600 bp, Chicken  19866894360375_2
tcttacctctcagtgtgtcaaagcccctattggggtgcaaagttcttactccacagagtacatccaggagccagataccctccctacaaatgttcctyatgctacttttgtgttattttccttcccattttggagggaagtgagtgttgtgtcatttgtagcactccaagggccacatgcatctcctgaggggaaaaaagggtatcagatggccaggtgagtatcttgaaactgaataactggcatggaaaagctgcttttggagtctgttctgcttatgcattgtttggagtccattaygtaatggctgcatgtagcagcagaagagagcactttcttccaagtgaactcgtttggcaaataatcactgtgccaattgaagtgaaacttagcacagaaatttccatccttagccatgatttcttcagctgtttccaattacatacatttgaaacttgagaaacacaatgtcaacttaaatggtcattttaattgtgtatgtatctaaagtacataagtgaatgggaaatattacaaaggcattttgaaataagaatgcttcagaaaataaaatctggattcacttcagatgcagaatcc

SEQ ID NO: 75923 - DNA, 600 bp, Chicken  19866894360388_1
gacctgttaacactgctgggtctgtgcttcctggcacccaaccgcagctgctgctatttgctcatctcccacagtcagtgccctctagtgcctggtgaagcatcccaggctcctcccagagagcagcatgatgcaagggatagacagcatgtgagaggtcacagattgtgaaaccaaactcaacacagctgcagacaaaccagctgaaatttatatactgtgtcgatttacaaagtgacctgcagatcttacataaagaccaaggcaatgtttcccaccaaactctgcaaaacattaggmaaaactatacatttccagaagaaaaaagtgcagcccttccaatgctggaacagcagrattctttctcttgagaagctactggggtgccctgcagtggagcagtccttcactcttaacatttcaaaaccagtcctgacaggacgcaggctgctgaattacccaggttccagtcatttaagcactaccagggtggctgtacacacatgaacagtgacacattgtgcgttgagttgtgcgtatcttacagcttctcgagtagtgcacaggattctattaatagctagaataattgcactgcaa

SEQ ID NO: 75924 - DNA, 588 bp, Chicken  19866894360388_2
ttgctcatctcccacagtcagtgccctctagtgcctggtgaagcatcccaggctcctcccagagagcagcatgatgcaagggatagacagcatgtgagaggtcacagattgtgaaaccaaactcaacacagctgcagacaaaccagctgaaatttatatactgtgtcgatttacaaagtgacctgcagatcttacataaagaccaaggcaatgtttcccaccaaactctgcaaaacattaggmaaaactatacatttccagaagaaaaaagtgcagcccttccaatgctggaacagcagrattctttctcttgagaagctactggggtgccctgcagtggagcagtccttcactcttaacatttcaaaaccagtcctgacaggacgcaggctgctgaattacccaggttccagtcatttaagcactaccagggtggctgtacacacatgaacagtgacacattgtgcgttgagttgtgcgtatcttacagcttctcgagtagtgcacaggattctattaatagctagaataattgcactgcaaatttaactggaatgaggacaacctctacagtccatttaggaatta

SEQ ID NO: 75925 - DNA, 600 bp, Chicken  19866894360390_1
gttgtgttttaatttctgcacagtgctgagcactgcagggtgtttggcagagagagccaaaggtgcctcagaagcaacctggcagaattaggtggaaaatgcctgcacctgctcgctgccttccagagggcatgcatagaaattgcccaccatgcttctgcatgctgctgtataaaacttgttttgtttgtgctttctttgtttgtttgtttctgctaggtttgtttgacatgcagttacctaagtccttgtgacagtacccttgaaaaaaaaaagtcattggaattatgtctccttttraactggcattagtggctgaggtaaggtgggctactttgctttgtgccctaaatgagatgaaaggaaacagggttgaatcagacaatagcaataacagtgtgtttcccttctctccttcactttgaaagggcttacaggaccctgtgtgcagctcagggtctccagagcttcttcccaacttttctgcattctgcctcaaactgaggagagaaaccattgctcagccaagtagattattaattgcaatattccctgagttgactctcatacagttctgcattagtrtggcttgttactgag

SEQ ID NO: 75926 - DNA, 600 bp, Chicken  19866894360390_2
ttatgtctccttttraactggcattagtggctgaggtaaggtgggctactttgctttgtgccctaaatgagatgaaaggaaacagggttgaatcagacaatagcaataacagtgtgtttcccttctctccttcactttgaaagggcttacaggaccctgtgtgcagctcagggtctccagagcttcttcccaacttttctgcattctgcctcaaactgaggagagaaaccattgctcagccaagtagattattaattgcaatattccctgagttgactctcatacagttctgcattagtrtggcttgttactgagtacaggcctctgtgactgttgtcctgtcacccccagggctctgccctccttgcagtgggttcctgccttgaatcattaaaacacacagccccacggttctgcctcgttccagcaaggggtagcactaagcatgaaatcactcactgaccttggcagagacttacagtgtgagcctctaaatgcctggccatgcaagggcagtttccacagagagatgctctcacccagttcagtaagctggaaggccattgctgcagaaattaccaggttatttaatttattgta

SEQ ID NO: 75927 - DNA, 599 bp, Chicken  19866894360394_1
  misc_feature (1)..(161): n is any nucleotide
nnnnnnnnnnnnnnnnnnnnnnnnnnnnnnnnnnnnnnnnnnnnnnnnnnnnnnnnnnnnnnnnnnnnnnnnnnnnnnnnnnnnnnnnnnnnnnnnnnnnnnnnnnnnnnnnnnnnnnnnnnnnnnnnnnnnnnnnnnnnnnnnnnnnnnnnnnnnnnnnnccctttttctgttggagcttaagtgttataacggcctgttgaaatctagactcaatccttgtggcagtgatcactaaaataaatgtaagaagctactgccaccatgtggtatggtaaacacgaaaaccttgtctgcacwaaagaaaagtgttattgataatgctggtgaaccacaccactgtgtgattattcctaagcgttattttcatagcatcagctttatagctaaatgacacaagaaggagaaagaagcattgcaacccatgtgaaagattattatggtgaagcacagagrcagaaacttgttctgttgatattwtttttttttcttttaattttatgaatgaatacaataagaaacttctgttctctcccttttacatggaaaggcattccttatatgctcagagaggcaaaatgagcgtacatggtgtgaaa

SEQ ID NO: 75928 - DNA, 599 bp, Chicken  19866894360394_2
  misc_feature (1)..(5): n is any nucleotide
nnnnnccctttttctgttggagcttaagtgttataacggcctgttgaaatctagactcaatccttgtggcagtgatcactaaaataaatgtaagaagctactgccaccatgtggtatggtaaacacgaaaaccttgtctgcacwaaagaaaagtgttattgataatgctggtgaaccacaccactgtgtgattattcctaagcgttattttcatagcatcagctttatagctaaatgacacaagaaggagaaagaagcattgcaacccatgtgaaagattattatggtgaagcacagagrcagaaacttgttctgttgatattwtttttttttcttttaattttatgaatgaatacaataagaaacttctgttctctcccttttacatggaaaggcattccttatatgctcagagaggcaaaatgagcgtacatggtgtgaaagaaatagaataatgttgtctggtgttttctgacttaatgaaatctgcaaaattttttgctgtttttttttttcagattacaaaagtatatgtatttaggaaaagatttgagaatcccccttaattttcagtcccattgaatatgctttaccttttg

SEQ ID NO: 75929 - DNA, 600 bp, Chicken  19866894360394_3
taagtgttataacggcctgttgaaatctagactcaatccttgtggcagtgatcactaaaataaatgtaagaagctactgccaccatgtggtatggtaaacacgaaaaccttgtctgcacwaaagaaaagtgttattgataatgctggtgaaccacaccactgtgtgattattcctaagcgttattttcatagcatcagctttatagctaaatgacacaagaaggagaaagaagcattgcaacccatgtgaaagattattatggtgaagcacagagrcagaaacttgttctgttgatattwtttttttttcttttaattttatgaatgaatacaataagaaacttctgttctctcccttttacatggaaaggcattccttatatgctcagagaggcaaaatgagcgtacatggtgtgaaagaaatagaataatgttgtctggtgttttctgacttaatgaaatctgcaaaattttttgctgtttttttttttcagattacaaaagtatatgtatttaggaaaagatttgagaatcccccttaattttcagtcccattgaatatgctttaccttttgtttttccaaaggcagttagaaagca

SEQ ID NO: 75930 - DNA, 600 bp, Chicken  19866894360400_1
agtagtccataaaagctacagaaatgccttagtttagctgttgctgagaagttatcaaatagttcattccggtattccacaagtagtaaattgttgtatttgtcctaattctttcagtggtgtcaatcatatttgcattgttattgcaccatgggcatttgtactacattactgtggctagaaacacagtgactgggttcaaaccatgatgctgctagagagaaaactatgaatttcagcacagaaaggcattctacttcctcagaaaggagggtgtgatttttgaaaactagtctttcyccatcagctgccacacagaggtgtgtgggaggcctcacactggaaaaagtagaagggtgtaagaaactggaaaatacagcttgaagtgaggcactattcagagaaaggcaataggaggcctgctaattcaggttgttaaccatgcataaaatgccagcatttttaaaataacacaatcaaactttttttttctaatccccttttaaagaaaattagaaaccaactcagtgctgacaagcacaagcagctgcctgaagttactcaattgcctccactttcaagtacttgactaacagctct

SEQ ID NO: 75931 - DNA, 600 bp, Chicken  19866894360401_1
gtattcaaccccgcggctgggggttggaactagatgatctttaaagtcccttccaaatctagccactctatgattctgtgatattatgtagatatttttgttatctcaacttttatctgttgatctttgttatattctctgactagattacaaattaaaatctagatagtaagacggggtagtttcacccagtcaaagttgcctggttggacaaatatcctaatgaggtgatgaggtaaacagacagggttcaagaattatgaaaaattgcacaagtagcaaaatcatggcacaggttayttaaggataaagtggagtcttctttgaccgaayttttataagaacaagtatgtcaggyatttttcagatatggtataagttasttattctgcctcagwgcaaggaagagactgaataattgcctcacrcctcctctggggatggatttttaaggatccattaaattagtactttgggaggacttgtaagacccctkcttctcaggtggagtaagggcaaagctaaacaatgaactgtggaaatgtgcatcagggtagccgtacatacagtgtacatacatgttttgggttgtacccaagg

SEQ ID NO: 75932 - DNA, 600 bp, Chicken  19866894360401_2
atgatctttaaagtcccttccaaatctagccactctatgattctgtgatattatgtagatatttttgttatctcaacttttatctgttgatctttgttatattctctgactagattacaaattaaaatctagatagtaagacggggtagtttcacccagtcaaagttgcctggttggacaaatatcctaatgaggtgatgaggtaaacagacagggttcaagaattatgaaaaattgcacaagtagcaaaatcatggcacaggttayttaaggataaagtggagtcttctttgaccgaayttttataagaacaagtatgtcaggyatttttcagatatggtataagttasttattctgcctcagwgcaaggaagagactgaataattgcctcacrcctcctctggggatggatttttaaggatccattaaattagtactttgggaggacttgtaagacccctkcttctcaggtggagtaagggcaaagctaaacaatgaactgtggaaatgtgcatcagggtagccgtacatacagtgtacatacatgttttgggttgtacccaaggaagagaagtattttttttctagtctgctgaact

SEQ ID NO: 75933 - DNA, 600 bp, Chicken  19866894360401_3
ctagccactctatgattctgtgatattatgtagatatttttgttatctcaacttttatctgttgatctttgttatattctctgactagattacaaattaaaatctagatagtaagacggggtagtttcacccagtcaaagttgcctggttggacaaatatcctaatgaggtgatgaggtaaacagacagggttcaagaattatgaaaaattgcacaagtagcaaaatcatggcacaggttayttaaggataaagtggagtcttctttgaccgaayttttataagaacaagtatgtcaggyatttttcagatatggtataagttasttattctgcctcagwgcaaggaagagactgaataattgcctcacrcctcctctggggatggatttttaaggatccattaaattagtactttgggaggacttgtaagacccctkcttctcaggtggagtaagggcaaagctaaacaatgaactgtggaaatgtgcatcagggtagccgtacatacagtgtacatacatgttttgggttgtacccaaggaagagaagtattttttttctagtctgctgaacttcagacaaggattctgcgcactcca

SEQ ID NO: 75934 - DNA, 600 bp, Chicken  19866894360401_4
ttatgtagatatttttgttatctcaacttttatctgttgatctttgttatattctctgactagattacaaattaaaatctagatagtaagacggggtagtttcacccagtcaaagttgcctggttggacaaatatcctaatgaggtgatgaggtaaacagacagggttcaagaattatgaaaaattgcacaagtagcaaaatcatggcacaggttayttaaggataaagtggagtcttctttgaccgaayttttataagaacaagtatgtcaggyatttttcagatatggtataagttasttattctgcctcagwgcaaggaagagactgaataattgcctcacrcctcctctggggatggatttttaaggatccattaaattagtactttgggaggacttgtaagacccctkcttctcaggtggagtaagggcaaagctaaacaatgaactgtggaaatgtgcatcagggtagccgtacatacagtgtacatacatgttttgggttgtacccaaggaagagaagtattttttttctagtctgctgaacttcagacaaggattctgcgcactccaggtaaaaatactgcagatcagtcca

SEQ ID NO: 75935 - DNA, 600 bp, Chicken  19866894360401_5
tgttatctcaacttttatctgttgatctttgttatattctctgactagattacaaattaaaatctagatagtaagacggggtagtttcacccagtcaaagttgcctggttggacaaatatcctaatgaggtgatgaggtaaacagacagggttcaagaattatgaaaaattgcacaagtagcaaaatcatggcacaggttayttaaggataaagtggagtcttctttgaccgaayttttataagaacaagtatgtcaggyatttttcagatatggtataagttasttattctgcctcagwgcaaggaagagactgaataattgcctcacrcctcctctggggatggatttttaaggatccattaaattagtactttgggaggacttgtaagacccctkcttctcaggtggagtaagggcaaagctaaacaatgaactgtggaaatgtgcatcagggtagccgtacatacagtgtacatacatgttttgggttgtacccaaggaagagaagtattttttttctagtctgctgaacttcagacaaggattctgcgcactccaggtaaaaatactgcagatcagtccagcataagcatttcta

SEQ ID NO: 75936 - DNA, 600 bp, Chicken  19866894360401_6
gttatattctctgactagattacaaattaaaatctagatagtaagacggggtagtttcacccagtcaaagttgcctggttggacaaatatcctaatgaggtgatgaggtaaacagacagggttcaagaattatgaaaaattgcacaagtagcaaaatcatggcacaggttayttaaggataaagtggagtcttctttgaccgaayttttataagaacaagtatgtcaggyatttttcagatatggtataagttasttattctgcctcagwgcaaggaagagactgaataattgcctcacrcctcctctggggatggatttttaaggatccattaaattagtactttgggaggacttgtaagacccctkcttctcaggtggagtaagggcaaagctaaacaatgaactgtggaaatgtgcatcagggtagccgtacatacagtgtacatacatgttttgggttgtacccaaggaagagaagtattttttttctagtctgctgaacttcagacaaggattctgcgcactccaggtaaaaatactgcagatcagtccagcataagcatttctagaggctgaaacacattatctatgagtctct

SEQ ID NO: 75937 - DNA, 562 bp, Chicken  19866894360401_7
agttgcctggttggacaaatatcctaatgaggtgatgaggtaaacagacagggttcaagaattatgaaaaattgcacaagtagcaaaatcatggcacaggttayttaaggataaagtggagtcttctttgaccgaayttttataagaacaagtatgtcaggyatttttcagatatggtataagttasttattctgcctcagwgcaaggaagagactgaataattgcctcacrcctcctctggggatggatttttaaggatccattaaattagtactttgggaggacttgtaagacccctkcttctcaggtggagtaagggcaaagctaaacaatgaactgtggaaatgtgcatcagggtagccgtacatacagtgtacatacatgttttgggttgtacccaaggaagagaagtattttttttctagtctgctgaacttcagacaaggattctgcgcactccaggtaaaaatactgcagatcagtccagcataagcatttctagaggctgaaacacattatctatgagtctctttttgcgacttaattttattaaatatttat

SEQ ID NO: 75938 - DNA, 600 bp, Chicken  19866894360403_1
tttgtacttagagaagtttgcaaatggaaaggaaatctagtgtcagtaaaagaatctgacccaacgcatacaggtaagattgcaagcctggtgtaagaactaacttctagagcactggggctgcccgttactgcccctctgtcccttatggcaaggtgggctactctgcgttacttgcttggcaaccacacttcaggcttggaaggctgcttttcatactgcagaagcagaaggcttctgtgatgcatctgtgcagcccaggacagtgcacatttccagatcaggtcttcgcatgcactrtaaatattttaacttgcaaaatatcgtgtctgtggcagataccaacctacagtaattcccagttgtaactgatatgtcttcctattcagaacattctgtagtcaagaaaaatacctccatatgttttgaattctcgtgcatcttcactggagttctcaagagtatgccactaatttaatatacggttgtgctgtacattcatgttgtatataagatggtcaatatacaagcagtaagctctggaatagctgaagtgttagcatatgtaaactttatgcagcgtgaatactttgcaggctc

SEQ ID NO: 75939 - DNA, 599 bp, Chicken  19866894360405_1
  misc_feature (1)..(129): n is any nucleotide
nnnnnnnnnnnnnnnnnnnnnnnnnnnnnnnnnnnnnnnnnnnnnnnnnnnnnnnnnnnnnnnnnnnnnnnnnnnnnnnnnnnnnnnnnnnnnnnnnnnnnnnnnnnnnnnnnnnnnnnnnnnnnnnnncattcaaagaagaagaaaaaaccccaaatcacactgctatcagcgatataaaagcatcctagcaaccaaagaactattttacttctttcttctttattcctctaagccatctagatttcttagcctccgcaggtgcattttctggtgtattttttttttgcctattgagcrtaatttttctgatttcggtaatctcagaatgttaaactgtagagttaaacgaaggcttcaaccgactccttccaatcccactgcagacaaaaggcacttccattccatgccttgcactggcaggagcagcaaagcagtaaggcgatgtgcagaagcctgcagatatcgggggtcatctctcagcacggcagaccagatggggcacaatgaggagttctaatgagtctcactgaggaagtacacgcagctatagccatggcaaagacagaaaagcgctgccagtggccaagaagaaarga

SEQ ID NO: 75940 - DNA, 600 bp, Chicken  19866894360405_2
gcrtaatttttctgatttcggtaatctcagaatgttaaactgtagagttaaacgaaggcttcaaccgactccttccaatcccactgcagacaaaaggcacttccattccatgccttgcactggcaggagcagcaaagcagtaaggcgatgtgcagaagcctgcagatatcgggggtcatctctcagcacggcagaccagatggggcacaatgaggagttctaatgagtctcactgaggaagtacacgcagctatagccatggcaaagacagaaaagcgctgccagtggccaagaagaaargaaatagatgcaagtccattaagcaaagcacttaaaggctaccccctatttctgatcttttgcagtttacccattaccaaatgctcccactgctctgtttgccaggggtttttgtgctgtttgcagaatgcaccatgtcactgtggtaagcaggcagggaaaaagggtaacggctaacgctggaggcaccttccattggagcatctcagtgcaytccaatcactggggaacagctagccattggcagagacagctgccctaagagcacaccaggaaacaacgcacaggtcagaaccacgg

SEQ ID NO: 75941 - DNA, 600 bp, Chicken  19866894360405_3
gagttctaatgagtctcactgaggaagtacacgcagctatagccatggcaaagacagaaaagcgctgccagtggccaagaagaaargaaatagatgcaagtccattaagcaaagcacttaaaggctaccccctatttctgatcttttgcagtttacccattaccaaatgctcccactgctctgtttgccaggggtttttgtgctgtttgcagaatgcaccatgtcactgtggtaagcaggcagggaaaaagggtaacggctaacgctggaggcaccttccattggagcatctcagtgcaytccaatcactggggaacagctagccattggcagagacagctgccctaagagcacaccaggaaacaacgcacaggtcagaaccacgggagcccactggcacctcactgctctcagggaagcgcagtgcgggtccagtgcatgcccagccatggcagtgtgctcttccctacagccctgggccatgagcggagcaaggaaggaggacaagaagttgtaccaagtcccatctccttgctgtacttgtacaaagggtcgagggcaaaatgtgaggcactccgagctcttctcatggtcacctct

SEQ ID NO: 75942 - DNA, 599 bp, Chicken  19866894360412_1
  misc_feature (1)..(4): n is any nucleotide
nnnncgttctgtaacgccatctgatttctagacaccatgcaatcactgtatgccccctctggaagatagggccacaccaggaaaatcttctattccaatgtatttctatttaataaacaatggctgctgagttcaagttgttcagagtaaagtcatccaaaagttgcatggaaaccagcacggtgcttcttacaccctgacaggcaaagagtacatttcctctcctatccagtcactaggaagctagcatttaatttactgacttggagcaaatgtactttccctgtgtgcttgggggaycttctcattgtagcattaccattctgtagcttccagggaattgttcagcaaatacagaagctccccctgacagtttgatctcaacagtcaacaaacccacacrtgccttcaataatagtgatggaatcmtgctgatgcacacagaatccactccttttcctaaaattacttttttttggagcttattgctgctcccttccagtaatgttttgctacacattcatacttttgcatccaaaccatgaaaawgaagccaawctaaactacttttgcctgacctcactgctgtcaaacatgtt

SEQ ID NO: 75943 - DNA, 600 bp, Chicken  19866894360412_2
ttctatttaataaacaatggctgctgagttcaagttgttcagagtaaagtcatccaaaagttgcatggaaaccagcacggtgcttcttacaccctgacaggcaaagagtacatttcctctcctatccagtcactaggaagctagcatttaatttactgacttggagcaaatgtactttccctgtgtgcttgggggaycttctcattgtagcattaccattctgtagcttccagggaattgttcagcaaatacagaagctccccctgacagtttgatctcaacagtcaacaaacccacacrtgccttcaataatagtgatggaatcmtgctgatgcacacagaatccactccttttcctaaaattacttttttttggagcttattgctgctcccttccagtaatgttttgctacacattcatacttttgcatccaaaccatgaaaawgaagccaawctaaactacttttgcctgacctcactgctgtcaaacatgtttaacatacacagaaagggcaattgctgtggatgaagcactcaatagaccactgaatagtcttctttaaagaatgcatagctgtcatctgcaagaggatcttctc

SEQ ID NO: 75944 - DNA, 600 bp, Chicken  19866894360412_3
agttcaagttgttcagagtaaagtcatccaaaagttgcatggaaaccagcacggtgcttcttacaccctgacaggcaaagagtacatttcctctcctatccagtcactaggaagctagcatttaatttactgacttggagcaaatgtactttccctgtgtgcttgggggaycttctcattgtagcattaccattctgtagcttccagggaattgttcagcaaatacagaagctccccctgacagtttgatctcaacagtcaacaaacccacacrtgccttcaataatagtgatggaatcmtgctgatgcacacagaatccactccttttcctaaaattacttttttttggagcttattgctgctcccttccagtaatgttttgctacacattcatacttttgcatccaaaccatgaaaawgaagccaawctaaactacttttgcctgacctcactgctgtcaaacatgtttaacatacacagaaagggcaattgctgtggatgaagcactcaatagaccactgaatagtcttctttaaagaatgcatagctgtcatctgcaagaggatcttctctgagccagaaaaatgtctcttacaca

SEQ ID NO: 75945 - DNA, 600 bp, Chicken  19866894360412_4
tttaatttactgacttggagcaaatgtactttccctgtgtgcttgggggaycttctcattgtagcattaccattctgtagcttccagggaattgttcagcaaatacagaagctccccctgacagtttgatctcaacagtcaacaaacccacacrtgccttcaataatagtgatggaatcmtgctgatgcacacagaatccactccttttcctaaaattacttttttttggagcttattgctgctcccttccagtaatgttttgctacacattcatacttttgcatccaaaccatgaaaawgaagccaawctaaactacttttgcctgacctcactgctgtcaaacatgtttaacatacacagaaagggcaattgctgtggatgaagcactcaatagaccactgaatagtcttctttaaagaatgcatagctgtcatctgcaagaggatcttctctgagccagaaaaatgtctcttacacaggctgaccgatttctcttggtgttcagagtctcagtttctgtctagcaccatttgaaatcggttatgatgtagggggaaaagcaacaataatggaaaacttcatttcccccagccccaga

SEQ ID NO: 75946 - DNA, 600 bp, Chicken  19866894360412_5
ctgacttggagcaaatgtactttccctgtgtgcttgggggaycttctcattgtagcattaccattctgtagcttccagggaattgttcagcaaatacagaagctccccctgacagtttgatctcaacagtcaacaaacccacacrtgccttcaataatagtgatggaatcmtgctgatgcacacagaatccactccttttcctaaaattacttttttttggagcttattgctgctcccttccagtaatgttttgctacacattcatacttttgcatccaaaccatgaaaawgaagccaawctaaactacttttgcctgacctcactgctgtcaaacatgtttaacatacacagaaagggcaattgctgtggatgaagcactcaatagaccactgaatagtcttctttaaagaatgcatagctgtcatctgcaagaggatcttctctgagccagaaaaatgtctcttacacaggctgaccgatttctcttggtgttcagagtctcagtttctgtctagcaccatttgaaatcggttatgatgtagggggaaaagcaacaataatggaaaacttcatttcccccagccccagagtccttata

SEQ ID NO: 75947 - DNA, 600 bp, Chicken  19866894360417_1
ctgagatcaaggacaaggtcaaaaaacaatgtttctattttgattaattcttaattcttcctcttagggagctgtaatttcattttcgcatttctgggcattctgttattttatcagtgctgcaaacaataataggacacatgaaccattccattttttttcatgattttatgcctcaaattttcatatttttatttctgtgtaggaggttgatgctaggtgtgattcaattctaaatgagaagtcataaatgtgtctgacaaatcacctctcatcaactacatatctagaatacaaatygatgaattaaggtaggagatttctgcttctcttgacaaggagaaaaagcacaagattatgtatctgaaagtctttgaaagaaatcttgtttctcaatattagttctacagttcccatttaaacctcaaaagaagatttcaagctggtttaggacaaatatttcagatgaataactgaataattactagccaaagaagaaacaaatggctgtttttaaaaatgtccccctagaaaggaaaaaaaaaaaaaaaaaaaagtagtgttttcctttcttctgtctggaagaagtgtatataacac

SEQ ID NO: 75948 - DNA, 600 bp, Chicken  19866894360430_1
atttctcattgttgtaaaatacgtgtaagagtaagagatatagtgagcagctgctgctgtgctgcagaaaagcaaaggggacttgataagaggaacattcctgtaaggtaataccattggcaaatactaatagaataatgtctgggtaaggcttgatgtctggcatcaggataattcagacataacgcatcacctgttagatattgaaaacagtgaggtacaatattctgtacctgtatagtctataagaagaaaaaactgggatatggaagatcaatttagaaatggcctcttctctcrtgtaactcatgatgggactagagggaatggcttcaagctgtgcgatgggaggttcaggctggatgttaggaaatactacttctctgaaagagtggtcaggcagtggaatgggctgcccaggaaggtgatggaccctgcaggtgttcaaggaacgtttggatgttgtgggacatggtttagtgagaaccattggtgatgggtggatggttggactgggtgatcctgtgggtcttttccaaccttggtaattctatgatgttatgattctaagagtggataggaacttgagagactatccag

SEQ ID NO: 75949 - DNA, 600 bp, Chicken  19866894360431_1
cttggtaattctatgatgttatgattctaagagtggataggaacttgagagactatccaggctaaataatactttgaacagggtgaatttaacactaaagaatagaaaacaaaaatcagtttgtttttccccagggaaaatgtaaggacaagtgtgcttaaaggtgggtgacatcattccataccatatcacagcatgatgcacagcacaatataaactaaacaccttatgagctttgtaaaacttggaatgcaacttttggtacgtgcgataaataagtttttaatgctgatttcaaakgcacatagctcaaatataagggtaattaatttctartgaatttcagggagcctgaagaattctttgcgatgcgttgtgctgaaagtattacaggaaatacatgaggagacaccatggcacaaagggagcaagctgaaaggacaaagatcttgtgcaggaacaaagtgtttttgttgcttagaacttgagcagatcataagaaactacctaccctactgctgctatttacaaacaacaaaggctgcaaaaagtagggatgtgtattcagggcttgtaataaccaacgaattaagtgacact

SEQ ID NO: 75950 - DNA, 600 bp, Chicken  19866894360431_2
ataggaacttgagagactatccaggctaaataatactttgaacagggtgaatttaacactaaagaatagaaaacaaaaatcagtttgtttttccccagggaaaatgtaaggacaagtgtgcttaaaggtgggtgacatcattccataccatatcacagcatgatgcacagcacaatataaactaaacaccttatgagctttgtaaaacttggaatgcaacttttggtacgtgcgataaataagtttttaatgctgatttcaaakgcacatagctcaaatataagggtaattaatttctartgaatttcagggagcctgaagaattctttgcgatgcgttgtgctgaaagtattacaggaaatacatgaggagacaccatggcacaaagggagcaagctgaaaggacaaagatcttgtgcaggaacaaagtgtttttgttgcttagaacttgagcagatcataagaaactacctaccctactgctgctatttacaaacaacaaaggctgcaaaaagtagggatgtgtattcagggcttgtaataaccaacgaattaagtgacacttgaggttggaacacatggcattcgtcctaggaatct

SEQ ID NO: 75951 - DNA, 600 bp, Chicken  19866894360437_1
attcagataaaagagagaataaactgttgattaatttagaataggaaacactagtagattgaggcaactaaaggcatggattactggaaatttcaggactcttctgttacatttttaggaccttatgcatttccatagaatgtttttgacatcttttaggaaatctattcttacgtttaataaaggtttactaccttgtaggagaaagatacgcactcgggtttgattgggccaatactgatctgtgaaaaaggaaccttcagtgcatcagacaacaacagaacaaacactcgagacttyttcttgctttttatggtctttgatgaagaaaaaagttggtacttcgacaaacgctctagaaagccttgtactgagaagacccaagaaatgcaacaatgccacaaattctatggtacttatttccttttctcaagtacttattgggrtagagggaaargtgctgagggagttatctcagttcactgtgcttgtgaacaaacgtaaatcctgcacattagttgtgtgaatgttattttgctgttgctgttctccattttacccataatagtcatagttttataagaaaagattagcattgac

SEQ ID NO: 75952 - DNA, 600 bp, Chicken  19866894360437_2
tgacatcttttaggaaatctattcttacgtttaataaaggtttactaccttgtaggagaaagatacgcactcgggtttgattgggccaatactgatctgtgaaaaaggaaccttcagtgcatcagacaacaacagaacaaacactcgagacttyttcttgctttttatggtctttgatgaagaaaaaagttggtacttcgacaaacgctctagaaagccttgtactgagaagacccaagaaatgcaacaatgccacaaattctatggtacttatttccttttctcaagtacttattgggrtagagggaaargtgctgagggagttatctcagttcactgtgcttgtgaacaaacgtaaatcctgcacattagttgtgtgaatgttattttgctgttgctgttctccattttacccataatagtcatagttttataagaaaagattagcattgactggaaaattgttattaaaatgcagaaaggatattgacctgaagctttaaaaaggcttttcaatttaaacaaacaaacaaaaaaaaacatacaaaaaaaaaaatctaaccactctttccagtcagaggttgatactctgtgaaagtg

SEQ ID NO: 75953 - DNA, 600 bp, Chicken  19866894360437_3
aggaaatctattcttacgtttaataaaggtttactaccttgtaggagaaagatacgcactcgggtttgattgggccaatactgatctgtgaaaaaggaaccttcagtgcatcagacaacaacagaacaaacactcgagacttyttcttgctttttatggtctttgatgaagaaaaaagttggtacttcgacaaacgctctagaaagccttgtactgagaagacccaagaaatgcaacaatgccacaaattctatggtacttatttccttttctcaagtacttattgggrtagagggaaargtgctgagggagttatctcagttcactgtgcttgtgaacaaacgtaaatcctgcacattagttgtgtgaatgttattttgctgttgctgttctccattttacccataatagtcatagttttataagaaaagattagcattgactggaaaattgttattaaaatgcagaaaggatattgacctgaagctttaaaaaggcttttcaatttaaacaaacaaacaaaaaaaaacatacaaaaaaaaaaatctaaccactctttccagtcagaggttgatactctgtgaaagtgaatctttttgc

SEQ ID NO: 75954 - DNA, 600 bp, Chicken  19866894360438_1
atttttactgaaaacctttttgttcaaacagtgtgataaggtaaatgcggataaaaatgctacgttggcaaaaattcctagactgagcttgattatttattgccttttaatgttaattaaaaataatctgaacagagactgcagcaatcccactgtgcttgctattctgcccatctttaaacctcataaacagagaagttccacatccctgcaatcaaacctctctccagacgcacacagactaaaacagaaagaaaaaaattagaaatttgcccttccttcagactttcccactcacaygggcaaatacttcttgaagcatgaattgcccyaggagaaaaccaggaaagggctaaagacacttctaaaggaacctcaaaagtctgtgtctggtagctgatccaggcctccggtgcagtagaaaaagccttgcactggcctaggagcttggctttctctttagacatcccatgacacgtcttgcaaatcccacaacggataatttattccctgcgtgctccttgtagaatatgggaaagattacaactggtcacagacttcagaagraggactgcaagatgtcacaagaagataaaacga

SEQ ID NO: 75955 - DNA, 600 bp, Chicken  19866894360438_2
gtgataaggtaaatgcggataaaaatgctacgttggcaaaaattcctagactgagcttgattatttattgccttttaatgttaattaaaaataatctgaacagagactgcagcaatcccactgtgcttgctattctgcccatctttaaacctcataaacagagaagttccacatccctgcaatcaaacctctctccagacgcacacagactaaaacagaaagaaaaaaattagaaatttgcccttccttcagactttcccactcacaygggcaaatacttcttgaagcatgaattgcccyaggagaaaaccaggaaagggctaaagacacttctaaaggaacctcaaaagtctgtgtctggtagctgatccaggcctccggtgcagtagaaaaagccttgcactggcctaggagcttggctttctctttagacatcccatgacacgtcttgcaaatcccacaacggataatttattccctgcgtgctccttgtagaatatgggaaagattacaactggtcacagacttcagaagraggactgcaagatgtcacaagaagataaaacgagtttatttttctcaaggatatggagaccttca

SEQ ID NO: 75956 - DNA, 600 bp, Chicken  19866894360438_3
atttgcccttccttcagactttcccactcacaygggcaaatacttcttgaagcatgaattgcccyaggagaaaaccaggaaagggctaaagacacttctaaaggaacctcaaaagtctgtgtctggtagctgatccaggcctccggtgcagtagaaaaagccttgcactggcctaggagcttggctttctctttagacatcccatgacacgtcttgcaaatcccacaacggataatttattccctgcgtgctccttgtagaatatgggaaagattacaactggtcacagacttcagaagraggactgcaagatgtcacaagaagataaaacgagtttatttttctcaaggatatggagaccttcacaagccattaaaagacattccaagagccgggctctttttctctgttgccttccgaaacatcaaaagaaaaataaaaaaaagccctgcaactcttctcttctggacagtcaaaaggctccacactggcaggtaatgggctcaaaaatgttgtatttgaaaaaatttgttaatatagacaatctaactttatttcttctggctcaagtgcgaatactttctaggcagtacctggaag

SEQ ID NO: 75957 - DNA, 600 bp, Chicken  19866894360453_1
acattagggtttgacatttcggtgttacttttccttctcttccaaggaatagatcaaagtgtacagagagtggggtttttgatatttttcttggcctctgtaggaccaaaaatctagcatgctttgagggatagaaagtacaggcttgttgatagtaagaaggctccgttttcttttcctttctttttctggtactgttttaggccctcagctctcagaagctgagagaatttgttctttgaactctgttttattttcagttgcgtaaagagagaatttttggtcacagacttatcaccragcttgaattggtttggtttgtggctaactgtgttttgagagctctagctagttcaccttctgattcctttggtaacacagcatgatcatagctctgctcttcatgtatgctctgaggcagcgatcttccacgctttgtagcttctaagcagtggacrgcatgcttgcaaacggcgcttcacctcaagatagaggtgaatcagaattttcctttatgcattaataacactgaatcttactgttgtctggtcagctttcgagatggtggtgggatgtaagtgctgctgtgagtcggctaag

SEQ ID NO: 75958 - DNA, 549 bp, Chicken  19866894360453_2
gaaggctccgttttcttttcctttctttttctggtactgttttaggccctcagctctcagaagctgagagaatttgttctttgaactctgttttattttcagttgcgtaaagagagaatttttggtcacagacttatcaccragcttgaattggtttggtttgtggctaactgtgttttgagagctctagctagttcaccttctgattcctttggtaacacagcatgatcatagctctgctcttcatgtatgctctgaggcagcgatcttccacgctttgtagcttctaagcagtggacrgcatgcttgcaaacggcgcttcacctcaagatagaggtgaatcagaattttcctttatgcattaataacactgaatcttactgttgtctggtcagctttcgagatggtggtgggatgtaagtgctgctgtgagtcggctaagagactgtgcttggaagtccaaactgatgctggaaggagccagaagtggttgaatggaagaccagaaggctgtctgggaagtttttctctttccctgaactaaaataa

SEQ ID NO: 75959 - DNA, 600 bp, Chicken  19866894360464_1
ccattcctaagcaagaaagcaattacatataagcgtgtcataactgtctgaatatataaatatatggtttattcaccatatacagaaatgcccaattctgatgaattttaaagcatgttgcagaaaaacacaaaggaaaacagcccttaccatgcaatcataacaccattatcggtgcacagccttggaggaggagacagaaaagcaaaaccgtttgcatttgccagagtctgcagtccttttctgatatactgattacttgcaactcctcctgatacaacctaacagcagttttcagtwggggaaagaaaaaaaaaggcattaactcmaaagaaaggacttgtaggtcaaactaaactagcagcctatctaaaaaacaaattcatcacaaagttttgaagatggcaattaaaaaaatatatttgaagcttaagccatttttgaagattgaagcctatcagaaaagaatgtgagcgtattatagctaaaaacaattcctgagtgaaagtatgctatcagcagaacagctatcaagtactgggctgccctagatcaaactgtgtgacatgagctgttagaaaaggtcaggttagttggtat

SEQ ID NO: 75960 - DNA, 600 bp, Chicken  19866894360464_2
taagcgtgtcataactgtctgaatatataaatatatggtttattcaccatatacagaaatgcccaattctgatgaattttaaagcatgttgcagaaaaacacaaaggaaaacagcccttaccatgcaatcataacaccattatcggtgcacagccttggaggaggagacagaaaagcaaaaccgtttgcatttgccagagtctgcagtccttttctgatatactgattacttgcaactcctcctgatacaacctaacagcagttttcagtwggggaaagaaaaaaaaaggcattaactcmaaagaaaggacttgtaggtcaaactaaactagcagcctatctaaaaaacaaattcatcacaaagttttgaagatggcaattaaaaaaatatatttgaagcttaagccatttttgaagattgaagcctatcagaaaagaatgtgagcgtattatagctaaaaacaattcctgagtgaaagtatgctatcagcagaacagctatcaagtactgggctgccctagatcaaactgtgtgacatgagctgttagaaaaggtcaggttagttggtatgaaaatccccttctagcttaaaaatcaac

SEQ ID NO: 75961 - DNA, 600 bp, Chicken  19866894360477_1
ccgctgctcggtgccttgggtgtcttccccgctgatacacagcagagattggcaactgatctatatatagtacagcaccgcagcccagacacaatggcagcattcagcgtgcatacatgatgatgtcagcaatggatgtttaattgcatcatgggaagtgaggggagaaaagaattggaagaaaaaaaagaaagggggcccctcgcccctccactttacataatttccttcgccgccagatgggaacgcatgggaatgccgccccacatctcagcagctccctcccctaagcctggcacrgccacatctgtttccccgatttcctacgcttctgatcttcttcacctgccctgcaccccaccatcttgggagagcttcctgagatgctgcggccgcatttgatttggcttcctgagccttgctccctccttccttgtttttctttctccgcttgtggcagcatccaggggctggcagctctgaagggctgaggaagggaagggtctgcactgcagggaccacgcgggctgcttttatttcagcaaatgagcatctgtagcacaaggcagtggctcacagaaggggcagctcccattcgag

SEQ ID NO: 75962 - DNA, 600 bp, Chicken  19866894360479_1
aggtccctcataagaaccagttccagttccaaacatctgcccattttctgcaacactcagacaaaacctggaagtgtaagatgaaaatacttgagtatttccctttttgaccatttctgaaagccatcccaggcacatcaccgctgaggagggactcattctcttcatccacaagcagagctcccctgaccttgacagctctgcaggaatagtcactacttagggacacatcctgttaatgcttccccaaagcatatttggtgcatgaggtaagtggaatggatgcagtgagtatttccrttctacaatttgccccaattgcttctgtctctctatcacacagaacctgatacctccaaaactgagagctatatttacccctcatatactgcagcatttgatggtctcatggttctaaattaagcagcttctgtcatgcccaagaacagcaatagctcttctccatacactctcagcatctgcattcttggtgcatttgcctaaatcatacttagaaccatgcacttaaatagccgacaggcatctcacttatccaacggtgaaactgagattgctggacattgcacccactgtcctttt

SEQ ID NO: 75963 - DNA, 600 bp, Chicken  19866894360481_1
tttctcctaaccaagcccaaatgctgttaaggtcggaattgaactgctgccattgctgaaggttctgcttcatccttagctccttgcttagagcttgagcctggattaattcccatcggtcaattacacctggaatgataaactccaaattcaacaaaagtgaaaaaaaaaccaacacatttgccacgcaagcaattgtgtcacttgagcactgcacagtataaaaaatgttccacaaacctgccaaaactttaatccaccaaacaccacattgaaaactaagttaggttgaaaaacatwatgttggagagaaagaatgagaagtcttgatgagtgactgggcagcaagaaattttaccactttctaacatcaayacttcatgactttacagaattaagtaaatatatacaagtgtcatgggttattatagaatgaacaaatcatagaacggtgtgggttggaagggacctttaagatcatctagttccaacttccctgcaataagcagggacacaacctctcactgggttatgctagtatatggatataataaatcagtataaatgcaaacaagttaggatctgaacacatctaactag

SEQ ID NO: 75964 - DNA, 600 bp, Chicken  19866894360481_2
ttagctccttgcttagagcttgagcctggattaattcccatcggtcaattacacctggaatgataaactccaaattcaacaaaagtgaaaaaaaaaccaacacatttgccacgcaagcaattgtgtcacttgagcactgcacagtataaaaaatgttccacaaacctgccaaaactttaatccaccaaacaccacattgaaaactaagttaggttgaaaaacatwatgttggagagaaagaatgagaagtcttgatgagtgactgggcagcaagaaattttaccactttctaacatcaayacttcatgactttacagaattaagtaaatatatacaagtgtcatgggttattatagaatgaacaaatcatagaacggtgtgggttggaagggacctttaagatcatctagttccaacttccctgcaataagcagggacacaacctctcactgggttatgctagtatatggatataataaatcagtataaatgcaaacaagttaggatctgaacacatctaactagccaaatacttattatcattttcactagtatttctaactctcacaatttaatattctcatatcttcatattttctt

SEQ ID NO: 75965 - DNA, 599 bp, Chicken  19866894360486_1
  misc_feature (1)..(21): n is any nucleotide
nnnnnnnnnnnnnnnnnnnnntgatggggtggggggcactcagcccagggcagagtgtgggactggggagggttttgaggtcccttccaacccaactgtgctgtgatactctggttatacaatttttaaggtccctcccaacccaaccatgccgtgattccatggttctacaatccttaatgtcccttcctacccaaccatgctgtgattccatgactttacgatctttaaggtctcttccaacccaagcccaaaatgcagccaggccataccttccatggtgttggagatgacgctgayggcactccccaccctcttctcaagccctggcccatcttgattgcccacggtgaggtggttggagtctgatttctctgtctcgttggctgggttgaactagaggagaggaggacacataggtgaacaagtattgaatgcacttagaggctgagaagacaaaagggtcatggtctagagaccttgggtgcaacatagagctgcaggaggattggtaggaccagcgggcacttctaaaggatgtgggggttgtgttgggtcacggcaggggcagagcacgtacttcgatcaccgtggcggag

SEQ ID NO: 75966 - DNA, 600 bp, Chicken  19866894360486_2
gagctgcaggaggattggtaggaccagcgggcacttctaaaggatgtgggggttgtgttgggtcacggcaggggcagagcacgtacttcgatcaccgtggcggagcgctgcagcacaaccttggggaccacctgcccattgcagtcctttgccttgtcctggtcgctgttcagatccgagtcgctcttcttcccggccgcgctgctgtgcagggaactgctgctggactgcctgtcctgcaactgcagcaaccacatctccatcactgcagtctgaacttcccaaaacctcacatgtttygaatttgggcagggtgaataattcacaagggcataactgtgtggtgagtgggtgtggtggtgatgggacagcggttggatccgatgatcttagtggtcttttycaacctcaatgactctatgagcgggcatggtggtgatgggttggggttggacaygatgatcctagaggacttttccaacctcaatgattccataattctatgtttctatgtaaaacctctgtcttgtggagaacattaatctttgtaatacgctttcattccaaatgagtaagagaagcacttgtcatatgcccaaa

SEQ ID NO: 75967 - DNA, 526 bp, Chicken  19866894360486_3
agcgctgcagcacaaccttggggaccacctgcccattgcagtcctttgccttgtcctggtcgctgttcagatccgagtcgctcttcttcccggccgcgctgctgtgcagggaactgctgctggactgcctgtcctgcaactgcagcaaccacatctccatcactgcagtctgaacttcccaaaacctcacatgtttygaatttgggcagggtgaataattcacaagggcataactgtgtggtgagtgggtgtggtggtgatgggacagcggttggatccgatgatcttagtggtcttttycaacctcaatgactctatgagcgggcatggtggtgatgggttggggttggacaygatgatcctagaggacttttccaacctcaatgattccataattctatgtttctatgtaaaacctctgtcttgtggagaacattaatctttgtaatacgctttcattccaaatgagtaagagaagcacttgtcatatgcccaaactcttacaaggacaccaggactcaggcaa

SEQ ID NO: 75968 - DNA, 472 bp, Chicken  19866894360486_4
cctggtcgctgttcagatccgagtcgctcttcttcccggccgcgctgctgtgcagggaactgctgctggactgcctgtcctgcaactgcagcaaccacatctccatcactgcagtctgaacttcccaaaacctcacatgtttygaatttgggcagggtgaataattcacaagggcataactgtgtggtgagtgggtgtggtggtgatgggacagcggttggatccgatgatcttagtggtcttttycaacctcaatgactctatgagcgggcatggtggtgatgggttggggttggacaygatgatcctagaggacttttccaacctcaatgattccataattctatgtttctatgtaaaacctctgtcttgtggagaacattaatctttgtaatacgctttcattccaaatgagtaagagaagcacttgtcatatgcccaaactcttacaaggacaccaggactcaggcaa

SEQ ID NO: 75969 - DNA, 599 bp, Chicken  19866894360492_1
  misc_feature (1)..(139): n is any nucleotide
nnnnnnnnnnnnnnnnnnnnnnnnnnnnnnnnnnnnnnnnnnnnnnnnnnnnnnnnnnnnnnnnnnnnnnnnnnnnnnnnnnnnnnnnnnnnnnnnnnnnnnnnnnnnnnnnnnnnnnnnnnnnnnnnnnnnnnnnnnnaacacatggaagataagttggggtagaattagtctcttcttccacattgtctattagattataagattcttactgctgatcacattctattttttatttacagagtactaaaacttgagaaaaattaaagaaggtctaaagcataataatttcctatcatmaaaatgacaaaaaacagtgtttattcatatatatctatataaaaataatcacgtgaagaggaagaagagaaacggagggagagagaccatatcttcaatgttttaaaattcagggaagacttttgtaatgaattaccacaggagcagaatttataatattaaacaaaaggaagattatgggatatatttctctgtgttataatttcacagaaggtagcaggcctatgggaaatgggatgtgaacttagttcaatcataaatccagaagttctaaagaaaaaacaagtaagatttccacg

SEQ ID NO: 75970 - DNA, 599 bp, Chicken  19866894360495_1
  misc_feature (1)..(93): n is any nucleotide
nnnnnnnnnnnnnnnnnnnnnnnnnnnnnnnnnnnnnnnnnnnnnnnnnnnnnnnnnnnnnnnnnnnnnnnnnnnnnnnnnnnnnnnnnnnnnaatgggaggttggtggccctgcccagtaggggggtggagattcatgatccttgaggtcccttccaacccaggctggccattctgtgattctgtgacaatggagaagaataattcccattcttcactcttgttccttaaactgttaccactctggatgatgtcccatcacatctctatttctctgtttcatgtcctgagttcactacrcacctgggtaagattagtctgtttagggcagttccttagaagggaaggacagtagggaggaatcattgcccgtatgaatataacctgacaaatttgacagataaagtttgatattgctctcctgtactaccaaataacaggcataaaagatgaggcctttgccaagtaatgatgctgccctgttacccatggttgctggctgtaaactctctccagttttaagagatctcttttccatatttagtgcttctgccagtaagggtccatagtaagccccatgcttttaacagcctcaggaa

SEQ ID NO: 75971 - DNA, 600 bp, Chicken  19866894360495_2
tcccagccagctgttactaataataacattctgcatcagaaagttttgcctgatccttacatatacacattttgtaatttttgctatgtctgttctgcttagaactgttattttatatactgccaaaatgtaaaatttacgtttttaagagacaaatgaatcagtagaggtatactgattttgtagccatttaaggcatttgccttcacagaaagctacagaatgaagcatttgtttcaactctcacctgccctctgctgcatgaaaaactgtactcagaaagcaggcttaataaatcartacagtttgattaattaaatacttttgtcttttttctttctttaggaatgcagtgaatgctcttttatcctcttctggagtcacagatctgtataaataaatcctaatattcctcaactactttctaacttgcaataacacaccatacctttcatagatgagcacagacacagcaatttyraagcctttcattcagtgagttggtgagactttaagaaaaaggtctttcaatttcatccattgggggctttctttctgacaagaatataatcaagaacaagactgctatcaaatgttact

SEQ ID NO: 75972 - DNA, 600 bp, Chicken  19866894360495_3
ttgtagccatttaaggcatttgccttcacagaaagctacagaatgaagcatttgtttcaactctcacctgccctctgctgcatgaaaaactgtactcagaaagcaggcttaataaatcartacagtttgattaattaaatacttttgtcttttttctttctttaggaatgcagtgaatgctcttttatcctcttctggagtcacagatctgtataaataaatcctaatattcctcaactactttctaacttgcaataacacaccatacctttcatagatgagcacagacacagcaatttyraagcctttcattcagtgagttggtgagactttaagaaaaaggtctttcaatttcatccattgggggctttctttctgacaagaatataatcaagaacaagactgctatcaaatgttacttaaaaatgtatgagccaacaggagctgctcactgaggacttagaaactgagtattatcatagtctttttaattgacatacttatggtactagaaagtcaatttatattggctttgtaaatctaccattctatttggtttctcctgctatcattacatgccttgkgtgactgtatctcttg

SEQ ID NO: 75973 - DNA, 600 bp, Chicken  19866894360495_4
tgtagccatttaaggcatttgccttcacagaaagctacagaatgaagcatttgtttcaactctcacctgccctctgctgcatgaaaaactgtactcagaaagcaggcttaataaatcartacagtttgattaattaaatacttttgtcttttttctttctttaggaatgcagtgaatgctcttttatcctcttctggagtcacagatctgtataaataaatcctaatattcctcaactactttctaacttgcaataacacaccatacctttcatagatgagcacagacacagcaatttyraagcctttcattcagtgagttggtgagactttaagaaaaaggtctttcaatttcatccattgggggctttctttctgacaagaatataatcaagaacaagactgctatcaaatgttacttaaaaatgtatgagccaacaggagctgctcactgaggacttagaaactgagtattatcatagtctttttaattgacatacttatggtactagaaagtcaatttatattggctttgtaaatctaccattctatttggtttctcctgctatcattacatgccttgkgtgactgtatctcttgc

SEQ ID NO: 75974 - DNA, 600 bp, Chicken  19866894360495_5
cagacacagcaatttyraagcctttcattcagtgagttggtgagactttaagaaaaaggtctttcaatttcatccattgggggctttctttctgacaagaatataatcaagaacaagactgctatcaaatgttacttaaaaatgtatgagccaacaggagctgctcactgaggacttagaaactgagtattatcatagtctttttaattgacatacttatggtactagaaagtcaatttatattggctttgtaaatctaccattctatttggtttctcctgctatcattacatgccttgkgtgactgtatctcttgctgtaacatgttcctagggcttccaccactggcaatagayatttcaacaaaatattctgtgccccacttctgaaacaaaaggtgtctggttgtgagtgtgttcagtccttgaagggaaacaataccaaaacagaacagaggaaatcttccaggtttatcacagagaactcttgtaccacatttaccccatttctgaggtagcaggtggtctcctaggggttgggagaattctacagaatttgcagtgctgtgttgtgcggcattgttgattgttggaggtgaag

SEQ ID NO: 75975 - DNA, 600 bp, Chicken  19866894360495_6
aggtctttcaatttcatccattgggggctttctttctgacaagaatataatcaagaacaagactgctatcaaatgttacttaaaaatgtatgagccaacaggagctgctcactgaggacttagaaactgagtattatcatagtctttttaattgacatacttatggtactagaaagtcaatttatattggctttgtaaatctaccattctatttggtttctcctgctatcattacatgccttgkgtgactgtatctcttgctgtaacatgttcctagggcttccaccactggcaatagayatttcaacaaaatattctgtgccccacttctgaaacaaaaggtgtctggttgtgagtgtgttcagtccttgaagggaaacaataccaaaacagaacagaggaaatcttccaggtttatcacagagaactcttgtaccacatttaccccatttctgaggtagcaggtggtctcctaggggttgggagaattctacagaatttgcagtgctgtgttgtgcggcattgttgattgttggaggtgaagaaagggaggtgggaaagaacccattttaacatctcttctctttctctcctcatccc

SEQ ID NO: 75976 - DNA, 600 bp, Chicken  19866894360505_1
tcttatgttagagctctcattgtgcatttgcttcactcctatgctccttccccaggctcttacttttggacactatgcttgttgtcacacatagggtatagtatcccacacaagcatcatgtgcagcccagtacacttaatttcctcactgtcactgctcaagaatacaactggaattatattagacatactggcatattccttcagaaaggtttgttctgttctttcaaaagactggaccaggactataggttaaggaataaaagtaggtggtaggtggttttatgcagcatgctctaraacttatcttctttctcttggtgggcacaaaaatctgaaggtttgatctcttgcatgatctgttatgttctcatcagataaaggccattttaagcacaaggcagaaactgacataatacctcatggataaatatccagtgaggtggacraaaataaataaataaataaataaacaaatagtgatccaggtgaaggtattccctgttctgcctttagatttcttgaagttatgatttcttctgaattagtaagacatttgccttcttgtatagacactctgaagtttttaagttacagctt

SEQ ID NO: 75977 - DNA, 600 bp, Chicken  19866894360505_2
tgtcactgctcaagaatacaactggaattatattagacatactggcatattccttcagaaaggtttgttctgttctttcaaaagactggaccaggactataggttaaggaataaaagtaggtggtaggtggttttatgcagcatgctctaraacttatcttctttctcttggtgggcacaaaaatctgaaggtttgatctcttgcatgatctgttatgttctcatcagataaaggccattttaagcacaaggcagaaactgacataatacctcatggataaatatccagtgaggtggacraaaataaataaataaataaataaacaaatagtgatccaggtgaaggtattccctgttctgcctttagatttcttgaagttatgatttcttctgaattagtaagacatttgccttcttgtatagacactctgaagtttttaagttacagctttttgattatggaataatttgaggtctcacactgccctttacacatctccccctgaagtcaatgcattcgtacacatttgctgttgagggcagagtttagcttcttgtgcatttagtctatgaattccactactgccagatctctctgct

SEQ ID NO: 75978 - DNA, 600 bp, Chicken  19866894360508_1
gtgcaagtagaatagaacagaaatgaactctttcacatgagggtggagatattcatcttgcaactggaggaggtgatggtaaatagaaaaacaggaaacagaataataaaaaaaaaaatcactagaatctatactcaaagcaccctaacctggactgtacaagtttaagactggtaaaacacagcatacaaaatgtttttttcctttaccacaatgagtcgggaaagcccagcaattaggaggaagtcaaagacaacggcctcagaattttgtttgtcttgggcaaaagaatgcaagctrggggcgggggggggaaggggagaaagaaagatttcagccatcctaatagaattgttaaattgcaacaagatatacaagtaatgatctaaaaaactacaattctgcagaaatgtctagagcagtaaaatcaaaatatcttcaaaaggtttcacaaaactggatataaagcctctctcagtcagaaataaagaaataatcaatcagacaacgtgcagatacaagagcagttgagtcctttacataggattacaataaaacatcttttttcttatatgagagaaggactatggataagagtga

SEQ ID NO: 75979 - DNA, 600 bp, Chicken  19866894360517_1
ttcaacgggcaactttgaaaatatgtctccagaatcctaaaacctacggtaatagattaaatattagcttcagtgggcagctctaggacttacatgtggtctgtatgcaatctagtttatcaggaaacaagaaaatactcctaatctaaaccctaaatctaatcttttagacaaaaggataaatttttgagtgattgtgctaagaacataaatcagaatgtgccaatgttttgggacatcatacagcttctttactctgctcaggacaaggaaaaatattgcagcaccagtattgttatrccaagtgtttgattgcaagtgtaacaacacaagcatgatgtcttttattaggatctcttagctcgatgactagaccaataataattaagtatatctgagaccaaccttcaacctttctaccttgaatgctatgcagtcytggartacagaaaataatgaatgtggtaattttcatcgtcctttctgggggaattaagttgccacgtccttcctaactaaaatgaactaaaatgcctgatgaacagcaaatggtttgggaaaatatacagctggacacagacactcaagccaccatagcag

SEQ ID NO: 75980 - DNA, 600 bp, Chicken  19866894360517_2
cctaatctaaaccctaaatctaatcttttagacaaaaggataaatttttgagtgattgtgctaagaacataaatcagaatgtgccaatgttttgggacatcatacagcttctttactctgctcaggacaaggaaaaatattgcagcaccagtattgttatrccaagtgtttgattgcaagtgtaacaacacaagcatgatgtcttttattaggatctcttagctcgatgactagaccaataataattaagtatatctgagaccaaccttcaacctttctaccttgaatgctatgcagtcytggartacagaaaataatgaatgtggtaattttcatcgtcctttctgggggaattaagttgccacgtccttcctaactaaaatgaactaaaatgcctgatgaacagcaaatggtttgggaaaatatacagctggacacagacactcaagccaccatagcagagtgtgccagwctgttgttttagaactgaatcyttcataatgctttaaggtctcaatttttgtgaccttatcctaccattttataccagcaagggcacaaagacagagcatgtggagttgactaagatgcttgacgtga

SEQ ID NO: 75981 - DNA, 600 bp, Chicken  19866894360517_3
tctaaaccctaaatctaatcttttagacaaaaggataaatttttgagtgattgtgctaagaacataaatcagaatgtgccaatgttttgggacatcatacagcttctttactctgctcaggacaaggaaaaatattgcagcaccagtattgttatrccaagtgtttgattgcaagtgtaacaacacaagcatgatgtcttttattaggatctcttagctcgatgactagaccaataataattaagtatatctgagaccaaccttcaacctttctaccttgaatgctatgcagtcytggartacagaaaataatgaatgtggtaattttcatcgtcctttctgggggaattaagttgccacgtccttcctaactaaaatgaactaaaatgcctgatgaacagcaaatggtttgggaaaatatacagctggacacagacactcaagccaccatagcagagtgtgccagwctgttgttttagaactgaatcyttcataatgctttaaggtctcaatttttgtgaccttatcctaccattttataccagcaagggcacaaagacagagcatgtggagttgactaagatgcttgacgtgatgact

SEQ ID NO: 75982 - DNA, 494 bp, Chicken  19866894360517_4
attgcaagtgtaacaacacaagcatgatgtcttttattaggatctcttagctcgatgactagaccaataataattaagtatatctgagaccaaccttcaacctttctaccttgaatgctatgcagtcytggartacagaaaataatgaatgtggtaattttcatcgtcctttctgggggaattaagttgccacgtccttcctaactaaaatgaactaaaatgcctgatgaacagcaaatggtttgggaaaatatacagctggacacagacactcaagccaccatagcagagtgtgccagwctgttgttttagaactgaatcyttcataatgctttaaggtctcaatttttgtgaccttatcctaccattttataccagcaagggcacaaagacagagcatgtggagttgactaagatgcttgacgtgatgactgtaaattgtccacattttgcagctgtagtaaggaatggtgatgacagctatgtggtacaca

SEQ ID NO: 75983 - DNA, 472 bp, Chicken  19866894360517_5
catgatgtcttttattaggatctcttagctcgatgactagaccaataataattaagtatatctgagaccaaccttcaacctttctaccttgaatgctatgcagtcytggartacagaaaataatgaatgtggtaattttcatcgtcctttctgggggaattaagttgccacgtccttcctaactaaaatgaactaaaatgcctgatgaacagcaaatggtttgggaaaatatacagctggacacagacactcaagccaccatagcagagtgtgccagwctgttgttttagaactgaatcyttcataatgctttaaggtctcaatttttgtgaccttatcctaccattttataccagcaagggcacaaagacagagcatgtggagttgactaagatgcttgacgtgatgactgtaaattgtccacattttgcagctgtagtaaggaatggtgatgacagctatgtggtacaca

SEQ ID NO: 75984 - DNA, 599 bp, Chicken  19866894360541_1
  misc_feature (1)..(220): n is any nucleotide
nnnnnnnnnnnnnnnnnnnnnnnnnnnnnnnnnnnnnnnnnnnnnnnnnnnnnnnnnnnnnnnnnnnnnnnnnnnnnnnnnnnnnnnnnnnnnnnnnnnnnnnnnnnnnnnnnnnnnnnnnnnnnnnnnnnnnnnnnnnnnnnnnnnnnnnnnnnnnnnnnnnnnnnnnnnnnnnnnnnnnnnnnnnnnnnnnnnnnnnnnnnnnnnnnnnnnnnnnnnnctttcagtattgttcttttctctttacccacgcacacagaacagggttaggtacatagagccactgcaggaaaagcagaygaggaggggaagccagcagatcttttttatctggggcctttgttttgagaggtcaaggaagtctgacaccatggtggtatgagtcccccgaaacacaggggaactcactcagtctgcctagtgcctgagtgggagtgctgatgggaacatttgaaaagagcacagtataaatctccagcagacagctgtgcaagtcacaaccgtgttaccaagggcaaaaatgcaaccccgcttattagactagatcctcttttagcccaagtcagagtcacttgagtcattctgcaacagcttaacta

SEQ ID NO: 75985 - DNA, 600 bp, Chicken  19866894360541_2
ttgttttgagaggtcaaggaagtctgacaccatggtggtatgagtcccccgaaacacaggggaactcactcagtctgcctagtgcctgagtgggagtgctgatgggaacatttgaaaagagcacagtataaatctccagcagacagctgtgcaagtcacaaccgtgttaccaagggcaaaaatgcaaccccgcttattagactagatcctcttttagcccaagtcagagtcacttgagtcattctgcaacagcttaactagcgtatcaccagggcatctgctcagctcctgtgagcccawctcccctgtgacagaaaccaaacacaacacagcctttaatttcagtgaaatcaggaacagatcagatctggggaacatgatgcctccaacacgctgaatcacatttgtttctcgggtgctgcgtttccttgttcctgaacaaattccttgcccattgctttaggatcttctggtctgacacttcgttctttccttaaaaaacagacttcaggaagtttaactcagtaagtggtacagtaagcagaggacctgatgctttttcattatttcaaacacagacagtatcatttgatgcttatg

SEQ ID NO: 75986 - DNA, 600 bp, Chicken  19866894360545_1
atccttgatgcatactagagataatggagctttcttcccttattcacagaggtgctgtgtggattatggaattcgttagtcaatgcttgtaaattgccactgttgactcagagcaaattcctgctatcagactcagttgtcagctcattttcataacaatgctgtattgttaaaaatacttttaagccactcttcagtgaaactggagaatacaatacactcaggcaaacatataaaacataaaagggatgctgtatcaataatgctagaagtcctgcatttgaagtttgagttaatcastgtagtggctccttaggaaggtacagcaagtcataaaacagaattgtttcccaaaaggagcgatggacatttaaaacctatctaggtaaagattaaagaaaccaccctgcaaggagcagttctgtatttgtccctgagggaaggatgggcttgattagggcaccatcaatcacaaacgcataaaattaagattgtatttacaagcatctcytacccaaatttctcatcacccacttctaagcctagcatcaattctgggagacacctccacaggtgaagtcgtaagagggaaatcagact

SEQ ID NO: 75987 - DNA, 600 bp, Chicken  19866894360545_2
acaatacactcaggcaaacatataaaacataaaagggatgctgtatcaataatgctagaagtcctgcatttgaagtttgagttaatcastgtagtggctccttaggaaggtacagcaagtcataaaacagaattgtttcccaaaaggagcgatggacatttaaaacctatctaggtaaagattaaagaaaccaccctgcaaggagcagttctgtatttgtccctgagggaaggatgggcttgattagggcaccatcaatcacaaacgcataaaattaagattgtatttacaagcatctcytacccaaatttctcatcacccacttctaagcctagcatcaattctgggagacacctccacaggtgaagtcgtaagagggaaatcagactccagtgtgacatccctggcattcagatttctactcctctcaagtttagtccatcactgtgttcttgcttccccagctgatgccaataacagtatggggctaactgcgtgccatgcagactctggtaacaaatatacctttgattcctctctgacacaatgcacacttttgtgtgcatgatgcataaatcattgcttttttactgcccgtca

SEQ ID NO: 75988 - DNA, 598 bp, Chicken  19866894360546_1
tattcaacctgaacctcccctggtgcaacttagagccacttcctctcatcctatcactggtacctgggagaagaggccaacctccacctcaccacagcctcctttcaagtcactgtaggaagcaataagaactctcctgagcctcctcttctctagactgaacaatcccagctctctcagcctctccccataagacctgtgctccagacctctcacagctctgttgccctttctggacaccctccagagcctcaacatcttttcttgtagtgaagggcccaaaactgaacgcagtactcraggtgtggcctccccagtgctgaatacaaatttctcacaaatgttgcctacagatatctattgatgtttttctttgtatctatacataatctctctttgccagggaaatttctagactaccgttaagaatagaactagcatttgttggtttatttttagagattttattcacataaagaatggggaacttccaaataattgccttccagagatgttcagctctttgtctctcacacacagaaacacataccatctacatatacatgagcacacaagcatgccaacagaccttacacaa

SEQ ID NO: 75989 - DNA, 491 bp, Chicken  19866894360552_1
actcccatccctttccgctttccatctccctctttcactatgctgctatgacccagccgatctaatgaggcacactgacttgcaccagtgaaagatgtggctttccgtttggaatgcctccaaccttctttatgccaggtcaaatttcatgtcacttcttgctcatattgtcgatctctgcggcttcaggggacttttgcccgagaggatgtttgtaactctttttctgctatcacttgctcattcccagcagcagtctgtgagatggctgagtgctctgcccctttagtcactttactycctagaataccgtctttcatttccaacagtgtatatgtggtatacacatgccatgttccggtcagcaggccaggtatgataattcctttccagaacgactgtaaatgtgaagttccaacagtgctgtgcctgattttctgcttccctgcctctgctttcagggggcagcaaccctggtaggcaggcagggc

SEQ ID NO: 75990 - DNA, 600 bp, Chicken  19866894360561_1
aaaatccccatcgtcaaacataaatagtgccccgtttatccaattacgctaccttgtttcattgcaatgctctgtaacatatttcttaggaatacaaggcttaaaattaataatagaacaggacaaaattgccatgtatatttctctagatagattttcatctagcagcaggacttcacttctgattcactcgctggttctctctaacctttacattattcattaatcaaactagaaacctgctttcaaagtcagtgcatggtagtaattatttacagttgtgcatagtatttaattttmagcaatgacaaaagcaggcatgtccagaatcataaggcttatcatttttcttccgttggaggtgaactatctaagggagccaaaagttgcaaacttctcttcaatacctctgctgccatcaagacaaaatgcagtgcaactgatacctttgaacttgtacaagtaaaaataaatacagtgaaaattaagtaatatataatgtattaactcctttaaataaaaggaataaagagatttgctatcagccttgatgagcgattcgtttcttactgcacagtctgtctactgtcactttgaggt

SEQ ID NO: 75991 - DNA, 599 bp, Chicken  19866894360586_1
  misc_feature (1)..(6): n is any nucleotide
nnnnnntgcttgtatttcctaatgtgcagtccttgtctgtgctctttatgtataggcattttaagatggaattacagcaagctgatttccattgtgtatgggtggtgaaatatctgccatgtcgttagctagtgttagaatacttccgatggaaggggtatacaaagaaagagttcaactgcttgataacctcagggctaaccaaaacttaaacatgttaatgtaactgacaggcacaggacaccaaccacctccctgggaaacctgtcccagcactgaccactctcagagtaaagaaaygtttcccaatgcacagtctgatcctcccctggcagcgttgtgccattctcacatgtcctgccatgggcagcaggagcacagcccggtgcctctctctgtttcccctcctcagggcatagyagggagcactgagatcacctcttctaactggacagcccaggtgccctcagctcctcctcrcaggatgtgcctcccagccctcttaccagcattgctgccttctttggatgctttcaagggcctcaacatcctttttttgtgttgtggagaccagaggtgcatatggtattcaagatgag

SEQ ID NO: 75992 - DNA, 600 bp, Chicken  19866894360586_2
gtcgttagctagtgttagaatacttccgatggaaggggtatacaaagaaagagttcaactgcttgataacctcagggctaaccaaaacttaaacatgttaatgtaactgacaggcacaggacaccaaccacctccctgggaaacctgtcccagcactgaccactctcagagtaaagaaaygtttcccaatgcacagtctgatcctcccctggcagcgttgtgccattctcacatgtcctgccatgggcagcaggagcacagcccggtgcctctctctgtttcccctcctcagggcatagyagggagcactgagatcacctcttctaactggacagcccaggtgccctcagctcctcctcrcaggatgtgcctcccagccctcttaccagcattgctgccttctttggatgctttcaagggcctcaacatcctttttttgtgttgtggagaccagaggtgcatatggtattcaagatgaggctgcaccwatactaaataaaatgaagggtgtcaactgggagtgggagaattcaagtatgggatctgttttgtctttgtgcaactgcctgtaacagcctaaactcctagaccaagacatct

SEQ ID NO: 75993 - DNA, 564 bp, Chicken  19866894360586_3
gcttgataacctcagggctaaccaaaacttaaacatgttaatgtaactgacaggcacaggacaccaaccacctccctgggaaacctgtcccagcactgaccactctcagagtaaagaaaygtttcccaatgcacagtctgatcctcccctggcagcgttgtgccattctcacatgtcctgccatgggcagcaggagcacagcccggtgcctctctctgtttcccctcctcagggcatagyagggagcactgagatcacctcttctaactggacagcccaggtgccctcagctcctcctcrcaggatgtgcctcccagccctcttaccagcattgctgccttctttggatgctttcaagggcctcaacatcctttttttgtgttgtggagaccagaggtgcatatggtattcaagatgaggctgcaccwatactaaataaaatgaagggtgtcaactgggagtgggagaattcaagtatgggatctgttttgtctttgtgcaactgcctgtaacagcctaaactcctagaccaagacatctgccaccaaagcacaccttgcttgt

SEQ ID NO: 75994 - DNA, 436 bp, Chicken  19866894360586_4
atgcacagtctgatcctcccctggcagcgttgtgccattctcacatgtcctgccatgggcagcaggagcacagcccggtgcctctctctgtttcccctcctcagggcatagyagggagcactgagatcacctcttctaactggacagcccaggtgccctcagctcctcctcrcaggatgtgcctcccagccctcttaccagcattgctgccttctttggatgctttcaagggcctcaacatcctttttttgtgttgtggagaccagaggtgcatatggtattcaagatgaggctgcaccwatactaaataaaatgaagggtgtcaactgggagtgggagaattcaagtatgggatctgttttgtctttgtgcaactgcctgtaacagcctaaactcctagaccaagacatctgccaccaaagcacaccttgcttgt

SEQ ID NO: 75995 - DNA, 600 bp, Chicken  19866894360587_1
agtcttcagggcaagagttagctatggggcaaaaagtacagaagattcctatttcacaggagcagatattgctccgtagcctccaggtttgtcagcctcccatgtctatatattttgtactcatttcactctcggtagaatggaatgggtctcatagaaatgcccaggaaaaaatggaatgagctgggcaagacggtggaaagaccattttcctggaacagaagaaaaacaaaacatcctcgctgtcaaagtgttgttggagtacgagctacatttctcatttgatgaaataggcctagmtttctagcacaactcaagcacttgtctgagtcctacctcctcccacagatgctctgctctttgtgatgtggatgagctcttttttaagggacatttggcagtggtactcaaaggctctgggatactgttagtagttagttagtagttagttctgtgtattacaaggacatgttatttccattttctttactggcctgatgaacttggtgcagtaaatctgtggggaaaagagcaacacccttgagctcgctgaattgtgctctttcctaatcaagccaatgagttctccttaacctgcat

SEQ ID NO: 75996 - DNA, 599 bp, Chicken  19866894360589_1
  misc_feature (1)..(41): n is any nucleotide
nnnnnnnnnnnnnnnnnnnnnnnnnnnnnnnnnnnnnnnnntatgcatgatcctatgcaatgattgcaattggagaatatagtagttatatctttcagggttttatctgctgaggtcaataaagcaacagaatgcatgccagacaacactttttaattaattgacaaatactgtccagttagtgggtgaggttcttgagaaactagagatactgtagaggtgacaactgggtacaaaaaaaaaaccacaaaaacaatgcaacacctaaaggctaaccaaggacaacaagaaagtgtattkaaaatgtactcttttaccttacacgtttacagacagtaaaacaaagtaatacagtgcmaaggacggcacaaatcagatctctcttagtatctggtgtctaggtaagtgttggaggctcgaacatacttctgtttctatttgacaaaatcagaagggtgcagctgaattgtaaagttaasctgaaataactgtgtgccatacagacacagtgtgtcctcatatggtgctcatacactcttagccatccttcccaccaggccagcattgctgttgcccccagaccattggtatccctccaa

SEQ ID NO: 75997 - DNA, 600 bp, Chicken  19866894360589_2
aatgattgcaattggagaatatagtagttatatctttcagggttttatctgctgaggtcaataaagcaacagaatgcatgccagacaacactttttaattaattgacaaatactgtccagttagtgggtgaggttcttgagaaactagagatactgtagaggtgacaactgggtacaaaaaaaaaaccacaaaaacaatgcaacacctaaaggctaaccaaggacaacaagaaagtgtattkaaaatgtactcttttaccttacacgtttacagacagtaaaacaaagtaatacagtgcmaaggacggcacaaatcagatctctcttagtatctggtgtctaggtaagtgttggaggctcgaacatacttctgtttctatttgacaaaatcagaagggtgcagctgaattgtaaagttaasctgaaataactgtgtgccatacagacacagtgtgtcctcatatggtgctcatacactcttagccatccttcccaccaggccagcattgctgttgcccccagaccattggtatccctccaaaagtgaactgaacatctacaatactaagtatagaaacactgtgtgtggtaagatgggag

SEQ ID NO: 75998 - DNA, 600 bp, Chicken  19866894360589_3
tagtgggtgaggttcttgagaaactagagatactgtagaggtgacaactgggtacaaaaaaaaaaccacaaaaacaatgcaacacctaaaggctaaccaaggacaacaagaaagtgtattkaaaatgtactcttttaccttacacgtttacagacagtaaaacaaagtaatacagtgcmaaggacggcacaaatcagatctctcttagtatctggtgtctaggtaagtgttggaggctcgaacatacttctgtttctatttgacaaaatcagaagggtgcagctgaattgtaaagttaasctgaaataactgtgtgccatacagacacagtgtgtcctcatatggtgctcatacactcttagccatccttcccaccaggccagcattgctgttgcccccagaccattggtatccctccaaaagtgaactgaacatctacaatactaagtatagaaacactgtgtgtggtaagatgggagcaaaaatgttaagttctgcagcttttagtgacaagtggtttttagttcaatgagtttaaacagactgtactccaagaaacacctgacaatacaccaagatcacacaaagaccgggtctctg

SEQ ID NO: 75999 - DNA, 600 bp, Chicken  19866894360589_4
acagacacagtgtgtcctcatatggtgctcatacactcttagccatccttcccaccaggccagcattgctgttgcccccagaccattggtatccctccaaaagtgaactgaacatctacaatactaagtatagaaacactgtgtgtggtaagatgggagcaaaaatgttaagttctgcagcttttagtgacaagtggtttttagttcaatgagtttaaacagactgtactccaagaaacacctgacaatacaccaagatcacacaaagaccgggtctctgacttgacccatcttaatgcsctgttgcttctgtagggacatgctaaagaatacattatggttacagatattctctgaaatacctgagagataagccactctgttgtagttaayccatattctcattttttagcacacagtattcagttcctcagtaaccaatgccaccatttcttaggagttttgtggagctaaggtcaaaggctcctttggctgcattgatmaacattttcttggtttggactccagacataaactgtgtccagaaaaaaaaacaagtagaaaagtaaaacacatcaagccatgattattattaatttt

SEQ ID NO: 76000 - DNA, 600 bp, Chicken  19866894360589_5
cctccaaaagtgaactgaacatctacaatactaagtatagaaacactgtgtgtggtaagatgggagcaaaaatgttaagttctgcagcttttagtgacaagtggtttttagttcaatgagtttaaacagactgtactccaagaaacacctgacaatacaccaagatcacacaaagaccgggtctctgacttgacccatcttaatgcsctgttgcttctgtagggacatgctaaagaatacattatggttacagatattctctgaaatacctgagagataagccactctgttgtagttaayccatattctcattttttagcacacagtattcagttcctcagtaaccaatgccaccatttcttaggagttttgtggagctaaggtcaaaggctcctttggctgcattgatmaacattttcttggtttggactccagacataaactgtgtccagaaaaaaaaacaagtagaaaagtaaaacacatcaagccatgattattattaattttatcctagataagaatatttgtgaactagctagcttgcagaggacacatactgactatgctgttcattccttaaaaccaaaaatttgcacatga

SEQ ID NO: 76001 - DNA, 600 bp, Chicken  19866894360589_6
gttcaatgagtttaaacagactgtactccaagaaacacctgacaatacaccaagatcacacaaagaccgggtctctgacttgacccatcttaatgcsctgttgcttctgtagggacatgctaaagaatacattatggttacagatattctctgaaatacctgagagataagccactctgttgtagttaayccatattctcattttttagcacacagtattcagttcctcagtaaccaatgccaccatttcttaggagttttgtggagctaaggtcaaaggctcctttggctgcattgatmaacattttcttggtttggactccagacataaactgtgtccagaaaaaaaaacaagtagaaaagtaaaacacatcaagccatgattattattaattttatcctagataagaatatttgtgaactagctagcttgcagaggacacatactgactatgctgttcattccttaaaaccaaaaatttgcacatgaagatattccccagctgactcaggggactcagttcaacttgcaaaaccttgcatgttattttggctggtagaggccaaagagcatattccaaactccttgcacaactgcat

SEQ ID NO: 76002 - DNA, 600 bp, Chicken  19866894360589_7
aggacacatactgactatgctgttcattccttaaaaccaaaaatttgcacatgaagatattccccagctgactcaggggactcagttcaacttgcaaaaccttgcatgttattttggctggtagaggccaaagagcatattccaaactccttgcacaactgcataatggatggccacatcagctttgttgtctacagcagctacactgaacaacagaagccctgaagataaggttgcttagaacctgaaggcagaacaaacacatgcattaggacagcagtgtcctagttacaggaatayggtgcaaatgggaaaactgctgtaactagctaatgcagagcaaaggtctgaaaatcgtactgactctggagctgycttgtgagaagccagtaggagggtctctgcctagcgattcacatgcaagatgggcatctctaaaagagaaggaatcgccctctaygacaatctccatttgaatcacattgaagcagcagctctccttttcctgcagttggactctccagcctttgccacagactccagccaccaactataaaaaaccttacattcttaaacattaaattttcaaattttcaaatt

SEQ ID NO: 76003 - DNA, 600 bp, Chicken  19866894360589_8
ggggactcagttcaacttgcaaaaccttgcatgttattttggctggtagaggccaaagagcatattccaaactccttgcacaactgcataatggatggccacatcagctttgttgtctacagcagctacactgaacaacagaagccctgaagataaggttgcttagaacctgaaggcagaacaaacacatgcattaggacagcagtgtcctagttacaggaatayggtgcaaatgggaaaactgctgtaactagctaatgcagagcaaaggtctgaaaatcgtactgactctggagctgycttgtgagaagccagtaggagggtctctgcctagcgattcacatgcaagatgggcatctctaaaagagaaggaatcgccctctaygacaatctccatttgaatcacattgaagcagcagctctccttttcctgcagttggactctccagcctttgccacagactccagccaccaactataaaaaaccttacattcttaaacattaaattttcaaattttcaaattttactgttttcaaactctgtgatacaaagagacagaagaaaaaaaaatctcatcctcttctcatcccaaagacaa

SEQ ID NO: 76004 - DNA, 600 bp, Chicken  19866894360589_9
gcataatggatggccacatcagctttgttgtctacagcagctacactgaacaacagaagccctgaagataaggttgcttagaacctgaaggcagaacaaacacatgcattaggacagcagtgtcctagttacaggaatayggtgcaaatgggaaaactgctgtaactagctaatgcagagcaaaggtctgaaaatcgtactgactctggagctgycttgtgagaagccagtaggagggtctctgcctagcgattcacatgcaagatgggcatctctaaaagagaaggaatcgccctctaygacaatctccatttgaatcacattgaagcagcagctctccttttcctgcagttggactctccagcctttgccacagactccagccaccaactataaaaaaccttacattcttaaacattaaattttcaaattttcaaattttactgttttcaaactctgtgatacaaagagacagaagaaaaaaaaatctcatcctcttctcatcccaaagacaatgaattctttctacgaccaagttgccacactcacaacagttgcaaaaagctgcagctccacagaaagctacttggctctgaaatg

SEQ ID NO: 76005 - DNA, 600 bp, Chicken  19866894360591_1
gccatgatgttaataaagtgcctaattaattttgttttattatggaacaggaactgctcaaccaagtgtttggagacctgatatccacttgtgaaagttacatttcaaatatagttctcaaagaggacggagcagatcaattgcaagaagatctcctggtgagtttggttccccttcatgggctggtcaaaggatgtgcatgttctcaaaatgaggggtctgttaagttcctggcagtagctcttacacaggaaaatcatgatgtaggtgcttgtgtatggcaatggaatcttgtctctrtgggcctggaagcaatcagcagtttgataccttcaaaatagctctaaggatgtgatgtcccatgtattttcaatgaaatgaggtttttttcctttgcttttccactcatgctctttataaaacactttggaaagtaagtctgtaagatatgtaggaaactttaaggtttattttaatgtaagtgtactggggggaggcttagtgtattaaagacacaccatttatgtttcaaagcttcactttttgttcattagctgctgtcttcttgaaaggactgagggaattttaagttgttcttgg

SEQ ID NO: 76006 - DNA, 599 bp, Chicken  19866894360596_1
  misc_feature (1)..(33): n is any nucleotide
nnnnnnnnnnnnnnnnnnnnnnnnnnnnnnnnngagttgtagcagattgagtgcatcattgctgatcagctgtgactgaggccaattcctctaactctgaagagagcacttttgccttctctattccaagcagcagtcactgagactaactgaaagggtaaaatatgccaggtttgactcctgctttattagtcaaaaatagacaggaatagttcaagcaatctctgaggagattgtatgttgtaaaattcttgcagactatttaccataacgctcgccatgtatttggcactacctgtsattatttaaatgtaatctactaagatttaagtgraaagctcttctgtgaagtgaagaaaaggaggcaatccttttcaaatatttggttatagatctgagyggaacatctcagtcttaatgcctckgggtggcctgaaaatatccagccaaaattagtttttatatgttgacattaaaatctagaaaggttaaatatatgcctgtttgggatccccttgaagcccctggaacaaaagcagagattaattttgtccttgaatctttgaagcctgtaatacaccacagtatactacccttca

SEQ ID NO: 76007 - DNA, 600 bp, Chicken  19866894360596_2
agttgtagcagattgagtgcatcattgctgatcagctgtgactgaggccaattcctctaactctgaagagagcacttttgccttctctattccaagcagcagtcactgagactaactgaaagggtaaaatatgccaggtttgactcctgctttattagtcaaaaatagacaggaatagttcaagcaatctctgaggagattgtatgttgtaaaattcttgcagactatttaccataacgctcgccatgtatttggcactacctgtsattatttaaatgtaatctactaagatttaagtgraaagctcttctgtgaagtgaagaaaaggaggcaatccttttcaaatatttggttatagatctgagyggaacatctcagtcttaatgcctckgggtggcctgaaaatatccagccaaaattagtttttatatgttgacattaaaatctagaaaggttaaatatatgcctgtttgggatccccttgaagcccctggaacaaaagcagagattaattttgtccttgaatctttgaagcctgtaatacaccacagtatactacccttcaaattcttgtctatctgtgaattttctttcagtttc

SEQ ID NO: 76008 - DNA, 600 bp, Chicken  19866894360596_3
agagagcacttttgccttctctattccaagcagcagtcactgagactaactgaaagggtaaaatatgccaggtttgactcctgctttattagtcaaaaatagacaggaatagttcaagcaatctctgaggagattgtatgttgtaaaattcttgcagactatttaccataacgctcgccatgtatttggcactacctgtsattatttaaatgtaatctactaagatttaagtgraaagctcttctgtgaagtgaagaaaaggaggcaatccttttcaaatatttggttatagatctgagyggaacatctcagtcttaatgcctckgggtggcctgaaaatatccagccaaaattagtttttatatgttgacattaaaatctagaaaggttaaatatatgcctgtttgggatccccttgaagcccctggaacaaaagcagagattaattttgtccttgaatctttgaagcctgtaatacaccacagtatactacccttcaaattcttgtctatctgtgaattttctttcagtttcaaatggtttctgtgtttgcacaatgttatctcctgtactcacttcattctgtacagtcactaacat

SEQ ID NO: 76009 - DNA, 600 bp, Chicken  19866894360596_4
ccaagcagcagtcactgagactaactgaaagggtaaaatatgccaggtttgactcctgctttattagtcaaaaatagacaggaatagttcaagcaatctctgaggagattgtatgttgtaaaattcttgcagactatttaccataacgctcgccatgtatttggcactacctgtsattatttaaatgtaatctactaagatttaagtgraaagctcttctgtgaagtgaagaaaaggaggcaatccttttcaaatatttggttatagatctgagyggaacatctcagtcttaatgcctckgggtggcctgaaaatatccagccaaaattagtttttatatgttgacattaaaatctagaaaggttaaatatatgcctgtttgggatccccttgaagcccctggaacaaaagcagagattaattttgtccttgaatctttgaagcctgtaatacaccacagtatactacccttcaaattcttgtctatctgtgaattttctttcagtttcaaatggtttctgtgtttgcacaatgttatctcctgtactcacttcattctgtacagtcactaacatccatctgtacagaaaacttatctcc

SEQ ID NO: 76010 - DNA, 600 bp, Chicken  19866894360596_5
ggtttctgtgtttgcacaatgttatctcctgtactcacttcattctgtacagtcactaacatccatctgtacagaaaacttatctcctcaagcacttttatccggtgcttttctgctacaggtcttcaaatgatcactgctagaactaatcccaggtgcctcattagggagtatgtgatcagcacataagccaaggggagagttatgtttaagttgtagcagacattaatgtgttagtgtccattagtgttaaagctaattgtcctcctaaagaatgcactgttcagactgccagatgarggaacccagaagatgcttaggagtcagtggggccatgggcacctttgtcccacttctcagctttcacgaccttttcacactgatggctgtgctactagctgtgtctgctttctcctgacagtgatgcagtttggcaaggggaagtcgtgctgctatcggtttctgaccaaaggacagcagtggatctggctccagacccattactatatcacataccaccagtggaactccaagccagagttcatcgtgtgcacacacatggtggtaaggtatgtcaagcagtgggacataaaggagagt

SEQ ID NO: 76011 - DNA, 600 bp, Chicken  19866894360597_1
gcgctggagattctgcaaggttctgtgctgctctgatggttattggattgtctcatggaaatcaggaagcctgtaaacacccttaaatacctaaaagagcagctttccgatgttattctacttcttgaaatgtgtgtatttccactaaatgtaggaataatttttgtaccctgcacagagtgactcatggggaagttcccaaatagacgtgtatacataaggtaagcaagccccaccagtgaggcatgccttcactctcttttgggagcaggaaagagtcctgtacttctctcccaacaytgcatggcaggaaaacacctcagggcttcaaatcactttacgggctggcgtccagaaagcctcttctctgtcacctgcagacagctatcaaagccaggtctgtgagtatgcacagaaacctctggctgtatggggtgtgttgggcactggctggggggggcaaaggagaaaaaggtgaaatgttctgatctctgtgaattccatgtcgaacagttacaggaaaatgccctgatctaacttaacatccctttggggtactgccaggtaactctccagttgtggtgtggttcttctgtgcat

SEQ ID NO: 76012 - DNA, 600 bp, Chicken  19866894360597_2
acacctcctcgttagcacttggggtgtcatgtccactcccataaataaatcaccgccaaacatagcccagaggctcagacccaaaccctggaaaacagatgattctttattcctttgtagtggaaggaaaggaaggaggttagggaaggctcatttatgcctgaagctcagacactcaggcatttccaggagttctccagattgtgtgaccgcttgacctcaaagatagagatgcaggctgaactgaactctaatcaataaagggcacgttgagtattctttctgcttttctcactgtgygtagtgctgacaggcttcttagtgcttcccaagaaytgtagtgccaaataatcttgcccagacaagctgctgtggtggttgtttttgtgttgctgttgagtggtgtgtgtatgatagggaaggggagcaaagaccccctcggctatttttccagcttctctactcccagccttccttctttttttttttctttccccccccctaaagctgtcctttttcttgcagagaagccattcagctggcaggaaatctctccaggcattttgaggattgtcatcactctgtgttccacccagggag

SEQ ID NO: 76013 - DNA, 600 bp, Chicken  19866894360597_3
tcccataaataaatcaccgccaaacatagcccagaggctcagacccaaaccctggaaaacagatgattctttattcctttgtagtggaaggaaaggaaggaggttagggaaggctcatttatgcctgaagctcagacactcaggcatttccaggagttctccagattgtgtgaccgcttgacctcaaagatagagatgcaggctgaactgaactctaatcaataaagggcacgttgagtattctttctgcttttctcactgtgygtagtgctgacaggcttcttagtgcttcccaagaaytgtagtgccaaataatcttgcccagacaagctgctgtggtggttgtttttgtgttgctgttgagtggtgtgtgtatgatagggaaggggagcaaagaccccctcggctatttttccagcttctctactcccagccttccttctttttttttttctttccccccccctaaagctgtcctttttcttgcagagaagccattcagctggcaggaaatctctccaggcattttgaggattgtcatcactctgtgttccacccagggagtttttggacattgttagctagattcacagttcagct

SEQ ID NO: 76014 - DNA, 600 bp, Chicken  19866894360608_1
tgggtgatagattgccagtaagtgtgctgcaatctgtgcacggtggttatttgctgaattggctcaaacaccagcaaggtactcacatttgtcctgctcgtcctcctgcacgtgcaggtctgtcctgctctatagcatctaagctcactgggtgcatcggctccattagtcatcctcatgaagttcacctgccacatttcttcaagttacctatttagaaaatgatagtgtttatatggttagaattttaggtgatcctgtgtggagccaggagttggagtcagtgatccttgtgggtcycttccaacttaggatattctgtgattctatgactgcggctgcaacacagtcctagatgagatttagcaaccattaaatacaaacatatacacacragatactatggatattttcttacataagaattttgtttgtaggagctctggacaaggctagctctttgccagcaaaaagcacagccctgattgttgtaaataacaaccaaattggctgattagatacacttccaaagaatgtgcttatgagtcctgggcagaraaacctgaagaggtaaacataaaagaactgttactgttcctt

SEQ ID NO: 76015 - DNA, 600 bp, Chicken  19866894360608_2
gctcgtcctcctgcacgtgcaggtctgtcctgctctatagcatctaagctcactgggtgcatcggctccattagtcatcctcatgaagttcacctgccacatttcttcaagttacctatttagaaaatgatagtgtttatatggttagaattttaggtgatcctgtgtggagccaggagttggagtcagtgatccttgtgggtcycttccaacttaggatattctgtgattctatgactgcggctgcaacacagtcctagatgagatttagcaaccattaaatacaaacatatacacacragatactatggatattttcttacataagaattttgtttgtaggagctctggacaaggctagctctttgccagcaaaaagcacagccctgattgttgtaaataacaaccaaattggctgattagatacacttccaaagaatgtgcttatgagtcctgggcagaraaacctgaagaggtaaacataaaagaactgttactgttccttttgtgccttggtgtacgaggcatctcttccatgttatttgattttttttattttttggttcttggaaaggatggtctattgcagagaaaaaagca

SEQ ID NO: 76016 - DNA, 600 bp, Chicken  19866894360608_3
tgtgtggagccaggagttggagtcagtgatccttgtgggtcycttccaacttaggatattctgtgattctatgactgcggctgcaacacagtcctagatgagatttagcaaccattaaatacaaacatatacacacragatactatggatattttcttacataagaattttgtttgtaggagctctggacaaggctagctctttgccagcaaaaagcacagccctgattgttgtaaataacaaccaaattggctgattagatacacttccaaagaatgtgcttatgagtcctgggcagaraaacctgaagaggtaaacataaaagaactgttactgttccttttgtgccttggtgtacgaggcatctcttccatgttatttgattttttttattttttggttcttggaaaggatggtctattgcagagaaaaaagcatgaaagcaactgataaacctgcagagggccatggtgttctgtggattaaaaaaagcagggcaaaacacttctcagtaaacagctgcaactagccttgaaaagaaaacatttctgattccagggaacatgtggtaatcatgtctacaaagaatgtggataaatg

SEQ ID NO: 76017 - DNA, 600 bp, Chicken  19866894360608_4
actggtgatagcagcagaattaaaacactgaagtagttatgggttgacaagttgcacatgggaagcaggtcatgagcatttaggctgaaggagcgccttagatctcaggtttatttgcttagagaaacaggtttgtttaggggaaagttaaaaagagaatcctggctgttcagaagggataaaattttatccttctaccgtaaggggacagaaagttgagatctttcttcattttcttactgttttacacacccacacagaagaagtaacacgcttgagtctctggggaagaaatcacaratctgccacagctcttcaatagcatttcagttcttttccaattcagcaggcaaatacagggcgagccagtaaataagcactgtattcctttgagactgctcctgtttgcagatgcctttgcaatcactgagaacttaatttggaaatgcaaagacttacgctttggggtggaataagagaaatagtttgcatatttcttaccttaccacctcaaaaatgttgactgtgtggtatcgccctctactggcaccggtctgaggagctttgcacgtacaaaagtggaatctgctggtcagtcag

SEQ ID NO: 76018 - DNA, 600 bp, Chicken  19866894360610_1
actggtgggttatcttatcaaaaaatgggggtgcatatgaagggaaaaagaaacatattttgaaagtcagactggaattttagtggttcagtgatgtttttctcctaatcccttactcctttagattttgctaaggtttgaataataaggaggaggaatttcttctgctatccctgcattggctcttgcaaaaggaaattctttacagttttatctccagcacagcattactttgatacttctccctctgaaaatgggatttagcttagtacaaaaccagaaagttatctgtttcaaacrttatactttggaaactgcaagagacatatcacttaattggctaattttctttcagaatttagtggattttaacatcaaaagttaatcattcttctagttgctggtttgtagcaatggctactggaaagggaatgctggcagggtttgttgaaaatggactatgcagatttcaataagaatggagttaaacataaatatacctgtagtatgtactagaaaaagctaagtcttcttaccagaagatgtactttttgtgaatatccagttaattgatgctatacattttgttttttaacactg

SEQ ID NO: 76019 - DNA, 600 bp, Chicken  19866894360617_1
aggtttgtgcaactggattcctcctcacacaacagcttcagcctggagttaggcaggctcatacagttcttccttccccattgttggtgctatggcttgtcaggttgcatcactagaatggccagaaagcagccttgcaagaaaagggagtggagtgagagccaggattacatccagcttgattacttacatcagtaacgaggagtcaaaatactttcactacaaacttagtgacaaaatcaatttcacagaattttcttcataagcagcaccttgttacattctcacatctgtgtgctyctgatgagtaagattggtctggacaccaggcacatgggcagagattgaatcgtggagacttgaggaagaaagggtggctcgggatgatacaatggcacccaaatccaaggcagaccggtcagagagtatttcattgggaaggaaaatgctacaggtattcacacacgcaaatcctacagatgggtcttttaattactcaccagcaaccatggagcttcgcaaggtttctgcagtctccatgcagaaggtacatagcagtaccgagtgycgayggcaacctaataggaaatagccagtcct

SEQ ID NO: 76020 - DNA, 581 bp, Chicken  19866894360617_2
gcaccttgttacattctcacatctgtgtgctyctgatgagtaagattggtctggacaccaggcacatgggcagagattgaatcgtggagacttgaggaagaaagggtggctcgggatgatacaatggcacccaaatccaaggcagaccggtcagagagtatttcattgggaaggaaaatgctacaggtattcacacacgcaaatcctacagatgggtcttttaattactcaccagcaaccatggagcttcgcaaggtttctgcagtctccatgcagaaggtacatagcagtaccgagtgycgayggcaacctaataggaaatagccagtccttatctttctttccttcaggccatgtacattattttacttttgataatcttagacagtttgctatgggagttcttatggtgggacagctgccctgaaggagacatcctgytctccatctctcattgtctccgtgctttccctggtggttttccagccactcctggctctctccctcaggcttccagacgtgcctttattctctcaaataagttcctgctgttgaccaaatccgtggttttctctttattt

SEQ ID NO: 76021 - DNA, 577 bp, Chicken  19866894360617_3
cttgttacattctcacatctgtgtgctyctgatgagtaagattggtctggacaccaggcacatgggcagagattgaatcgtggagacttgaggaagaaagggtggctcgggatgatacaatggcacccaaatccaaggcagaccggtcagagagtatttcattgggaaggaaaatgctacaggtattcacacacgcaaatcctacagatgggtcttttaattactcaccagcaaccatggagcttcgcaaggtttctgcagtctccatgcagaaggtacatagcagtaccgagtgycgayggcaacctaataggaaatagccagtccttatctttctttccttcaggccatgtacattattttacttttgataatcttagacagtttgctatgggagttcttatggtgggacagctgccctgaaggagacatcctgytctccatctctcattgtctccgtgctttccctggtggttttccagccactcctggctctctccctcaggcttccagacgtgcctttattctctcaaataagttcctgctgttgaccaaatccgtggttttctctttattt

SEQ ID NO: 76022 - DNA, 440 bp, Chicken  19866894360617_4
gcagaccggtcagagagtatttcattgggaaggaaaatgctacaggtattcacacacgcaaatcctacagatgggtcttttaattactcaccagcaaccatggagcttcgcaaggtttctgcagtctccatgcagaaggtacatagcagtaccgagtgycgayggcaacctaataggaaatagccagtccttatctttctttccttcaggccatgtacattattttacttttgataatcttagacagtttgctatgggagttcttatggtgggacagctgccctgaaggagacatcctgytctccatctctcattgtctccgtgctttccctggtggttttccagccactcctggctctctccctcaggcttccagacgtgcctttattctctcaaataagttcctgctgttgaccaaatccgtggttttctctttattt

SEQ ID NO: 76023 - DNA, 600 bp, Chicken  19866894360627_1
tccctcttagagagaaactacttttctctgaactgaaactcagaagcaattcagaaaatgccaagaacagttccctacacaatatccctatgaaaaaggttgtttccctctcaacctcaacagtcttctgatactatcccaaatactctcaaatcttcatataaaacaatttcatggaaatttggtgttaatatcaatctcacaccccattcttatttatcctttgcaaaatgaaaaacaaacccagtgaatcaagttcaggtaaaggatctcatggaagagatttttctaagtggacaytgacttttagctcacattgtgaagctgtctccaagcataagaatgtgacccattccagctaacactaatacagatattgcgctcaatcagcccagctaatagacacccacaactaaatctcaacagcagaacacatatgggaacatgccaacctgaaaggaaaaaaatatccactgttcacagtgtggatatctgatcctcagcaccataatgacttgataatgtggccttagccctggcctacttgaaaaaccagtagtagctccagcccatgggtctttaaatcagggacccaggatt

SEQ ID NO: 76024 - DNA, 600 bp, Chicken  19866894360631_1
cctgtcattaagatttttggaataagactaaaagttgaatttcctttgacgtattgtaaatcattactgatttgttgacatgcacatggttgatttgatggcaacagagaaaaattttcaaagtggttgtcagacaggaggaaggtgtatttgtgagtggaagagacaaaggggaaaacagatcttcagaatttcagaacggtgttttttttctaacttttttatgtttatttagtaaagaaatgccacacgcaataaagaaatgcaggtggcaaatgaaacaatatacatatgaaattycatttttatatttcttttccattgatactgccttcatcacaagggtgttaatttcatttgtattgtagctatacaaataatctacatatttaagtagtgaaaacagaggtagcaacacattcacacaataactgtattgtctgtcctccatttgaatcaaaaacataagtgctgctcctttaaaggagaccttgttatcttggtaaagaaaactaatgaggtggcctttctagggctagtcacataatagccatggtgacaaggacctctatcaagaaataaagcagaagataaatgaga

SEQ ID NO: 76025 - DNA, 600 bp, Chicken  19866894360631_2
gatactgccttcatcacaagggtgttaatttcatttgtattgtagctatacaaataatctacatatttaagtagtgaaaacagaggtagcaacacattcacacaataactgtattgtctgtcctccatttgaatcaaaaacataagtgctgctcctttaaaggagaccttgttatcttggtaaagaaaactaatgaggtggcctttctagggctagtcacataatagccatggtgacaaggacctctatcaagaaataaagcagaagataaatgagatttttctaatatccatttcaccyattgttcacaagtgtcacacaatacagcttctatttatcatgagacagtagatactgggcacaattttgtaaaggaagtctaaattgcaacattgtgttgctaacagcctgtaaacattctttactccttcctattcttttcccaattttgcaattttttgttttggaccaagacgattttacttatacttgcacagaatgtccacacaacattttacagtgaagcacaattttagtctgctaggtcaaacgcttgtgccatcttaaccaagaaagaagatattatgcttagagcttctt

SEQ ID NO: 76026 - DNA, 600 bp, Chicken  19866894360631_3
tcacaagtgtcacacaatacagcttctatttatcatgagacagtagatactgggcacaattttgtaaaggaagtctaaattgcaacattgtgttgctaacagcctgtaaacattctttactccttcctattcttttcccaattttgcaattttttgttttggaccaagacgattttacttatacttgcacagaatgtccacacaacattttacagtgaagcacaattttagtctgctaggtcaaacgcttgtgccatcttaaccaagaaagaagatattatgcttagagcttcttttccyagctttctagattactttattttacaagctttatcaattcaaagtgtcaaattccaaagtgtcttcagtttgacctgggtttctgtgaaggaatccttctcacactggacacatctggcgacgctgtacataggaagccattctgcttcagggacattttttctaaagacagagactgacagaatgctccataagcatcctcactgagttcccactttcaccttggaaatacttggtctacataggtagacttggatcaagtttgtaacaaagacatttacaaaaggtgttatctgtcac

SEQ ID NO: 76027 - DNA, 600 bp, Chicken  19866894360642_1
gcccaaggagaacaatgtccttcagctcatggtaaaggaggtttgttgctcgtaagggcatcacaaagtcctgcagcccaatcaggggtgagtttgcatcaccaaagacgcagaccaagatgtgatcctgcaggtacagcactgcttggttctcgcagctctaaattggaaagagaatccagatagagcagctgatgggattatcaggtttaaaacacctctttgccctgtaacatctgcaggtagaatgagaatatataccaaacaaagcgtttgtccttaagaatttggattccaaaygtacccaacaaaaaactgatatgttggtataaggcatcaaaatcatcacagcaacaatagtcggtatcaattccaggtgcttactaactgctttgtcctgcctatctgcttatatttctcaaattaactaattaacgcagtacaggggattgttcagtatgtatggctgctgtctcgtggttggtaggtgggatgggcagtccccagagccaggtctgtcataggcacagcactgacagccacatcccccagccaggaactgcaggatccgttcccacaacgttcattcctatggcagtt

SEQ ID NO: 76028 - DNA, 600 bp, Chicken  19866894360643_1
atgacagagataactttgttttgaacattttattttgtctcccagcctagtctcttactgttgcagtacaagctttattgaggccaggttttaaaatgtgttttttaaaacaattcttcttatgatacctcataattaaagttcagtgaacaagtcgagtgataacaggggagttctggtctgttttatgaggcaatactctagttcctgaatggatgaaccgggggacctttctcttttatatgggaattgggtaattgctggaaaaaacagagtcatgctcctcttgttagtgtaccrtaagctttttaaaataaagtagctgggctctctcttaatagtgactttcatggaaatgctggttcccaaagttgtgacctgtgggcctctggagtcacaacctgggtccagctccagcctccacagctggtttatctggctgcctctgcccagacctctggatccaaatgctcaggaggttggagggattagagatcctctacaactcagatgcacttctaattagaaatgacataccaaaaaatagtttctagggaaggaaatggaagcctaaaagcaaaatgaaattaaaggtcaatc

SEQ ID NO: 76029 - DNA, 600 bp, Chicken  19866894360643_2
agttcaataacttaaaaaaaaaacaaatggagctaatagttgagaggcactggaagagagaccagctatacttagaggcatctactgtgaggtaaaacagcagtggaaaataaaatagagaatcaaattttgacaatacagttttttaaaagaactaagaaagaaacctaccctacagaatttaatttgaatcattcttgcttccttgtaggttttaagcaaacccagtacaatttcatactctcaattcaagcttaaacagatgatgtattagtttttaaaaatatttcttgtttcttygtgacatttcaataatactgttttccatacctttactgctgttagtttggagagcttttagataccaaacatttaagcaggctttaagcaagtctgaagagaacggagcttctttatttaccttcattttccttcaagcacaactcagttttcctttaacarctggtgcagcagcattaataaattctgaattctctgcattcgagacaaagctgcccagtattttggataccttggtgaggggaatttcctagctcctgtgctaagccacaggctgcagcctcatgaacgtttttgctg

SEQ ID NO: 76030 - DNA, 600 bp, Chicken  19866894360643_3
gaaacctaccctacagaatttaatttgaatcattcttgcttccttgtaggttttaagcaaacccagtacaatttcatactctcaattcaagcttaaacagatgatgtattagtttttaaaaatatttcttgtttcttygtgacatttcaataatactgttttccatacctttactgctgttagtttggagagcttttagataccaaacatttaagcaggctttaagcaagtctgaagagaacggagcttctttatttaccttcattttccttcaagcacaactcagttttcctttaacarctggtgcagcagcattaataaattctgaattctctgcattcgagacaaagctgcccagtattttggataccttggtgaggggaatttcctagctcctgtgctaagccacaggctgcagcctcatgaacgtttttgctgtggcctgttaatcttccctccccatttgcaggcagggcagatagccagtgagaagtgatgagtgcttctcatggtaagaaacaatacatgaagactttccaaattaatttaacatttaccagaaacgttgctggccacatcaatttaagaaattctggcaag

SEQ ID NO: 76031 - DNA, 600 bp, Chicken  19866894360645_1
caagacaacaccaccaccatctgatccacagtctagacaaaactgtgacttagtcttcttcttagagctagaaaacaagaccacatcaataatctggtgcttctggcatgatttctaacaattctgtctttctcattgtcaactggaatcttactggaatcttctaccacagcttattttttgcttagtgcaggctttctcttcctaaagcaactgacccttctcaaatatggtcaatggcagttaagctttgtttatcaacaagcctggaatagaaggaggcagtgtaggggcagaagygagcaaccaaactgaactgcatgtttgttaactggttttcattctgttcatacattatactacattaacttgtacacaaataacctagcagagtccctgaaaatggaaatcaaagctcatcttcagcaactgcaagacattccaccccttcctgccatcatgctctcagcaaaaaaataatgaattgacaatcagtatgtcacagttttgttctagagctgcagttccctttgttaacaaacatccaattgatatgaatgtacatttttaaagagacattcacttttgaatttatcataa

SEQ ID NO: 76032 - DNA, 600 bp, Chicken  19866894360645_2
aatgtacatttttaaagagacattcacttttgaatttatcataatatcaataagtatgctaaagtacactgaagatagttatcttcctctggacatcattaactcaataagtatgctaaagtacactcaagacagttatcttcctctggacatccttaacaacgagtaatatgagttttattttccttgtacattgggctctttaatttctttcataaatcatttatttcaaaaaactttctgttcatattcaaaattgctaaatgggaatttactactagtacaacaatgggcaaacaraacaaccagttttgcaacagagcaacctcagatttatttgctacattaccaaaagctraagagtagcaaaaactagtgcccttacaacaaaatgtcacataccttgttttacgagatgtatgtctccttctcgtgttttttcccaaagtccatagcaggtactacctttcatgcacaaaatggtgccattctcttgggagattcggctctcgctgattccgtggtcctgctgatacgggtccttaaatgcacacagccgctcctcactctgtgcagctttagacaaagaatgaaaaatat

SEQ ID NO: 76033 - DNA, 600 bp, Chicken  19866894360645_3
ctaaagtacactgaagatagttatcttcctctggacatcattaactcaataagtatgctaaagtacactcaagacagttatcttcctctggacatccttaacaacgagtaatatgagttttattttccttgtacattgggctctttaatttctttcataaatcatttatttcaaaaaactttctgttcatattcaaaattgctaaatgggaatttactactagtacaacaatgggcaaacaraacaaccagttttgcaacagagcaacctcagatttatttgctacattaccaaaagctraagagtagcaaaaactagtgcccttacaacaaaatgtcacataccttgttttacgagatgtatgtctccttctcgtgttttttcccaaagtccatagcaggtactacctttcatgcacaaaatggtgccattctcttgggagattcggctctcgctgattccgtggtcctgctgatacgggtccttaaatgcacacagccgctcctcactctgtgcagctttagacaaagaatgaaaaatattttttgtcactgacttcattcatacaattttaactttaataataggaagactacagtc

SEQ ID NO: 76034 - DNA, 600 bp, Chicken  19866894360645_4
acacagccgctcctcactctgtgcagctttagacaaagaatgaaaaatattttttgtcactgacttcattcatacaattttaactttaataataggaagactacagtcttccggaaacttatgttccacaccatcatgaactataaattgttattccttaaactgtactccaacagtcagaagtaaaaatcctgaagttacttttacaaagaggcaaaaaaaaaacctcagaagatgtttcaaaatggatctgcaaatgtttgaagaaaatttcattgcatagcctgcatcatttgttcrcaagcgtaagttatgcaactgttagctggtttctttagcaaccacrcgttacttaattgttcccaggktgtaaaccaagccaaccttgttcagagtgccatccaacccagtgctaccttatcacactgtcatgctcctcctgcactgacctctcttttttccacattttatccatctgctgtactgacctctttttcctcagaagcccattaatttggtctatttcaaacaacatttacaaccaccaacagaaatacaaacggctgagtaaaatccttacaactctgaccaatgatctgt

SEQ ID NO: 76035 - DNA, 600 bp, Chicken  19866894360645_5
atattttttgtcactgacttcattcatacaattttaactttaataataggaagactacagtcttccggaaacttatgttccacaccatcatgaactataaattgttattccttaaactgtactccaacagtcagaagtaaaaatcctgaagttacttttacaaagaggcaaaaaaaaaacctcagaagatgtttcaaaatggatctgcaaatgtttgaagaaaatttcattgcatagcctgcatcatttgttcrcaagcgtaagttatgcaactgttagctggtttctttagcaaccacrcgttacttaattgttcccaggktgtaaaccaagccaaccttgttcagagtgccatccaacccagtgctaccttatcacactgtcatgctcctcctgcactgacctctcttttttccacattttatccatctgctgtactgacctctttttcctcagaagcccattaatttggtctatttcaaacaacatttacaaccaccaacagaaatacaaacggctgagtaaaatccttacaactctgaccaatgatctgtgaaacactgactgtatataagagcaaagctgtacacagactatccc

SEQ ID NO: 76036 - DNA, 600 bp, Chicken  19866894360645_6
ttcatacaattttaactttaataataggaagactacagtcttccggaaacttatgttccacaccatcatgaactataaattgttattccttaaactgtactccaacagtcagaagtaaaaatcctgaagttacttttacaaagaggcaaaaaaaaaacctcagaagatgtttcaaaatggatctgcaaatgtttgaagaaaatttcattgcatagcctgcatcatttgttcrcaagcgtaagttatgcaactgttagctggtttctttagcaaccacrcgttacttaattgttcccaggktgtaaaccaagccaaccttgttcagagtgccatccaacccagtgctaccttatcacactgtcatgctcctcctgcactgacctctcttttttccacattttatccatctgctgtactgacctctttttcctcagaagcccattaatttggtctatttcaaacaacatttacaaccaccaacagaaatacaaacggctgagtaaaatccttacaactctgaccaatgatctgtgaaacactgactgtatataagagcaaagctgtacacagactatccccacagaacacccagcaggaaga

SEQ ID NO: 76037 - DNA, 599 bp, Chicken  19866894360646_1
  misc_feature (1)..(187): n is any nucleotide
nnnnnnnnnnnnnnnnnnnnnnnnnnnnnnnnnnnnnnnnnnnnnnnnnnnnnnnnnnnnnnnnnnnnnnnnnnnnnnnnnnnnnnnnnnnnnnnnnnnnnnnnnnnnnnnnnnnnnnnnnnnnnnnnnnnnnnnnnnnnnnnnnnnnnnnnnnnnnnnnnnnnnnnnnnnnnnnnnnnnnnnnnnncaacacaagtagattactagtgaagaacaggttaccttcacagaagtcacactattttgacctcatcttgtcctgatcttctagttgcttctagttgctatcagcagtatttyctttctttttccactgaatcattttgccaggcgctgaaatgcagcttcctggattgtaataccctacatcactttcagcacctataaataacacaaatgtcaacttgtcctttgccagtgctctaacacagcgagttgttttaatcagaaataccataattttacttgtgagcaggaacaatcccaggctaaaagcaccagaggcagggcttgcggctgccccatgtgccctttcctgagaactgaaccagcagtaagggccacacattttgtaacacrgcaggggtcactgggcagtg

SEQ ID NO: 76038 - DNA, 600 bp, Chicken  19866894360646_2
agttgctatcagcagtatttyctttctttttccactgaatcattttgccaggcgctgaaatgcagcttcctggattgtaataccctacatcactttcagcacctataaataacacaaatgtcaacttgtcctttgccagtgctctaacacagcgagttgttttaatcagaaataccataattttacttgtgagcaggaacaatcccaggctaaaagcaccagaggcagggcttgcggctgccccatgtgccctttcctgagaactgaaccagcagtaagggccacacattttgtaacacrgcaggggtcactgggcagtggtgccgccacctggatctcaggaacatttgcatcttaataaatgcgagacgaaaagtactacactgcttgttggtttttgaaactgctaaaaataagccacgtgtggtgctgagttaaggatgtatggaaagaacagcccatctgccaccatgagcttgacagacatcacagcatggactctgctcacttctctgtgcagggcaacataatgaatgtgtctaagacagcaacaaagacttgctaggttggtaacggcttgtaaagaaaactacaaaagcc

SEQ ID NO: 76039 - DNA, 599 bp, Chicken  19866894360648_1
  misc_feature (1)..(36): n is any nucleotide
nnnnnnnnnnnnnnnnnnnnnnnnnnnnnnnnnnnntgaaaacttcatttctgagtggtacggtttatcttctttcagagccgagatagaaaggacagcagttcatgacacaggttccttaccaaaaaaaaccaaaccaaccaaacaaacaaaaaaacacagatcaagagcatctccattccactcttggacaaattcacagagtcaaaatttacctcaaaaaacatggacctcaaatgcactgttcagtaatttttttttcatctgtatataccaccaaagttggccaaagtatgaaaygtgcaaacttttaaaagcactaaaataattttcactctgaacatctgcatattcttattcaaaattcttcacattttttctttaaataccccttttcttaaggttttcagattttttttttatacaaccaccattatagtttctgtggatgataaagaatttaaagatctcaaccaactttaaggcaagattgcygctgttctgcaataaaggtattgcagttttaccatttctggtgcaattgctttcactgctttctgttctgctgtctgccataacagctgtatgcctcattgacc

SEQ ID NO: 76040 - DNA, 574 bp, Chicken  19866894360648_2
ttcacagagtcaaaatttacctcaaaaaacatggacctcaaatgcactgttcagtaatttttttttcatctgtatataccaccaaagttggccaaagtatgaaaygtgcaaacttttaaaagcactaaaataattttcactctgaacatctgcatattcttattcaaaattcttcacattttttctttaaataccccttttcttaaggttttcagattttttttttatacaaccaccattatagtttctgtggatgataaagaatttaaagatctcaaccaactttaaggcaagattgcygctgttctgcaataaaggtattgcagttttaccatttctggtgcaattgctttcactgctttctgttctgctgtctgccataacagctgtatgcctcattgacctttccttattttcatcatttgtaccaaccatttccctttttttgctattctactgctacattaaaacaacacmagtagattactagtgaagaacaggttaccttcacagaagtcacactattttgacctcatcttgtcctgatcttctagttgcttctagttgctatcag

SEQ ID NO: 76041 - DNA, 397 bp, Chicken  19866894360648_3
attttttctttaaataccccttttcttaaggttttcagattttttttttatacaaccaccattatagtttctgtggatgataaagaatttaaagatctcaaccaactttaaggcaagattgcygctgttctgcaataaaggtattgcagttttaccatttctggtgcaattgctttcactgctttctgttctgctgtctgccataacagctgtatgcctcattgacctttccttattttcatcatttgtaccaaccatttccctttttttgctattctactgctacattaaaacaacacmagtagattactagtgaagaacaggttaccttcacagaagtcacactattttgacctcatcttgtcctgatcttctagttgcttctagttgctatcag

SEQ ID NO: 76042 - DNA, 599 bp, Chicken  19866894360650_1
  misc_feature (1)..(212): n is any nucleotide
nnnnnnnnnnnnnnnnnnnnnnnnnnnnnnnnnnnnnnnnnnnnnnnnnnnnnnnnnnnnnnnnnnnnnnnnnnnnnnnnnnnnnnnnnnnnnnnnnnnnnnnnnnnnnnnnnnnnnnnnnnnnnnnnnnnnnnnnnnnnnnnnnnnnnnnnnnnnnnnnnnnnnnnnnnnnnnnnnnnnnnnnnnnnnnnnnnnnnnnnnnnnnnnnnnnnccaccaggactcagtgggacccccccatatccccccacctacctgcccggccaggaagtgcagctgggtgacagtggccgtctccttrtgcaaacccgtcagctccacgccgggcgcaccgtacctgggggggccgttaaggaaaagcaaaaaagaacccaacaaaaaacaacacagcccctccgagcgccgcttggatgccactcaaccagtaccccacactgaacccagattaacccccctcattgcagccaaacaccccctcctctcccaccccacatccctgatgcccccccacacgtcccccaatccctcgccgagggtcaccaagcaacggccctttggctcgcgttgctgggagcaacccgctctgccgccagccgctgt

SEQ ID NO: 76043 - DNA, 600 bp, Chicken  19866894360653_1
tgggacagcaattatccttaacctgcaggctgtttgctgtctaggtgagaaggggagggaatgttacaagttctccagcgacagcagtgttggaggcaaaagcaatgggttgctgcagagaaaactctgcttgcttcctgtggagctgggctggagtgaggaccagccttggtgtctcttcttggccaggtggctccttgctgatgcttcccatgggttgctgcttagagagacatagcgtttcctgctgcagtagtggtcctgccaccatccctgtcactgtggaaatcagatttaaaygaggcaataacatrctataggaagagtcaaacttttgtagttcagctcttatgctgaggccaaacacatctcaagaaaaaactgcttggtttaccaaatacacaggtgatgacaatgcatttatgttccctggcaaactgagttaaacaaacagggactaagttgggcagacattataggaggtaatactttgctataacttaactaggagcagtttattctcctttccacttayggcaatcactatgcatcactctcccaagagaagagcattgtggagaaaaaattacaacatacaaa

SEQ ID NO: 76044 - DNA, 600 bp, Chicken  19866894360653_2
tccttaacctgcaggctgtttgctgtctaggtgagaaggggagggaatgttacaagttctccagcgacagcagtgttggaggcaaaagcaatgggttgctgcagagaaaactctgcttgcttcctgtggagctgggctggagtgaggaccagccttggtgtctcttcttggccaggtggctccttgctgatgcttcccatgggttgctgcttagagagacatagcgtttcctgctgcagtagtggtcctgccaccatccctgtcactgtggaaatcagatttaaaygaggcaataacatrctataggaagagtcaaacttttgtagttcagctcttatgctgaggccaaacacatctcaagaaaaaactgcttggtttaccaaatacacaggtgatgacaatgcatttatgttccctggcaaactgagttaaacaaacagggactaagttgggcagacattataggaggtaatactttgctataacttaactaggagcagtttattctcctttccacttayggcaatcactatgcatcactctcccaagagaagagcattgtggagaaaaaattacaacatacaaagtcttgcgagtgca

SEQ ID NO: 76045 - DNA, 600 bp, Chicken  19866894360653_3
tagcgtttcctgctgcagtagtggtcctgccaccatccctgtcactgtggaaatcagatttaaaygaggcaataacatrctataggaagagtcaaacttttgtagttcagctcttatgctgaggccaaacacatctcaagaaaaaactgcttggtttaccaaatacacaggtgatgacaatgcatttatgttccctggcaaactgagttaaacaaacagggactaagttgggcagacattataggaggtaatactttgctataacttaactaggagcagtttattctcctttccacttayggcaatcactatgcatcactctcccaagagaagagcattgtggagaaaaaattacaacatacaaagtcttgcgagtgcagtaactatgcaataggggacagtagctaaaatgaaatatttaagcgtatgtacatctgtctcctttttataaaaattatggttgtttttacctcagatattaaactgttaaattaagkcctgaaaactcagtcrctcagctctcagtgtgcctaaattcaagccgcctttcagtaacatcaggttctgtgcaaataaacagtaggtttcaattgtctgctg

SEQ ID NO: 76046 - DNA, 600 bp, Chicken  19866894360653_4
gcaaactgagttaaacaaacagggactaagttgggcagacattataggaggtaatactttgctataacttaactaggagcagtttattctcctttccacttayggcaatcactatgcatcactctcccaagagaagagcattgtggagaaaaaattacaacatacaaagtcttgcgagtgcagtaactatgcaataggggacagtagctaaaatgaaatatttaagcgtatgtacatctgtctcctttttataaaaattatggttgtttttacctcagatattaaactgttaaattaagkcctgaaaactcagtcrctcagctctcagtgtgcctaaattcaagccgcctttcagtaacatcaggttctgtgcaaataaacagtaggtttcaattgtctgctgctaattatcgcccaaatttgatttgcacgctcttcaaagggactcatatctttccatttagctatttgtttcactgcgatgaatctttaattcaagccaaatgtgggtcaatttccagctgaagaaaaaaaaaaagcttggaatgtgtttatccacggtcataccagtatctctttttagttttatgtatgttttga

SEQ ID NO: 76047 - DNA, 600 bp, Chicken  19866894360653_5
aaacagggactaagttgggcagacattataggaggtaatactttgctataacttaactaggagcagtttattctcctttccacttayggcaatcactatgcatcactctcccaagagaagagcattgtggagaaaaaattacaacatacaaagtcttgcgagtgcagtaactatgcaataggggacagtagctaaaatgaaatatttaagcgtatgtacatctgtctcctttttataaaaattatggttgtttttacctcagatattaaactgttaaattaagkcctgaaaactcagtcrctcagctctcagtgtgcctaaattcaagccgcctttcagtaacatcaggttctgtgcaaataaacagtaggtttcaattgtctgctgctaattatcgcccaaatttgatttgcacgctcttcaaagggactcatatctttccatttagctatttgtttcactgcgatgaatctttaattcaagccaaatgtgggtcaatttccagctgaagaaaaaaaaaaagcttggaatgtgtttatccacggtcataccagtatctctttttagttttatgtatgttttgattcatggcctcgaggg

SEQ ID NO: 76048 - DNA, 599 bp, Chicken  19866894360655_1
  misc_feature (1)..(99): n is any nucleotide
nnnnnnnnnnnnnnnnnnnnnnnnnnnnnnnnnnnnnnnnnnnnnnnnnnnnnnnnnnnnnnnnnnnnnnnnnnnnnnnnnnnnnnnnnnnnnnnnnnnacactactggaggttgggttgtgagtggcgtttgaaaaaccctgttgatttctaaagttttccatcaaaaaaactttggtttatctgatcctggatattttggcaaagaaaaacatttacagaaacagcctcatttgaataacatcagatagcaagtttctgtgtttcatacctacaagtgctgtagaataaccttgctgktgcagtactctggcaaaagtagtttcatttggtgggagtccaccagaacatccattccaaaaaagaatgcgccgttctgtgctggatgccatgcctggagaagagtagtatttttaaaataaagcaagccagaattcagatttttcagttttttcacattgttctttctgatgaatgagattcagctgccaaagcctggtacctttttattatacattcagcatgccctaaggtattctgactgacccttcagaaggatgtcccttccaagttttctgttgtatctgctagtccagtgc

SEQ ID NO: 76049 - DNA, 600 bp, Chicken  19866894360666_1
ccaggcacatacagtccaggaagttcctgcagtgcatttaagaaaactttctgatgcaagtggtagaggagccaatgaggagaggtgtgctgtgggaccttgttcttacaaacaaacaaaggctggttgggaacatgaaggttgagatccaccttggatgcagtaatgatgagataatggagttcaggatcatacatggaagaaacaaggaagtaaatgggattgcagccatgaacttcaggaaagtcaaatttgacctcttcaaggatctacttggaagcatctcatcagttagagcaytggaaaatagggaggcacaaaagagtttgttgacattcaagcaccacttcttccaagctcaagattggtgcatccctgagagtaagaatcaggcaaaagtggcgggagactatcatggatgggtaaggagctcatgagaaatctcgaaaggaagaagaaatgaatgtgaaaaggggtctggccagagccttttttgttccctgggaggaatactggaacattgtcagggcctacagggatgtgatgagtaaggctaaggccttggaattagatctggtgaggaaggtcaaggacaacaag

SEQ ID NO: 76050 - DNA, 600 bp, Chicken  19866894360666_2
ggccagagccttttttgttccctgggaggaatactggaacattgtcagggcctacagggatgtgatgagtaaggctaaggccttggaattagatctggtgaggaaggtcaaggacaacaagaaaaccttccttaagtgtatcaacagcaaaaggaagactagggaaaatgtaggccttctgatgaatgaggtgagtaccatgctaatgaaggacattgagaaggccttcttagctttggtctttactgctaagagtgccccaggccctggagataagagaaagggtctggggaaaggaakacttcyttttggttgagaagaatctggtcagagattgcctaagaaaacttgatgcacaaaatccacaggccctgatgggatgcacccatgaaygctgagggagctggcaaaagtgattataaaactgctctctatcatctttcaaaggtcatggagaatgggagaggtgcccaaaaactggaggaaagcccctgtgactccagtctctgaaaagggcaggaagaaagatctaggaaatgacaggccagtcagccttacctccacccatgagaagttgatggaacagctaattctggatgt

SEQ ID NO: 76051 - DNA, 600 bp, Chicken  19866894360666_3
agccttttttgttccctgggaggaatactggaacattgtcagggcctacagggatgtgatgagtaaggctaaggccttggaattagatctggtgaggaaggtcaaggacaacaagaaaaccttccttaagtgtatcaacagcaaaaggaagactagggaaaatgtaggccttctgatgaatgaggtgagtaccatgctaatgaaggacattgagaaggccttcttagctttggtctttactgctaagagtgccccaggccctggagataagagaaagggtctggggaaaggaakacttcyttttggttgagaagaatctggtcagagattgcctaagaaaacttgatgcacaaaatccacaggccctgatgggatgcacccatgaaygctgagggagctggcaaaagtgattataaaactgctctctatcatctttcaaaggtcatggagaatgggagaggtgcccaaaaactggaggaaagcccctgtgactccagtctctgaaaagggcaggaagaaagatctaggaaatgacaggccagtcagccttacctccacccatgagaagttgatggaacagctaattctggatgtcatgtc

SEQ ID NO: 76052 - DNA, 600 bp, Chicken  19866894360666_4
tctggtgaggaaggtcaaggacaacaagaaaaccttccttaagtgtatcaacagcaaaaggaagactagggaaaatgtaggccttctgatgaatgaggtgagtaccatgctaatgaaggacattgagaaggccttcttagctttggtctttactgctaagagtgccccaggccctggagataagagaaagggtctggggaaaggaakacttcyttttggttgagaagaatctggtcagagattgcctaagaaaacttgatgcacaaaatccacaggccctgatgggatgcacccatgaaygctgagggagctggcaaaagtgattataaaactgctctctatcatctttcaaaggtcatggagaatgggagaggtgcccaaaaactggaggaaagcccctgtgactccagtctctgaaaagggcaggaagaaagatctaggaaatgacaggccagtcagccttacctccacccatgagaagttgatggaacagctaattctggatgtcatgtccaagcaattggaagacaacatggttatcaggtgtagtcaacatggactcacagaggggtgaaatcatgtttgatcaatctgctagct

SEQ ID NO: 76053 - DNA, 600 bp, Chicken  19866894360672_1
catgatatgaaatgcagagacacctttaagcattactgaacaggacaagaacaaaagcagttccatagaagctgttcatctcaaaacagagatgttacaccaaagtcagaattgcttgtactaattggatttacttagccttattaaagttccagaatccaaattgcaatgaaaaacagtagctacctgaaagcactgtagcattgatgctcctggtatatttaccctaagcaccattcactgataatacatgtgcagtgacactatggaagctactctgtgttcttgcttatatcactrtctgcagacactgttgtcaatctgtacaggtagcacagctcagctggtatcattgtattacttttttgtttgtttgtttttgttttctcyggaggcttcctttttagtaagaatatgtgggaatgtgtgtgtgttgagggagtttctgctagcacctgtttctgtcttgtcctagtgataacacagtaagagctgatcctatgcatgttyaagttagtcaagtgaggagtctaattgctttaasagatgttttttcagacattaagattgtgttaagtctgcaaggtagtgctgtgcaga

SEQ ID NO: 76054 - DNA, 600 bp, Chicken  19866894360672_2
gatgttacaccaaagtcagaattgcttgtactaattggatttacttagccttattaaagttccagaatccaaattgcaatgaaaaacagtagctacctgaaagcactgtagcattgatgctcctggtatatttaccctaagcaccattcactgataatacatgtgcagtgacactatggaagctactctgtgttcttgcttatatcactrtctgcagacactgttgtcaatctgtacaggtagcacagctcagctggtatcattgtattacttttttgtttgtttgtttttgttttctcyggaggcttcctttttagtaagaatatgtgggaatgtgtgtgtgttgagggagtttctgctagcacctgtttctgtcttgtcctagtgataacacagtaagagctgatcctatgcatgttyaagttagtcaagtgaggagtctaattgctttaasagatgttttttcagacattaagattgtgttaagtctgcaaggtagtgctgtgcagagatagctgaaccaactccagctgagatagcttcaaaatcagatcagcgcatcactgtagcaggactaattagcccagagacagcaccacg

SEQ ID NO: 76055 - DNA, 600 bp, Chicken  19866894360672_3
tcctggtatatttaccctaagcaccattcactgataatacatgtgcagtgacactatggaagctactctgtgttcttgcttatatcactrtctgcagacactgttgtcaatctgtacaggtagcacagctcagctggtatcattgtattacttttttgtttgtttgtttttgttttctcyggaggcttcctttttagtaagaatatgtgggaatgtgtgtgtgttgagggagtttctgctagcacctgtttctgtcttgtcctagtgataacacagtaagagctgatcctatgcatgttyaagttagtcaagtgaggagtctaattgctttaasagatgttttttcagacattaagattgtgttaagtctgcaaggtagtgctgtgcagagatagctgaaccaactccagctgagatagcttcaaaatcagatcagcgcatcactgtagcaggactaattagcccagagacagcaccacgctgacacagttagattgctctgggacccaagctaatatcctgataggaattccatggagacgttcccgtttgtttaaaacaggctcagttatctggattaccacaacagcaatgctcaat

SEQ ID NO: 76056 - DNA, 600 bp, Chicken  19866894360672_4
taatacatgtgcagtgacactatggaagctactctgtgttcttgcttatatcactrtctgcagacactgttgtcaatctgtacaggtagcacagctcagctggtatcattgtattacttttttgtttgtttgtttttgttttctcyggaggcttcctttttagtaagaatatgtgggaatgtgtgtgtgttgagggagtttctgctagcacctgtttctgtcttgtcctagtgataacacagtaagagctgatcctatgcatgttyaagttagtcaagtgaggagtctaattgctttaasagatgttttttcagacattaagattgtgttaagtctgcaaggtagtgctgtgcagagatagctgaaccaactccagctgagatagcttcaaaatcagatcagcgcatcactgtagcaggactaattagcccagagacagcaccacgctgacacagttagattgctctgggacccaagctaatatcctgataggaattccatggagacgttcccgtttgtttaaaacaggctcagttatctggattaccacaacagcaatgctcaattcctacatttctgaagtggcctaawattgttgcc

SEQ ID NO: 76057 - DNA, 515 bp, Chicken  19866894360672_5
tgctttaasagatgttttttcagacattaagattgtgttaagtctgcaaggtagtgctgtgcagagatagctgaaccaactccagctgagatagcttcaaaatcagatcagcgcatcactgtagcaggactaattagcccagagacagcaccacgctgacacagttagattgctctgggacccaagctaatatcctgataggaattccatggagacgttcccgtttgtttaaaacaggctcagttatctggattaccacaacagcaatgctcaattcctacatttctgaagtggcctaawattgttgccttttgtaatacctgcagcccctggcaattgcttcatttatggcaattttatactttgggatacaaaaacagacttttgttactttatgtacttcctaagggatacttgcatcctgaagttgagtagcaaatgccccttcatcatctatacaaatgttactgtcagttctaataattttgttctttatgtcttccaatattcataga

SEQ ID NO: 76058 - DNA, 516 bp, Chicken  19866894360677_1
ctcagaatttaatggtgaatggagtgaattacttactgcagagcaaactgattttaaaatatatagatataaggtttaatagattgtagaatcatagaatggcctgtgttgaaaaggaccacagtgatcatctagtttcaaccccctgctatatgcagggtcgccaaccactagaccaggctgcccagagccacatccagcctgggattgaaacataatcttcttgttttaatgagttgcatctcattttatagacaacttagtgaatattttcatcactgtgttttatgtgtgtatatscaggtgtcctggcatgtttacataaaactgaggcagtactgtacattaatgtcttgttcaagactgggcagattgattccatggattgacatgagatctttaactgtaatcacactggaaatgttttatgtaagttttgtaaaactgctgtgtgaagtacatccaaaatgcttccgtgtgatctcacatgtaaggacactgataactgtgtacatg

SEQ ID NO: 76059 - DNA, 600 bp, Chicken  19866894360685_1
ctgacttgtgtgcaatctttctgttttagctggagagctattatggataatttgatgacacacgacaaaaccacattcagagatttgatgagtaagcattcattgatgtagcagtgacttttcttcaaggaaaacctgtagaggaagaaaaaaaggggggatggggatggggaggaggaataagtattttgaagaaaactcttgttcagtgtttattccactttgtttgaattattcaatatgtttctttattttttcaactacttgtttctagtgatccatacttaagatcttttgaartgagcagccaagcccagctgcactgtgtatacctctgagttttctttcaaacatatatttgaaatcactgttgttaagaatgcaaattgcaaaatatgcatcttcttaatggctacttttgagctgcattaatgcagtgaatgtaagagttatttacttctttaagtgaaacgaaagggaaatttaatgttaacctgtgttactcattttctctttcagcacgagtggctgtggctcagagcagttctctcaatctgtttgctaatagagaagcagagctggaacagcgtgccatgctcc

SEQ ID NO: 76060 - DNA, 600 bp, Chicken  19866894360685_2
tgtgtatacctctgagttttctttcaaacatatatttgaaatcactgttgttaagaatgcaaattgcaaaatatgcatcttcttaatggctacttttgagctgcattaatgcagtgaatgtaagagttatttacttctttaagtgaaacgaaagggaaatttaatgttaacctgtgttactcattttctctttcagcacgagtggctgtggctcagagcagttctctcaatctgtttgctaatagagaagcagagctggaacagcgtgccatgctcctgaagagattggcttttgcaatytttagtagtgagatagaccaataccagaaataccttccagatatacaaggtcagtaaaaatgtagcagttcatggagtccttctggatatttgtataacaggacaacagcaggtaaatttgttccctggtatgaatatctgtgtatactgagtatggarttactatggattttcctcagaacacttttagtcttacatgattacagagcacgtggactttcaattaccagttctctaacagattatttactcatttgtcattttataccttgatcaatatccttggacacccaaaaagtg

SEQ ID NO: 76061 - DNA, 600 bp, Chicken  19866894360685_3
tttaatgttaacctgtgttactcattttctctttcagcacgagtggctgtggctcagagcagttctctcaatctgtttgctaatagagaagcagagctggaacagcgtgccatgctcctgaagagattggcttttgcaatytttagtagtgagatagaccaataccagaaataccttccagatatacaaggtcagtaaaaatgtagcagttcatggagtccttctggatatttgtataacaggacaacagcaggtaaatttgttccctggtatgaatatctgtgtatactgagtatggarttactatggattttcctcagaacacttttagtcttacatgattacagagcacgtggactttcaattaccagttctctaacagattatttactcatttgtcattttataccttgatcaatatccttggacacccaaaaagtgctctttgacatggtaggtgcttatacctcgaatgttcagctagggctaaatacaaaagctgagcctgaagagtttttgaattcttgacttttatggttcttttttttgctgctctgtatatatatcccatttatcattgaagaatatttctttaactta

SEQ ID NO: 76062 - DNA, 491 bp, Chicken  19866894360685_4
ctgagcctgaagagtttttgaattcttgacttttatggttcttttttttgctgctctgtatatatatcccatttatcattgaagaatatttctttaacttacctttttacatgattgggaatgaaatatggttgtttttcttctaagataatgcaaataattatggagtcttcgtcttgatttgttgtctgctagtgctaccagagcaggcaccttgacctcttcctccatacagatagtcagttacatcaactttctgattacatttgttccaggatttattctttggagttgtgttgygatttgtttttgccagtctgtcagtagctgctttattacattcaagatacawatggttttgctgctttgaactgcaaagtgcatgtattggcttgactgaaaaatttctttaagtattgcctccctattgaatgcacaatggtgcttatggttaaacaatgtattatccctgcataattcttcatatactg

SEQ ID NO: 76063 - DNA, 439 bp, Chicken  19866894360685_5
gctctgtatatatatcccatttatcattgaagaatatttctttaacttacctttttacatgattgggaatgaaatatggttgtttttcttctaagataatgcaaataattatggagtcttcgtcttgatttgttgtctgctagtgctaccagagcaggcaccttgacctcttcctccatacagatagtcagttacatcaactttctgattacatttgttccaggatttattctttggagttgtgttgygatttgtttttgccagtctgtcagtagctgctttattacattcaagatacawatggttttgctgctttgaactgcaaagtgcatgtattggcttgactgaaaaatttctttaagtattgcctccctattgaatgcacaatggtgcttatggttaaacaatgtattatccctgcataattcttcatatactg

SEQ ID NO: 76064 - DNA, 600 bp, Chicken  19866894360687_1
cccattttaggaatgggtcagtcctaaagaggagttccattctgtcagcaaacggtgttgtgtgttgattgagttccaattattcctcttcccattttctcttttgtcttttggcttcttttctgttttcctttctctttacagagattgctttgagaaagacaacggcaaggttgtgcttctgatgtgcatctacatttttgaagtcgcaacaaaaattaatttgacatgacttgcagatatcttctgaagctgtaaagctcctgattttaacacattaaatgccatacatagattgcrtgtctttaaaagtgacgcaccgatgaatgtcaataaatttcaaagtgacacagctttgtgtaagttttttgtctttgtcaattagaatctctcaagagtcccgaaatgtgaagacaagtaaactgtgtctgtcattccttttagtcagcaggactgtatgtagttttcagtattatattaattctctgtaagtacatgagaagcattcatgtgtctacctcagatgaatagggagtgccattaacttctgccgcatttcttcttccttttaccaagttagatgggtagagtaaaatgaag

SEQ ID NO: 76065 - DNA, 600 bp, Chicken  19866894360689_1
ctctttcaacttaaaaccgttcccctttgtcctgctgttatctaccctttcaaagagtttactcctctcctgtttataggctcccttcaggtactgaaaggctgcaatgaggttaccccacagccttctcttctccatgctgaataagcccagctccctcagcctgtcctcataggggaggtgctccagccctctgatcatctttgtggcccttctctggaccccctccaacagctccctgtctttcttgtactgggggctccatacctggacacagtactccagatggggccgcacaaragcagattagagagggacaatcacctccctgtccctgctggccacccctctcatgatggagcccaggatgccatttgctttctgagctgcaagagcacactgctggctcacgttaagtttttcatccatcaggacccccaggtccttctctgcagagctgctctcaaggactgctccttccagtctgtatagatgcctggggttcctctggcccaagtgcaaaaccctgcactttgctgtgttgaacctcattaggttcacccgggcccacctttcaagtctgtccaggcccctctgaat

SEQ ID NO: 76066 - DNA, 572 bp, Chicken  19866894360690_1
aagtattccaggaggttggaaatgagaaaacttttatacttggttctttcccatgcctccataccaagagccctgaatactgatgatctgaaaagagagaagagggtgggggaaaacaaacaagttttttttccattttttaacttcacttttttcagtctgtaagtaataggagtaaatgtgaggaatttagcttagcctgcttcttaaaaataattgaagacagaaaatttacttagagtaatacctatgtacagtagaatctttggttctagtttgcttcgcttaactacatacatrcatcaagaaaaaagttttgctgtaaaaacagttgcacaatttgactgcttggtctgtcattaagataaccacaaggcagcagtagctttcagccagaactctaatcagttttaggcatttaagaagaaaaaagttcaaaaaatggtttttttcattcttcacatttgaatcacagaatcacagaatcacagaatggcctgggttggaagggacctcaagggatcatgaatctccaacccccctgctgggcagggccaccaacctccccattt

SEQ ID NO: 76067 - DNA, 600 bp, Chicken  19866894360698_1
gtctggagagatagatggcagagcactatgcaagcaggttactgcatcatcttcatgctctacttgacttttgaaaagcttcaaaaagcttttatgcataaaatttactgtatgtttttaccaaagtaatttggagatatgctaaacatacagagccttctcatgataaaagtcattgctgtccagagggcaggagtggaatgttattaagataacttcctagaagagatccaatatttatttggaggagcagcctcaaatatgattaatttgacattattttatagaacagtatcgctraggcctgaagcagtactggcagcaggtgaaggcgtgcataatgatgccacatgaggtttgttcagaaacccctcttttgtaatcagttgcaaatttccataatttccaggtgcacctgtattttgttatttttccttatgtgcctttgagaccaaatagattatgggaaacaaacaaacaaaaaaaaggcctctctaatattttgccatgttaaaactragcttttaatgacacaaggcacagtggaaagatatccagtactcacagtgagaaattgcattttcatctgcctttatttat

SEQ ID NO: 76068 - DNA, 600 bp, Chicken  19866894360698_2
ctagaagagatccaatatttatttggaggagcagcctcaaatatgattaatttgacattattttatagaacagtatcgctraggcctgaagcagtactggcagcaggtgaaggcgtgcataatgatgccacatgaggtttgttcagaaacccctcttttgtaatcagttgcaaatttccataatttccaggtgcacctgtattttgttatttttccttatgtgcctttgagaccaaatagattatgggaaacaaacaaacaaaaaaaaggcctctctaatattttgccatgttaaaactragcttttaatgacacaaggcacagtggaaagatatccagtactcacagtgagaaattgcattttcatctgcctttatttattaatggtttcagctgtaatttgtcagaccaaaagattagccattaagcttggtttgctttgggaaacttcacttaagattctgctgttctttgccccgaaggcttcaagtagcagggtggtccttgcaatgatctgtgatcgtgggcaactgggaagtagaaacagcaggagataagggccaggagtgacataaagcctaggaggagccagagtaggat

SEQ ID NO: 76069 - DNA, 600 bp, Chicken  19866894360704_1
cccacgcactctagtactggaacatgaaagatgattcaggaccttgcagcaccgagcctgagcacgttacaaagcaacagcaatccaacccaaagtcatccatgtgagctcttaaaggggcagttatcccggaggatgtcagacatctggccacagctggctggttaatcagctgcctgcaggaacagacgcacatataatacacagattttcccttaagccaatactgcactggtgtgacctttaccaagagtgcatatgtgtaaactccagcaatcaacagctcggcagctgcctgcrggaaggcatgtgcctgaaaattcgcctctcaaaggcgaaccctgcagatgctgagatgaaaatggtgctttgtgctcatggctgcagctctgagagggtggtggtgcttgcggggtgaagatgaggatacacatctgtggaatagctgaaggagagacctgcttaacatgcaaaaccatcatgctcgacacaagcaactgcatcagtgattcagagaggagaatgaatagggaagggatgaaatttgcagtttaattaaacaactaggaattatcaagtgtggggggaatcagggaaaca

SEQ ID NO: 76070 - DNA, 600 bp, Chicken  19866894360704_2
gctgcagctctgagagggtggtggtgcttgcggggtgaagatgaggatacacatctgtggaatagctgaaggagagacctgcttaacatgcaaaaccatcatgctcgacacaagcaactgcatcagtgattcagagaggagaatgaatagggaagggatgaaatttgcagtttaattaaacaactaggaattatcaagtgtggggggaatcagggaaacagcacaggggaatccacaggcagaaggcagtggccattttgctaaattgtcagctcatacaggagtgcattggtgtaactraaaaaattgtaaaatcttgaaaagcatcagtcgggttctctgggagagagaagtccaggaggcacaaakgaaagaatgaagctgacacagtgcagagtagcagaaaggccagtgctcctcggggtcagactcaaagggatcctacatgctccacacagaaatggagggcagtgcaggcaaagaaggggctgctcacagcctgcccaaccacagaaggacacagaactagagcaagctgccagagaggtggtggaacatccttctctagagatattcaaaacccacctggacactttcctg

SEQ ID NO: 76071 - DNA, 600 bp, Chicken  19866894360704_3
aggagagacctgcttaacatgcaaaaccatcatgctcgacacaagcaactgcatcagtgattcagagaggagaatgaatagggaagggatgaaatttgcagtttaattaaacaactaggaattatcaagtgtggggggaatcagggaaacagcacaggggaatccacaggcagaaggcagtggccattttgctaaattgtcagctcatacaggagtgcattggtgtaactraaaaaattgtaaaatcttgaaaagcatcagtcgggttctctgggagagagaagtccaggaggcacaaakgaaagaatgaagctgacacagtgcagagtagcagaaaggccagtgctcctcggggtcagactcaaagggatcctacatgctccacacagaaatggagggcagtgcaggcaaagaaggggctgctcacagcctgcccaaccacagaaggacacagaactagagcaagctgccagagaggtggtggaacatccttctctagagatattcaaaacccacctggacactttcctgtgcaatctgctctaaggaacctgccttagcaggaggttggactgagggatctccagaggatctttcagt

SEQ ID NO: 76072 - DNA, 599 bp, Chicken  19866894360705_1
  misc_feature (1)..(15): n is any nucleotide
nnnnnnnnnnnnnnncgatgcgcacgggcaggacgagcttttgtgtgctctccttccagccaggatggaccattggcagaaccaccttcccttccctaatttgctcacctggagcacgtgcccggacctccaaggagctgtgtgggacgagacagctctgtgctgtgcaacaaacatcagcagagctgcggagcgcttccactcccagctccaccaccccctgattgacaccctgtaataaagagatttaccacataattattgtgcatttgggatgcggcaccattctttttttttttycctttctttctttcttttttaacccagtgacagctttaaacagcggttaaagtatgtgtttatattaatgtcattagttatttttgtgtatttaaccaaaaaggcttttcctcggaacgatggcatggtaaacaacagctcagttgtctcctataggcatcgttacctctgctttcagatgaactgcttaagtgaatgggagggaaggatctgagcctggattgatgtgtgtctgtcgtggctccaccagcaaagatgttaaactgagcttagaacacatgagagagtgagcctggcat

SEQ ID NO: 76073 - DNA, 600 bp, Chicken  19866894360707_1
gcaaaaacttcctgtgatccctgctcaatcagctagctgttactcctataggaacagccactactacttactataagccactattacttactacttactatataccattacttctctgtgatggtttacacagaatattctaaacggattccaagagaaaagcagtaattcctcctttctgtatttgtagaacaacagtttctttacagtattgcttacatattcatagattttctttatttataaatctatctatctattttgtgtgtgtgtgtgtaagatattactcactggaaacayagttttaagtgtgaattacaaatattttattttgtactgcacgttttcacttttgaaaatgttacctctctgtttcgatctgttctcctccccccttgtgctctaccagtaagagcatttcagtagatagcagctactttcctctctaaattaccataaaatgatcatatatttaaaattctgcaatgatcaccttttgattagcaactcagtccagctaatctttttgtagtgaaaatagcatcaacatcataaatactcaactgaagggtgctttcctgtttgcatttattgaacaag

SEQ ID NO: 76074 - DNA, 600 bp, Chicken  19866894360718_1
cagcatgtttccctcttgagagagattgtaaaatttcagttggtttaatcaaccttgtttccttccttgtctttggcttgtgtgtaaacacatcgatgctctgcaaatgcttctccagcatgtttttgatatcaccatctcagcagctgacaaaagaaactacagagtgccaaatagagagatggggtttaaaagattccacttgaaataatctaatttattcatatgttttacatttttaaatttgttagtgatcctgtgatcctatttctagtcaggtcagcctattaagtccttctwatatttattttttaaacaaaatacacgtaatcaaataaatcctaatggctataatcacaaatacaatcatcttcaggtagcttgaaaagcattcatgattagtataaggagatcagcttctcaagaaactctaatgactattgtctaatagattcttctttgatccaaaatcaataacaccattagatgaaggtgaattcaggatgaaagatcttctttgattctgtctattatagcattcctggcacatccatgaagaaattaagaytctccacataaagttaatcacatgtgagcaac

SEQ ID NO: 76075 - DNA, 600 bp, Chicken  19866894360718_2
ttctagtcaggtcagcctattaagtccttctwatatttattttttaaacaaaatacacgtaatcaaataaatcctaatggctataatcacaaatacaatcatcttcaggtagcttgaaaagcattcatgattagtataaggagatcagcttctcaagaaactctaatgactattgtctaatagattcttctttgatccaaaatcaataacaccattagatgaaggtgaattcaggatgaaagatcttctttgattctgtctattatagcattcctggcacatccatgaagaaattaagaytctccacataaagttaatcacatgtgagcaaccattccattttagatatcctgctctccaagattatgccatgatgtggtgagcgagacatgtctgcacttggacttatttttctccatgcctttttttagtcagtggggtttcaggttgctgctttgggctgtgattgtaaagatgttgcagagaagttcccgaccaatccctttctttgctaaagcaggaacgtgttgctccattacatttaggtaggagaacttggaagccatctctctgggtccttggcattaggtacaagataag

SEQ ID NO: 76076 - DNA, 599 bp, Chicken  19866894360724_1
  misc_feature (1)..(55): n is any nucleotide
nnnnnnnnnnnnnnnnnnnnnnnnnnnnnnnnnnnnnnnnnnnnnnnnnnnnnnnttattttatttatttatttatttattgcagtgtgtatcaagacccattctttattatggaggatgaggtttaatattattctgatattgtgacaaatactatcagttactgagactaatggctatgatttctgaaaagcagcaatagaaatagctttcagggaattgtgtcacacaatttaattgaaccagtataagagcagaagaaggaaaaactaaagaaatacaaaatgtaaaaatggcacyatgcaccaaaagttaatctgcagtttcaccagaatcctccattagaccttcagaattctgatgcaacgcaaggtgacatctgtccttggaaattcttaaaatccttttcttttttctgttttattttttttcttgtaaatgcttgatttgaccaaagtgaggataccctgaacaatggtgaattaattctgtgaattgaattacgtaaagaggtgataattttaaggtcttttaagagggtgtcaaagacaaggtaaatgtatgccttgttgtgctgaatgatgaagatgacatgaaag

SEQ ID NO: 76077 - DNA, 598 bp, Chicken  19866894360725_1
tctttcaataacaaatttaattggattcaaaggccaattctcctagcttccttcccgtatcatttatgtattctatttactgtaaagattttccttcaaaatcattttacataatccattttacataatctgtcaaatctcagataagctttaaatcaacattaaaaatgccaacaggagatggactgatctttaaaagcacagtgctatacctttcgtaggagaataacagcagaggccagtatttgaaaaacaaatggcaagacaggctaacgtggatggtagtgttacatatccagmagggtgaatggcttagcagcttgaggtcagtcactaccctgagcataaaccatcaggccacagaatcatagaatccttagagatggaagggccctctgaaggccatctggtccaactyccctgcaatgaacagggacrccacagcaasatcaggttgcttagggccttatccagcctcgctttgaaagtctccagggacagggcatcaaccacaacactgggcaacctgtttcagtgcctcaccaccctctgtctaagaattcttttccttacatctaacctaaacctaccttctttg

SEQ ID NO: 76078 - DNA, 480 bp, Chicken  19866894360725_2
ttttacataatctgtcaaatctcagataagctttaaatcaacattaaaaatgccaacaggagatggactgatctttaaaagcacagtgctatacctttcgtaggagaataacagcagaggccagtatttgaaaaacaaatggcaagacaggctaacgtggatggtagtgttacatatccagmagggtgaatggcttagcagcttgaggtcagtcactaccctgagcataaaccatcaggccacagaatcatagaatccttagagatggaagggccctctgaaggccatctggtccaactyccctgcaatgaacagggacrccacagcaasatcaggttgcttagggccttatccagcctcgctttgaaagtctccagggacagggcatcaaccacaacactgggcaacctgtttcagtgcctcaccaccctctgtctaagaattcttttccttacatctaacctaaacctaccttctttg

SEQ ID NO: 76079 - DNA, 460 bp, Chicken  19866894360725_3
ctcagataagctttaaatcaacattaaaaatgccaacaggagatggactgatctttaaaagcacagtgctatacctttcgtaggagaataacagcagaggccagtatttgaaaaacaaatggcaagacaggctaacgtggatggtagtgttacatatccagmagggtgaatggcttagcagcttgaggtcagtcactaccctgagcataaaccatcaggccacagaatcatagaatccttagagatggaagggccctctgaaggccatctggtccaactyccctgcaatgaacagggacrccacagcaasatcaggttgcttagggccttatccagcctcgctttgaaagtctccagggacagggcatcaaccacaacactgggcaacctgtttcagtgcctcaccaccctctgtctaagaattcttttccttacatctaacctaaacctaccttctttg

SEQ ID NO: 76080 - DNA, 450 bp, Chicken  19866894360725_4
ctttaaatcaacattaaaaatgccaacaggagatggactgatctttaaaagcacagtgctatacctttcgtaggagaataacagcagaggccagtatttgaaaaacaaatggcaagacaggctaacgtggatggtagtgttacatatccagmagggtgaatggcttagcagcttgaggtcagtcactaccctgagcataaaccatcaggccacagaatcatagaatccttagagatggaagggccctctgaaggccatctggtccaactyccctgcaatgaacagggacrccacagcaasatcaggttgcttagggccttatccagcctcgctttgaaagtctccagggacagggcatcaaccacaacactgggcaacctgtttcagtgcctcaccaccctctgtctaagaattcttttccttacatctaacctaaacctaccttctttg

SEQ ID NO: 76081 - DNA, 600 bp, Chicken  19866894360726_1
ttgatttggggtaaggactgagctacttacaaggctcagaacactgctccagaggtaaataacaagctgtagaaactgctatgaatatatttagctgaataaactcattgtttggggaaaaaaaaaatttgaaaagtttagtaagcgttttctttcctccactttgccagtgtgaaatctggcccaaagtgaagtggtggatataaaataatccaacagctttactttctgctgcccagctgtggtattttaagcaaacgtgcaatgagatgtacttaactgttaaccatgagcgaatayatgaaaaacttgtgtcatcagccttcyatgtgtatggcacttgggaaatcttgccaaattgaactgtggctgaaccaagaggctgtctcatgagcgctctcaggagcagctgaaaggtcgaagatccagcttgccctgtgacagccaagcaattcaataaagcagatttgcaagaaagtatctgagccctgacaacagtcctagtgttttaatctcaggtatcttcaattttatctgttgtcaaataacataccttcagctattattaaccctatttcatccaggtcatcctttggtaat

SEQ ID NO: 76082 - DNA, 600 bp, Chicken  19866894360726_2
tacaaggctcagaacactgctccagaggtaaataacaagctgtagaaactgctatgaatatatttagctgaataaactcattgtttggggaaaaaaaaaatttgaaaagtttagtaagcgttttctttcctccactttgccagtgtgaaatctggcccaaagtgaagtggtggatataaaataatccaacagctttactttctgctgcccagctgtggtattttaagcaaacgtgcaatgagatgtacttaactgttaaccatgagcgaatayatgaaaaacttgtgtcatcagccttcyatgtgtatggcacttgggaaatcttgccaaattgaactgtggctgaaccaagaggctgtctcatgagcgctctcaggagcagctgaaaggtcgaagatccagcttgccctgtgacagccaagcaattcaataaagcagatttgcaagaaagtatctgagccctgacaacagtcctagtgttttaatctcaggtatcttcaattttatctgttgtcaaataacataccttcagctattattaaccctatttcatccaggtcatcctttggtaattgccaagtgctattgccgttgtaaaat

SEQ ID NO: 76083 - DNA, 600 bp, Chicken  19866894360726_3
tgtgacagccaagcaattcaataaagcagatttgcaagaaagtatctgagccctgacaacagtcctagtgttttaatctcaggtatcttcaattttatctgttgtcaaataacataccttcagctattattaaccctatttcatccaggtcatcctttggtaattgccaagtgctattgccgttgtaaaatgggtgaataaaattctgcagttcctcctagaagtagcaaacacagcatcaaggcaagctacaggaaaatgcatttcctgggatcgtggaactgaagctttaatcctaartataaaggtatatttaactgattcttccaaaaagagttactaatctctatttgtgtagaaaacaacaatcttgttctgttattgttttcaataaaattagatgtttgggttttattggatgactaaataagaccatatcaaaaactcttctaagaaatgctgacccacagtctgcaaatattgtaagtagtatacctaagtatactaggtatacctaattgaaacattaggaatcagttctggatggcagtccctggataacgtgtcaagtataaacagacttggcttggctttatggtt

SEQ ID NO: 76084 - DNA, 600 bp, Chicken  19866894360727_1
tattgcagcagggagcgtctctaggacagacgcaaggtgaaggcggccggctgcccagatgaaatgaatgactgtgtctgcattgccaaagccgagcaaacatacggtggggagactgcccatttctggcagaggacagcctgaataacaacccggcacggggaagatatgtagagttagagaacatttgagattttatttatttattttttgtttgcctcccggccgtcaccctccccagggatgcaggggctgatcctgctgctcctgctctcgcgttctcatccctcccagttctgyctgtgctgaggaatgggagataaaccacagccccctgccttgcctgtcaccagcacgtggtggctcttcccatccttttgtgcaggtgttatgaccttccagggatgctgtgatgtaaataattatattcctttcaccacctgaaayggatgccaaggatagtgtgctcagaccacgttccttggacttgacgtgtactttggggcatatcctggaggctgggaagaatcccgtccctgggtcacactgggcatattgaaatatgtgggacctgagattcggtgccctgggggctctggg

SEQ ID NO: 76085 - DNA, 600 bp, Chicken  19866894360727_2
acaacccggcacggggaagatatgtagagttagagaacatttgagattttatttatttattttttgtttgcctcccggccgtcaccctccccagggatgcaggggctgatcctgctgctcctgctctcgcgttctcatccctcccagttctgyctgtgctgaggaatgggagataaaccacagccccctgccttgcctgtcaccagcacgtggtggctcttcccatccttttgtgcaggtgttatgaccttccagggatgctgtgatgtaaataattatattcctttcaccacctgaaayggatgccaaggatagtgtgctcagaccacgttccttggacttgacgtgtactttggggcatatcctggaggctgggaagaatcccgtccctgggtcacactgggcatattgaaatatgtgggacctgagattcggtgccctgggggctctgggctgaacccttggagctgcagctggctgtagagctgtctggttgccaggatcacctatgcagtgtttgatgttggtagggtacatggggggggcgtggagatggggagcacatctgctgtgcacatgagagctgcaaagtcattcaga

SEQ ID NO: 76086 - DNA, 600 bp, Chicken  19866894360732_1
acagtggaatgggagagagaattgaaaagacaaagaagaacctgtgggttgagatataactatttacttagagaaaacaaaaaggataatagttatgactgtattgagatgactgtctataacaagtgatccaccgcctgccaactgatgcccagctagcccctgagcagcagaagcaaaaaagatgaactcccacccctttcaaaactttacttccacatgatgtcatatggtatggaatatgtctctgaccagtttaagtcaaatctcctgattctacctgctcccagcaacttttgyccccttttgttggtagagcagtaggaaaaacggaaaattaaatcatacttggctctatacagcactgctcagcaacaactggaaacatcrgtgtgttaccaacattgtttttctcctaaaaccgaaatagagcatcataccaaacactatgaagaaaagtgactgtcccatctgaaactaagacagggattccagtttccctttctcctgtgtcagatacaactgaaaacaggctgtttcacagagaatttgttaagagtggagactgttcttgatgcaagtatgaggatcctcttgatt

SEQ ID NO: 76087 - DNA, 573 bp, Chicken  19866894360732_2
agttatgactgtattgagatgactgtctataacaagtgatccaccgcctgccaactgatgcccagctagcccctgagcagcagaagcaaaaaagatgaactcccacccctttcaaaactttacttccacatgatgtcatatggtatggaatatgtctctgaccagtttaagtcaaatctcctgattctacctgctcccagcaacttttgyccccttttgttggtagagcagtaggaaaaacggaaaattaaatcatacttggctctatacagcactgctcagcaacaactggaaacatcrgtgtgttaccaacattgtttttctcctaaaaccgaaatagagcatcataccaaacactatgaagaaaagtgactgtcccatctgaaactaagacagggattccagtttccctttctcctgtgtcagatacaactgaaaacaggctgtttcacagagaatttgttaagagtggagactgttcttgatgcaagtatgaggatcctcttgattctttacaacaacaacaaaaaccctacatactatagtttctgtagcttctatcgattatctaag

SEQ ID NO: 76088 - DNA, 600 bp, Chicken  19866894360750_1
gaagcaggaacagtgaatgaataaggctcgggcccttaaagtttatcctctggctgctgcaaggtctgtccagaactactgaatcagctggagatttgccattgctcttattaggagaaggatcaggcccacagattacataagactgggtcttgtgaacaagccaagtaaaactgtaaaaatcacagtcatcgccacgtgcattacagaagtgtccggaggcctctgggctcctcttgatcaggtgctgtacagaggaaaatggtagcaactgagccagttagcagtgtgggtgttctygccggagaaagaaaacgtgactgctaggtttcctgcaaggctttacctttaaagaaaagaaaatattaagcatctggatttcctttcctgtagtcatactgaatgcaaagttggtcattttgatgtctatttagcaagttgtttaggttcagttgttgcctcttatttgttgttcctggaacaatgtagcacctcttctgtaaagttttggaggcagtgactgtgactgttttacttaattgtttagccagggttgcatttctgtcctttgttaaacactactttgtatctaaatacgaa

SEQ ID NO: 76089 - DNA, 600 bp, Chicken  19866894360753_1
gtctttgcagctttatttagcctttcctctgtaagctaatgcagattttgaaatgcccctgtggtggataaggtcactttgttaaagtaacaccgatgtgacccccgtgtgtttgcatatatataaattccctccatgacattcttgtcatgtttgctcagtgaacaagtaatttgccactctcattacttcaggtacaaggtagcttgtgaaaatcaatcttctttctgcttcatacatcacagcctgtaacagacacaaagtgcattctgattccaaaatgaagccaggggaaaaatrcagtcctattctcataaactactgcattagatctaggtgggaagaaaagaaagagaagaggcatttagcccagcaaagcgtgcaagttttacataggaggcagacaggaattctctgtatgcaaatcgaaagtggtctttctgttcaaaaagttgtcttttaccagtgtggatccctaataacagaataagtagcactagggagcctacctgtgctattgagtaatattcaaagagagttaaaacattgctggcagatcaatataggtatcattgccattgttattttcagctgaagaga

SEQ ID NO: 76090 - DNA, 600 bp, Chicken  19866894360754_1
cggcaatcagactgtcagatgcccatttgtgaacagactgctaggaagttccagttgtttaatgatttatattccacctaagcattaactgattttggagagagttcttgacatctctaaaccattaatattcttatgcctcaggaaagcttttattaatgtgttcacaggtaatactgaacaataggcttacagcacacaccaaattattttaattctattctagcttgttactttgtgtttatttctaataaaataatccagtcagaagataaaggagtaagaaacaaagctgtagayggagatcagagaaagggcaagaacagcaattcccaggaaaaagaaacttctacgaagtgtaggagttgcatttttcatcatcagtgacattgccattgtcattattaatatgtctctttacattactggcactttattgcagttaatgacccatttcccacaccatctcactgctaatctacgtctttctttattaaactagtagttagccagcaaagacaaggcaccatcaccatgaacatcctgtatttacaccatccaacagaagggatgacactttgaagtgaattaaataagagc

SEQ ID NO: 76091 - DNA, 600 bp, Chicken  19866894360759_1
atgctcacattgagtacagatgtctgcagtcagccagtttgccatgatccttgtgtgacagcacagaggctgtgctaggccatggggctccaaaataacaggtacactggagcaggagaggaaaggaaaagaaggcaggcaagtaaatcaaccctctgttggagggtacagaactttttccacccttccccaagacctgatccaacattgctaaatgattttagctaagtggatgggttcaatggagcagtcagctccacacttaggaaagttattaggcaccagaacaacttcattcaytgagacttctctattgactaatagtatttcaacagaagggctagctaacagatatctgtgactgatccaaggttatgacttacagcatacgctgtacaatgtttctttgacatctggaagtatggcagtattgcagtcactcagaactcttctgcagcatctgcattgtgagccagaccaaggcactgtcagtgctaacatctgtagcgaacactggcccaatttttggacattgaagtacaagtgtttgaacccgaaactgctatgactatttgggctatattagagaacagtatcaga

SEQ ID NO: 76092 - DNA, 600 bp, Chicken  19866894360761_1
gacaaagcggtaaatccattgaatgggaactcctggctgtgaatagttcacccagcttcactgctctgcctttaagggactgcccgaaggacttacaactccactgcattcttgccaggtaatttgtgcagcattttttagaaacagttaaattaaaaggccctcatgggaaaactcaatgaatttaatagagatgaaatcaatacggttccacaaaaattacttcaaacccttcagttggatcttcttccctgatctcagcccccttacattgcatagcacagtcaaagccatgtaagygaatcttaaattgaggattacagctacagggaaaaacctccagggagagaactgctaggaccacagtaaagcttgttttgcacctggaagaagaggacaacgtgaaaccaaggagtttggcagatcctggaacaacccaaggatgctgatgcagcttagcaaggagtcaagttatgccaagaaccactccagcagcttactacaaagaaagcttaaatgcttcttaccttacgatttgagactttgcccctgctctgaaacagtcaaggagcccatagaattaatacaggaattatatct

SEQ ID NO: 76093 - DNA, 600 bp, Chicken  19866894360763_1
gaaattttcatgttttcagttttcttctagagtgattttttttcttcactggctgaaagcagagagttacttagattatcatagaatcatagaatctttgtccttcagttgacatcaggcatattttagactgtctattctttactgggataaatatcctgagtcttacatgcagtgaaagtaaaaaaaaaaaaaaagagagagagaattaattcacagcagtcagtcttaacattaccctcagagttattcctctggtgccttgcatggtcactgtgtgatggaggccattcagagctygtactgtttgaggagatatcagaccattgctggaccattggaaaaaagcatgctctcctcttctaggaccccctcctttctcttcaggaagcttatattccaactccctttaagtactgcataggagtacaattctcttacagccacagtctgcccccattttgcttagaacagctggcaactgattgtagtgatttaaccatttttaattgtgctagatgttttgattaacattttagacatggatttgtaggtggcttacagtggtcttgtggttaatatgttgattgggcgttctgg

SEQ ID NO: 76094 - DNA, 600 bp, Chicken  19866894360763_2
atttatagtaaatccacactacagaagtactgaattgtattatgttattatagaagtaccattcagcactggaacatacaaagtaatggaaaaccaatagaaatgttggtaggttaaattgctgcccttttcctactgttttccagctccatttttaaaggctcagctgtgtgtgtgtatcatttgtctgacatccagactgtgttcaatgggccatttgcacacaaggagggcccaaaccatcagctgattccatatcagggcagaattccgtacccacgacctggcactgtaagtacwtaatatgtttatagaggcttgccaattacttctccttgtttaatacataaatagataatatttattccaggagaactgtctgtatgtgactatggcatttagttacagttcagaacaattttatttgcttctcaccttaccattcaaatcgtacagtatctagaaatcttccataaaaaaaactgtcattgtcacgtaagatattaatctctcttctttctgctcaaagatggtaagagttatttcactaaataatagtcagatgttttgcatgtacttttaaattttgtgtgcaggatt

SEQ ID NO: 76095 - DNA, 600 bp, Chicken  19866894360765_1
tagttctgtgttctttttgtactgtggtgcccaggattgcatgcagtaccacagtgatggatcttggtacttgtgatatgacgtgtagcttccagatccacgacaaaggtgtttgctgagcccaagcccgtgcctggggcttctgctggcccagctacagctacaccagggctgtggagcagtgctgctggctccatgtcttgccaaaggccatagtgaatgtgcagcttttactcttttggtcatggtgagtgtttctcctggtagcttaatgttaagctttgccaggaagcgttttgrtgatgtggaacttattatgcaacctggcaggacactccttgtctagacacccctatcactgtttaaattctgaaggtgtaattcacttggaagaaataagtacttatgaaaactactcacaaacccatagggcctatctgtccagtgctggaagtactcattactgaggtgttgactgattggcatataaagcctgtaagaagcaggactgtttatgtttttatcatcatgactctttactactgcaggagaaaagtctgaaaggcttgtggtttggaatggggaagtgagacattatct

SEQ ID NO: 76096 - DNA, 600 bp, Chicken  19866894360765_2
gaacttattatgcaacctggcaggacactccttgtctagacacccctatcactgtttaaattctgaaggtgtaattcacttggaagaaataagtacttatgaaaactactcacaaacccatagggcctatctgtccagtgctggaagtactcattactgaggtgttgactgattggcatataaagcctgtaagaagcaggactgtttatgtttttatcatcatgactctttactactgcaggagaaaagtctgaaaggcttgtggtttggaatggggaagtgagacattatctgaaaccmctagataatcaaattaaaaaatcttcttgtttcaaccctagagccagttttgggcaatgcgagaccaattagatttttaaaccacagtttctgatctctatcagttattaatgcttgaacagccyaaacctttggaaagatgattttgrtgagatatctatggcttctggtagttgcatgatttagaggatgcttcagtaattcgtggttaaataagatactgtttctccttaagacaatgttaaaatctttaaataggaaagaaagaaaagcgcaccaacctgtttgttttaacaagag

SEQ ID NO: 76097 - DNA, 600 bp, Chicken  19866894360765_3
cctatctgtccagtgctggaagtactcattactgaggtgttgactgattggcatataaagcctgtaagaagcaggactgtttatgtttttatcatcatgactctttactactgcaggagaaaagtctgaaaggcttgtggtttggaatggggaagtgagacattatctgaaaccmctagataatcaaattaaaaaatcttcttgtttcaaccctagagccagttttgggcaatgcgagaccaattagatttttaaaccacagtttctgatctctatcagttattaatgcttgaacagccyaaacctttggaaagatgattttgrtgagatatctatggcttctggtagttgcatgatttagaggatgcttcagtaattcgtggttaaataagatactgtttctccttaagacaatgttaaaatctttaaataggaaagaaagaaaagcgcaccaacctgtttgttttaacaagagaaagtaggtctgaaagacccattgaagtttgtctccctgtataacagacacaaagcttttccctaaatcaggcttatactcgctgtactgcacaagaagccaaaatcccatgtactccataaaga

SEQ ID NO: 76098 - DNA, 600 bp, Chicken  19866894360765_4
ctcattactgaggtgttgactgattggcatataaagcctgtaagaagcaggactgtttatgtttttatcatcatgactctttactactgcaggagaaaagtctgaaaggcttgtggtttggaatggggaagtgagacattatctgaaaccmctagataatcaaattaaaaaatcttcttgtttcaaccctagagccagttttgggcaatgcgagaccaattagatttttaaaccacagtttctgatctctatcagttattaatgcttgaacagccyaaacctttggaaagatgattttgrtgagatatctatggcttctggtagttgcatgatttagaggatgcttcagtaattcgtggttaaataagatactgtttctccttaagacaatgttaaaatctttaaataggaaagaaagaaaagcgcaccaacctgtttgttttaacaagagaaagtaggtctgaaagacccattgaagtttgtctccctgtataacagacacaaagcttttccctaaatcaggcttatactcgctgtactgcacaagaagccaaaatcccatgtactccataaagaggtacaagacctggtacattttca

SEQ ID NO: 76099 - DNA, 600 bp, Chicken  19866894360771_1
ttcctctggatactgcacacaaacggcagtaagagttgctttcttgcttttctttgttttcagtcttgaaccctttaccaagataagcctacaaccagtctgcatcaaggcaagtcaaatgctgaggtctcctcaagttttgacccctaagaggggctcttcccatcattagggcttgccccgagacagagcacaaagaaaaattctgttaatgagaacttaaaattagagattttcttcctactgtcaatagctataaaatgagctgagaaattctatctacagaatatcccaggctcygagcttctctaagacttactctctactgctgctacctgtcttgccatccagaccgtctgctcgacacacacacttctggttggaagatgagaaactgtttctccaaggctggaggcacaccaccacagtagtgtatctttacattagcaggagtgccacagaagtgaagaggcaacagacagcagtcatcagtcaggttgcagtgacatccrttcagcctcctgctgcatctcagtcctccctggaggcagctgagtaaagcaactgcctgtctgcagaagatcaagaaaaatacctatt

SEQ ID NO: 76100 - DNA, 600 bp, Chicken  19866894360771_2
tgagaacttaaaattagagattttcttcctactgtcaatagctataaaatgagctgagaaattctatctacagaatatcccaggctcygagcttctctaagacttactctctactgctgctacctgtcttgccatccagaccgtctgctcgacacacacacttctggttggaagatgagaaactgtttctccaaggctggaggcacaccaccacagtagtgtatctttacattagcaggagtgccacagaagtgaagaggcaacagacagcagtcatcagtcaggttgcagtgacatccrttcagcctcctgctgcatctcagtcctccctggaggcagctgagtaaagcaactgcctgtctgcagaagatcaagaaaaatacctatttattttctccaattttaataagcagatggcttcatctctcatcttcctgaaagaaacttccctagaacagtctttaagagctcctaaaagccaactcaaacccactcttaacaagtacgtttcttcaggatgtgaggtatgcagcactgctcacaggtcagctgtgtttatccctgaaaagcattcacaaatggacaaaatgcctaccatgt

SEQ ID NO: 76101 - DNA, 600 bp, Chicken  19866894360776_1
tgggaatgaagtggcattaatgcaactttgctcataaatgcagactaccgattatgatgaggttgattacattagggaattgaaagattttaaacaagataacagcagtaaagaaaagaaatacagaagaaatgttggtaacattatcagaatacaaagaaataaatagatgctgacaaaaatagttttggaacacaacgaagagcagttgtgccacaattctaactaacaagcagcattgctcattgtgctacaacttcgccttccagtgtgatgccacactacatttattttttacaygcatctaatgcaagacaaaaaatcttgaacccatgctaaacctgtataaaratgtaggtgcattaagactggaagggagttcacatctcattaatctggacacacatgagaactgatggattcactagccttcctctgtgcttgatcatatgaacaggcctcaaacacctcacacgttagacacgtacacagtagaaatatacacagacttacaaaagcttcacacagcatcatccagctcaccaattttcaatttcacctacaaagagaattggcaataaccaaaaaggcttagttttg

SEQ ID NO: 76102 - DNA, 600 bp, Chicken  19866894360776_2
ttatgatgaggttgattacattagggaattgaaagattttaaacaagataacagcagtaaagaaaagaaatacagaagaaatgttggtaacattatcagaatacaaagaaataaatagatgctgacaaaaatagttttggaacacaacgaagagcagttgtgccacaattctaactaacaagcagcattgctcattgtgctacaacttcgccttccagtgtgatgccacactacatttattttttacaygcatctaatgcaagacaaaaaatcttgaacccatgctaaacctgtataaaratgtaggtgcattaagactggaagggagttcacatctcattaatctggacacacatgagaactgatggattcactagccttcctctgtgcttgatcatatgaacaggcctcaaacacctcacacgttagacacgtacacagtagaaatatacacagacttacaaaagcttcacacagcatcatccagctcaccaattttcaatttcacctacaaagagaattggcaataaccaaaaaggcttagttttgatctgatcacgcagcatcacaaatgaacacatgaaaactctaaattcaagc

SEQ ID NO: 76103 - DNA, 466 bp, Chicken  19866894360778_1
aggtcagaagtaaataaataagattgttcatggaaggtcaaatagtatgcatgttctcagggggtgatgaaaatttctgcagagtatagaaacaggtgtgattgttatacagcaggagaatggagagcttgctgtaaccagaacatttaaaattctgctgtcaaaaatattgtacaagaaagatataagattatgcttattactactaatttatgagcctaaatatgttgaagagctaggaatgcagagaaaatattctacaattttgccttaatatttataagccctaaagtgcacaasagtatactgtccaaacaggttcaatgatagcactgtgcatttcattctctttttcactaagcccatgtagagaatggacacgaaccagaccatggagattggacatgtactgtttgactagaacatgaattcatcaggtagggcaatgtgtctcttctcctctctc

SEQ ID NO: 76104 - DNA, 592 bp, Chicken  19866894360783_1
ttgcttcctgagcacagcacagctttcattatccagcccagcacacagacatccctgctgccaggattgtgctgttttgtggctgtgttttgcagtgctcctcctgctgcctcccagctgctggtggccgtgcagaagcatggggtgaggctgtagggatgagggcacaatggggacatcacaccagaagaagtaaaagacaaattgttgcaaactgagagttctgtgaaaccaaagctctggtttcctttttgctgttgacatggcattgttccccagagcctcggacaccactggcaygttccatcaagcacagcacakcagtcagcagagagcagtgcagctgcactgaagctcacagacctgctgccttcccagtccccacacccatatcaattcaaatatcccatttcctgctgaagttcaggtgatggtctgaaagtgaatggaatgactgatttagctcggcggttatcgggcagttctccaatgggagaaatatgtgctatctctgggttttataaccgtgcttttcccatagtaaaggagaaagtttttttcatttccttttgtggagaaacatacaaaggag

SEQ ID NO: 76105 - DNA, 571 bp, Chicken  19866894360783_2
gctttcattatccagcccagcacacagacatccctgctgccaggattgtgctgttttgtggctgtgttttgcagtgctcctcctgctgcctcccagctgctggtggccgtgcagaagcatggggtgaggctgtagggatgagggcacaatggggacatcacaccagaagaagtaaaagacaaattgttgcaaactgagagttctgtgaaaccaaagctctggtttcctttttgctgttgacatggcattgttccccagagcctcggacaccactggcaygttccatcaagcacagcacakcagtcagcagagagcagtgcagctgcactgaagctcacagacctgctgccttcccagtccccacacccatatcaattcaaatatcccatttcctgctgaagttcaggtgatggtctgaaagtgaatggaatgactgatttagctcggcggttatcgggcagttctccaatgggagaaatatgtgctatctctgggttttataaccgtgcttttcccatagtaaaggagaaagtttttttcatttccttttgtggagaaacatacaaaggag

SEQ ID NO: 76106 - DNA, 600 bp, Chicken  19866894360786_1
catgggggagagactcgagcagcgtaggctccacgcacggactcaaagttaaataaaactcgtttagagctcaggaccagtaaaatgttgtctcttggcaatctgcagtagatcctccccaggaaacaccttggaaaagcagagcttcctctcattttctttcccttaccttatccactatcaccccctaggtgctgcaggttcacagggaacagcaccaaacacatctgcctctcctcctgtgccttaggaactgtttcctgactgatttcatttgctatagaagccttaaaaaacatygtaacacactgttatgtttaatacagaggtagcaagggtgggaaatgccaacaaccagtgtgaatagactcgtatggctttaaagcgttccctggaaaaatacagatgatggaaagaaactgtgctggagagatctgggctgctgcccataaatccagaaggaaatttagtccccaaagctctgaaagttgctattgctcttcttgaaatgagcaattgggtaatcagcgttaatattaaacagcttgttccaaaaaaaaaaaaaaaaaaagacaattcaagagattctgccctccagca

SEQ ID NO: 76107 - DNA, 600 bp, Chicken  19866894360788_1
tacgttttagatcaaatgcctacggaactgggagtttaattcctaggcatgttggcctgatgctatgtgtaaggctagtgacattgggcaagaaaggtttggaaaaggatcagaaaggcactgagagaaaacatacacatgacagagggagaaggaagtttaggtagatgaaaaatagattttgtaaaaaaaaacatcctgcagtgttcagatgctcttgactgaaaaattggatgtacagtaactggtcagccccttggtcttgctagtcaaggcactctgagagagggcaagcatcartctttaaaaagaagctccagatggattcacatcaggtaaatataacgattttctccaccctttaaatttcatttcactggatagctgggcattccctacaggtctgtattccaatacctcatctctctgatggtattttctgtagttagcactattataaccctgcatactcttgttattaatccaaacctattaacgcgtttctcctccatacaaaactcttgacttcaatgactccttgtggccaggagatccttaccctaaccggatacaacaaagaggaattcttaagttgaccta

SEQ ID NO: 76108 - DNA, 428 bp, Chicken  19866894360788_2
tttcatttcactggatagctgggcattccctacaggtctgtattccaatacctcatctctctgatggtattttctgtagttagcactattataaccctgcatactcttgttattaatccaaacctattaacgcgtttctcctccatacaaaactcttgacttcaatgactccttgtggccaggagatccttaccctaaccggatacaacaaagaggaattcttaagttgacctagctttctaagattctattttaacctgagtctagccttacagatgccttttttttttaggcaatctyatccagttattaggtaagacatctctgcagctgaatttaatatgtaaaaatttagcaaaacaaacttgctggtacttgttttgaaaaaaactcctgcaatgaaaggcatgaattacacataattattg

SEQ ID NO: 76109 - DNA, 577 bp, Chicken  19866894360803_1
aggcagcatcaagccccgggcagggcagagtgggggcagcagagtgggggctccccactgcattgctccactgggacaggggctgcccaacaagctgggtcctcggggtgagaggggcaagggtggccttttcctgttctgcattaagaaaaaatgaggatgagaacttcagaggaggttggcagcatgccccttacaaatgggcctgatgggcaccgagagcaattcctgcatcagggacaatctcattgcattctctcaattcttggcttctccaagagcacttccagcctcgcttgygctggctcggtgagcaaagcaagctacagcagcagaagcaccttctctccctcagctggaatgacccataagcatgaaaacaatgctgcacataagcagtgcccagcgctgccccatgttcacccaatgctggcagcagcctgccaagcaccagcagaactgcccaggagtcactttgagtgtgtttgtacacagagatgtgctaacatgcaggagaagaaggcagagaaatatgctaatttgaaacatctggcaactgtttcagagtttaacatgt

SEQ ID NO: 76110 - DNA, 599 bp, Chicken  19866894360805_1
  misc_feature (1)..(51): n is any nucleotide
nnnnnnnnnnnnnnnnnnnnnnnnnnnnnnnnnnnnnnnnnnnnnnnnnnngagaggaactgggagggaaaaggatagacctgggtggggggagcaaaagaatctggggatggctttatactgtctacagtgctcttcaggcatgctccacccacggctgctgccctttctgcctgcagcacagcctgcattgagctgccatcagtagggaccagagtgaacgcatctctgtgagcagtgcagggctcacagccctgtagagcgatgagaccctgcaaagctggtctttgaggaaggggstgcagtgaggaaggggatgcattgaggaaggggatgaactcaggaaggggatgcactgagggaaggggaacactgagggaagggtatgttttctgcatcctttggggtgcagcagtgctcggtgctggctcatggcaaggaggggctcacagccccacgttggccatgggtgaccccccagcaccgtgccatctcttcaggaccgcctgcactcggtgcccggcctgcttggtgtccaggagcgaggtatggggctgctgggggggcacagctctgcagtggggctgagctgaagggtg

SEQ ID NO: 76111 - DNA, 600 bp, Chicken  19866894360806_1
tgtcagagtcatttagtgtcttagagcacaccaatttcagcctgtgtagctaatatctaaggtagtaggttatgctgcttagggaactatcataggacagattccatgcatatccactataacccaccgtggagtttccctctctactgtaccttccctttatagatgatcatcacagtaagtcacctccaataattattcagtggccggcaagatcataattacccaaggaggcactgcacacaggtatcagtaggctggataatctttttgttcacctagagcagatagtgagggtgragtggccagaaatcagctacctcatgaggcacattaaatcccactattctcatttcctctttgcacattgaactgggagcaagctgagaacrtgtcctagagacacacagacacacacaggcatatatgggacactgatacttgtggccacaaaggctgccccagccaagggctactttcaacagcacttacacagaggactcacatawaacagacacagactgccaagactccttccttcttcccagttgatagagaaagaagttctctagagaggaatacagaactctgtaggttcac

SEQ ID NO: 76112 - DNA, 600 bp, Chicken  19866894360806_2
taggacagattccatgcatatccactataacccaccgtggagtttccctctctactgtaccttccctttatagatgatcatcacagtaagtcacctccaataattattcagtggccggcaagatcataattacccaaggaggcactgcacacaggtatcagtaggctggataatctttttgttcacctagagcagatagtgagggtgragtggccagaaatcagctacctcatgaggcacattaaatcccactattctcatttcctctttgcacattgaactgggagcaagctgagaacrtgtcctagagacacacagacacacacaggcatatatgggacactgatacttgtggccacaaaggctgccccagccaagggctactttcaacagcacttacacagaggactcacatawaacagacacagactgccaagactccttccttcttcccagttgatagagaaagaagttctctagagaggaatacagaactctgtaggttcacaggcatagatgtatttttggatactctgagtacctcttttggtctctgtgttcatcaggcagacccagtatggtgtctcattctgcctggaa

SEQ ID NO: 76113 - DNA, 600 bp, Chicken  19866894360806_3
gcaagatcataattacccaaggaggcactgcacacaggtatcagtaggctggataatctttttgttcacctagagcagatagtgagggtgragtggccagaaatcagctacctcatgaggcacattaaatcccactattctcatttcctctttgcacattgaactgggagcaagctgagaacrtgtcctagagacacacagacacacacaggcatatatgggacactgatacttgtggccacaaaggctgccccagccaagggctactttcaacagcacttacacagaggactcacatawaacagacacagactgccaagactccttccttcttcccagttgatagagaaagaagttctctagagaggaatacagaactctgtaggttcacaggcatagatgtatttttggatactctgagtacctcttttggtctctgtgttcatcaggcagacccagtatggtgtctcattctgcctggaaaccctgcccagatcctaggtcctcttacaagacttcatggattgcctgcacaccggtatgtctaacttgaagttctctgcaaatgcacatgctcacacatctctcaagcacattata

SEQ ID NO: 76114 - DNA, 600 bp, Chicken  19866894360809_1
gtgtttttctggaagttatttccttccaaggagggaaggctgcagctcagcaggggctggagctgatgtcagtgaatgaaaacatgcagctaggagaggccatcagttgggaactaccttagcagaagaatctgtatgcctttaacaatgtctctttccactctagggtatgcagactgaactgaggttgggatgctcatacaagaacagaatcagtctgctcaaatgcagagagctcccattttagcacaaggtaacagtgcctgttcccatagaggggccagtggaactggatgcttkctatcccagtagcgcttcagccaatgcatctaaaagaacattattataaaggctgtgtagcaaggctttgtgactgacagctgagcaatgcagctttcccccattgattctgaaagacagtgggagaaaataacttggaaaaaaaacccaaatgtttctttacatattagggaatgcacaaccattagtccaaggggagacttgtgaagctaacagtcccctctgtagtactgcaataattctatgcgttagggctacaaagaaccaaatctgggattacattttccctcaacttgaagg

SEQ ID NO: 76115 - DNA, 600 bp, Chicken  19866894360817_1
atgcagaggcacagggaaaatcacctgggaggaggtaagggtttcttgtaggaggagagatgggaaacccgtattgtctcagtccccagcgcaagatggagcaagatggtggtgtccctactagccagtttgccctgcagaggtagaaacttcagtaccttaaaggaatgaaagaatgtgacaagctcgcttgggaaacggttctgtagaagcacagagggtcatttagaattggctgtgctcatttgttccagactgcatttagaagtgccttccttcatgggaggtattccatgtgcrgttagggacaagccattggccccagaggagcaggccgctgcgggtgggcgccatggggctggcggccatgccacactgcccacgccaggctcgggtgcagaagcatggggagatgcaagtgtctgaatttggggatgtgattacgtggttatggagatcattgtgcagttagactgggagatagtgttacagaaatgaccttacgcccaagtaactgctagaactctttgaaacaaagagagggcttcgcctctgacaggaatattaaggaaaaaaacatcgtggccttcaggctgataa

SEQ ID NO: 76116 - DNA, 600 bp, Chicken  19866894360823_1
cacaacacattgtccttgtttgctcacacgagcagaacgggatcaggtaaccatgatcctcctttccttcagagggaattactctttgtttttgtcttagaaatgaaagtagttgtcattaacttctattggttggctttaagttaaatgtactctgtatgttctacagtaggtgtgaggctgaactgcatcatgcttaagtgtgtgtagaagagcacacttctgatggaaaggcagtgagttgaagtgaggcattgtgtgcagggtaaggtaataccttctgttagatatgccttagtmgtgtaaacccttcttcaaatctggaatagaaacctgaagaggttggcttttgcccataaaagcacatcaaatgttttcgtagcccacatccatgagctctatgtacacaaagtttgtctgttctctttatttccttgggcagtctggtagccctcactcccctaaaaagtcttgccttgcttgcacccagaagccatcacagtcactgactggaaagcatccttggtgttaatgtagtccttgttttttccaactagcactccatatcaaaataaaacattaacatcaaattaatttgat

SEQ ID NO: 76117 - DNA, 600 bp, Chicken  19866894360825_1
gcttgcattgctcgtgcacttgtgagctggttcctctgtcatctgaccgaaggctggcagccccttcctgcagcccctccttcaccgcctggctaacacaggccactcggcagctcagattcattcatgtctgcattcattctacatgaaaatcagtagggataaccgctgcaaactttatatttaacagccttcagaaataataagcgctcagaaataagatgctctaagcctgctatctaagcacagcagcaactattttgttacgcggaacatatgagagcccttcatgcacagccrttaggagctgtcatacctgtgcctgcttctaagcgcgatttacatgcatccgtttatgccacatgctgcctccatgggacatgtgagccacgggctggtggaggcacatcagcatcacccaagtgtctgccccacaggagtgcctggrgaccctgtcactatgacaaggacactccttacagaggtttgtgctacatcagggtggcacctctcgccagcaatgggcctgagccacttctgggatacaacgaggaaacaaaccttccagtgatctcctcgcttaatttctccattgcctta

SEQ ID NO: 76118 - DNA, 600 bp, Chicken  19866894360825_2
aaaatcagtagggataaccgctgcaaactttatatttaacagccttcagaaataataagcgctcagaaataagatgctctaagcctgctatctaagcacagcagcaactattttgttacgcggaacatatgagagcccttcatgcacagccrttaggagctgtcatacctgtgcctgcttctaagcgcgatttacatgcatccgtttatgccacatgctgcctccatgggacatgtgagccacgggctggtggaggcacatcagcatcacccaagtgtctgccccacaggagtgcctggrgaccctgtcactatgacaaggacactccttacagaggtttgtgctacatcagggtggcacctctcgccagcaatgggcctgagccacttctgggatacaacgaggaaacaaaccttccagtgatctcctcgcttaatttctccattgccttaagtacaatggctaacagttaaaatggactttggggtgtcgcctacggagatctgtaatggtttcctgctttttctttctatttgcagtctattttgagcgctctacctttcctgagctgcccatgaggagctgcgctgtgcactttca

SEQ ID NO: 76119 - DNA, 600 bp, Chicken  19866894360827_1
gggaatactgtgcttcaagaagaagcgcacagcgtagcccatctacaatcacagctcctttctgaaaaaccgaaagaattacttaattcttaactcagctcttagttatctcattcttgatattttgagttcaattttcacaaacatttttgcttaataaagtagcatgactagtgctatcaaaatatgatgtgttttttaaaaaatctaagcttctggaatcatatgattatatgagagtcttcacttttgtttggtaaaagaaaagtttttgtccctcacacttgcagaaaaaaaaawaaataaaagacccttggagcctcagggaaggccaatcatcatttagccaggactggaaatacagtcaatctgcttcctgattraggcaaatttctttgtgtctcagcacatatattagtttgcagttcttccaaaccccttctagttgagcactgaaacagcagaactttctgttttcttgcataatgaagtcttgatttagaatttcattctcctctcaaaacttgacctttaccattagaaatagactggattttcatttaattataatagcattgttcattctgttcttttcattat

SEQ ID NO: 76120 - DNA, 600 bp, Chicken  19866894360827_2
taattcttaactcagctcttagttatctcattcttgatattttgagttcaattttcacaaacatttttgcttaataaagtagcatgactagtgctatcaaaatatgatgtgttttttaaaaaatctaagcttctggaatcatatgattatatgagagtcttcacttttgtttggtaaaagaaaagtttttgtccctcacacttgcagaaaaaaaaawaaataaaagacccttggagcctcagggaaggccaatcatcatttagccaggactggaaatacagtcaatctgcttcctgattraggcaaatttctttgtgtctcagcacatatattagtttgcagttcttccaaaccccttctagttgagcactgaaacagcagaactttctgttttcttgcataatgaagtcttgatttagaatttcattctcctctcaaaacttgacctttaccattagaaatagactggattttcatttaattataatagcattgttcattctgttcttttcattatgtgtgttagctattttcggctgaaataatattaataatgaaatacagattctggttacttgtagtttaaatttgacagaagtg

SEQ ID NO: 76121 - DNA, 600 bp, Chicken  19866894360827_3
agcacatatattagtttgcagttcttccaaaccccttctagttgagcactgaaacagcagaactttctgttttcttgcataatgaagtcttgatttagaatttcattctcctctcaaaacttgacctttaccattagaaatagactggattttcatttaattataatagcattgttcattctgttcttttcattatgtgtgttagctattttcggctgaaataatattaataatgaaatacagattctggttacttgtagtttaaatttgacagaagtgttaagtaaacagttttgaaaytctatcaacctatacagacagtatcactaaccagatattctagctaataaagcagctttataacttaatatttgctacaaaaatcttctccagaaatgactatcacagcatagctcttatcttactgacaaaagtgaaacataatgaaaatatatattgtggaaaaccaagctttctattctacagttggtgtgctgttataaaaaggcttaccataaaatgactactgagtgtcttgaaaataaatgactataacttcctccatcatggaaatacatttattggatgaattgtctgaac

SEQ ID NO: 76122 - DNA, 600 bp, Chicken  19866894360827_4
ttcttcattaactctctctgcaaatgtgagagagcactagggacacttcagattcagatgacggagataaaaagaaaatgtttgtgaaaaggactattacaaaacagatttcttctgggttttgtttgctcctgaaaagttttttggattagcttgatttttttttttttccccagagtaaaattaatggcaactataatttagcttttgtttggagccatataaagtctcggtcttcattgtttcactgacattgtaagtacatttacagacatttgggatacagattattttaaaaarttaaggaacatccttattttaactaactcctctgcttctgactgttctcacacatgtataccatgtggcttaactgggagccagaacaaaaatgactgtttattgaagtacctctactgcctgagggcttcttaattggatgtcacttctgtttaaatgctttcaggcagccagccatgcccacttctgattctagcctgtatcaagttcatgctgctcatgtcacacattgattatactgcattatatagcacactagatctgtgcttctgcataattcacagcttagactgttgacct

SEQ ID NO: 76123 - DNA, 600 bp, Chicken  19866894360828_1
agaattatgaagcaattcatacgaaatcacggagaacacaaagcagctcccctaccaaatttgtccactcatagaatcatagaatcattaaggttggaaaagacctccagaatcacctagtccaaccatccacataccaccaatattgcccatgaaaccatgttcctaagtactatatctgactgtttcttgaacaccactaggggaggtgattccaccacttccctgagcattctgttccagtgccttaccactatttcagagcagtttttcctaacatccaatctgaaccacccctgrcacaacttgagggcattccctctcattctattgctagttacctgggagaagagaccggttgttgcaagcaactactcaatgacctgctgccaaaaattcacatttgtgtttttcaactaaaccacatccaggacatcatataagaccctctcttaactccatatcacctaaatattagatcagaattgccagagaccacatatatccagtcatagctcatagcagagatggcacccaaagcaggaccccaccgaacaagcactgccactagtcacccctcaagtgacttcttctctctcc

SEQ ID NO: 76124 - DNA, 599 bp, Chicken  19866894360833_1
  misc_feature (1)..(126): n is any nucleotide
nnnnnnnnnnnnnnnnnnnnnnnnnnnnnnnnnnnnnnnnnnnnnnnnnnnnnnnnnnnnnnnnnnnnnnnnnnnnnnnnnnnnnnnnnnnnnnnnnnnnnnnnnnnnnnnnnnnnnnnnnnnnnnctgcgtgaaacccatagctcttctacatccatttctgtagtaggatagctttcttagtcgaggcttaaactcgatagtgctaaccttttgggtaggtcagaggtgttctcagattgtgtgtttacttctttctctccattattcactgggatgtggctctttttgtgacttttrtatgatttcctctctgtcacagggtcagagggagtgcatgtgtttaaagctaccaggctagtggctgctgacatgtttttttgtatacatttccatatccagtaacagggagaactcttgttttggcagcatagtgggtatttatttgaccatgtggtaacagagatttatttaagaaaaatggcaaggagaaggatgctgtaggactgcacctctcatttcactttattcctgtcaatgcttttgacagtttttgttccttcatgttcagaaagaagaatctttgtaatatcatatag

SEQ ID NO: 76125 - DNA, 600 bp, Chicken  19866894360833_2
atccagtaacagggagaactcttgttttggcagcatagtgggtatttatttgaccatgtggtaacagagatttatttaagaaaaatggcaaggagaaggatgctgtaggactgcacctctcatttcactttattcctgtcaatgcttttgacagtttttgttccttcatgttcagaaagaagaatctttgtaatatcatatagattttatcagcattagttttggggagaaagttttggagctgtatacatttgatttcagccaaacacgctgtttcagctaccgagtcctgaataaacwwagcaatactttgcagacctctgattcattcaggcaaaaataaataatattcagttgattgaaactagcctgcaaaacctaggctagaaaaaagaaatgcttccaatcttttttttcctctttcattgaggaaatagaagggagtaatttttgaaatgctgaaaaagtgctatatgatgaaaagctcctataagtcaattagcctttgttaggttctttatttattgtacaaaatccrttgcatgcactgctgaaattttcttacttttctctttgtatgattgtcaaaagtgataggta

SEQ ID NO: 76126 - DNA, 600 bp, Chicken  19866894360833_3
tccagtaacagggagaactcttgttttggcagcatagtgggtatttatttgaccatgtggtaacagagatttatttaagaaaaatggcaaggagaaggatgctgtaggactgcacctctcatttcactttattcctgtcaatgcttttgacagtttttgttccttcatgttcagaaagaagaatctttgtaatatcatatagattttatcagcattagttttggggagaaagttttggagctgtatacatttgatttcagccaaacacgctgtttcagctaccgagtcctgaataaacwwagcaatactttgcagacctctgattcattcaggcaaaaataaataatattcagttgattgaaactagcctgcaaaacctaggctagaaaaaagaaatgcttccaatcttttttttcctctttcattgaggaaatagaagggagtaatttttgaaatgctgaaaaagtgctatatgatgaaaagctcctataagtcaattagcctttgttaggttctttatttattgtacaaaatccrttgcatgcactgctgaaattttcttacttttctctttgtatgattgtcaaaagtgataggtat

SEQ ID NO: 76127 - DNA, 600 bp, Chicken  19866894360833_4
gagctgtatacatttgatttcagccaaacacgctgtttcagctaccgagtcctgaataaacwwagcaatactttgcagacctctgattcattcaggcaaaaataaataatattcagttgattgaaactagcctgcaaaacctaggctagaaaaaagaaatgcttccaatcttttttttcctctttcattgaggaaatagaagggagtaatttttgaaatgctgaaaaagtgctatatgatgaaaagctcctataagtcaattagcctttgttaggttctttatttattgtacaaaatccrttgcatgcactgctgaaattttcttacttttctctttgtatgattgtcaaaagtgataggtatgttgaaargaaacctttttctctgctactgttcattccactattacagagaatcaatcacaaaagcagcagttgcatctaataattcttccagtacagcgcaggtggaaagaaaattggcttctttatacatgcaaagcatgagaaaataagttctatgtgagggatgaatgcaacacgctaggaataccacaagcagaatgtattggagtctctgcaatcatctgttttagatgat

SEQ ID NO: 76128 - DNA, 600 bp, Chicken  19866894360833_5
tttgcagacctctgattcattcaggcaaaaataaataatattcagttgattgaaactagcctgcaaaacctaggctagaaaaaagaaatgcttccaatcttttttttcctctttcattgaggaaatagaagggagtaatttttgaaatgctgaaaaagtgctatatgatgaaaagctcctataagtcaattagcctttgttaggttctttatttattgtacaaaatccrttgcatgcactgctgaaattttcttacttttctctttgtatgattgtcaaaagtgataggtatgttgaaargaaacctttttctctgctactgttcattccactattacagagaatcaatcacaaaagcagcagttgcatctaataattcttccagtacagcgcaggtggaaagaaaattggcttctttatacatgcaaagcatgagaaaataagttctatgtgagggatgaatgcaacacgctaggaataccacaagcagaatgtattggagtctctgcaatcatctgttttagatgattttgaaaaatccttgtacttagctgctttctctctgtgcacattggctgctcatggactgcgtttcctttg

SEQ ID NO: 76129 - DNA, 599 bp, Chicken  19866894360834_1
  misc_feature (1)..(208): n is any nucleotide
nnnnnnnnnnnnnnnnnnnnnnnnnnnnnnnnnnnnnnnnnnnnnnnnnnnnnnnnnnnnnnnnnnnnnnnnnnnnnnnnnnnnnnnnnnnnnnnnnnnnnnnnnnnnnnnnnnnnnnnnnnnnnnnnnnnnnnnnnnnnnnnnnnnnnnnnnnnnnnnnnnnnnnnnnnnnnnnnnnnnnnnnnnnnnnnnnnnnnnnnnnnnnnnnccaaagcttctggtggtctctgctaacaggttttgtttaatattaacttcatataatgtgtcaattcttcatttaaactatttcctttcacrtgaggagggactagtaattaccataagccatgttctgccaaaattttcaagatgtatttatttattcagtcccaaaacaaagaggaaaaactgtagggataaaaatggcacaagagttgtgcacagcagaacaaatcacaacagtacaaagctcccacttcaatcatttcaaaatattttatttcagtttttaaaagatgtgctttgtgcttccatttaccagaactttcaaactggacaagtgatttctgtctcacttagaacttgttcaagcaggagacttaaatacaagggaacgt

SEQ ID NO: 76130 - DNA, 600 bp, Chicken  19866894360834_2
atatcaagtcaaagctagacttgatagacccctgtagggttagtgggctcatccagaatgagactgacctatgacacctctccttgtgccactggagaagccccaggctgtacgccgctccaggaatcatagaatcagaatggcttaggttggagtgaaccttaaagcctatctagtgccaaccccctgtaccacaggcagggttgccacccaccagatcaggctgcccagagccccatcaagactagtcttgagcacctccagaggtggggaacccacaacctctctgggtaatatgtsccagtgccacaccaccctctgagtgaaaaatttcttcctaacgtctaacctaaatctctcctcttttagcttaaagccattccctcttgtccgatcactatcagcctgtgtaaaatgttggtccccctcctgcacataagctcccttcaagtactggaaggctgcatgaggtcttcccagaaggtgtgggaaaatgcagattgcagcatcttcacaagaggggcatgatttcagaaaacacagcatctgtaccagttagataatgtacctgaccggggaaactgcaagaacagcagctga

SEQ ID NO: 76131 - DNA, 599 bp, Chicken  19866894360839_1
  misc_feature (1)..(223): n is any nucleotide
nnnnnnnnnnnnnnnnnnnnnnnnnnnnnnnnnnnnnnnnnnnnnnnnnnnnnnnnnnnnnnnnnnnnnnnnnnnnnnnnnnnnnnnnnnnnnnnnnnnnnnnnnnnnnnnnnnnnnnnnnnnnnnnnnnnnnnnnnnnnnnnnnnnnnnnnnnnnnnnnnnnnnnnnnnnnnnnnnnnnnnnnnnnnnnnnnnnnnnnnnnnnnnnnnnnnnnnnnnnnnnnttgcacatctgtaagttaaaaaaaaaaaaaaaaaaaaaaaaaaggtgatttacagtaggtggctcttgtttaaattmagggaaacaccaagagagactcagataatgatcatacacctgagagatgaataaagccttttgtacagagccaaaggaatttattatttccccaaaacaaaattctttgcattccaccatacctttgtagaacataacatactatatgtggtatgtagaaaaatgaacagtttattttaaaaagatcatttaaattccaaagagaaacattcatattgaaagctacaaataggtattcatgcaaattttttaatattatttgtttgtaaaaattaaagattatgccaaagcaagtaaat

SEQ ID NO: 76132 - DNA, 600 bp, Chicken  19866894360842_1
ttgcttgaatatctttcccgttttgcatgtgatcttttggcctcttcttttcaccgtgttctcattctaacttcaaaaccagagtgaaagtgtaaaagatactgtctttggttgccacagctatttttaggtgtactaaaaacaaatagagaggtcccagttgaatgtaggcctagatgattttgctggatagccaggttttagttgtctcctgtagagatactgtatggagaacactgggagtatataattgatggaaccaaatgtaatgatcttcctcaaagtatatgtcacttggaygggtgtgctggggcagtgcagctttctgctgctcatcatggtgcacaggagggaaccaagtggctttcatcagaatttatgtcagtgctttcttcagtgtgccttattagctttcatgtcagtgtyttggtgctagcatatatcttaattgaaaagtaaccagtagagaagttttgtcttaatattaaaatctcctctttaatagtacttgaggcaagttggaaaaccattttgatggtatcagacagaccaatgtcggggccttacataattgaagtctcagtagaggtgtggaaggag

SEQ ID NO: 76133 - DNA, 600 bp, Chicken  19866894360842_2
ttaggtgtactaaaaacaaatagagaggtcccagttgaatgtaggcctagatgattttgctggatagccaggttttagttgtctcctgtagagatactgtatggagaacactgggagtatataattgatggaaccaaatgtaatgatcttcctcaaagtatatgtcacttggaygggtgtgctggggcagtgcagctttctgctgctcatcatggtgcacaggagggaaccaagtggctttcatcagaatttatgtcagtgctttcttcagtgtgccttattagctttcatgtcagtgtyttggtgctagcatatatcttaattgaaaagtaaccagtagagaagttttgtcttaatattaaaatctcctctttaatagtacttgaggcaagttggaaaaccattttgatggtatcagacagaccaatgtcggggccttacataattgaagtctcagtagaggtgtggaaggagtattttagcctctttaagcggcctacttcaaaagcaggttgaatcgtttctgtggccctgcccttccatctgctttgcggttggagcattgccttttgctttggggagattctgctttggtcaccg

SEQ ID NO: 76134 - DNA, 599 bp, Chicken  19866894360853_1
  misc_feature (1)..(84): n is any nucleotide
nnnnnnnnnnnnnnnnnnnnnnnnnnnnnnnnnnnnnnnnnnnnnnnnnnnnnnnnnnnnnnnnnnnnnnnnnnnnnnnnnnnncctgaaatgattgtttcttcatctggaacaatggaaataatgaatattaactgctgccatgaaatacagtgttcttcacagcagaaagctaaaaaagaaacagagctgaaaaagaagcatcatcctcacaacttctgcaacagcagtgtaaaattaggagaactgtcatgcagtttcacagggacgtggagggtgtaagacatctagctctctgcktgggttgctgtaatatatttctgtactatgagttaggaaaatttccttcacttttaccttgctgtgcatgtgacagtcctggcgaggacagccagtctacctcagggaaagacagataagatgcaccgtacatgagacttgtgaaagctgccgacctcaggaacaagaggaggggacctgggaccatgtcctgattccctcagttacaggtgtgcagatgttttcaacaagctcttgtcaggattgcattatactggaggtctggtgctgatgagttcctgtacagcccaatttcccac

SEQ ID NO: 76135 - DNA, 599 bp, Chicken  19866894360854_1
  misc_feature (1)..(37): n is any nucleotide
nnnnnnnnnnnnnnnnnnnnnnnnnnnnnnnnnnnnnatttttaagtattcatttaaatggtgaagcaggaaagcaaaagtttcttaaaggaagcatgaagtggtacaggaagaagcttttggagaagctgtcactttttgttactatcctctcttttttttggtagtggtaatttcttaagaaatatcctcattggacctaggaaatactttgtttagaactactgatgtgtttccttaactcctgattttcttccttgcttactgttttaaattacttctgcatttttttcaagcttygtttataatgtcctggtactgagagggcagtgtaattaaatacagtatgaatttatcaacaaaaaaagttgattgcagcatgtgctatgcggtgttaggcttcagtggctcaagtctcaccaaagtgtggccacaggagctgacagctgtagagattctgaaagacctctgctgtgaggagagagagctgcttcacragctgcctgtgctgttccctgctgtcctctgctcctccttttgctctctggacagactccatccaaaagagcattacaagtttgcatgctgaaacagagttt

SEQ ID NO: 76136 - DNA, 600 bp, Chicken  19866894360854_2
acctaggaaatactttgtttagaactactgatgtgtttccttaactcctgattttcttccttgcttactgttttaaattacttctgcatttttttcaagcttygtttataatgtcctggtactgagagggcagtgtaattaaatacagtatgaatttatcaacaaaaaaagttgattgcagcatgtgctatgcggtgttaggcttcagtggctcaagtctcaccaaagtgtggccacaggagctgacagctgtagagattctgaaagacctctgctgtgaggagagagagctgcttcacragctgcctgtgctgttccctgctgtcctctgctcctccttttgctctctggacagactccatccaaaagagcattacaagtttgcatgctgaaacagagtttcagaattaatgagtttcagaattaactttgagcagtgacacatgatctgggtttttttggagaagaagcatccatcaaatcccatttataagtaaagagtaagtcattaaaacaagcctctactgggatttcagtgctggtgtcagttgtgggcagtgaaatgcaaaggctgtgttcagtcatggagtggcacaaagg

SEQ ID NO: 76137 - DNA, 366 bp, Chicken  19866894360879_1
ttaaaacacaaaacaagaaacctaagactaattaaactaaaactgaataagcatgtgcattccagtaagttattgccgtaaatctttgcctagtcaaatatttagaccatgattgactcagcagttaattcttaaagactcaagtcttagcttttcagctccctggcataggcttcagaaggagtcattggtctgataatggtaagaggagatgtttggcacacttaattaatgtaagctcttttcattagctctgcagtcagagatgcaagttaaattgacgagaaataaaggggaaargggggaaaaaagctttagtatatttttgtagaaaataagtaacttttcttgtggtgtttagaaata

SEQ ID NO: 76138 - DNA, 600 bp, Chicken  19866894360884_1
acaagggcaagaaatacttaattgtcatcacatggagctaccaagataatggaaaattgcagagaccttggagtgcagccacggaaggaagaagccaaaacaagagccagggaaaagcagacccttacgcagcttcatgatcctactgaagagatggcggtggctcaaccagaccagagagcctcattatttactttcagggagtgaaagtaccaaataatcagcagctcttcaaagactgacacgacaagaataccagaagccacaaatcaaatttaacagagcaaaaataacagcagyagcttctctgaccttctgtgcttcaccttccctctgatttcttcatttgaaaagttttccatgtcaacacaattcaagagatttcccaaatgctattaagataggattactcaaaaatgcaaaatatatcacttccagatagctgctcaccaagcagcccagacacagacctgtcacacagaaaggagatactggaaaactaaatgcaaatcttagaaagaagcaagaagaattccaagagaacccagctcagactcactgctctcaattaaagtctctgagatgctgaactgaaattgc

SEQ ID NO: 76139 - DNA, 599 bp, Chicken  19866894360888_1
  misc_feature (1)..(141): n is any nucleotide
nnnnnnnnnnnnnnnnnnnnnnnnnnnnnnnnnnnnnnnnnnnnnnnnnnnnnnnnnnnnnnnnnnnnnnnnnnnnnnnnnnnnnnnnnnnnnnnnnnnnnnnnnnnnnnnnnnnnnnnnnnnnnnnnnnnnnnnnnnnnntgcacactgttggttggctctatccctcctgccttgtgctgcatgtcctgtcacaggagcagcccaaggagaatgggttttcgcactgaacactccatttggagctgcagagaaacattgtgatggcacaacgaaaagctgggataggtgctttggctygctgccctgcactttttgataaagctgggtcgtcgaggagactcagctccaaaacacagtgatgtttgtgaatgtgcgccaccattttcctttgattcgtttcttttgtttcccgcatggcaatagctggaagcccagcgttatttctaagctatgctaaatcagcagggccctgggaaagcactgcgttgcttttctggtgggagagtgcaaatattttgaatgccaaaaaggtgcttccgaggagctccttattatttgggaaacaggaagaaaagctgtggatgcagggagttccc

SEQ ID NO: 76140 - DNA, 599 bp, Chicken  19866894360903_1
  misc_feature (1)..(85): n is any nucleotide
nnnnnnnnnnnnnnnnnnnnnnnnnnnnnnnnnnnnnnnnnnnnnnnnnnnnnnnnnnnnnnnnnnnnnnnnnnnnnnnnnnnnncctgcatacgtcctgacaggcaaatcctcaaccgaagacagtgtaagcaaaaatctgctctgttgaaaagaaaaaagaaacattcttctgataacactattcatccctatccatgagaaatatgcgtatgtggtgcactgtgaccacacctaagtgggaattcctcttcagaagcgtccatcccaccaacaaacagccacatgtcattacaggtrcgttacctctgtgagtccctttcccgtcagctggaacacacccgtcttctgtgctgtttccaagtgggcttttaatgcactgtttcccatcctaatgcttcttcgagtgtacggggtccgagtggtgctttcagacagattctcttattctgtgatggaggaccacgacccaaattctgcatcataaagcaatttttttttctattttatgtgtgctgtctaaaatttagatcttaggatattcacctcacttaagatgcattcattacagcagtctacaaatcaaaatgatgcaacaa

SEQ ID NO: 76141 - DNA, 600 bp, Chicken  19866894360912_1
ctcactgcaaagcacagtcactgcagtccatcaaaggctgcttcaacccccagaaatgcccccatctgtgtggattatcaggattttaattcctatgattagcatttccagcaggttttgtcgctcacagcacatccttcctgcagaggaaccatggagatgcacctgcaggcactgctctgcggtcaccacgtggcacagcccagcacatccatggggattctcaaggagagaggaaagcagtggcacagagctcacgaagcaaagtatactccaccagatcccacattcccctctttrtagggaccgtggaagacagcaacagggcctgcttcactttctcatagaaaccaggagccaaaaacaactgaaatcagygccggagctggagaggtacagcacagcacagcaaacagccagtctagacactgaaatgtggaaacatgattcaaataaccacaactggcacatcacgtattgatcgcagcccgtcgcagaacgggccctcagtgagtaagaatatagaagaaagattaaattagagtcttccactttggttttagaaaaatatgggtcctttgggcacaatgacacggacca

SEQ ID NO: 76142 - DNA, 600 bp, Chicken  19866894360912_2
caggattttaattcctatgattagcatttccagcaggttttgtcgctcacagcacatccttcctgcagaggaaccatggagatgcacctgcaggcactgctctgcggtcaccacgtggcacagcccagcacatccatggggattctcaaggagagaggaaagcagtggcacagagctcacgaagcaaagtatactccaccagatcccacattcccctctttrtagggaccgtggaagacagcaacagggcctgcttcactttctcatagaaaccaggagccaaaaacaactgaaatcagygccggagctggagaggtacagcacagcacagcaaacagccagtctagacactgaaatgtggaaacatgattcaaataaccacaactggcacatcacgtattgatcgcagcccgtcgcagaacgggccctcagtgagtaagaatatagaagaaagattaaattagagtcttccactttggttttagaaaaatatgggtcctttgggcacaatgacacggaccaagcggcggttcttccacgctgccgggctgctcgctgggcttggaaggaacacacctgggttgtgtgcttcacccggtg

SEQ ID NO: 76143 - DNA, 600 bp, Chicken  19866894360927_1
tgcttgtggtttgctttgtgaatgaacttgacacgtgtcatgcagctctcccttttaaaaagcaaagtagctgaatatcagaagatgtcagaacataatatgttttacgtacttgaccaacccttccagagcatgtgtgttatgactcttaggaagtgatcatgtgcccttttcttcttctttttttttttttttctgtgatgctcctgcagcaaaagggcctttgcaatttctggtggcagttttattgctcatattgagagcacatgagtttgtaggtgacaaactctgtggctttcytgcaccaaataccaaatgctgcagaatcacgtggctacagggactccactaccctttgaagaaaatagtgtctttatgttgacagtaggtgttaaagcaggcaggttttggactggattttcttccttttccagtgacctaattgctgaaaggacacgtagtacaacagctttggtgcagctcagtcacttttagaagcccacttggttcaatggtgttgtttttagtgttattttttcaggcactaaatgatataaagaaatattatcwggatgcttcactgttcagatgttatccatg

SEQ ID NO: 76144 - DNA, 600 bp, Chicken  19866894360927_2
gtttgtaggtgacaaactctgtggctttcytgcaccaaataccaaatgctgcagaatcacgtggctacagggactccactaccctttgaagaaaatagtgtctttatgttgacagtaggtgttaaagcaggcaggttttggactggattttcttccttttccagtgacctaattgctgaaaggacacgtagtacaacagctttggtgcagctcagtcacttttagaagcccacttggttcaatggtgttgtttttagtgttattttttcaggcactaaatgatataaagaaatattatcwggatgcttcactgttcagatgttatccatggtttaatttataatacctctcctcaggtggaaaaatatactgaactgtaaagatttatgttccaatctagtaatgcgatttacagtgttttaaaggttccaggattaggtgaaaaatcaattccttttacaatcaagggaaacaaaaagaatgatgtacttgctagtgccagctgtaattatggtggaagattcacggtacttcagccttcggatatcactagacaagagttttagggatttgggaaaactgcatagctgtatggcatat

SEQ ID NO: 76145 - DNA, 600 bp, Chicken  19866894360934_1
tgtagtacaatgatgcaggcattcagaggcaccagaatggaaatagtaataatacagtaaaagagcagagcaggattgtattatcttgcagtttaaactaatgatgaccaccctagaccgacactaataataataataataataataaagcaatggctgaataacttgtaaggttttaaggttggtagaagtatcctgctaataatatttcatgtgcaaaacatgcttctgagattttttattacattgctgtttaagaaccagacagctatggtcctgtgagttcacataacttaaagrctgtcactacattcctgacagtcctggggccctttggctggagaaacataactaaccttaaagatagctatgctcctcctgaatggcatgatgagatgtggcactgatccagcctaatgccaccaaaccatttccagacgcaattcagaagggctttcaaacacagagaatctgtctactggaaacagatcacagactccacatggctatagcatagtttcttctcaatagtttacctgtgattaatcttgtcttacattgaagaaacagatatttatcattaatgttttgtctaaagaa

SEQ ID NO: 76146 - DNA, 600 bp, Chicken  19866894360940_1
tctttctaacttgaaaggaaactgggctggtaagggttggtgaataccatctgtcatccggacatgcaatttgtacacattcagaccatgcccagatgccttggatttggaaagtggcaaatttggatgccttgatatagaagcaatcatgatttagaatcataggatcctgacaatcccaaggagatctccagcccaagatcctgctcaaagcagagtcagctatgagggcaaacctgactgctcagggcttgctcagagagcaaagatcttggaaacagatacacatacttaccgttytgttcagaaggacatgacacatatgactatttcctttgccataaatgatgttagttcttcatgctttcaagtattttttcctccccagtttccaccatccattgaatgtcaactccagtctatgatgactaaacagctgagacaarggacaggaaccctgaataaatatgttagtgacaaatatgtttcacttttctttcaaatctattctgaaactgttgccaactgaggcttggcaaagtagcctacattagaacatatctcacattaagccacttcctttctactcataaatttagt

SEQ ID NO: 76147 - DNA, 600 bp, Chicken  19866894360940_2
tcatgatttagaatcataggatcctgacaatcccaaggagatctccagcccaagatcctgctcaaagcagagtcagctatgagggcaaacctgactgctcagggcttgctcagagagcaaagatcttggaaacagatacacatacttaccgttytgttcagaaggacatgacacatatgactatttcctttgccataaatgatgttagttcttcatgctttcaagtattttttcctccccagtttccaccatccattgaatgtcaactccagtctatgatgactaaacagctgagacaarggacaggaaccctgaataaatatgttagtgacaaatatgtttcacttttctttcaaatctattctgaaactgttgccaactgaggcttggcaaagtagcctacattagaacatatctcacattaagccacttcctttctactcataaatttagtttttcttttctactgcctgtcacctgaagttctgagggcattcaggagatgttctggcttattccacctcrtagaagaagaccccttgacattttctttctcctttctcatattcagtagccttacacacaagaaatccttctaaa

SEQ ID NO: 76148 - DNA, 600 bp, Chicken  19866894360940_3
tattttttcctccccagtttccaccatccattgaatgtcaactccagtctatgatgactaaacagctgagacaarggacaggaaccctgaataaatatgttagtgacaaatatgtttcacttttctttcaaatctattctgaaactgttgccaactgaggcttggcaaagtagcctacattagaacatatctcacattaagccacttcctttctactcataaatttagtttttcttttctactgcctgtcacctgaagttctgagggcattcaggagatgttctggcttattccacctcrtagaagaagaccccttgacattttctttctcctttctcatattcagtagccttacacacaagaaatccttctaaaatccattttgtaccaagaaagtgcaaatctagttacactctgcattacataccactgttacatgtgtgcattcacattgttcacttgtttacaataacagagatatgtttatcataattttcataatttattttattttgcaaataccaacatgctcagctcagggttaacaattctgttgggcacaacctagcatggggtggtctgacctgtcaccccattaac

SEQ ID NO: 76149 - DNA, 600 bp, Chicken  19866894360941_1
ggtcatagagctcttctgacaaagcagaggttgtgtggaggtggatcttttcctcctggcataggtgtggcatggcaccaatcccaacaccgatcagggaaaaggttgagctaatgggctgatgaaggacggtgctgcctcccatcagcacatttccacccagcccattacattcccagttgcacactcctggtaccttcctctgcctgagggtctcatggggctgcaactgctgcgctggggtcacctggggagctgcagggatcagtgccacaccttgatacaagaaatgacgtacgrtgtgtcatgaaggtcctgctctaccagaaagcatgtggaatggagagaccctgtgctcacgtggaacgctggagtggcacactgtcacatcagarccaagcagagactccaggtctgcctggagactgcgtggggttctcatggccatatggcactgctcaacatcccagctccttacaatgccccacagtacccagcacagtgaggaggaggaggtgaggcgacacatttgacctgccacagtccctggctggcaggacaggtccccgaggccgtcaccacgaaggctgcagccaccca

SEQ ID NO: 76150 - DNA, 600 bp, Chicken  19866894360941_2
agggaaaaggttgagctaatgggctgatgaaggacggtgctgcctcccatcagcacatttccacccagcccattacattcccagttgcacactcctggtaccttcctctgcctgagggtctcatggggctgcaactgctgcgctggggtcacctggggagctgcagggatcagtgccacaccttgatacaagaaatgacgtacgrtgtgtcatgaaggtcctgctctaccagaaagcatgtggaatggagagaccctgtgctcacgtggaacgctggagtggcacactgtcacatcagarccaagcagagactccaggtctgcctggagactgcgtggggttctcatggccatatggcactgctcaacatcccagctccttacaatgccccacagtacccagcacagtgaggaggaggaggtgaggcgacacatttgacctgccacagtccctggctggcaggacaggtccccgaggccgtcaccacgaaggctgcagccacccatgtcccctctgtgctgcgtgggaccggggcacagggccactggacacccccacagacacacagagctgctttgtctgggggcagccacgtcatgc

SEQ ID NO: 76151 - DNA, 600 bp, Chicken  19866894360954_1
aaatggaatcacagttttctctgctttggactgtaacaagttttcagggctccaggtctactgaacagggtgctcagaggagaggaattcagggactcacccacacctggcctgagtcactcactttagtcatttggatagccgtctcctccctctgtagccagtaaaggaatgccatctgaggagcactcacatggaagtgcttccttcccagtatactatagacacagcccgagtactgtagtctagtaataaaatcacactttctacgtatggatgtgtcattaaaaccactgaaayrtgcaatcatagaatcacwgaagtgtttgagttggaagagacctttaaagaccatctggtccaactcccctgmaatgaacagggactcctacagctacatcagagtgctcagagtgccactcagcctgaccttgagtgtctccagggatagggcatccatcacctctctgggcaacctgtgccagtgccttrccacaccagttctaaaaaacctcttccttatatccagtctaaatctcccccttttagcttgaaaccatttccccttgttctgtcaaaagaccctgctaaagagtctgt

SEQ ID NO: 76152 - DNA, 600 bp, Chicken  19866894360954_2
aatggaatcacagttttctctgctttggactgtaacaagttttcagggctccaggtctactgaacagggtgctcagaggagaggaattcagggactcacccacacctggcctgagtcactcactttagtcatttggatagccgtctcctccctctgtagccagtaaaggaatgccatctgaggagcactcacatggaagtgcttccttcccagtatactatagacacagcccgagtactgtagtctagtaataaaatcacactttctacgtatggatgtgtcattaaaaccactgaaayrtgcaatcatagaatcacwgaagtgtttgagttggaagagacctttaaagaccatctggtccaactcccctgmaatgaacagggactcctacagctacatcagagtgctcagagtgccactcagcctgaccttgagtgtctccagggatagggcatccatcacctctctgggcaacctgtgccagtgccttrccacaccagttctaaaaaacctcttccttatatccagtctaaatctcccccttttagcttgaaaccatttccccttgttctgtcaaaagaccctgctaaagagtctgtc

SEQ ID NO: 76153 - DNA, 600 bp, Chicken  19866894360954_3
tctgctttggactgtaacaagttttcagggctccaggtctactgaacagggtgctcagaggagaggaattcagggactcacccacacctggcctgagtcactcactttagtcatttggatagccgtctcctccctctgtagccagtaaaggaatgccatctgaggagcactcacatggaagtgcttccttcccagtatactatagacacagcccgagtactgtagtctagtaataaaatcacactttctacgtatggatgtgtcattaaaaccactgaaayrtgcaatcatagaatcacwgaagtgtttgagttggaagagacctttaaagaccatctggtccaactcccctgmaatgaacagggactcctacagctacatcagagtgctcagagtgccactcagcctgaccttgagtgtctccagggatagggcatccatcacctctctgggcaacctgtgccagtgccttrccacaccagttctaaaaaacctcttccttatatccagtctaaatctcccccttttagcttgaaaccatttccccttgttctgtcaaaagaccctgctaaagagtctgtcctcctttcttacagctca

SEQ ID NO: 76154 - DNA, 546 bp, Chicken  19866894360954_4
tcagaggagaggaattcagggactcacccacacctggcctgagtcactcactttagtcatttggatagccgtctcctccctctgtagccagtaaaggaatgccatctgaggagcactcacatggaagtgcttccttcccagtatactatagacacagcccgagtactgtagtctagtaataaaatcacactttctacgtatggatgtgtcattaaaaccactgaaayrtgcaatcatagaatcacwgaagtgtttgagttggaagagacctttaaagaccatctggtccaactcccctgmaatgaacagggactcctacagctacatcagagtgctcagagtgccactcagcctgaccttgagtgtctccagggatagggcatccatcacctctctgggcaacctgtgccagtgccttrccacaccagttctaaaaaacctcttccttatatccagtctaaatctcccccttttagcttgaaaccatttccccttgttctgtcaaaagaccctgctaaagagtctgtcctcctttcttacagctca

SEQ ID NO: 76155 - DNA, 427 bp, Chicken  19866894360954_5
catggaagtgcttccttcccagtatactatagacacagcccgagtactgtagtctagtaataaaatcacactttctacgtatggatgtgtcattaaaaccactgaaayrtgcaatcatagaatcacwgaagtgtttgagttggaagagacctttaaagaccatctggtccaactcccctgmaatgaacagggactcctacagctacatcagagtgctcagagtgccactcagcctgaccttgagtgtctccagggatagggcatccatcacctctctgggcaacctgtgccagtgccttrccacaccagttctaaaaaacctcttccttatatccagtctaaatctcccccttttagcttgaaaccatttccccttgttctgtcaaaagaccctgctaaagagtctgtcctcctttcttacagctca

SEQ ID NO: 76156 - DNA, 600 bp, Chicken  19866894360963_1
catgagcacagcctggagaagaactcgttgagagcagccctgcggagaaggacttgggggtcccgatggacagaagcgggacatgaggcagcagtgtgcgcctgcagcccggaaggccgacagtcccctgggctgcagcaacagaggggtggcagcagggagaggagagggagggggttgtgcccctctgctctgcccctggaaggccccacctgcagtgctgtgcccaggcctggggcccccaggacaggagggatgcggagctgctggagcgggtccagaggagggcacgaggatgcwcagagggctgcagcacctctgctgtgaagacaggctgagggagctgggcttgttcagctcggggaagcttggggaccaactgtttacatggtcttatagtgacaagacaagaaggaatggctctaagctaaaagaggggagatttatgttagatgygaggaagcmatcctttcctcagagggcagtgaggcgctggcactgctgcccagagagctgtgggtgccccatccctgcaggcactcaaggccaggtgggatggggccctgggcagcctgagctggtggggggcagccctgccca

SEQ ID NO: 76157 - DNA, 494 bp, Chicken  19866894360963_2
agggagaggagagggagggggttgtgcccctctgctctgcccctggaaggccccacctgcagtgctgtgcccaggcctggggcccccaggacaggagggatgcggagctgctggagcgggtccagaggagggcacgaggatgcwcagagggctgcagcacctctgctgtgaagacaggctgagggagctgggcttgttcagctcggggaagcttggggaccaactgtttacatggtcttatagtgacaagacaagaaggaatggctctaagctaaaagaggggagatttatgttagatgygaggaagcmatcctttcctcagagggcagtgaggcgctggcactgctgcccagagagctgtgggtgccccatccctgcaggcactcaaggccaggtgggatggggccctgggcagcctgagctggtggggggcagccctgcccatggccgggggtggaactgggtggctttagctcccctccaaccacagccat

SEQ ID NO: 76158 - DNA, 485 bp, Chicken  19866894360963_3
agagggagggggttgtgcccctctgctctgcccctggaaggccccacctgcagtgctgtgcccaggcctggggcccccaggacaggagggatgcggagctgctggagcgggtccagaggagggcacgaggatgcwcagagggctgcagcacctctgctgtgaagacaggctgagggagctgggcttgttcagctcggggaagcttggggaccaactgtttacatggtcttatagtgacaagacaagaaggaatggctctaagctaaaagaggggagatttatgttagatgygaggaagcmatcctttcctcagagggcagtgaggcgctggcactgctgcccagagagctgtgggtgccccatccctgcaggcactcaaggccaggtgggatggggccctgggcagcctgagctggtggggggcagccctgcccatggccgggggtggaactgggtggctttagctcccctccaaccacagccat

SEQ ID NO: 76159 - DNA, 600 bp, Chicken  19866894360964_1
cacagcctggagaagaactcgttgagagcagccctgcggagaaggacttgggggtcccgatggacagaagcgggacatgaggcagcagtgtgcgcctgcagcccggaaggccgacagtcccctgggctgcagcaacagaggggtggcagcagggagaggagagggagggggttgtgcccctctgctctgcccctggaaggccccacctgcagtgctgtgcccaggcctggggcccccaggacaggagggatgcggagctgctggagagggcccagaggagggcacgaggatgctcagagrgctgcagcacctctgctgtgaagacaggctgagggagctgggcttgttcagctcggagatgaggaagcttcgggaagaycttattgctgccttccagtacttgaaaagagcttacaagcaggaggggaagtgactgtgtacagtttgatagtgacaggacaagggggaatggctttaaactacaagagtggagatgtgggttagatrtgaggcaccagctgcccagagagctgttggtgccccatccctgcaggcactcaaggccaggtgggatggggccctgggcagcctgaactggtg

SEQ ID NO: 76160 - DNA, 580 bp, Chicken  19866894360964_2
aggcagcagtgtgcgcctgcagcccggaaggccgacagtcccctgggctgcagcaacagaggggtggcagcagggagaggagagggagggggttgtgcccctctgctctgcccctggaaggccccacctgcagtgctgtgcccaggcctggggcccccaggacaggagggatgcggagctgctggagagggcccagaggagggcacgaggatgctcagagrgctgcagcacctctgctgtgaagacaggctgagggagctgggcttgttcagctcggagatgaggaagcttcgggaagaycttattgctgccttccagtacttgaaaagagcttacaagcaggaggggaagtgactgtgtacagtttgatagtgacaggacaagggggaatggctttaaactacaagagtggagatgtgggttagatrtgaggcaccagctgcccagagagctgttggtgccccatccctgcaggcactcaaggccaggtgggatggggccctgggcagcctgaactggtggggggcagtcctgcccatggccgggggtggcactgggtgggctttgagctcccctccaa

SEQ ID NO: 76161 - DNA, 452 bp, Chicken  19866894360964_3
tgcagtgctgtgcccaggcctggggcccccaggacaggagggatgcggagctgctggagagggcccagaggagggcacgaggatgctcagagrgctgcagcacctctgctgtgaagacaggctgagggagctgggcttgttcagctcggagatgaggaagcttcgggaagaycttattgctgccttccagtacttgaaaagagcttacaagcaggaggggaagtgactgtgtacagtttgatagtgacaggacaagggggaatggctttaaactacaagagtggagatgtgggttagatrtgaggcaccagctgcccagagagctgttggtgccccatccctgcaggcactcaaggccaggtgggatggggccctgggcagcctgaactggtggggggcagtcctgcccatggccgggggtggcactgggtgggctttgagctcccctccaa

SEQ ID NO: 76162 - DNA, 600 bp, Chicken  19866894360970_1
cttgtcatgggatttcaaaaaacagttattgagaagagtaattatgaaagtagcaatcttttcactgacattattcttctgtaattgagatctgggaggtaagagctttgtgttttcttgtgtatatatacatatattttcccacagtgtagtttgcaagaattgttgatctatataatttttcttttataattcactctgccctgaggaaccacagtcaagcagaaggccaggagactgcaagaacacagacaaaccatataagcatttataagcagtctggagagcaccaagcattaraaaaataaaataaatctacctttcaaatagacttacatcaggaatccttgagctcatttctgggacagaccrcatggttagagaaagactgcctgcttccacccattcacaaactgctgatcttcgttcctttcataattttctaacattacagcaacarttacacagaaaaatgtctaatgtatgttgtacttcctttaatgttgtttagcatctggaaacttggaggaaacaatctgctttctagggacagcattttcagaattgctgacttaggccacaatcccacacagtcgcagg

SEQ ID NO: 76163 - DNA, 600 bp, Chicken  19866894360970_2
attcttctgtaattgagatctgggaggtaagagctttgtgttttcttgtgtatatatacatatattttcccacagtgtagtttgcaagaattgttgatctatataatttttcttttataattcactctgccctgaggaaccacagtcaagcagaaggccaggagactgcaagaacacagacaaaccatataagcatttataagcagtctggagagcaccaagcattaraaaaataaaataaatctacctttcaaatagacttacatcaggaatccttgagctcatttctgggacagaccrcatggttagagaaagactgcctgcttccacccattcacaaactgctgatcttcgttcctttcataattttctaacattacagcaacarttacacagaaaaatgtctaatgtatgttgtacttcctttaatgttgtttagcatctggaaacttggaggaaacaatctgctttctagggacagcattttcagaattgctgacttaggccacaatcccacacagtcgcagggatgcaacagcacggagatctttgcagatcattacagaggactataaatgtttttttattattattattttt

SEQ ID NO: 76164 - DNA, 576 bp, Chicken  19866894360970_3
aattgttgatctatataatttttcttttataattcactctgccctgaggaaccacagtcaagcagaaggccaggagactgcaagaacacagacaaaccatataagcatttataagcagtctggagagcaccaagcattaraaaaataaaataaatctacctttcaaatagacttacatcaggaatccttgagctcatttctgggacagaccrcatggttagagaaagactgcctgcttccacccattcacaaactgctgatcttcgttcctttcataattttctaacattacagcaacarttacacagaaaaatgtctaatgtatgttgtacttcctttaatgttgtttagcatctggaaacttggaggaaacaatctgctttctagggacagcattttcagaattgctgacttaggccacaatcccacacagtcgcagggatgcaacagcacggagatctttgcagatcattacagaggactataaatgtttttttattattattatttttttaagatgctttaaaactatttcagatacttatttactttttttttccccctctcttgtcccaa

SEQ ID NO: 76165 - DNA, 599 bp, Chicken  19866894360972_1
  misc_feature (1)..(69): n is any nucleotide
nnnnnnnnnnnnnnnnnnnnnnnnnnnnnnnnnnnnnnnnnnnnnnnnnnnnnnnnnnnnnnnnnnnnntatgatagaggaaaaatagataatcttcaaactaacataggaaataaatatgatgaatcttggcctggacacttgaatgaaagattttgcaacttacagtacttaaaaaatattggtctaattgctcactatgcttgaaagctaaatcttttatgcttatttactacatatttttcctctagcagaataactactgaaatcatttttcagctaactttaaaacagttcatyatgattttttaaacatacatcrtattggcgcaaacaagtttgatttcagcttgatttataatgcttcatttggtgttattttcctaaagcagctcttaaaaagctgtttccattcacaggtagactgcatcaaaaaaaaaaaaaaactttcatacaaaatgtacagcacaagtatgatttgaaaatattcatctcattcacattcccctgcctccactaaaagatttataacatctaaaacaggaattgatgaattcatcagcacctgcgacattttgatcataatcaataacataatt

SEQ ID NO: 76166 - DNA, 599 bp, Chicken  19866894360972_2
  misc_feature (1)..(47): n is any nucleotide
nnnnnnnnnnnnnnnnnnnnnnnnnnnnnnnnnnnnnnnnnnnnnnntatgatagaggaaaaatagataatcttcaaactaacataggaaataaatatgatgaatcttggcctggacacttgaatgaaagattttgcaacttacagtacttaaaaaatattggtctaattgctcactatgcttgaaagctaaatcttttatgcttatttactacatatttttcctctagcagaataactactgaaatcatttttcagctaactttaaaacagttcatyatgattttttaaacatacatcrtattggcgcaaacaagtttgatttcagcttgatttataatgcttcatttggtgttattttcctaaagcagctcttaaaaagctgtttccattcacaggtagactgcatcaaaaaaaaaaaaaaactttcatacaaaatgtacagcacaagtatgatttgaaaatattcatctcattcacattcccctgcctccactaaaagatttataacatctaaaacaggaattgatgaattcatcagcacctgcgacattttgatcataatcaataacataattttgccctttaaatgggatttca

SEQ ID NO: 76167 - DNA, 600 bp, Chicken  19866894360979_1
ttcagttagcttattcaccaacattgatgaatttaatactggaacacggagaaatgcattctggggaggatgaatttgagcgcagggaaaagctgcttgaaatctactgctgtttttcaggatactggtctttgttcccaatgatcttaaagccgagtcttctactcttttgggatgagtctgtcttgtatctattccatgcatttgctaactttgtgttgtttttttttttcttattactgtcacctgcattcgtgctccccacctttcgttggcacgtcctctcttcttctccccttycctcaaccccaccctttcactgtgcttcgcacctgggcacttctcaagatgtggaagacgttaaatttgtgataaactacgactatccgaacagctctgaagattatgtgcaccgtattggccgtaccgcgcgtagtaccaacaaaggtaccgcgtacacgttcttcacgccaggaaacctgaaacaagccagggagcttatcaaagtgttggaagaagccaatcaagccatcaatccaaagctgatgcagcttgtggaccacagaggaggaggaggtggtggtggaggtaaaaacacat

SEQ ID NO: 76168 - DNA, 600 bp, Chicken  19866894360985_1
cagacacactgtttgcacagcactaccagcacccccagtcaagtggatgttactggagctgtcaatggatcccagcatgtcacagctgccaggttggggggaagcatctgaggggagagaactgggccagaaatctctgctccttgagacccagcccagcccgagaagtgggatggcatcagactcaccaaggtcagaaggctcataaaactgtttccatgaagagcatctctgcctgttattcccaaaccactcttaagcattgtcagcctttcttgttagctactacttttttttttytctctgttaattaacagttcaagaagcatccctctacacagttgcaggcccatcaaaatctgacactacctcatttttattcttctcccaccatcctccctcctctcatctccaggactttcctgtgattcagcaccagcccttcccagctccccttgcaagctgcaaactgagtcattattggatggaaggcttccaaggaaagtgcccaaatggtgtcgatgcaccaaatctttcctctgggaacgggacccacagagcactgccatgggatgctgtgctgcaatttgacatgtggga

SEQ ID NO: 76169 - DNA, 600 bp, Chicken  19866894360996_1
aggtgggtaaataatatcctgctcactctttctgcagtgtcacagcccctgatatggggtctaatatgtcctcagctttatgcattttgctttcttcctggcactacaatttcaccatattgccattgtctgaaaacatggacatccataagaaataaaagaattcaggaaacatcacataatgatagtttagtaaagatgggcattatgcagttgtagtccagatcaacatttgtatctggtactttaatgtacttgatttataccagaaacttccatgaggttggtgcaggtgtcatytacttaataataattatctctcttattcttttttttttttttttccaacctctgkccttcaagtgaatgagttgttaagagctcattacaaatgaagtattatttaaatagcagtataatttttaataagcagttttcttagattcatgtattttttaagactagaagggacttacatcacctagttcaactcaaataacgcagactctagaaccacatcgttttctcttgtcatgagctctgtaaatggcatttggctgcagctcatctcctagagatgcatttatccctaattacaga

SEQ ID NO: 76170 - DNA, 600 bp, Chicken  19866894360996_2
ttctgcagtgtcacagcccctgatatggggtctaatatgtcctcagctttatgcattttgctttcttcctggcactacaatttcaccatattgccattgtctgaaaacatggacatccataagaaataaaagaattcaggaaacatcacataatgatagtttagtaaagatgggcattatgcagttgtagtccagatcaacatttgtatctggtactttaatgtacttgatttataccagaaacttccatgaggttggtgcaggtgtcatytacttaataataattatctctcttattcytttttttttttttttccaacctctgkccttcaagtgaatgagttgttaagagctcattacaaatgaagtattatttaaatagcagtataatttttaataagcagttttcttagattcatgtattttttaagactagaagggacttacatcacctagttcaactcaaataacgcagactctagaaccacatcgttttctcttgtcatgagctctgtaaatggcatttggctgcagctcatctcctagagatgcatttatccctaattacagaaatggagaatcttcctcttttcttcatag

SEQ ID NO: 76171 - DNA, 600 bp, Chicken  19866894360996_3
ggggtctaatatgtcctcagctttatgcattttgctttcttcctggcactacaatttcaccatattgccattgtctgaaaacatggacatccataagaaataaaagaattcaggaaacatcacataatgatagtttagtaaagatgggcattatgcagttgtagtccagatcaacatttgtatctggtactttaatgtacttgatttataccagaaacttccatgaggttggtgcaggtgtcatytacttaataataattatctctcttattcttttttttttttttttccaacctctgkccttcaagtgaatgagttgttaagagctcattacaaatgaagtattatttaaatagcagtataatttttaataagcagttttcttagattcatgtattttttaagactagaagggacttacatcacctagttcaactcaaataacgcagactctagaaccacatcgttttctcttgtcatgagctctgtaaatggcatttggctgcagctcatctcctagagatgcatttatccctaattacagaaatggagaatcttcctcttttcttcatagtagaatgctcacaggatgaaatatcc

SEQ ID NO: 76172 - DNA, 600 bp, Chicken  19866894360999_1
ccaaatggctatcccaagtaaaaggaaaatgagggagcataaactgtatgataaaaggtgagacaaagaaaagatctataagaaaatccctgggatccatgaactatcatgttgtcacaggaataattaaggagagcaacgatacaagaaatgaaaagatttggtctcatcagtattcatcacagagtggatcagatagatacctaatcaaagaaatcaaactgaggagatgtttaccaagcaagagaaatcaagatcatctagaagaacctaattcgtggagacagaaaagagaagatyacaagtgggaaagtggtcatttcaaacaggtacagagctgcaacaacgaaagcaatgtgttcagtccacagcacaggaggttgaggtgagatggcggctgcatctcctcacagggagcggagggacagcgctgagctctgttctgtgtgacagagacaggrcctgagggaacggcatggagctgtgtcaggggaggggcagctgggggttagggacaggtgctgcaccagagggcggtgggcatggaatgggctgcccagggctgtggacacggcccctggtgctggagttcaagaagca

SEQ ID NO: 76173 - DNA, 483 bp, Chicken  19866894360999_2
tggtctcatcagtattcatcacagagtggatcagatagatacctaatcaaagaaatcaaactgaggagatgtttaccaagcaagagaaatcaagatcatctagaagaacctaattcgtggagacagaaaagagaagatyacaagtgggaaagtggtcatttcaaacaggtacagagctgcaacaacgaaagcaatgtgttcagtccacagcacaggaggttgaggtgagatggcggctgcatctcctcacagggagcggagggacagcgctgagctctgttctgtgtgacagagacaggrcctgagggaacggcatggagctgtgtcaggggaggggcagctgggggttagggacaggtgctgcaccagagggcggtgggcatggaatgggctgcccagggctgtggacacggcccctggtgctggagttcaagaagcatttggacaacactctcggacacagggtttgaaatctgggtggtg

SEQ ID NO: 76174 - DNA, 599 bp, Chicken  19866894361001_1
  misc_feature (1)..(99): n is any nucleotide
nnnnnnnnnnnnnnnnnnnnnnnnnnnnnnnnnnnnnnnnnnnnnnnnnnnnnnnnnnnnnnnnnnnnnnnnnnnnnnnnnnnnnnnnnnnnnnnnnnntataaatgattcaacagctgcccaagcaatatttctgagctgaaaaagaggatttgctctgtaaacccagatgtttggcagccttagatcagcagtatatgaaggtgcctctggagcttttggtcttctctcaaacattggcagctgcacctctgtcctcactctgggataagcaaccctctacctccatctgcatggccsaaaccccagcactggtagtgaaggagtctgcttctttcatagcctgggtgatattttaagaaaatctgtgcttttagaaatgttaattccgtatatcatctctgccacagctagttccatcaagcactagagatctttctccatggtagtctatttgtctgagttaaacatcaggtcttccttgaagggacatctttccttcatggctgacaagagtcactgccatagagtgaaaggctgtgtcccttttacaatagtttttttacaattgtttccctagaaagagaccccagctgctt

SEQ ID NO: 76175 - DNA, 332 bp, Chicken  19866894361004_1
gtcatccccattgcagggtgctggaaccttttctcctcactcgcttgtactgtcgagtcagctgtttcaggtgcctggcagcttaaggcactggttgtactgacagctgcctagagagatgcaatgatttttttaactcaatctgaaaatatgctttagatttcttcttcagacctgttgcatccaaatagttaggaagcattaaactagccaaatccttgaagccataacttaacaaaatacgagtgcatccaggctggagttggttacggaagcttctgggttgaacaagaatccttyaaatgtgaactggagttggacgtggaagtgta

SEQ ID NO: 76176 - DNA, 600 bp, Chicken  19866894361008_1
ctacaaatattctctttcctattggctcagcagcagtacccctcccctccaccttcaatgctctcagacatcatcccacccacaatctctcatataaggcctggttggaaatctgattcttaatttctgctttttggccaggggttgactgtaactccttcccacagtctagcaatgcctgtggatttcagtggaacctggaaccttgtcagtaatgacaacttcgaaggctacatgacagctttaggtaggtgaaaagacctaatcctattcttctctcttcccctgtgaggggcctgytgcattttaattgtttgaattcttctaaaatctagatatagatcattttttccccctctaaaacatagtagaaggatatttgttagctgattaaagacacagcattagctgtcagttcagcctgtcacccaggtgtccctgcagatttcaggaatttctcagcctgatatttgtcacaagtagaactcaaaagttctacaacttttttaagagatagggaagagttctctgtctactgaacttcttttgcttttcagtacagacttacagaaaccacctcacaaaaaactatgccatgtc

SEQ ID NO: 76177 - DNA, 600 bp, Chicken  19866894361011_1
ctttctaaattgtcttctcagtgtaattaaaatagcatcaatcttaaatacagttgccctgtagtcttcaaacctacattacttagagacttaattatgcagaattacaaaactttcttataaatggttcaacatgttggtggtaaagatgtgatctgtgtggcctacttatgaagtttacaatctctctcgagcaattaattgtttccaagtgtttggtgtgttgctctccctttcagactaacacaaagctattagaagatgcagtgacaggacttctttatagccatctaacaatgrcactaatcagtccaggtgactgctgttgctgcatacaacaaatcaatgtcctaacacacatcctggaaaggagaaagatgaaatttgggtattttccagctgtgcaacaaggccttttgtagtggaagccaagccttcaaaatattttccccagttgcatacttctctacaaatttaaggggcactccaagaggtggaagtgattcctaaaacccaaaagagggttgttcagatcctgtatgtgttggtaaatctctgcctttactgagcaggtcaaaacagccttgaatctgaatgctt

SEQ ID NO: 76178 - DNA, 600 bp, Chicken  19866894361015_1
aaagagagaagaatttttgcattttactaatattccacactcgaagcagtatgatttgcagaattgcgttttgcgcagcttttcagagaaaagctgtattgtgaatgatttgtgacatataatagcactttttgcttttatttccttcaaccttgatcttcaagagtgtaggaaaaaaaacaacgaacaaacaacaccctaatattctttttgcctgaaaagatcagaattatacttactttcattgactcacagttccaggagctacataataaattttttaaacccgtttaattgcayagtgcaactttttctatgcataataatattataatgtgagatccaattttccatcaggactagaggttcagctattggaaagttgtccatacgagtcctcagagttgctgctggtcctgatcagaatatgttctgcccttcactatagcccagtttaatggtgggcttggtgtgcataatatgaaatagtatgttaaatcaaacgttaacataggtgacaacgtggtgatagctaatggtttgaagactccaacactctttcaggtctgcaagctcagtagtgacttacatcatccttga

SEQ ID NO: 76179 - DNA, 600 bp, Chicken  19866894361019_1
attggtcagcgttggtcccactgagtgtggggggctgacactgtgctccctccgagctctgctgctttgcaggggtgtacgatgacccgcgctgcacacaggaggtgaaccacggcgtgctggtggttggttatggcaccctcaacgagaaggacttctggctggtgaaaaacaggtgaaggcgctgcgggtgtgcggtgggctcctcgtgggcgacctccccctcatccactgatctgataacgtctggtgggctcatacagagcagagggagggcagctggatgcagagtgcagtggrgctgtcattgtgtgacagagtcggtttcagtcctgatgccatcccccatggttggtgctcagccatgtcagagcascccaactgtcctcctggcagtgagaagggactcaaaatgcctttaggacacttcacaccctccaaaccccccttatgaaaccgaatctggagttcaaaatgccattcagaggttgacggaaggactgcagaacggtttcatcgctgcctgtaaaaagctgtggcagagacatcaaaaccattggggtgctgagagcactgatgctttgcagagaaaggaatctc

SEQ ID NO: 76180 - DNA, 600 bp, Chicken  19866894361019_2
gtacgatgacccgcgctgcacacaggaggtgaaccacggcgtgctggtggttggttatggcaccctcaacgagaaggacttctggctggtgaaaaacaggtgaaggcgctgcgggtgtgcggtgggctcctcgtgggcgacctccccctcatccactgatctgataacgtctggtgggctcatacagagcagagggagggcagctggatgcagagtgcagtggrgctgtcattgtgtgacagagtcggtttcagtcctgatgccatcccccatggttggtgctcagccatgtcagagcascccaactgtcctcctggcagtgagaagggactcaaaatgcctttaggacacttcacaccctccaaaccccccttatgaaaccgaatctggagttcaaaatgccattcagaggttgacggaaggactgcagaacggtttcatcgctgcctgtaaaaagctgtggcagagacatcaaaaccattggggtgctgagagcactgatgctttgcagagaaaggaatctcacttttctaacctctgtttgtttcctctcccaaaagttggggcgaacgctttggtgacgggggttacatccgcatg

SEQ ID NO: 76181 - DNA, 600 bp, Chicken  19866894361021_1
aacaagaagacctccaccaaccctactccacagagagaattctacagtatttctagataaattattctgattacttggtgtactgaacattttttgagaatatctaatcttcggtgttttgttgtagattgaattgatttgtttttctgttgggtgtccttgaatatagttgatcacacttcttccaccagtagacttttcaagcactggaaaattttacatcaccctctatttccttttcttaaattactggactcagtttgactttgccttagaaggtcctttcttctctctctgttyattctgcatctctttttatctgaatttgctctacagtgggcacagtacttcagcaaagtgttggcagtttgaagtacagcagattgattgcctccctgattcttttcttaaacatgaaataaaatatgacttatcttttcatttagtcactgtctcacacctacttttgttccactgtagcctctgcatctttttttgcagtactgcttgcttgatcattattaaaaatacactttttcagatttatgaatctaagatccacctcctgcactctgtagttcccctcagtttgatcatgcc

SEQ ID NO: 76182 - DNA, 600 bp, Chicken  19866894361022_1
acataaccaagttgccttctgctgtgtgtaactatttatatctccagtttcaccttgttccaaggtgatacagccaagcaagaggtcatgtttgcttgtagatggtttccgaattaaactacaatgctaaaggaagctaacctccctgtggaaattacaaagctgcctgcaggcccccacagcgctgtgtgtattttaaggttagaagagaatctgaatactagaaggtggtgctgagggcactcctgcagcatgggctggggtctcatccatgccctgctggcagctgtgggccctcawacagctggaacgggtcagatcctcagttcagagatgtaggtaatctcgccaagcagcaraaagtgaattttactactatatagagcatctttagatgtgaagcttttctctacctcccaacctgcgcaagttcctgtaacagcagcctttcaagcaaagaatgacaaggaaacctttgtagcaacacctgacctatgatacaaggcatctgcctgctaacactaggccaaaattgagcactgcaaaatcctgtcctcgtcacctcttgatgccccccctgtgtgatgtggaagtttgagt

SEQ ID NO: 76183 - DNA, 600 bp, Chicken  19866894361022_2
ccaaggtgatacagccaagcaagaggtcatgtttgcttgtagatggtttccgaattaaactacaatgctaaaggaagctaacctccctgtggaaattacaaagctgcctgcaggcccccacagcgctgtgtgtattttaaggttagaagagaatctgaatactagaaggtggtgctgagggcactcctgcagcatgggctggggtctcatccatgccctgctggcagctgtgggccctcawacagctggaacgggtcagatcctcagttcagagatgtaggtaatctcgccaagcagcaraaagtgaattttactactatatagagcatctttagatgtgaagcttttctctacctcccaacctgcgcaagttcctgtaacagcagcctttcaagcaaagaatgacaaggaaacctttgtagcaacacctgacctatgatacaaggcatctgcctgctaacactaggccaaaattgagcactgcaaaatcctgtcctcgtcacctcttgatgccccccctgtgtgatgtggaagtttgagttgctctctctctcaccagtgcatgcggggttatatgctgtaactgtaaggacagatgtt

SEQ ID NO: 76184 - DNA, 600 bp, Chicken  19866894361031_1
aaattatcttcttacttgtgttctaatttttctgttttcactacaatcatgctgccactacctattttcccctaatgtgcattttcaagagttttaatttaacagctttcaatgatggaggaaaaaattgagaataaacaaagcctctgtttgttcaccttactgaccacaagtgatatttggaatggaattgaatctaaataaaaatacagcaataatggaagggaagtcccattttcttttatcaataactgtatagaaacatccagcaggatgtttaacacagtagtttaaaagacktctcatacctttatgtaggaaacaaggccttcctagtcttatatactacacaaattaagatcactaggaatawaaaccaaggccaaatattagctgatatggtttgtatctcsaacagtataacaagataattcactaaaagatatacagaattaagttcaaatgtcaagatttagcagtttcatctgctggaacacatacaaatcaagaacatcaacttgatttaaaagaaaatatactatttttttaaagttttgatgcaaagatgtctaatggaaagaatacattggaaatggttac

SEQ ID NO: 76185 - DNA, 600 bp, Chicken  19866894361031_2
aatgtgcattttcaagagttttaatttaacagctttcaatgatggaggaaaaaattgagaataaacaaagcctctgtttgttcaccttactgaccacaagtgatatttggaatggaattgaatctaaataaaaatacagcaataatggaagggaagtcccattttcttttatcaataactgtatagaaacatccagcaggatgtttaacacagtagtttaaaagacktctcatacctttatgtaggaaacaaggccttcctagtcttatatactacacaaattaagatcactaggaatawaaaccaaggccaaatattagctgatatggtttgtatctcsaacagtataacaagataattcactaaaagatatacagaattaagttcaaatgtcaagatttagcagtttcatctgctggaacacatacaaatcaagaacatcaacttgatttaaaagaaaatatactatttttttaaagttttgatgcaaagatgtctaatggaaagaatacattggaaatggttacgttttccacttagttaaacattcctgaatagattaaacaatctgcatttgccaaatcattgttccaagcaagc

SEQ ID NO: 76186 - DNA, 600 bp, Chicken  19866894361031_3
gatggaggaaaaaattgagaataaacaaagcctctgtttgttcaccttactgaccacaagtgatatttggaatggaattgaatctaaataaaaatacagcaataatggaagggaagtcccattttcttttatcaataactgtatagaaacatccagcaggatgtttaacacagtagtttaaaagacktctcatacctttatgtaggaaacaaggccttcctagtcttatatactacacaaattaagatcactaggaatawaaaccaaggccaaatattagctgatatggtttgtatctcsaacagtataacaagataattcactaaaagatatacagaattaagttcaaatgtcaagatttagcagtttcatctgctggaacacatacaaatcaagaacatcaacttgatttaaaagaaaatatactatttttttaaagttttgatgcaaagatgtctaatggaaagaatacattggaaatggttacgttttccacttagttaaacattcctgaatagattaaacaatctgcatttgccaaatcattgttccaagcaagcaggaaaaaagatcccacagtaacaacaaaaaaactccacc

SEQ ID NO: 76187 - DNA, 600 bp, Chicken  19866894361032_1
gaatattgatgctggcaccgtaccaaatgatgcttatattacgctgtgctgataataataaatcagtacacccactgtgttttatttttgcggtaaggaaactcaaagggaaaaaagccaggcacttacctattttaccagataattcacctgtagtggagctataaaaggaacgtcacttgcatttctcttctctgttaaagcaaaacgatggagcagaggaaggcaccttcaggcaagagcagagcgagtggaaaatcaaagcagagcacaggctgcgaggagggatgtgagcacacrgcagtccctgtgtgcagggcagcagggatggggctgtgcaatgtgttgggagtgggcagcagcaagctgcatgtgtagctctatttcctggctcccggatttgctttyggatggggaagtcggaatggggatgttttcttttaggttacagtttcatttgttttgcaggatttctgctgaagagccgtttctgtcattgataatggactggaaaaaaagcatcagtgcatcatccaaagtgtttaatcgcctgtactcatcatggtcagtcaagcactcggccattataatgaagggtta

SEQ ID NO: 76188 - DNA, 600 bp, Chicken  19866894361032_2
ggaaaaaagccaggcacttacctattttaccagataattcacctgtagtggagctataaaaggaacgtcacttgcatttctcttctctgttaaagcaaaacgatggagcagaggaaggcaccttcaggcaagagcagagcgagtggaaaatcaaagcagagcacaggctgcgaggagggatgtgagcacacrgcagtccctgtgtgcagggcagcagggatggggctgtgcaatgtgttgggagtgggcagcagcaagctgcatgtgtagctctatttcctggctcccggatttgctttyggatggggaagtcggaatggggatgttttcttttaggttacagtttcatttgttttgcaggatttctgctgaagagccgtttctgtcattgataatggactggaaaaaaagcatcagtgcatcatccaaagtgtttaatcgcctgtactcatcatggtcagtcaagcactcggccattataatgaagggttagaagttatctatagaataatcaatgtatcatgtactgcactaagaatgttccwtttttttccccatcaagactagctttggcagttcaatgggctatgcatgttatgr

SEQ ID NO: 76189 - DNA, 600 bp, Chicken  19866894361032_3
gggcagcagcaagctgcatgtgtagctctatttcctggctcccggatttgctttyggatggggaagtcggaatggggatgttttcttttaggttacagtttcatttgttttgcaggatttctgctgaagagccgtttctgtcattgataatggactggaaaaaaagcatcagtgcatcatccaaagtgtttaatcgcctgtactcatcatggtcagtcaagcactcggccattataatgaagggttagaagttatctatagaataatcaatgtatcatgtactgcactaagaatgttccwtttttttccccatcaagactagctttggcagttcaatgggctatgcatgttatgraatattttacacacattctgtactttctgtccaccacttcttctgctgggtagcccccatctctaccagcctcctgtccctgcttgggctctgttgctggtggtccagggagctatgctttagcatagggcaggatttctggagtgaagtcaagcaagaagagaccgagaggaacagtgcttgcatggaaaggtagaaatcataaaagagaaatgtttgatgccatccaggtgttggtgcatcca

SEQ ID NO: 76190 - DNA, 568 bp, Chicken  19866894361032_4
ggatggggaagtcggaatggggatgttttcttttaggttacagtttcatttgttttgcaggatttctgctgaagagccgtttctgtcattgataatggactggaaaaaaagcatcagtgcatcatccaaagtgtttaatcgcctgtactcatcatggtcagtcaagcactcggccattataatgaagggttagaagttatctatagaataatcaatgtatcatgtactgcactaagaatgttccwtttttttccccatcaagactagctttggcagttcaatgggctatgcatgttatgraatattttacacacattctgtactttctgtccaccacttcttctgctgggtagcccccatctctaccagcctcctgtccctgcttgggctctgttgctggtggtccagggagctatgctttagcatagggcaggatttctggagtgaagtcaagcaagaagagaccgagaggaacagtgcttgcatggaaaggtagaaatcataaaagagaaatgtttgatgccatccaggtgttggtgcatccatcaatgatgagagctcagcagca

SEQ ID NO: 76191 - DNA, 600 bp, Chicken  19866894361033_1
tcctgttgaacagtacaagggtaattaagtctctcactacaccctggagggcagtgagtcagtctgggctcagctggagtccactaaaagagtactgactaaatttataacagtgttaatgaacctatgcatgctactggtcagcatgaaaggccaaacagcagaggaagccatcgagcaaagaggagatgaagggaaatacttcttcaatgatgatgtagtgaaactgtgaccaaggtgtaaggaggaaagatttcttagctactggcaaacctactgaagccacaggtaatacagcasaaatgccagagaggtacactggcacatctcttaattcccagtgctagaaaaacagaaccaatcagatagcaaagctcttcagaatagttacagacttacgtaagacacagatcatcagctagttctaataaaaatagcttaagtgaaagcgagctccgtatagtaaataaaagctagggaattactataactcacacatgatttgtggcattatttggaaatgctgcactttaaatatgtttacataactaaaactacagttgtcattaaagcaattgtatgtgtatcagatactctgtt

SEQ ID NO: 76192 - DNA, 600 bp, Chicken  19866894361035_1
gtataccagaacttccagaacaaataaccttgctgtacacagaactaaatgtgcacatattcagtatgtgtagttagtctctcactggtgatcacttctgtgttcctgttattacctcaaatacgaaactggagagcagaaaaggccagatagcaaatactaatgaaaattacttaacttaaatgcttgtggattatccatatatgaaggatacatccaaaattacatatggataaaggaatagaccttttttccccccaaattaccgccaatttcagttcatcatccctaaggagcagrtgcattcttgctcactttctgacaaatgtgcaaaaaagtgtagttaatatttaaaattgaaggggaacagtcaaaggtggaagaggaatttcctgtcttcttatcaacccatacctacctatcatgtgttccctgactctcaagcactactcacctcatggatgggtggtgggaagtcaccataagcctccatgatgtgaaccaagaggatgtgtcacctcaccttggtttaatggagagcaccttgtttggtgcatttaaatgcattcttacatgcctagaaagcaaaaaattcccttt

SEQ ID NO: 76193 - DNA, 600 bp, Chicken  19866894361053_1
cttgcagcttcatcagtgaaggccagagaaatgccacccatttgcactcctgttttggggttggcatctgatgtgctcaggactcaagctcaccgacgtgccacaaagcaaatggtgccacatcagttgcgggtcagcctgggcccttctggaaggagggaagcaaagaaagtcttgaagaagagccacgctgtgctcataagggatgggttgacctgtggcagctctggcagaacttgtcccacatcaggaagggcctcaggttcctctgctctgcctgcattccctccctgctgaaakgaagaayrttcagtaagaacactgcagaaatgcattatgagaatcagatactaagctgtattgttactcaaatttcactctcaacataaarcccacacagtgcttctctactgaagtaacccccaacaaccaaagaatatatygcttaggacagatgcctacatggttcatccactcaggtgtttmctttacagctaattaactcagtaaacactgacaacaaccccaagtgtcactggaaatgcaggactcagcttgctcccatactcagacctgagttcagtgacagaacttagactg

SEQ ID NO: 76194 - DNA, 600 bp, Chicken  19866894361053_2
cttcatcagtgaaggccagagaaatgccacccatttgcactcctgttttggggttggcatctgatgtgctcaggactcaagctcaccgacgtgccacaaagcaaatggtgccacatcagttgcgggtcagcctgggcccttctggaaggagggaagcaaagaaagtcttgaagaagagccacgctgtgctcataagggatgggttgacctgtggcagctctggcagaacttgtcccacatcaggaagggcctcaggttcctctgctctgcctgcattccctccctgctgaaakgaagaayrttcagtaagaacactgcagaaatgcattatgagaatcagatactaagctgtattgttactcaaatttcactctcaacataaarcccacacagtgcttctctactgaagtaacccccaacaaccaaagaatatatygcttaggacagatgcctacatggttcatccactcaggtgtttmctttacagctaattaactcagtaaacactgacaacaaccccaagtgtcactggaaatgcaggactcagcttgctcccatactcagacctgagttcagtgacagaacttagactgcaacaga

SEQ ID NO: 76195 - DNA, 600 bp, Chicken  19866894361053_3
ttcatcagtgaaggccagagaaatgccacccatttgcactcctgttttggggttggcatctgatgtgctcaggactcaagctcaccgacgtgccacaaagcaaatggtgccacatcagttgcgggtcagcctgggcccttctggaaggagggaagcaaagaaagtcttgaagaagagccacgctgtgctcataagggatgggttgacctgtggcagctctggcagaacttgtcccacatcaggaagggcctcaggttcctctgctctgcctgcattccctccctgctgaaakgaagaayrttcagtaagaacactgcagaaatgcattatgagaatcagatactaagctgtattgttactcaaatttcactctcaacataaarcccacacagtgcttctctactgaagtaacccccaacaaccaaagaatatatygcttaggacagatgcctacatggttcatccactcaggtgtttmctttacagctaattaactcagtaaacactgacaacaaccccaagtgtcactggaaatgcaggactcagcttgctcccatactcagacctgagttcagtgacagaacttagactgcaacagac

SEQ ID NO: 76196 - DNA, 600 bp, Chicken  19866894361053_4
accgacgtgccacaaagcaaatggtgccacatcagttgcgggtcagcctgggcccttctggaaggagggaagcaaagaaagtcttgaagaagagccacgctgtgctcataagggatgggttgacctgtggcagctctggcagaacttgtcccacatcaggaagggcctcaggttcctctgctctgcctgcattccctccctgctgaaakgaagaayrttcagtaagaacactgcagaaatgcattatgagaatcagatactaagctgtattgttactcaaatttcactctcaacataaarcccacacagtgcttctctactgaagtaacccccaacaaccaaagaatatatygcttaggacagatgcctacatggttcatccactcaggtgtttmctttacagctaattaactcagtaaacactgacaacaaccccaagtgtcactggaaatgcaggactcagcttgctcccatactcagacctgagttcagtgacagaacttagactgcaacagaccactctccaacacctaacaagtagaagataacatgcagcacttaagtactccacaagaggaagcacgctggcaattattctga

SEQ ID NO: 76197 - DNA, 600 bp, Chicken  19866894361053_5
cccttctggaaggagggaagcaaagaaagtcttgaagaagagccacgctgtgctcataagggatgggttgacctgtggcagctctggcagaacttgtcccacatcaggaagggcctcaggttcctctgctctgcctgcattccctccctgctgaaakgaagaayrttcagtaagaacactgcagaaatgcattatgagaatcagatactaagctgtattgttactcaaatttcactctcaacataaarcccacacagtgcttctctactgaagtaacccccaacaaccaaagaatatatygcttaggacagatgcctacatggttcatccactcaggtgtttmctttacagctaattaactcagtaaacactgacaacaaccccaagtgtcactggaaatgcaggactcagcttgctcccatactcagacctgagttcagtgacagaacttagactgcaacagaccactctccaacacctaacaagtagaagataacatgcagcacttaagtactccacaagaggaagcacgctggcaattattctgatacagaagatgcttctctagaaaaattcagaattttcactacttgtataatt

SEQ ID NO: 76198 - DNA, 600 bp, Chicken  19866894361053_6
cacgctgtgctcataagggatgggttgacctgtggcagctctggcagaacttgtcccacatcaggaagggcctcaggttcctctgctctgcctgcattccctccctgctgaaakgaagaayrttcagtaagaacactgcagaaatgcattatgagaatcagatactaagctgtattgttactcaaatttcactctcaacataaarcccacacagtgcttctctactgaagtaacccccaacaaccaaagaatatatygcttaggacagatgcctacatggttcatccactcaggtgtttmctttacagctaattaactcagtaaacactgacaacaaccccaagtgtcactggaaatgcaggactcagcttgctcccatactcagacctgagttcagtgacagaacttagactgcaacagaccactctccaacacctaacaagtagaagataacatgcagcacttaagtactccacaagaggaagcacgctggcaattattctgatacagaagatgcttctctagaaaaattcagaattttcactacttgtataattagcaaacagtaaaacctttgttgcattccatgctcctgtttta

SEQ ID NO: 76199 - DNA, 599 bp, Chicken  19866894361056_1
  misc_feature (1)..(68): n is any nucleotide
nnnnnnnnnnnnnnnnnnnnnnnnnnnnnnnnnnnnnnnnnnnnnnnnnnnnnnnnnnnnnnnnnnnntagaaatgttgagtcataagagaggattattttccttaagtgtgtcagagggagaaaggagaaaatggtcatttagcctgaagttcagttatatcatagaataggtcaagggggaatggttttaagatcaaggagggaaggtttagattggttcttgggggaagttctttaagagagagtggtgaggtgctggaacaggttgcccagagaggttgtggatgctctgtccctwgagatgttcaagaccaggtttgatggagccctgagctacctggtctagtaccagatttgtaggttgatggccctgcctgtggcaggggggctggatatcttggggttattcaaccaaggatctttggggtcccttctgacccaaactgttctgtgattctatggttggtttagtatagtggatggcatgatttattttttcatattgcctttcagttatgaaaagtagaaccttggttctactcctgaatatgtattttgtctttgagtattttaaggagagacagaatttatgatcag

SEQ ID NO: 76200 - DNA, 599 bp, Chicken  19866894361058_1
  misc_feature (1)..(179): n is any nucleotide
nnnnnnnnnnnnnnnnnnnnnnnnnnnnnnnnnnnnnnnnnnnnnnnnnnnnnnnnnnnnnnnnnnnnnnnnnnnnnnnnnnnnnnnnnnnnnnnnnnnnnnnnnnnnnnnnnnnnnnnnnnnnnnnnnnnnnnnnnnnnnnnnnnnnnnnnnnnnnnnnnnnnnnnnnnnnnnnnnnntaaaatattaatattattaaatttgcacaaaaaaatggggttaagatattattatgattgatggctaataccacccaataaactgaacttcaaaatgattaaatttcttttctctgttccygttagatacacactatgtagtctatgggaagtaaaatctcccactgtcaaagatggaaatcaagtacagttcctttacagacccatacaaatagctccaccatccagagaatagtaattatcataataaatacaaatattcagagactagcaaatcaaagtgtctttggagggataagaactcaattccattgaaattaaagggagttttgatttgtttagcctttcggttaaggtcctgttcttatcagttgatcaaaactaggagaagtaactgatagtctcaaaaatgttctgsaa

SEQ ID NO: 76201 - DNA, 600 bp, Chicken  19866894361058_2
ccygttagatacacactatgtagtctatgggaagtaaaatctcccactgtcaaagatggaaatcaagtacagttcctttacagacccatacaaatagctccaccatccagagaatagtaattatcataataaatacaaatattcagagactagcaaatcaaagtgtctttggagggataagaactcaattccattgaaattaaagggagttttgatttgtttagcctttcggttaaggtcctgttcttatcagttgatcaaaactaggagaagtaactgatagtctcaaaaatgttctgsaaggcattggcaagttgcagtattttgaatatttcaaattatccagtagaatattcccatagctctaaactgttgaattaaatatttaacttcaaggtcattttatttcattcgtcagactctgatgttgtttatacatagcgacattatgaacctgctagctatccttcaaggagtactatgtgtacagccataaaaatagaagtggagaggaaaggaaaatgctstaagtggcaagaccagatcacaacatcgtttagactgaatttaactctcacacaaggatgttttcatccttca

SEQ ID NO: 76202 - DNA, 600 bp, Chicken  19866894361058_3
ttcggttaaggtcctgttcttatcagttgatcaaaactaggagaagtaactgatagtctcaaaaatgttctgsaaggcattggcaagttgcagtattttgaatatttcaaattatccagtagaatattcccatagctctaaactgttgaattaaatatttaacttcaaggtcattttatttcattcgtcagactctgatgttgtttatacatagcgacattatgaacctgctagctatccttcaaggagtactatgtgtacagccataaaaatagaagtggagaggaaaggaaaatgctstaagtggcaagaccagatcacaacatcgtttagactgaatttaactctcacacaaggatgttttcatccttcagttatatcagctaagaaccttaattcttaacttgctstgcaaacatgaggcagcagtggttatcaggtcactcctaagtgtcctgaacattatatgcctgttcctgagccagagataatacaccaaaaatttcagcagggctgatgctccggcttagtgctgaacaagtacttacacagttgcwggccagcaccacacaagctcagtgctctgaggaataccctgga

SEQ ID NO: 76203 - DNA, 600 bp, Chicken  19866894361058_4
attatccagtagaatattcccatagctctaaactgttgaattaaatatttaacttcaaggtcattttatttcattcgtcagactctgatgttgtttatacatagcgacattatgaacctgctagctatccttcaaggagtactatgtgtacagccataaaaatagaagtggagaggaaaggaaaatgctstaagtggcaagaccagatcacaacatcgtttagactgaatttaactctcacacaaggatgttttcatccttcagttatatcagctaagaaccttaattcttaacttgctstgcaaacatgaggcagcagtggttatcaggtcactcctaagtgtcctgaacattatatgcctgttcctgagccagagataatacaccaaaaatttcagcagggctgatgctccggcttagtgctgaacaagtacttacacagttgcwggccagcaccacacaagctcagtgctctgaggaataccctggagagggtctctttcactctctctgaagagggcagacagcttgcgagtgtaagccaagcagacatcaagtgccaggtatttagacaccacacctaacaatagggacaaatgc

SEQ ID NO: 76204 - DNA, 600 bp, Chicken  19866894361058_5
gtacagccataaaaatagaagtggagaggaaaggaaaatgctstaagtggcaagaccagatcacaacatcgtttagactgaatttaactctcacacaaggatgttttcatccttcagttatatcagctaagaaccttaattcttaacttgctstgcaaacatgaggcagcagtggttatcaggtcactcctaagtgtcctgaacattatatgcctgttcctgagccagagataatacaccaaaaatttcagcagggctgatgctccggcttagtgctgaacaagtacttacacagttgcwggccagcaccacacaagctcagtgctctgaggaataccctggagagggtctctttcactctctctgaagagggcagacagcttgcgagtgtaagccaagcagacatcaagtgccaggtatttagacaccacacctaacaatagggacaaatgcatcttttcaccccagaatctcaccaacactgcatagttcaagtaaatattaaaacacctatatgcttatctctagcagactcatgtagcttcaaaggcttaccctctgtcagccatcaagttaagaagtaaccctggcattgcagga

SEQ ID NO: 76205 - DNA, 600 bp, Chicken  19866894361062_1
tgcttccccatcccctgtacagaaggtatgagtcccctgtgaagaaccccaaacctcctcactctgtatctgctgggaggaagacaagatccagagcctgctaggtgccctagggatgtacagcagtgagggcttgtgggcaagtttggtgcttgcaggatctctgcatgctctcccattttcactgtgtctccacaaaccctttcctgctagttttcccccaaatctctttgcagtaacaaatttacagcccattatatattcactgggtaaaactgtactatctctcgtaacacagcraaatcttattcttgcatctccaaaaacattttaatttctttagcaatgctgagaaaatgcaatccttgttccagagagcttacagagagcacctgcccaggtggtgagcgggtaccactscragcaaagaacactgtgtgtttgggaagttttgtgtcccatagatcatcttcyctatcagctagcactgctggaggcaaaggacttaggacaccaaagcctttttaaatgcaaaccatccttctggttaaagtacaggcaggttatcccagcagcaggactgcttgcttgaygaggatg

SEQ ID NO: 76206 - DNA, 600 bp, Chicken  19866894361062_2
cagcagtgagggcttgtgggcaagtttggtgcttgcaggatctctgcatgctctcccattttcactgtgtctccacaaaccctttcctgctagttttcccccaaatctctttgcagtaacaaatttacagcccattatatattcactgggtaaaactgtactatctctcgtaacacagcraaatcttattcttgcatctccaaaaacattttaatttctttagcaatgctgagaaaatgcaatccttgttccagagagcttacagagagcacctgcccaggtggtgagcgggtaccactscragcaaagaacactgtgtgtttgggaagttttgtgtcccatagatcatcttcyctatcagctagcactgctggaggcaaaggacttaggacaccaaagcctttttaaatgcaaaccatccttctggttaaagtacaggcaggttatcccagcagcaggactgcttgcttgaygaggatggtaatctgcatggaaatagccaggacagtcatttccctccctcacgtgctgggctgagcgatagggtggtggatggttgactgtagctcaggcaggctgtaaagcaacgtttttgtcagc

SEQ ID NO: 76207 - DNA, 600 bp, Chicken  19866894361062_3
gcagtgagggcttgtgggcaagtttggtgcttgcaggatctctgcatgctctcccattttcactgtgtctccacaaaccctttcctgctagttttcccccaaatctctttgcagtaacaaatttacagcccattatatattcactgggtaaaactgtactatctctcgtaacacagcraaatcttattcttgcatctccaaaaacattttaatttctttagcaatgctgagaaaatgcaatccttgttccagagagcttacagagagcacctgcccaggtggtgagcgggtaccactscragcaaagaacactgtgtgtttgggaagttttgtgtcccatagatcatcttcyctatcagctagcactgctggaggcaaaggacttaggacaccaaagcctttttaaatgcaaaccatccttctggttaaagtacaggcaggttatcccagcagcaggactgcttgcttgaygaggatggtaatctgcatggaaatagccaggacagtcatttccctccctcacgtgctgggctgagcgatagggtggtggatggttgactgtagctcaggcaggctgtaaagcaacgtttttgtcagctg

SEQ ID NO: 76208 - DNA, 600 bp, Chicken  19866894361062_4
cccattttcactgtgtctccacaaaccctttcctgctagttttcccccaaatctctttgcagtaacaaatttacagcccattatatattcactgggtaaaactgtactatctctcgtaacacagcraaatcttattcttgcatctccaaaaacattttaatttctttagcaatgctgagaaaatgcaatccttgttccagagagcttacagagagcacctgcccaggtggtgagcgggtaccactscragcaaagaacactgtgtgtttgggaagttttgtgtcccatagatcatcttcyctatcagctagcactgctggaggcaaaggacttaggacaccaaagcctttttaaatgcaaaccatccttctggttaaagtacaggcaggttatcccagcagcaggactgcttgcttgaygaggatggtaatctgcatggaaatagccaggacagtcatttccctccctcacgtgctgggctgagcgatagggtggtggatggttgactgtagctcaggcaggctgtaaagcaacgtttttgtcagctgatgtcactgcgagcttcagtgtgaagtgaggcaatcagagattaagggatag

SEQ ID NO: 76209 - DNA, 600 bp, Chicken  19866894361062_5
cacagcraaatcttattcttgcatctccaaaaacattttaatttctttagcaatgctgagaaaatgcaatccttgttccagagagcttacagagagcacctgcccaggtggtgagcgggtaccactscragcaaagaacactgtgtgtttgggaagttttgtgtcccatagatcatcttcyctatcagctagcactgctggaggcaaaggacttaggacaccaaagcctttttaaatgcaaaccatccttctggttaaagtacaggcaggttatcccagcagcaggactgcttgcttgaygaggatggtaatctgcatggaaatagccaggacagtcatttccctccctcacgtgctgggctgagcgatagggtggtggatggttgactgtagctcaggcaggctgtaaagcaacgtttttgtcagctgatgtcactgcgagcttcagtgtgaagtgaggcaatcagagattaagggatagcagaaaattgagccaggtttgactagcatcccttcttgccctaaaatgaatgtgatgtttttctccctcgtctctcgcagaaaccgtttctttctgaggagcagagagtggactatgtc

SEQ ID NO: 76210 - DNA, 600 bp, Chicken  19866894361064_1
aaatccagataatctcctttaccatttagcattgagcaccatcctaattccatgtttcataaaactgtctccaaatcaccgagggagattaaaaatttagaaatagcgccgcaatatttttaaaccagaaatcactgctcacatctggtcagatgtgctgaccctaacctaaatatcgagggcattaattcacggagaagaggcagccacagaggagcccaaatggaagcgcttcgccgggggaagtgcagcgaagcaggcgcagcaccagactgctgcacaaagccccgcacgcagccrgacactgcctggctcactctgagaggcacgtatttgaagtcatcaagccgcaatcttcttaaattgtagtaaattacaacctagaggtattgaaatattaatatctctcactgagctgggagaagagagtcattttgctatcatcccgtaggaatattttctagcctcgatggctggactttccaaactcgactccctctggaagcgcagccactctcggcgctgcggagccacgcgctgtaccagaagcactcgtttactctaacgagtggctgaggcagagcagccataaatcgaccc

SEQ ID NO: 76211 - DNA, 487 bp, Chicken  19866894361071_1
tccaggcagagatgtgttgtgccctgtagtttccattcacagtactgtatcctaagcaatgagcttgttatgtagctttcctttaagaatttctgaatactgtatgcaaattcatagattgtgtttccacttttttcccgagtgcaatgaataattgattttaggctagtgttatacttctaaagtgtatgtgttcattttaaagcttcttggactttaaagcttctttgtgcttcagaactaatggatttatggtggtcagcatgtggtatttgatatattgatagtgtccatgtgcayttgcttacctcctgctgtttttttcttgcagatgttaatgaatgtgcagatcccacaacctgcattagtggcacatgtgtcaatactgctggtagttacacatgcgagtgccctcctgattttgagctgaatcccacccgcgttggctgtgttggtaaggaactgctcattgcattcattaacaagt

SEQ ID NO: 76212 - DNA, 600 bp, Chicken  19866894361076_1
cctgtggcatcccctgagacatatcttccatgctctctgcttgtaatcctttgtttatggtatttcagccaactctcaattaagaatcatgtgacagtgtttatattcaaactgaatgcaattaataagtgtcaagatgtcatgaaatgctgtgtgcgctgtgtgctaaaagataaatgttctaggcctttccctttgggcactaatcagataatacatgtttgaaagggttgagtctgtcagtcaggccatagatctgtaaattcatgttgaaattcatatggcaacactcaacaaaaygcttgaacatgtgcttaagtcctttctgagttaaatcaaatacataagcatgtgcttaagatctggatctccaggcagaccaatygaaattaatgagaaatgttttgcatctctatgcaccaggtctccatcttgctatcaggaaaactggagccctcatctactaagagcagagtcattttgaatctggcacttcaggagatattgggtgtacttattttgagtaactccagtgctttaaayaagacttaggaatgygstttctttcccttcttttataagtagttaagctcctctatt

SEQ ID NO: 76213 - DNA, 600 bp, Chicken  19866894361076_2
atcatgtgacagtgtttatattcaaactgaatgcaattaataagtgtcaagatgtcatgaaatgctgtgtgcgctgtgtgctaaaagataaatgttctaggcctttccctttgggcactaatcagataatacatgtttgaaagggttgagtctgtcagtcaggccatagatctgtaaattcatgttgaaattcatatggcaacactcaacaaaaygcttgaacatgtgcttaagtcctttctgagttaaatcaaatacataagcatgtgcttaagatctggatctccaggcagaccaatygaaattaatgagaaatgttttgcatctctatgcaccaggtctccatcttgctatcaggaaaactggagccctcatctactaagagcagagtcattttgaatctggcacttcaggagatattgggtgtacttattttgagtaactccagtgctttaaayaagacttaggaatgygstttctttcccttcttttataagtagttaagctcctctattagtgcaagttataggactcatcttgagatgctcatcagtggctttgtttcacatccatacatgtttgtggtagtcttctcctttg

SEQ ID NO: 76214 - DNA, 600 bp, Chicken  19866894361076_3
tcaggccatagatctgtaaattcatgttgaaattcatatggcaacactcaacaaaaygcttgaacatgtgcttaagtcctttctgagttaaatcaaatacataagcatgtgcttaagatctggatctccaggcagaccaatygaaattaatgagaaatgttttgcatctctatgcaccaggtctccatcttgctatcaggaaaactggagccctcatctactaagagcagagtcattttgaatctggcacttcaggagatattgggtgtacttattttgagtaactccagtgctttaaayaagacttaggaatgygstttctttcccttcttttataagtagttaagctcctctattagtgcaagttataggactcatcttgagatgctcatcagtggctttgtttcacatccatacatgtttgtggtagtcttctcctttggtccctaataattcatgatgaggtcagtgtggtttctgctaaaaagtgcatagtcttttggatcctgtgagcaggaaacaagggaaccctgagagccctgaatatgttcattgtcgcttgtgtttgtaacactgcacatttgtagaagactccaattc

SEQ ID NO: 76215 - DNA, 600 bp, Chicken  19866894361076_4
gtaaattcatgttgaaattcatatggcaacactcaacaaaaygcttgaacatgtgcttaagtcctttctgagttaaatcaaatacataagcatgtgcttaagatctggatctccaggcagaccaatygaaattaatgagaaatgttttgcatctctatgcaccaggtctccatcttgctatcaggaaaactggagccctcatctactaagagcagagtcattttgaatctggcacttcaggagatattgggtgtacttattttgagtaactccagtgctttaaayaagacttaggaatgygstttctttcccttcttttataagtagttaagctcctctattagtgcaagttataggactcatcttgagatgctcatcagtggctttgtttcacatccatacatgtttgtggtagtcttctcctttggtccctaataattcatgatgaggtcagtgtggtttctgctaaaaagtgcatagtcttttggatcctgtgagcaggaaacaagggaaccctgagagccctgaatatgttcattgtcgcttgtgtttgtaacactgcacatttgtagaagactccaattcccagaagtttttgtt

SEQ ID NO: 76216 - DNA, 600 bp, Chicken  19866894361076_5
aaattcatgttgaaattcatatggcaacactcaacaaaaygcttgaacatgtgcttaagtcctttctgagttaaatcaaatacataagcatgtgcttaagatctggatctccaggcagaccaatygaaattaatgagaaatgttttgcatctctatgcaccaggtctccatcttgctatcaggaaaactggagccctcatctactaagagcagagtcattttgaatctggcacttcaggagatattgggtgtacttattttgagtaactccagtgctttaaayaagacttaggaatgygstttctttcccttcttttataagtagttaagctcctctattagtgcaagttataggactcatcttgagatgctcatcagtggctttgtttcacatccatacatgtttgtggtagtcttctcctttggtccctaataattcatgatgaggtcagtgtggtttctgctaaaaagtgcatagtcttttggatcctgtgagcaggaaacaagggaaccctgagagccctgaatatgttcattgtcgcttgtgtttgtaacactgcacatttgtagaagactccaattcccagaagtttttgttcc

SEQ ID NO: 76217 - DNA, 600 bp, Chicken  19866894361088_1
tggaagtacatgagaagcggaaccaaagtcactgaaactcttagtttaccatctcagtccctcaacagtacattgtgggaatccagatcaggacagctgcatgcgactcgtcaatgaaatatcaaagattattcataacgtagggaaaatgtttgcaaggttcaatgtgttcaggaggtttccctcctggtgatgttaaagcagcagagttgttttcttactgcagtagaaagaccaaagatgtaagaggtgcagctttaggtgtcccggaggaggaggaagagtgcatgtggaagcaamtgtaaatgcagtgccttgggctggtgactgccatcctcactgcaaaatggtagggcacctctccagagcagtgacataatgcagaatgcttttcatttccagccatttggagaaactctaacattacccagcagtgatagaaatgacgttcactttattattcaacattaggatcaaaccatgagctttctaaacattattttcagtatttctttattggtcatttcctacccttgaagggaacgtagatccccagtgcataaattgctctgctccagcaactaaaagaggacttaattc

SEQ ID NO: 76218 - DNA, 599 bp, Chicken  19866894361090_1
  misc_feature (1)..(22): n is any nucleotide
nnnnnnnnnnnnnnnnnnnnnncacaagtatggttagatgagccccccccctgttaaagaaaactccaaaatgtattctgctgccctatggatggcttatatagccacagtctcatacagacacatctacgtcaacaagactagatttaagagaatgttaaaagtattttgagtgagtgtgtgtggtaaagaagaaaaagagattagtgattatttacatagaagcatgagttatgtctgaaatgaagatacaccctaattctcagacagcccttggactgcaaaataacagagcagttycagcagcagcaaatgacataaaagctaaaatgtctagtgagaaattctacagggatctctcctgcacttgaatatgcaggtctcagcacggtgagatccagcaaaggtgacctgcagcaaagatcttaagctttgcaatgtttgtttggctaaactgcagcaaaaccacaaaagyttttttggagttttggaactgtacaattccagataggctttatcctcgcgccgtgatgaatggaactgggaatatctcccagcatctgttacttaaaagttgtgaaagatatgacatatctcag

SEQ ID NO: 76219 - DNA, 600 bp, Chicken  19866894361090_2
agtgtgtgtggtaaagaagaaaaagagattagtgattatttacatagaagcatgagttatgtctgaaatgaagatacaccctaattctcagacagcccttggactgcaaaataacagagcagttycagcagcagcaaatgacataaaagctaaaatgtctagtgagaaattctacagggatctctcctgcacttgaatatgcaggtctcagcacggtgagatccagcaaaggtgacctgcagcaaagatcttaagctttgcaatgtttgtttggctaaactgcagcaaaaccacaaaagyttttttggagttttggaactgtacaattccagataggctttatcctcgcgccgtgatgaatggaactgggaatatctcccagcatctgttacttaaaagttgtgaaagatatgacatatctcagcttaaagaacaaaaatcctcaaagtactccagtcatatgtcatgatggttccctgttgcactcctctttgtttccaggttccgatggagaaggcggctagtggtgatctctgctcccagtgatgaggactgggcttattcccagcagcttgctgctctcagtggacaagcctgtaa

SEQ ID NO: 76220 - DNA, 600 bp, Chicken  19866894361101_1
gttcctcacctttttaatctcctcctgtgtgaggttgttgtgtgtgctctggggagctgggaggagggaaaataagtacagctgtaaaggaaaactttgattctaaattgtccggatcctttatgctacttgtgtatttcaaatgcaaagtcttgaatatgatgaacaatgtgcactttgagaagttcagaagctggaagttttagctattgcaaatatagtaaattacagtttacaggataccagacaaataactgcccctttggatttcagagccgtggtttgtagaagtttgcttcraactgaggcttgtttgtatcagcagaacatttggggcaggggactgcttaaaaataacttgaagaaccctactgaaatgaatctcaacactgccacgcggccsaagtcctgcaagtaaygtggggataataattctttgaaggaaaaaaccaaaacttgaagtcttgctgtaacagatgctactttgtcttgagtgactaactgtaaaaatgcagggtaactttttcaagtagcatacaagctactgaaggctgaacagatttttgccttgcagtgtgggagtgagttaattatgacata

SEQ ID NO: 76221 - DNA, 600 bp, Chicken  19866894361101_2
taaattgtccggatcctttatgctacttgtgtatttcaaatgcaaagtcttgaatatgatgaacaatgtgcactttgagaagttcagaagctggaagttttagctattgcaaatatagtaaattacagtttacaggataccagacaaataactgcccctttggatttcagagccgtggtttgtagaagtttgcttcraactgaggcttgtttgtatcagcagaacatttggggcaggggactgcttaaaaataacttgaagaaccctactgaaatgaatctcaacactgccacgcggccsaagtcctgcaagtaaygtggggataataattctttgaaggaaaaaaccaaaacttgaagtcttgctgtaacagatgctactttgtcttgagtgactaactgtaaaaatgcagggtaactttttcaagtagcatacaagctactgaaggctgaacagatttttgccttgcagtgtgggagtgagttaattatgacatatttgaccaggaatcagctgggtttcacttgtgcttggtgagaaaatctgcgatgcaaatgttcccccgctgctgagagcgaatgcgcgcagtgagtgttggaa

SEQ ID NO: 76222 - DNA, 600 bp, Chicken  19866894361101_3
tttatgctacttgtgtatttcaaatgcaaagtcttgaatatgatgaacaatgtgcactttgagaagttcagaagctggaagttttagctattgcaaatatagtaaattacagtttacaggataccagacaaataactgcccctttggatttcagagccgtggtttgtagaagtttgcttcraactgaggcttgtttgtatcagcagaacatttggggcaggggactgcttaaaaataacttgaagaaccctactgaaatgaatctcaacactgccacgcggccsaagtcctgcaagtaaygtggggataataattctttgaaggaaaaaaccaaaacttgaagtcttgctgtaacagatgctactttgtcttgagtgactaactgtaaaaatgcagggtaactttttcaagtagcatacaagctactgaaggctgaacagatttttgccttgcagtgtgggagtgagttaattatgacatatttgaccaggaatcagctgggtttcacttgtgcttggtgagaaaatctgcgatgcaaatgttcccccgctgctgagagcgaatgcgcgcagtgagtgttggaacgctcctggaaatcag

SEQ ID NO: 76223 - DNA, 600 bp, Chicken  19866894361116_1
ggtttttcctgccaagtatgtgggagaaggtgggagaggatgatcaaagagctggggagctcgggaagtcaattagtttgatttgctgttttctattcctttctcgttccctatttcactggctctgtttctgtgtttgctgcctttatcacagcgttttacactgtttatttgcagaggaagctgaaagctcagtatgcagtatgagacttcattgtgctgttactgttgcacagttattttgtcacctgcattttactgtgtcccagcagtagctgtgcccttctctttaggtgagayacctgcacacagcaggctggacaggagccatgggagcaataaccctggttgtggttcctgacaattgctgagtttggttgtcataatcatctcatgcaatggttatgtgctgtgggatttgtgctgggattgagttgcactggggcaaggaaatgcacctttgaagatgggcaaaacatggaatattaaacttgtaaaatagcacaaactaacttagaggtcagtgcaggtgccttcgtatctccctgcactgctgaaataagcttgaacacaagctgaatgatcagaagaaatctttat

SEQ ID NO: 76224 - DNA, 600 bp, Chicken  19866894361120_1
gggcctggctcacgttcctgcacgcttcctgctgccttgccttgctcaacctcagcaccccacatcccctttatcgggtattctcttatgatcacacggatgtgtgtctgaaggagctctcctggtgaagtgcagcacgcactgctattcgggtctgcagcacatggggcatcccaaaggggatatggtgctccaccggtccgcacgcacactgtgcacctgaatcattcactaattattactgagctccatttctgcaccacgccaaaggctgccctacaaacccatcggggagctgcygatgggcagcacacctgcacagtgacacagggccaaaggcagcagagctcagatcacatcactgccccgcagcactcagcagggaaaagaaagtgaaacaacagctctgggagcaataaaaccccaaagcaaacatgaagcaaagccttcctccacttccaacccacacacattgctctcaactgacgggtgagccgagttgggctgacagcaggaaataactgacgcatttatgacaccccaaaattgcttcccagtggcagctcagcactgtgcactgctcacaccggctgagggcag

SEQ ID NO: 76225 - DNA, 599 bp, Chicken  19866894361140_1
  misc_feature (1)..(15): n is any nucleotide
nnnnnnnnnnnnnnnatgttaaggagcctgaatatttcccaccatgtattttaaagttttgtacttactgctgtttatccaaaacaaagtaatggctttgaattctgttgaaaaatgtaccagagtactggccaagtttttactaaatctcgttttatgagaaataataaaacaaatatgaataattattcagcaatgtgtattactctcccttttttttttaatacacctagaaatatatgagagaatgtgaaggtgatctctggagaatatatccaatacccactgttacccttaaartcccaagctgaagtatcactgccaaaaatagcctcctaaaggtgacactcatatgaaagatgtcacaagttgcagtaagagctgyaatataagccacattyacagcgcttcyacagtttgcacatttatttctttttcctatgtgatgttctttctcctactctacataaatcactctgttttgggtaatattatctaagtacacacaattatgcatgcraattatttgcttaaaaatctcataattatgggaatttgaaatttaaccagaaaatagtgttcatgattagaaaaaagaa

SEQ ID NO: 76226 - DNA, 600 bp, Chicken  19866894361140_2
aaagtaatggctttgaattctgttgaaaaatgtaccagagtactggccaagtttttactaaatctcgttttatgagaaataataaaacaaatatgaataattattcagcaatgtgtattactctcccttttttttttaatacacctagaaatatatgagagaatgtgaaggtgatctctggagaatatatccaatacccactgttacccttaaartcccaagctgaagtatcactgccaaaaatagcctcctaaaggtgacactcatatgaaagatgtcacaagttgcagtaagagctgyaatataagccacattyacagcgcttcyacagtttgcacatttatttctttttcctatgtgatgttctttctcctactctacataaatcactctgttttgggtaatattatctaagtacacacaattatgcatgcraattatttgcttaaaaatctcataattatgggaatttgaaatttaaccagaaaatagtgttcatgattagaaaaaagaacctggaaatcaaaatgagcaagaaatcagtgttgactttgatttgttttacaaggcaaagaaagcaaaaattccaaccaaaaatat

SEQ ID NO: 76227 - DNA, 600 bp, Chicken  19866894361140_3
attctgttgaaaaatgtaccagagtactggccaagtttttactaaatctcgttttatgagaaataataaaacaaatatgaataattattcagcaatgtgtattactctcccttttttttttaatacacctagaaatatatgagagaatgtgaaggtgatctctggagaatatatccaatacccactgttacccttaaartcccaagctgaagtatcactgccaaaaatagcctcctaaaggtgacactcatatgaaagatgtcacaagttgcagtaagagctgyaatataagccacattyacagcgcttcyacagtttgcacatttatttctttttcctatgtgatgttctttctcctactctacataaatcactctgttttgggtaatattatctaagtacacacaattatgcatgcraattatttgcttaaaaatctcataattatgggaatttgaaatttaaccagaaaatagtgttcatgattagaaaaaagaacctggaaatcaaaatgagcaagaaatcagtgttgactttgatttgttttacaaggcaaagaaagcaaaaattccaaccaaaaatatcatttaatagaagaat

SEQ ID NO: 76228 - DNA, 600 bp, Chicken  19866894361140_4
aaatgtaccagagtactggccaagtttttactaaatctcgttttatgagaaataataaaacaaatatgaataattattcagcaatgtgtattactctcccttttttttttaatacacctagaaatatatgagagaatgtgaaggtgatctctggagaatatatccaatacccactgttacccttaaartcccaagctgaagtatcactgccaaaaatagcctcctaaaggtgacactcatatgaaagatgtcacaagttgcagtaagagctgyaatataagccacattyacagcgcttcyacagtttgcacatttatttctttttcctatgtgatgttctttctcctactctacataaatcactctgttttgggtaatattatctaagtacacacaattatgcatgcraattatttgcttaaaaatctcataattatgggaatttgaaatttaaccagaaaatagtgttcatgattagaaaaaagaacctggaaatcaaaatgagcaagaaatcagtgttgactttgatttgttttacaaggcaaagaaagcaaaaattccaaccaaaaatatcatttaatagaagaatttctcatatag

SEQ ID NO: 76229 - DNA, 600 bp, Chicken  19866894361140_5
ttaatacacctagaaatatatgagagaatgtgaaggtgatctctggagaatatatccaatacccactgttacccttaaartcccaagctgaagtatcactgccaaaaatagcctcctaaaggtgacactcatatgaaagatgtcacaagttgcagtaagagctgyaatataagccacattyacagcgcttcyacagtttgcacatttatttctttttcctatgtgatgttctttctcctactctacataaatcactctgttttgggtaatattatctaagtacacacaattatgcatgcraattatttgcttaaaaatctcataattatgggaatttgaaatttaaccagaaaatagtgttcatgattagaaaaaagaacctggaaatcaaaatgagcaagaaatcagtgttgactttgatttgttttacaaggcaaagaaagcaaaaattccaaccaaaaatatcatttaatagaagaatttctcatataggtccatatgaagcaggtagtaaacagacgttagcacatctgttcacaaacagactttcacctgtatgtactttttacaggtcaacagtcagttgagctattttaatgt

SEQ ID NO: 76230 - DNA, 600 bp, Chicken  19866894361145_1
tttttaacagatgctaaaaacctaataagttcacctctcttagcacccagtcagaataccaaatttttatattcccataaaaatttaccagatttctgaaagtatgtgatgtcctgaaaagaaaaatcataagaaacttggatcagatgtttattatctgaaaacctttacaatccactaaggagtgcttttggaagggaagtaggaaatgagttggaaagcattaataaactttcaagatacttgaaaacacaagcacttgatctttaagtgaactctagattacttccattttttttkaaaccataagtagtgcttagaaagaaagatagtttatctaagtttaaaaaaaaaaaaaagaaaagaaaaggagagagaggaaagaaagtttagcttggacaaaagctagaaaaggcagaaaaagcagtacttgaaaattattactttttggcatttactttgattaatactttcagtcttccataggaaaaaaaaagacaacaacataaacattcattaatttaatttaatttctttaatgtgttactgaagttcattttataatgaaattataacaaaatatcattagtctggcacaac

SEQ ID NO: 76231 - DNA, 600 bp, Chicken  19866894361146_1
aggcaaaccagaaattatgtctttccacaaacagagacatactgttaccattggagagggctgctgggctttgtaaaagtgttctagtgtcctggccaagcagaatgtgttatccatcttccgtaaaagtgtataaatttacttcatagactcttctggaatttttccagattccagcgtccaagtgtagaagtttttgcacacacacaagaaaagctacagtttgtttgctagttattttgcactgttttgtatacataatgttatagcaatctggctgaaaactttcagtccttagcmggaaagggaaactgggctaaggccaaaaatggcagagcagttcatgaactgttgaacacacttgggaagaaaatacagttggtttcatgagacttcatgcttgtacaagacagaaagctatgaatcagttcacttgtgtttgtgtctctggtgatgaccagactaaaagtgatagccattcagggttagatttttcctatgaaaatgtgacataagcaagtgtagcaatgtgtagagtgactacatttcactaaaatcaatgagaacaattctaagattagcaccaaaatctctggattc

SEQ ID NO: 76232 - DNA, 600 bp, Chicken  19866894361146_2
tgtctctggtgatgaccagactaaaagtgatagccattcagggttagatttttcctatgaaaatgtgacataagcaagtgtagcaatgtgtagagtgactacatttcactaaaatcaatgagaacaattctaagattagcaccaaaatctctggattcttgctttctcttcttacttttaccgtattatttaaaagtaatgcacagcctcctttggcagagcgggttttgaggcagtgcatacaaagcttacaaaccaagtccatgaggagctttctcagaccagatgaccatgcacacracgcatctaaatgcaaccgaaggcagtcctgtcactcgaacaaaaaacaatgagtgcatttgaaccacccagcaagggcagagtagccatggcaacacgaaacctagcacaggctacaaaatcctcccaagatcttgagtgaatgtgagggtaatgtttaacccacacttcattttaacctgctaatgcagatcctagagcagcttacacctgcctgggctctgctcaggtttttggctatcagttgcatccatttctcaggacctatatccatgtctcaaaggggaaagaaagatgagt

SEQ ID NO: 76233 - DNA, 600 bp, Chicken  19866894361149_1
cctatgtcatttacatttgttatagtgttacagtcatcttcacatctaaatacatttaaaatgttgatttcttgatatttttcacagtttgagaaattttttttgttactactttcattgggctacaacattagaaagactaattgtgtcctcctgaagccaaggtggtcctttcctttttcctttcctttccttgccttgctttgccttgccttgccctccttcttacacatatcatttttaggaatgaacagatagcttactagagctcccaaacattcaagagtacagaaatctttwgaagaaaagctgaggacaagaaacaggaacatgctgaaatttaacataggataaagaataaccatagaactatcagtgctgttattctcacagtttagaaatacattaagcagccatgaaaaaacagagggtggtgaccgttttaacctgacaactaaaatttgcctacacagactagcatcattagtacaggttgtctctcatgacaccttttaaataaaccagctccagacctgtagctcccaggatttcctcagggttctatgagatcatgcttcagtatcagtaaatctgggtctg

SEQ ID NO: 76234 - DNA, 599 bp, Chicken  19866894361159_1
  misc_feature (1)..(122): n is any nucleotide
nnnnnnnnnnnnnnnnnnnnnnnnnnnnnnnnnnnnnnnnnnnnnnnnnnnnnnnnnnnnnnnnnnnnnnnnnnnnnnnnnnnnnnnnnnnnnnnnnnnnnnnnnnnnnnnnnnnnnnnnnnccctgcccttccgtcccacaggaaagaagccgacagctcccgtcgggctccaaacccccatccctaccgaaacgtgatgcaactttcatttcttaccccatactgtttgacagggcaggcactgagactcgctgggtgtcactgtctatgggagcaacctaaggtgcacacagcacawcgcaacttcagccctcaaaaggagtcccaggggcttgctttgctgttgttggtttggttttcttttaaaaccaagtttgtttctccctttagaaaatgattttgagcaacaaagtgacagtgggaagaaacaagttgcaaattacttcacccccccagcactgtaagaatttcagcatggttaacaaacctctataggtgaattaaggtgaattaaaatatgaaaggttaaaaactcatcaggaattgttccttttatttttgctcataggcctaaacctgtaaagaatccgagctgct

SEQ ID NO: 76235 - DNA, 600 bp, Chicken  19866894361167_1
gaaattctaagttaagagcctgtgttcattacttcattgagagaaggattccagcctccaccatgctgcctttgtttcacctccctgactggaaagaggctgcatctggtcagtgcagcaacagtagctcttcagcacttcctcatctactcagtgcaaggcacggcaggacaaagtctcaatcaaaaacgttcctgattctgtcttctgttggtaaacaggcagtaacaaatcagcaacgagaggtctggtagatgatgctcaggactgtgcagcaaaattcctttctttttttttttwaatttttttaaagattaataaatggattgtgcacttcagatggttttgattgctcagctctttaacccagctcttatccagcaacctcatatttacatagggggtaacagctcccagactttagagaaaccccaagactgctcctaactttgacagagtcagtgtgagtgtgactaagatttaaaaccaaaagcagctttcagatgctttattccctttaaagactgcacacaggagaggagtttcttgatatttttaacttctaatagttgagattcctgaggaggcttcaaggcttgc

SEQ ID NO: 76236 - DNA, 520 bp, Chicken  19866894361167_2
taaaaccaaaagcagctttcagatgctttattccctttaaagactgcacacaggagaggagtttcttgatatttttaacttctaatagttgagattcctgaggaggcttcaaggcttgctccagcactagttaacagccattttctttgtctctgcttttctggatttccccctgcccattgcaaacatatttttagatacactaagacaatctttttgctttaccatggcaacagttgacagtagtgcatgtgtcttttcagctttcttttcaaaacatgacaaggctgattggaagcrtagtatatctgcggatttcagagcacaatgacatttgtattgcatacttacggtttcaggctaggctaagtttcaaatgtgccttgttttacggagattatttttgttccagtgataaatacatctgggttcacygatttttgctacaaacttgctacgtgaccttgaccaagttgtttaatctaccaccccttcattcctatttataatatgggtactt

SEQ ID NO: 76237 - DNA, 385 bp, Chicken  19866894361167_3
agccattttctttgtctctgcttttctggatttccccctgcccattgcaaacatatttttagatacactaagacaatctttttgctttaccatggcaacagttgacagtagtgcatgtgtcttttcagctttcttttcaaaacatgacaaggctgattggaagcrtagtatatctgcggatttcagagcacaatgacatttgtattgcatacttacggtttcaggctaggctaagtttcaaatgtgccttgttttacggagattatttttgttccagtgataaatacatctgggttcacygatttttgctacaaacttgctacgtgaccttgaccaagttgtttaatctaccaccccttcattcctatttataatatgggtactt

SEQ ID NO: 76238 - DNA, 600 bp, Chicken  19866894361168_1
agtctttttttatattttaagctcatattccaggatatttgcacaaacagagaaatatcaccttctcaccgagaataatagcagaactgtttcgtatgtctccagctgggcaagggtgtgatcccttgaacagaattcaagttaaactgtggccaaaatgattttaacttctacggggaattgcccatgattaaggggcaagccagaaattatcacacaaatcaatcaattagcagtggcaagaaagagttacgcgtttgtactgtgtttggtgctgtaaagacgagtaatcagaaccayagaatggtttgtgttggaaaggaactataagatcatctagctccaacccccagtgagacagtcttccagtcaaggcagtaaaacatgtgagcatacccattttcctcaggttgtctgtacaccccagtgcctgctcctggcatgtcaatatctcccactgggtcaatgaaagctgctcctgccctggcgctggtaccgactgggtcagggcctgcctgcatggcacagctgccgttcttgctcgctcttgtcttcccatttgggtatgcctttgtttttggccatgaacacaaggaaacc

SEQ ID NO: 76239 - DNA, 600 bp, Chicken  19866894361176_1
ctgaaaaagcagggaaagaatgagctgcagacactggctgactaacactttcaagaaaattgttggaagagaaggggaaaaaaatattcaagggctactccaaaagtcatgcctcctattttcttacgctggctcatgctcatgctgaggcaaatgctggcggtacagcagtagaggttgaacgtttccgccaagattctgttatattttgttgctgtgtgacaaatggcagcagaggggatgtctgacagaatggcatctgacatggaagtgcaaatgaagcaaaagggtggctccccrcagaaggagtgacacccatggacattcactgatgctcgctgaacatttctgaagaccaagcagtggatgtgagcacagggargtggtgggtgctgcgtttcagcagcggtgacagtgggtcacatccactggtgcagatttttacgagcatgggatgcaggctcttgttcgtagccggtgaaattgcacagctactggtggtgagtatgctgaaaaagagtgctttgtagctgccaattttctgtctcaaatgcagttattgtgctctttgtatctgttgtaatttccacggaaataaat

SEQ ID NO: 76240 - DNA, 600 bp, Chicken  19866894361176_2
aatattcaagggctactccaaaagtcatgcctcctattttcttacgctggctcatgctcatgctgaggcaaatgctggcggtacagcagtagaggttgaacgtttccgccaagattctgttatattttgttgctgtgtgacaaatggcagcagaggggatgtctgacagaatggcatctgacatggaagtgcaaatgaagcaaaagggtggctccccrcagaaggagtgacacccatggacattcactgatgctcgctgaacatttctgaagaccaagcagtggatgtgagcacagggargtggtgggtgctgcgtttcagcagcggtgacagtgggtcacatccactggtgcagatttttacgagcatgggatgcaggctcttgttcgtagccggtgaaattgcacagctactggtggtgagtatgctgaaaaagagtgctttgtagctgccaattttctgtctcaaatgcagttattgtgctctttgtatctgttgtaatttccacggaaataaataggaggcattactttcagagtgacctgtgtatatataaggatcatggtagcagtgtccaaaactattattttgctatgaatg

SEQ ID NO: 76241 - DNA, 600 bp, Chicken  19866894361184_1
gctatttatttgttactaggtgtcatagctctggacagactcccctggctggatgctccccaagccctggcttggggtcccaccaccctgggactgggtgctctcaatcttcctgactttgagcagaaccaggctgcctttggctctctgcttctacatgcttgctgaagatgtgctctcctaattcctcagaccttctctctgtcacttattctgtatttgttctggctctccaggaaaatcctcatgcccaaagcattgcactctacttcttcagactgagatggaaattctcactcygaactttcgacattgcaagaagtatagtgaatccaatagtaagaaatgtccttatgcccttttcacaccattctctttctggattaggagcaaagcctttagagagggtttttcttcagaaacttgctgccagtccactcccttccacctttgccattacacagttaggaaagttcattctttggcctgaagcctgagcttttgttcatctytctcctacttcttgtctcatctgtcttcttgactcaccctattttcatggcttttaaaaagtgtttaatactgtgctcccttcagatt

SEQ ID NO: 76242 - DNA, 600 bp, Chicken  19866894361184_2
tctgtatttgttctggctctccaggaaaatcctcatgcccaaagcattgcactctacttcttcagactgagatggaaattctcactcygaactttcgacattgcaagaagtatagtgaatccaatagtaagaaatgtccttatgcccttttcacaccattctctttctggattaggagcaaagcctttagagagggtttttcttcagaaacttgctgccagtccactcccttccacctttgccattacacagttaggaaagttcattctttggcctgaagcctgagcttttgttcatctytctcctacttcttgtctcatctgtcttcttgactcaccctattttcatggcttttaaaaagtgtttaatactgtgctcccttcagattgccccaggagggtgcttctcccttctcaggcaatccttgggaaactcactgcccagctcagcacattcttgaagtgttagcaacatctctgcttgttctgtagtttctctcaaacagaagctgtcagaggacagtgtcctcatcacatttacttggggtgtgaaatggaggggaaagagcgaggatgtagctcgctgcaaaaggagctgctg

SEQ ID NO: 76243 - DNA, 600 bp, Chicken  19866894361192_1
aaagacctaagatttattttcttattctttttaaggcataaggctatgtacttctaaatatatctgaaaattatgtcttccaataacagctgtgattgtgtactattttttatttggtaccaatccagaagaggaaataaagtttaggtatataaatgtgttttggagtgccagattttattatggcaatttttaggaactagatggttgtttaaaattttaacctatctaaaagcaaagcacgaggctaattgatatgctaaccagtatcatggtgaaatactagactcttctgttatyaattaccagttgagattatcacagctgttgagtaaacacaaggagaaaatctgaccttcacagagagttcaagcatacctttttttagagagacactgatttttttcagaactgttctgatatgagattaaaggagccttgacactgacataggcacttagagctattttggtcacactgaaatatttttctctgtaagcaaatactatgcataatgctagctctgtgttctgttctgtgattatatctctctttttatactttagcatatctttgttttttcaagaagttcaaaaaaag

SEQ ID NO: 76244 - DNA, 599 bp, Chicken  19866894361197_1
  misc_feature (1)..(7): n is any nucleotide
nnnnnnntttctagtttatctgatcaacacttactcatagttgtacacttctaccataagactcttgccaggcccgtctaagttgaaaatctatctatctgatacctgtatatatgtgtgtatatgcacatacagggctcagtatgttttggccaatagcaaagttctggtggactgttgtaataaacagattgaacaagcaggagctctgtagaaggtctattactgaagtaggtagaaaggtacctgtatgcaagagaaggatgctgcacgcctacctgaaagggatagtataaagcwgtgtttcattactttgtgccacctgtacctgatacctccccagttttcctctcattacgagtttgtcagctgtaatctactttccaatatccctgcaggcattaatccaactgccctccgtggcacagacacgggtgtatgggttggtgcaagtggctcagaagctgctgaagcccttagccaagatccagaagagcttttgggatacagtatgactggctgccagcgtgctatgcttgccaacaggatttcttacttctatgattttacaggtaagtgcccccagacctgtcaatact

SEQ ID NO: 76245 - DNA, 600 bp, Chicken  19866894361197_2
gatgaaaacccagcctgcaactgctgtaaagtggcatgtgaggagtgaaaactgtgatgtaactgtgttgagaatcattatgaggctttgtacttcagctgctgaagatggctgtagctgagatccatctgaaagatatcaggagatcttttatctgcctttaggctgctggttggtattgaactgtagaagtcagcaagctcggaggcaaactgactggtgagaaaaatgggggaggcaccagcctgaaattgactaatggtatagatgtggcttgaattgtgtgtggatttgaagacrgagggatgggagtcactctggagaggaggcaaggatagcatgaggaagcaggagtgacttttcactgctgtgaatagggaaggggtgttatttgcccacatgactttttatttgatggagatggagaagaaagtttgaaaggtayccctaaagccaaagtgtgggcttttctttttttaattccatacaaatctgttattaagtggcaagcaggagaagtggtcaatcttgtcccctggtgtataaagattacctgtaatcttctgattacttaatactttttttaatgcgtttgtcttg

SEQ ID NO: 76246 - DNA, 600 bp, Chicken  19866894361197_3
atcttttatctgcctttaggctgctggttggtattgaactgtagaagtcagcaagctcggaggcaaactgactggtgagaaaaatgggggaggcaccagcctgaaattgactaatggtatagatgtggcttgaattgtgtgtggatttgaagacrgagggatgggagtcactctggagaggaggcaaggatagcatgaggaagcaggagtgacttttcactgctgtgaatagggaaggggtgttatttgcccacatgactttttatttgatggagatggagaagaaagtttgaaaggtayccctaaagccaaagtgtgggcttttctttttttaattccatacaaatctgttattaagtggcaagcaggagaagtggtcaatcttgtcccctggtgtataaagattacctgtaatcttctgattacttaatactttttttaatgcgtttgtcttgcaatcctatcctgtagtctttggagattaattctagaaaactaacggttaaaaaaaaaaaaacacattttttttcccccctttttgtttcctaaggaccaagcttaactatcgacacagcctgctcctccagtctcatggcttta

SEQ ID NO: 76247 - DNA, 599 bp, Chicken  19866894361199_1
  misc_feature (1)..(32): n is any nucleotide
nnnnnnnnnnnnnnnnnnnnnnnnnnnnnnnnactactgtgtagcatccactgcctggaccttagattttaaacctaaatatgtcaattgactggcagaattggatttaagattagtgtctcattaatatatagggaaaagcttaggtccttgatcaaatcactgaaacaaatgccttttaaaacctaagtaggcagaacacttgaaaaaaagatacaaaactgattacgcagaaataaacacaaatagaagtactatgagaaaacctgctaacacaggcaaaggactgaagaagagatmcactctgaaacactaggacaggaatttcagaagctctcttcattgtctacatattccttacgtgaagtaagaatgttaactaaaatggctaaaaatctagtcaattaacttttggaaacgtaaatgcttcttggacatccctctgatcttgtctttcatatcttttctttttttttttttacattttttccccctcaatattaattggttttgatacaaattgttttattatcctaggcctgatgtaaaaatacttcattcattataagattttctaccctagtgaaatttccaatttt

SEQ ID NO: 76248 - DNA, 600 bp, Chicken  19866894361200_1
ataaacacaattgtgtatatgatgaatcaaataattatttattctacacaatgaaatccctggaaatcattaattatactaaatgtcttcaaattactcattttctatggaagaattaatgtatttcaaatcatcaaaagaccaatcattatcagtgagacttgattacagagtaaaatgcacatgaaatgtctccagcagaaaaatcctaaaagcaatgaaagaaatattcctagtaaattaataaggtttcttgaagaattgcctactgtcatgttgaaactggtatttagctttttmttctttctatctaaaatgccatgcagcttagctcattttcaaatacgatagtagttagaagggtctcaccaacttttcattctgtgctatgagacacttggaatctatttaaaatgctgctttacttgaagtatttcttcaagaaattagtcaataggtattaacccagatgatcactgttctgaaacatacgcttccctcctccattcctgtccactaactaatgcctaatgccaccgactccagtaatgttagaaggaggttaattggtcatgaatgaccaaggaacgccatagtgtt

SEQ ID NO: 76249 - DNA, 599 bp, Chicken  19866894361204_1
  misc_feature (1)..(270): n is any nucleotide
nnnnnnnnnnnnnnnnnnnnnnnnnnnnnnnnnnnnnnnnnnnnnnnnnnnnnnnnnnnnnnnnnnnnnnnnnnnnnnnnnnnnnnnnnnnnnnnnnnnnnnnnnnnnnnnnnnnnnnnnnnnnnnnnnnnnnnnnnnnnnnnnnnnnnnnnnnnnnnnnnnnnnnnnnnnnnnnnnnnnnnnnnnnnnnnnnnnnnnnnnnnnnnnnnnnnnnnnnnnnnnnnnnnnnnnnnnnnnnnnnnnnnnnnnnnnnnnnnnnnnnnnnnnnnnttaatttttaattgagaattgagattgaaygtgccaggatctctaaataatcggcaggcatttaggcaaagacacattatgttgccatggcactgcagttgagctacagttgctagcgtgctctagtaatgcatcccatttagagagctgtgtttcagagtcagtattttccttgctgtgctgttcttaaagctgttactggaaactccagttatgatgtgaatgcttggaatatttcacctctttttttttctttcatggggtttggggggagagaaagactaatggaagctgtcatttatttcaggtgttcttttgcacgttatggg

SEQ ID NO: 76250 - DNA, 600 bp, Chicken  19866894361207_1
tatattcttcctgccacttcagctgtcacctcattcagcattaccttcatcccaactacgtgcagctgtgctgcacatctagatttgctgatctttttgatctcttcttcaggcaactctctgcaaaggtacttttcagtgaagaagctgaggcatctgagtgagattcataagtatatagtaggaacactcattaaaaaggaactgggactcattaaaaaagaagtaagagaaacaaagaagggaaaaagaaagcaatagtgatagataaaatggtgcaagtcactgtaaggtgccctyctccagctgagttagacttcagtgcttgtagcactaacgtattccaaggtttctgcctatactgcctcttctgtatctgtgcatgcccttcctctgctgctagacaktaaaaaagaactcactcctaattcaagcaacatgaagattattcacttctatgtagcttgactacaaaatagacatttgcctctttttttttcattagcaatgtactgctagtactaaagcttaatcatgtgaattgtctttagcagttcatcatcttgctttcaaagatattactcataatctctcacacaa

SEQ ID NO: 76251 - DNA, 600 bp, Chicken  19866894361207_2
ttcaggcaactctctgcaaaggtacttttcagtgaagaagctgaggcatctgagtgagattcataagtatatagtaggaacactcattaaaaaggaactgggactcattaaaaaagaagtaagagaaacaaagaagggaaaaagaaagcaatagtgatagataaaatggtgcaagtcactgtaaggtgccctyctccagctgagttagacttcagtgcttgtagcactaacgtattccaaggtttctgcctatactgcctcttctgtatctgtgcatgcccttcctctgctgctagacaktaaaaaagaactcactcctaattcaagcaacatgaagattattcacttctatgtagcttgactacaaaatagacatttgcctctttttttttcattagcaatgtactgctagtactaaagcttaatcatgtgaattgtctttagcagttcatcatcttgctttcaaagatattactcataatctctcacacaaactgttcatttcactaattgcaaataagcttataaaaaatttacatttttttctccctaatttctagactacatttctcagaaatctcaagtctagattcaaaatac

SEQ ID NO: 76252 - DNA, 600 bp, Chicken  19866894361208_1
gagaataccaacaaattgacagtctatacgatacctccagagttcttaaccagcgttattttctcatcctagtttagattcttgtgttaaggaagaagacagttcagtatgaagatagtagagatgttaaaagtgtcattttaaggcacatacatatgtttttcttaattaacatgactttgcccttcatataaccataccatatactaagtcttctgcccaaagtcagttgtatcttagaatcacagaaatgatgagcagaaggggcagctggaggtgattgctgctcttccccaaacraagcatcaagatcccccagcagctgtcagtggaatatgtctctcctacaattttggtagtttggactctgcttcaggctaattgccttctcccttttgtcccagtcccagctacatggcagcattactacagacacccttcatttatagcttacttcaattactagataatttttatttgctcaaaacccaaaccattttaaaatagatgaagaaagtagggaagagaacagagcaaaggtcatgttgcactttacaaagtccagccgtttccagtttctctcatggttgcagtaaaacc

SEQ ID NO: 76253 - DNA, 599 bp, Chicken  19866894361215_1
  misc_feature (1)..(25): n is any nucleotide
nnnnnnnnnnnnnnnnnnnnnnnnntttgtttgaagtgagggaaatagtaagaatagatcctcttagaattttacactggactgtgtgttctgttgagcaccaagtttggtttgttgatttgctgcctcacttctaaatcaagagtgtagctttgtttccaagtgcaccatagtcccaaggtggtcacagagagccttgtaaccacgtttcttttcggagtgtggaaagctactgctccatgaaaaggcagtatgaaacaaatagtgtaggaagtctcatagtgggctctgcagctgaaygctagctggggcaaagggcagaacatggaggatatctgagggaggttatctaggcggtcttaagttcaaagaggaaaaagctttatttggctgtgagttgaacttattgtcattggaagaatattcagataaaagctgatgtttagtctaccactgaaaggaacacacattataaatcgcagagttttaatttgaagttaatgttcctacttaggcatcactgtccatataacacttacaacatccactgataccatggtattattatcttccaaattgtgttaataaatgatctcagt

SEQ ID NO: 76254 - DNA, 600 bp, Chicken  19866894361218_1
gagattaaataaaccacagagtacaaaagtgaaaggattaaaccataaaagtcaaaggcagaggtcataacaagacacttttcaaaggaatgatttatttgagaagtcttccttagcaactgaggtttcttcctgaagctatggctattttgcaaggctccatcccctaaaatgaaacaggtctggctacatttctgctaacattgctatcttgatgtacttgcattgtgaatactctacagatcaacagcacagtcaaaatatagttgtagcatgagggctcaacatgaaggtatgaarggctgtggctgtctctgagcagagaagcagagaaggatgatctgcaaggtaggcagagcatatgataaaacagactgtaactattatccaacttgaaktatttwaaaaaaaatcacgaagtgcaaaagtctttagattggctagcaaatgcatactaaaaaggcagtagttaaataggttatcttttagccaacagctcctgagactttgagagatattattttcatgttttcaaatgtttttccagataagacttcttaattacagatgactgaagaaacgatcgttattaggaaatga

SEQ ID NO: 76255 - DNA, 600 bp, Chicken  19866894361218_2
ttgagaagtcttccttagcaactgaggtttcttcctgaagctatggctattttgcaaggctccatcccctaaaatgaaacaggtctggctacatttctgctaacattgctatcttgatgtacttgcattgtgaatactctacagatcaacagcacagtcaaaatatagttgtagcatgagggctcaacatgaaggtatgaarggctgtggctgtctctgagcagagaagcagagaaggatgatctgcaaggtaggcagagcatatgataaaacagactgtaactattatccaacttgaaktatttwaaaaaaaatcacgaagtgcaaaagtctttagattggctagcaaatgcatactaaaaaggcagtagttaaataggttatcttttagccaacagctcctgagactttgagagatattattttcatgttttcaaatgtttttccagataagacttcttaattacagatgactgaagaaacgatcgttattaggaaatgagaaacccccaaatcacagctgtccccaacacaaaagcttaatttggcttcagattctatttttaaatcttttttccttagcagtgtgaacacttcata

SEQ ID NO: 76256 - DNA, 600 bp, Chicken  19866894361218_3
agtcttccttagcaactgaggtttcttcctgaagctatggctattttgcaaggctccatcccctaaaatgaaacaggtctggctacatttctgctaacattgctatcttgatgtacttgcattgtgaatactctacagatcaacagcacagtcaaaatatagttgtagcatgagggctcaacatgaaggtatgaarggctgtggctgtctctgagcagagaagcagagaaggatgatctgcaaggtaggcagagcatatgataaaacagactgtaactattatccaacttgaaktatttwaaaaaaaatcacgaagtgcaaaagtctttagattggctagcaaatgcatactaaaaaggcagtagttaaataggttatcttttagccaacagctcctgagactttgagagatattattttcatgttttcaaatgtttttccagataagacttcttaattacagatgactgaagaaacgatcgttattaggaaatgagaaacccccaaatcacagctgtccccaacacaaaagcttaatttggcttcagattctatttttaaatcttttttccttagcagtgtgaacacttcataggtatc

SEQ ID NO: 76257 - DNA, 600 bp, Chicken  19866894361227_1
acagtgtacaaggcagagcagagcacagcagtcccatgcctctctgtacaaacatctccctgccagttctgcctctttcatctccccacttcccactgtctatatgccttcttctcttctgtaagatagatgaaacactgttcagtgctggctggcatagcagcacctgcattcaccgcactcttctgtcctccttcctttgtgcttcccttctccctgtcactgtttctttgcattccctagttcaagctgaaagtgttcttgcttcattgctatctgcagtccttcttcttttaaaaygccttgtcagaatttgttctttatataaaaatcttcaagaaaggaggggttaacttctttttgtaaaattaaagcagtaaaattaaaacctccaatgtgctgcctgtggccatgcttgaggctgaagccgtttgaattttttgctgttatagcactgaacagccaaacagaattcggccccttatcttccactggaaaaaaaaaaaatcccatagagctgcctcctttgcagcagttcttgggttggaattgcagcaatactgcaaagacagactgctgtagccctctcatttcaccacc

SEQ ID NO: 76258 - DNA, 600 bp, Chicken  19866894361233_1
aataaaagtgttcctatgtccattttgtacatggatgttgtcttctatgtacaaacctggagtgcagtgtttgttgaagttctttttacagtacctttcagagaaatggcaccaacctgtacacaaagaaatacatcagattgttttgcaagactgatgggagtccaagaggcatttgcaaaaactggtgtgtctttcagcacagatctggtggaaacattaaaaaaagaatcagaaagtattataaacacacattccttgaagcagctgaaggcaaacaacttgtttgctgcctttcartacaagcagaggaagcttactactggaggcccttccagttacagtttagtgccaagtccttacatcgcctgatggctgatgatacacagtaagtaaatgtaactaatatagtagtacacagtaaataaataacaaatactaaattattcaatggccccggagcatagctgagaaattcctttgctgtctaattgcattctaaggaaaaacctgyccaaagtattagccatctattatcacatcctgagatttctgmsattaacctggaaggctgaataagcctgtaaaaaagcaatgccc

SEQ ID NO: 76259 - DNA, 600 bp, Chicken  19866894361233_2
aaacattaaaaaaagaatcagaaagtattataaacacacattccttgaagcagctgaaggcaaacaacttgtttgctgcctttcartacaagcagaggaagcttactactggaggcccttccagttacagtttagtgccaagtccttacatcgcctgatggctgatgatacacagtaagtaaatgtaactaatatagtagtacacagtaaataaataacaaatactaaattattcaatggccccggagcatagctgagaaattcctttgctgtctaattgcattctaaggaaaaacctgyccaaagtattagccatctattatcacatcctgagatttctgmsattaacctggaaggctgaataagcctgtaaaaaagcaatgcccttagccactgccaaggtgggaacttagcctgartgccaaaggagcagcaggaaatgttcagagaaggaatgttgtgttgggatctggtgaaagatctaaacacatgggactgaccaagtttggaaatgatcaggctttgtataagcaagaaagcaccctcttggaacatagcatgttctcatcagaccctcacactttaccccaacaggaagag

SEQ ID NO: 76260 - DNA, 600 bp, Chicken  19866894361233_3
ccttgaagcagctgaaggcaaacaacttgtttgctgcctttcartacaagcagaggaagcttactactggaggcccttccagttacagtttagtgccaagtccttacatcgcctgatggctgatgatacacagtaagtaaatgtaactaatatagtagtacacagtaaataaataacaaatactaaattattcaatggccccggagcatagctgagaaattcctttgctgtctaattgcattctaaggaaaaacctgyccaaagtattagccatctattatcacatcctgagatttctgmsattaacctggaaggctgaataagcctgtaaaaaagcaatgcccttagccactgccaaggtgggaacttagcctgartgccaaaggagcagcaggaaatgttcagagaaggaatgttgtgttgggatctggtgaaagatctaaacacatgggactgaccaagtttggaaatgatcaggctttgtataagcaagaaagcaccctcttggaacatagcatgttctcatcagaccctcacactttaccccaacaggaagagacttcacggttttgcatgtgattgttatctcattttccttta

SEQ ID NO: 76261 - DNA, 600 bp, Chicken  19866894361233_4
cttgaagcagctgaaggcaaacaacttgtttgctgcctttcartacaagcagaggaagcttactactggaggcccttccagttacagtttagtgccaagtccttacatcgcctgatggctgatgatacacagtaagtaaatgtaactaatatagtagtacacagtaaataaataacaaatactaaattattcaatggccccggagcatagctgagaaattcctttgctgtctaattgcattctaaggaaaaacctgyccaaagtattagccatctattatcacatcctgagatttctgmsattaacctggaaggctgaataagcctgtaaaaaagcaatgcccttagccactgccaaggtgggaacttagcctgartgccaaaggagcagcaggaaatgttcagagaaggaatgttgtgttgggatctggtgaaagatctaaacacatgggactgaccaagtttggaaatgatcaggctttgtataagcaagaaagcaccctcttggaacatagcatgttctcatcagaccctcacactttaccccaacaggaagagacttcacggttttgcatgtgattgttatctcattttcctttaa

SEQ ID NO: 76262 - DNA, 600 bp, Chicken  19866894361233_5
tccagttacagtttagtgccaagtccttacatcgcctgatggctgatgatacacagtaagtaaatgtaactaatatagtagtacacagtaaataaataacaaatactaaattattcaatggccccggagcatagctgagaaattcctttgctgtctaattgcattctaaggaaaaacctgyccaaagtattagccatctattatcacatcctgagatttctgmsattaacctggaaggctgaataagcctgtaaaaaagcaatgcccttagccactgccaaggtgggaacttagcctgartgccaaaggagcagcaggaaatgttcagagaaggaatgttgtgttgggatctggtgaaagatctaaacacatgggactgaccaagtttggaaatgatcaggctttgtataagcaagaaagcaccctcttggaacatagcatgttctcatcagaccctcacactttaccccaacaggaagagacttcacggttttgcatgtgattgttatctcattttcctttaattctgtgctgaaaaagtaggcttacagctccagtagaaggtatatcagggagcatgggggtagtcactgagcccca

SEQ ID NO: 76263 - DNA, 600 bp, Chicken  19866894361233_6
agggtttgatttgttcatgttatgctgctgacacagcatgatttccctctctagctgcctttgccatatcagtgctaacatctggcaaacatggaagactattttctttctaacaaaagagattattatcaataggcaggctcttatgtattaaacatgtcaagatgggagatcattatcatcaacaaacagggaccctgaatacctaggtcactgatgagttttcatgcagaacagtaaagaaggtggtggcacagtgtttttgctgaagctgcagctgtagcagcacagaatactctytgcttggtggtggctgtgagcatccagaagctgttgcttttagtgatctcatagccagaaaattggctggggtcgttttgctgatcgtgaggtctgctaaacctcattgtgatagttgttcatattatctatgtcttctgaaaatggtgttggttgaggttgaatgggacttctgaagatcatcatttggtcccaccttcctgcaagagcaaggtgagccagagcagggtgcctagaaacatgtccagaaggagatcccaaaacttttctgggcaacctgtgccagtgctccatcaccca

SEQ ID NO: 76264 - DNA, 570 bp, Chicken  19866894361237_1
actgtcagggggggaatgaattcaccagcgttcagagacagccagctctcaggattcatcagagtttgaaactcaatacaactcaacagggaatggtgctgtaaaaattgacctcagacatttagtcagtcttggtaatgtttagtcacgatgggtttgttctaaatcgacaatcagaaagtgtaatcagctgcatttccttgctgttggaaagtggacaaggtcatatgtggagccagtctatagttttggaaaaagcaactgagcgttttcttacctgcgatattgaaacccttcctycctcttattactcccatttaaaactgtgccagttcttacagaagatgccaatgaaccatcctcccccaaacagcaagtgtcaaatgcatcactgctgttagtcagaacaaaggtggtggtgttttgttgttgttgtttttgttttgttgttgtttgtttgtttgtttttaatggaaaaagagacctttgataaggtctatgatacaaaaatgaacaggtggccaaatgagcctcacttctatatttcatccttaagtatgaagtctggga

SEQ ID NO: 76265 - DNA, 552 bp, Chicken  19866894361238_1
acctcagcatcataaaatttgcaacatgaaaatagaagctgtggtttgctaggaaaccagaaggatgaatattgatttgcttttattatgaacatttgtgcttatatccctggatcaccagtaattgtggcaagtattatgaaactcaatcaataaatgcttatttgccccttcataattaattcaaattcagataacagactttggggatttttatttctgttttttcttctccgtacattagtttgctttttaatttgacacaacagaattagaattgatcttgttttgaaaagatgytggtattaccaaccactgatgacgctgaagaatgaaagttgttgtcaatattgcttgtaagtctcaaatggatctaattggagaatagaacagtcccttcttgctaaattaaaccttggtaatccttatccacgtgaaagttaaaatgttatagaaaataacatctatcagcctgagaacttttatgaaaatatctttcatataaagtctgtaccaggctaaacctggtaacaaatataattccattgtttt

SEQ ID NO: 76266 - DNA, 600 bp, Chicken  19866894361242_1
actcagggatcaatttttaacgactctgtcagacatcctctggcaaatccagaacagctgttcaaacattcaaaggccagggtgcgtgtttctcctctgtgcacccagtcacagtctggcatcttcacacaacctattcccatcaacagggtgcaaacaggtgctggctaaagactgggcacgagtacagctacagtaaggacatgacatggtcagcttctgtgagaggcatgcagatgcttccctgttaagtgccaggggccttctctagaaaaagaattgagcggttgcctggagctstcctttcagcttggactgcaattgatttctcattacaggacatgatgtttgctgctaaggtagacgtcaggttttgaagacagcttgttctcttgcagtccatgtgacaatattggttttaggacagggactctattaaaataatgtgactatatcctgtatttggggttaataagctacagcatgacctacctrttccttcttaatacgagacctaaaacgctggcagctgcttcagctgtagtcagcccgagacctctctatctgtagcattacatccccatgcctcacgggaatttt

SEQ ID NO: 76267 - DNA, 600 bp, Chicken  19866894361242_2
gtaaggacatgacatggtcagcttctgtgagaggcatgcagatgcttccctgttaagtgccaggggccttctctagaaaaagaattgagcggttgcctggagctstcctttcagcttggactgcaattgatttctcattacaggacatgatgtttgctgctaaggtagacgtcaggttttgaagacagcttgttctcttgcagtccatgtgacaatattggttttaggacagggactctattaaaataatgtgactatatcctgtatttggggttaataagctacagcatgacctacctrttccttcttaatacgagacctaaaacgctggcagctgcttcagctgtagtcagcccgagacctctctatctgtagcattacatccccatgcctcacgggaattttacatatacacaaaacacacattgaatgtgctttatttcagactgcattcattggctgaacacagcctgggtcaccacaaaagcaaagatgcaccttaaaacaaagatacattttgctttacgttgcagaactaaaagttctgaatggcttcttaatacagcaataacagatctatctcgtcttcagtgtactgac

SEQ ID NO: 76268 - DNA, 600 bp, Chicken  19866894361244_1
ccatgctcctttttgtcctaatgagctcctagtcctccttccaggagcatcactcagcatcccccccttcattaaaaccaggaaattaattcatttttgacccaacatcctgtcatcctcctcatatctcacacagtgatgtattcccaaatcccctttagaagcaaagaatccagtcccttgcagtaaacgcaatgcaaaacgcaagtattttagggcaacagaaaaaactgtcacataaccttcagtgtcttcatccagtactgtgctcctcaagcttttcagaaccatccttcctcrttttttttttttttttttttttctggtagaagtctcatttcccattctcacttagccagttcttaccctcacaaaggcactattcaacctctagcttatctcaaacccccagaggtcaaacaccagctttttcttttttcattatgaatcagtttgtgttacctgttttcttctcctcattttttttcttaatttgattttcagcgaaactgaaccccaagctctacctgtgttgattcaaaggaacaactacagtcttcttgggactgaaggggatggacatttctgggtggggggact

SEQ ID NO: 76269 - DNA, 600 bp, Chicken  19866894361244_2
catgctcctttttgtcctaatgagctcctagtcctccttccaggagcatcactcagcatcccccccttcattaaaaccaggaaattaattcatttttgacccaacatcctgtcatcctcctcatatctcacacagtgatgtattcccaaatcccctttagaagcaaagaatccagtcccttgcagtaaacgcaatgcaaaacgcaagtattttagggcaacagaaaaaactgtcacataaccttcagtgtcttcatccagtactgtgctcctcaagcttttcagaaccatccttcctctrtttttttttttttttttttttctggtagaagtctcatttcccattctcacttagccagttcttaccctcacaaaggcactattcaacctctagcttatctcaaacccccagaggtcaaacaccagctttttcttttttcattatgaatcagtttgtgttacctgttttcttctcctcattttttttcttaatttgattttcagcgaaactgaaccccaagctctacctgtgttgattcaaaggaacaactacagtcttcttgggactgaaggggatggacatttctgggtggggggactg

SEQ ID NO: 76270 - DNA, 600 bp, Chicken  19866894361244_3
tgctccccagacagaaaatcactgcactggtaaaggaaaaaaaaaatggagccatgtaacaacccaattaccaaagccattacatcatccaaatagcgaatatacatagtttatttttaaaacagctggaatctcatatttgacaaagtcaaagacagatggagctttcagaaccaggctgatactgaaggaaagttaaaacgcttttgctggcataggtacagcattgaggtgccaaagtccctgtcagacagagctgtcattcaaagttctgctagtaggttttgatatcaccaaaakctgtgctttattctggtagacatgtttcacaagaatttggaagaagtgaggaagctacatcagcatagatgtcagctttccagcctgaaagcatcctgctttaagagcttctggtaggtctatgaacccagcagtgtcacaacagcaaaagctacaggcatatcttaggcctgttgataggcacaaaacccagaagggaactttatgtctcttgatccagtgtaaacaagtgcagcaaaacaaattctttgagtgatcagactgtgttatccagaaatcctttggtggttggactgcagg

SEQ ID NO: 76271 - DNA, 600 bp, Chicken  19866894361249_1
tggaaacgcacatactacccatacacttaactttcaatgttcaaagaaggaccactgacagttatcacctttgagttaggtatgtctgtagctgactgaggtccgagccttacatgagctcatgttctgccattacaacaagaaaaagctgaaaaactcagactgtctgtgtgctccaagtaccctgattttttgtcagagctgtaacggtctctgactattacagataagtattagcatggctcacagtaataagatcttgtacttctttatttgcctctaaatggttaagcacgctaygatacatatatattaaggaatataaaaaaaaattaaaaggtcagatccaacatgatgcagctggagaatgatgcaaagcaaaaatattggaaaattaaggagaaaattatatgaaagatcactaatttacatagaacagcctgggtgctattagaaatgtggcaacgagtgaggaaaatagatcatctaccatctgcagacaattaaactcaaaactgctgctgcataatattttgaaatatccctctgcaacactgaaacacagtgttgatagtagctgctagagtactgctgctattg

SEQ ID NO: 76272 - DNA, 600 bp, Chicken  19866894361256_1
ttaacaccacatctaaacacttcttgagcacctccagggatggtgactcaaccacttcactgggcagccctttccagtgcctgaccactctttcagagacaaatttttccctaatacctaacctgaacctcccctggttcaacttgaggcagttccctctagttttatcactagtcatgaagaagaagaggccaattcccacctcaccacaacctcctttcacatagttgtagagagctataagatctcctctgagcctcctcttcagatgagtgtccaccatttcaccctgagagttgrttgggatgagagtctttgaccactgaaaatgttatggaaaaaatgaaaaatggttgctgggttacgtgtaccctgtctcccacccagacgccttcctgtgsaaactgctaatgccatgccctggtccctgcactcctggggctgcattctgtagctgtggatatttcttccagcactgcccaggtctctttagctgctcctgatatacctctgttctcctctgagtaccattttcagtcacttcttagaatagactcatagactcatagagtcacccgaggttggaaaacctaggatcat

SEQ ID NO: 76273 - DNA, 600 bp, Chicken  19866894361256_2
aatttttccctaatacctaacctgaacctcccctggttcaacttgaggcagttccctctagttttatcactagtcatgaagaagaagaggccaattcccacctcaccacaacctcctttcacatagttgtagagagctataagatctcctctgagcctcctcttcagatgagtgtccaccatttcaccctgagagttgrttgggatgagagtctttgaccactgaaaatgttatggaaaaaatgaaaaatggttgctgggttacgtgtaccctgtctcccacccagacgccttcctgtgsaaactgctaatgccatgccctggtccctgcactcctggggctgcattctgtagctgtggatatttcttccagcactgcccaggtctctttagctgctcctgatatacctctgttctcctctgagtaccattttcagtcacttcttagaatagactcatagactcatagagtcacccgaggttggaaaacctaggatcatccagtccaactgtccacctaccaccagtatttccccactaaaccatatccattactacccctgtgctttcccataccatgatcccccactccaccacagaa

SEQ ID NO: 76274 - DNA, 600 bp, Chicken  19866894361261_1
ccctgctcctgagggtgtgcagagccctacagccttgcagcacaccaccctcagccccagggtgcccgggcagaacagcacacccaggcaacgtggggaaggagctccccttgtcccacctgtgcgtgcaaaagggaacagctgtgagctacatctaaagcagagtttgggctgctcagtgacataatcacagccctcatgtgcaatagcatgctccgtgtggcacagggcaatgtatctgcacacccagcagcaaccacagcaagaaggcagacccagctgagcccagtcagagcaggkcaacacaggcctgtctctccagaccaatgcaatgtctccaactgatgtttcttttcttgcaaacaaatgaagtgcagcaggtgatgtaccagacactcatgtttcagagggtactaatttgcatctatgatgcatttaaggaaaagtgtatcttctttcacataggcrtgctttggtgactgcagtttggtcagagggaggaaggtggggcagccgctggcaacattcatgtcgttcacaggtctctgaaaggaagcagaagccaagtctgggcgaaaagcatcaataatgtgttctctg

SEQ ID NO: 76275 - DNA, 600 bp, Chicken  19866894361261_2
gggctgctcagtgacataatcacagccctcatgtgcaatagcatgctccgtgtggcacagggcaatgtatctgcacacccagcagcaaccacagcaagaaggcagacccagctgagcccagtcagagcaggkcaacacaggcctgtctctccagaccaatgcaatgtctccaactgatgtttcttttcttgcaaacaaatgaagtgcagcaggtgatgtaccagacactcatgtttcagagggtactaatttgcatctatgatgcatttaaggaaaagtgtatcttctttcacataggcrtgctttggtgactgcagtttggtcagagggaggaaggtggggcagccgctggcaacattcatgtcgttcacaggtctctgaaaggaagcagaagccaagtctgggcgaaaagcatcaataatgtgttctctgttgttttggtcaagcagcataaatgtaacctgaaaagcagaaggcagcagtgatgagttactgaaccgaaaattaaacagaaaatgttggagacaaacgtgcaaacgctgtgaaagcagctggatgctctattgacagttaaatgcgagctgtaaagaacgtctcaca

SEQ ID NO: 76276 - DNA, 600 bp, Chicken  19866894361264_1
gtacttctccttgctgctggcataacaagcaattactatgccatccatactgcacagagttaagcattcgtttaacgccttccttccatgcagatttataagatacatggcttaaatgagggatttgactaatatgctagtgcacagaaataaagaaccagcaacttccaagaagaacagacacctatgactaatggcatttgatcttgtcagagaggaagctatttttaattctgtgacgtacaaacattgattacttagctgtagacactggaaaagtgctacgcataaagtgacctygttggctgcagtttacccatcccaaaggactgcctttgctacaggacctttgccagttccctgtgctcatgcaaaaagaagaattatgcccatacctcacaagtgccagagtcaccgtaactaccaagtgcaaccactcaatggcacagccttcagaagcatttatgggcagcttcattatgaaggcagagaagaaaggcttattttatcacgaacattgcttttgcctcaaggacttctcttctccatcccaaaatgtttctctgcagtaagatcactcctacctgccttctcagtgct

SEQ ID NO: 76277 - DNA, 599 bp, Chicken  19866894361270_1
  misc_feature (1)..(14): n is any nucleotide
nnnnnnnnnnnnnnctccaaaccccaaacacaaaccggccacaaacgggcaccttgctgacaacacacacaactggagcagccctcccctcctgaaacagtcctatcgccgggctgcaagcgaggaggtagaggttgttgtgctggatactcaaagacaaactgcacttcttaaaacagaagcagataattacagccatttaatttttaattactagtttaaattcttctgtaagcaccaggctgcgcgctcggctcacacacttatgaatgaagctctgggaagcacagcaagctctcyctgctaagagcaaagcrccgcagcatgacaacrctcccattatgaccagacatttcagaacggcctctcctctcctccaagactttttttggctcccgattaatctctcatacttattgccattcacacgcaatgatcactcgttcttcttgctgctctccctccgagggcgcagtgtgcctccggccgtgtcacctcgtggggctgcaggaagggagctgcaccctgagcaggcctgggagcgctccggcagtgagcagcgtgtcgagtgggytgcgcatacrtgctgatgtatggcc

SEQ ID NO: 76278 - DNA, 600 bp, Chicken  19866894361270_2
caaaccccaaacacaaaccggccacaaacgggcaccttgctgacaacacacacaactggagcagccctcccctcctgaaacagtcctatcgccgggctgcaagcgaggaggtagaggttgttgtgctggatactcaaagacaaactgcacttcttaaaacagaagcagataattacagccatttaatttttaattactagtttaaattcttctgtaagcaccaggctgcgcgctcggctcacacacttatgaatgaagctctgggaagcacagcaagctctcyctgctaagagcaaagcrccgcagcatgacaacrctcccattatgaccagacatttcagaacggcctctcctctcctccaagactttttttggctcccgattaatctctcatacttattgccattcacacgcaatgatcactcgttcttcttgctgctctccctccgagggcgcagtgtgcctccggccgtgtcacctcgtggggctgcaggaagggagctgcaccctgagcaggcctgggagcgctccggcagtgagcagcgtgtcgagtgggytgcgcatacrtgctgatgtatggccagagtatgtcatgtgtgc

SEQ ID NO: 76279 - DNA, 600 bp, Chicken  19866894361270_3
accggccacaaacgggcaccttgctgacaacacacacaactggagcagccctcccctcctgaaacagtcctatcgccgggctgcaagcgaggaggtagaggttgttgtgctggatactcaaagacaaactgcacttcttaaaacagaagcagataattacagccatttaatttttaattactagtttaaattcttctgtaagcaccaggctgcgcgctcggctcacacacttatgaatgaagctctgggaagcacagcaagctctcyctgctaagagcaaagcrccgcagcatgacaacrctcccattatgaccagacatttcagaacggcctctcctctcctccaagactttttttggctcccgattaatctctcatacttattgccattcacacgcaatgatcactcgttcttcttgctgctctccctccgagggcgcagtgtgcctccggccgtgtcacctcgtggggctgcaggaagggagctgcaccctgagcaggcctgggagcgctccggcagtgagcagcgtgtcgagtgggytgcgcatacrtgctgatgtatggccagagtatgtcatgtgtgctctgtgtatacggaga

SEQ ID NO: 76280 - DNA, 432 bp, Chicken  19866894361270_4
gctctgggaagcacagcaagctctcyctgctaagagcaaagcrccgcagcatgacaacrctcccattatgaccagacatttcagaacggcctctcctctcctccaagactttttttggctcccgattaatctctcatacttattgccattcacacgcaatgatcactcgttcttcttgctgctctccctccgagggcgcagtgtgcctccggccgtgtcacctcgtggggctgcaggaagggagctgcaccctgagcaggcctgggagcgctccggcagtgagcagcgtgtcgagtgggytgcgcatacrtgctgatgtatggccagagtatgtcatgtgtgctctgtgtatacggagaggcggtggttgacatgtcagatcagcagcctgtgccctggcagacgctctgcaccgtctcagcgtgggatgga

SEQ ID NO: 76281 - DNA, 422 bp, Chicken  19866894361270_5
gcacagcaagctctcyctgctaagagcaaagcrccgcagcatgacaacrctcccattatgaccagacatttcagaacggcctctcctctcctccaagactttttttggctcccgattaatctctcatacttattgccattcacacgcaatgatcactcgttcttcttgctgctctccctccgagggcgcagtgtgcctccggccgtgtcacctcgtggggctgcaggaagggagctgcaccctgagcaggcctgggagcgctccggcagtgagcagcgtgtcgagtgggytgcgcatacrtgctgatgtatggccagagtatgtcatgtgtgctctgtgtatacggagaggcggtggttgacatgtcagatcagcagcctgtgccctggcagacgctctgcaccgtctcagcgtgggatgga

SEQ ID NO: 76282 - DNA, 600 bp, Chicken  19866894361273_1
tgactgaaatatcaggaattcttgaagaaattcagctcagaacatctaacaatgtcatcaaccactcccagtgctaccagtcccgtgccttctaccaacccagctacctgcacatcttctcagcctgagcatcccaagacaccttcttctctagtggggcagaagagtgtaagtatggttgttttacgtattttatcaattttcattgctgtgcatagactgaaaataatagttttggaactcagtgacggtattcctattgattgcccatgagatccggtacaatgcctgttaagaaamaaatgaggttatttgcaaaataattctgttacaatgacaaaaattgggctaatcagtaactcctctgaagtcaaatcatatatatcaatttataccaatagcattccctactattaccttagacacatccatcagatctatatgacaaataagttttttgttgttcaagtgcagtcacatttctgagaacaaagcgaactgcccaaactacaacagcccaatagctgcaaaagcaacaaagcaacataaaaaaacctaagtggttgtctgacaaagccaggcaggactggtagttgcagt

SEQ ID NO: 76283 - DNA, 600 bp, Chicken  19866894361278_1
tataccttcttgtttaactctgaagcgtgtgttaaatgaaacaggggaaaaaaaaaaaaaaaagatctcatttctgatcaaacaatagaaaagagcacacacagacttctcctgcatggtattacaccgtgggacctccaactcctgctgctgattgtgtttttttttttatagtactttatttatttttttttaatggccaaatgcataaccatcttgattttctaacagtgttttgccaactattacctggcagctctatttggtttcaaaatgagaaatacattaatatttctgacwtatagatgtagcaggaatctgagctggtattatacagctgcaaatccccaaaccaatttcacagttaccagagctgacctcaatactgcataatgctttctcttccatcaaatctccaaatgccatcagtaagagaataaattgttttcccagaacttgcaagtaaagaaatgaatgtcaaaatacaaaaactgagtgaaattcatgttgtatctagaagcataacacaactaagctaaaatgtatgttttctccttttgtattggaattcaaaacagtagcttgaagtgaaaatctaaa

SEQ ID NO: 76284 - DNA, 600 bp, Chicken  19866894361278_2
cataatgctttctcttccatcaaatctccaaatgccatcagtaagagaataaattgttttcccagaacttgcaagtaaagaaatgaatgtcaaaatacaaaaactgagtgaaattcatgttgtatctagaagcataacacaactaagctaaaatgtatgttttctccttttgtattggaattcaaaacagtagcttgaagtgaaaatctaaaacagctttatggtaggaagccgatatttatcatggtttaaaatgatgttagtggtgttttcttaagcacaagcaaaaggatagagtayaaggtcttcaatagactagagtgtccccaggtttcagcaaatcagccaaaaataagatgaaagtttctcaaatacagcaatgcctaatccttctgcattgtctttggttttctattataaaaataaaagtttccatacatcttgtaagaggagtatgctgacttttttcccaccccgagtgatattcactggtgctgtcttcagatgaaaaacccagctgaagatctaagccgattaaggccttttgaggtcaccgagctcaattaaagtagatcaatttcccagtgatattttcatgta

SEQ ID NO: 76285 - DNA, 600 bp, Chicken  19866894361292_1
gacattggaaaaaatctactggatatacacagctgtaactgatatccaaattggttctttagtattaattaaatagtatgtcaatgtgaaatggcatgattatgataatttgggtccttttcatggctgtttcttaaaggaggagaaggcaagagagcaaatggagaaatggaaatagatttcctaattcaggtgcattactgctgcttttattatttttcccttcaaaaaggaatcaaagccagaatatgtctttacagatcaacacagataatatgaacatttcaggaaaattcattwttagatycttatttttaaaacatttaccttctttttatttaaactttttgttcctcatccccatcttccccagtgggaatattcattacatgttggtattggtacttctcgtgtaccttttcccatagcattaagctgcatatgttgaaacagctgcttaaacttgtttcaccatagcacattaagcattctgtgcaatgccagcaactggcttttgcaggataggaaggcagatggagtactgaactgtggtggctagactcacatgttggaacttgactccagacttgacctgggccc

SEQ ID NO: 76286 - DNA, 600 bp, Chicken  19866894361292_2
gaaaaaatctactggatatacacagctgtaactgatatccaaattggttctttagtattaattaaatagtatgtcaatgtgaaatggcatgattatgataatttgggtccttttcatggctgtttcttaaaggaggagaaggcaagagagcaaatggagaaatggaaatagatttcctaattcaggtgcattactgctgcttttattatttttcccttcaaaaaggaatcaaagccagaatatgtctttacagatcaacacagataatatgaacatttcaggaaaattcattwttagatycttatttttaaaacatttaccttctttttatttaaactttttgttcctcatccccatcttccccagtgggaatattcattacatgttggtattggtacttctcgtgtaccttttcccatagcattaagctgcatatgttgaaacagctgcttaaacttgtttcaccatagcacattaagcattctgtgcaatgccagcaactggcttttgcaggataggaaggcagatggagtactgaactgtggtggctagactcacatgttggaacttgactccagacttgacctgggccccattgtc

SEQ ID NO: 76287 - DNA, 600 bp, Chicken  19866894361305_1
aaatgccccccaaaaacttagaaaaacatggttggaagttttgagattgtgcaattaaccaaaatcactatagcgactgcaggttttcaggtagttgaattctttagcaatgcttaaaaccaaggatatattgaaagaaaaaataaaggatttcctcatacttacagcagcactgaagctgaaaaatgaagagagagatattttctaattacagtttcaaagctccacctaatactgtgattagcttttctcagctttgattcccatgactgcatacagaattcctgtgggatttgcacrctttaatgcttcacctcttygttttctatagtttttttttgtgagaactgaaggaggtgataggaaaaccttctgctgataggcttctctatcacaaaaatttctttgtgctgcaaactgtttcccagtgcctcttttccattgctgtgtctgccacacacagcagttgtaactgaagagtttctgctggagttggatgctaaattacttcactttaagttaagctatacagtgtaattgcttgcatattacataggacactgctgaagggctgtgtgaaatgactttgccactggaaat

SEQ ID NO: 76288 - DNA, 600 bp, Chicken  19866894361305_2
gaaaaacatggttggaagttttgagattgtgcaattaaccaaaatcactatagcgactgcaggttttcaggtagttgaattctttagcaatgcttaaaaccaaggatatattgaaagaaaaaataaaggatttcctcatacttacagcagcactgaagctgaaaaatgaagagagagatattttctaattacagtttcaaagctccacctaatactgtgattagcttttctcagctttgattcccatgactgcatacagaattcctgtgggatttgcacrctttaatgcttcacctcttygttttctatagtttttttttgtgagaactgaaggaggtgataggaaaaccttctgctgataggcttctctatcacaaaaatttctttgtgctgcaaactgtttcccagtgcctcttttccattgctgtgtctgccacacacagcagttgtaactgaagagtttctgctggagttggatgctaaattacttcactttaagttaagctatacagtgtaattgcttgcatattacataggacactgctgaagggctgtgtgaaatgactttgccactggaaatatttctatctaacatcaggt

SEQ ID NO: 76289 - DNA, 600 bp, Chicken  19866894361308_1
gcaccacaataaataaataaaatccctgatttgtttcctttgtaaattataaataaatttggtaaaagcaaagctagtcaaaatgtattctgtctccaagaaataaaatttgctttttaacaaatttgaatgaacaggatcaaattttgattccaaacttcatcttctctaaaggactgctatattcaaaaatagttactccattttccttctctctcttctcctttacctcaaattgctgaacttgaaaatctttcagataagttataactgacaaatatgctataaataaaatagctycaacttaagaaaatcctggtgttcaagaagagattaatttagttttgattcttcaatgataatttgatacatattaatgccttctcagtgtcttaaattctacaaattgtttaccattgtatggtggaggtctaacaaaatgaagtggccattatgtaactaatctacagatcggcaagaaaagtaagagcggttcaataggctgtgtagaaacatatgaagatatgaggaatatcaagcagactcatcactgaggaaagaggaagtctccctacctcaccagtatcctcatcccagcaa

SEQ ID NO: 76290 - DNA, 600 bp, Chicken  19866894361328_1
tatgtgcagtacagcatctaccctgttcccactgagttttcttgtcttagtatttcttataagagttaaagttaggagagtttgtgttcagttgttaattttcttctttttatccccacaatgtacttgccacgattggcgtaaaatgaacttcatttaaaaaattcttctaagtaaacgggtaagatctaatttgcaaataaagcctcttgggaggctgctgatccttttgtagtgaaatgcgagtctcttactgtgagttgtcagaagagaggaggaagacagttagaataactgcaraataaattgaagatgtgtgtcacgttcctgtgtgcctgtggtcatgggaaaagtgccctttaattgtggtggtgtggggaatctcatagcagagatttcataagactagccagataaatgaccaaagaaagtactttgcatgtttaggggtgactggaattraaacctgcttcatttttgctctcaccttcaaaactctgaaagtaacatctggccgtgggcaaagggagcaatttttggccattgggctgtttggacagcaagtagttactcaacaaacacattatcccaaactgttta

SEQ ID NO: 76291 - DNA, 600 bp, Chicken  19866894361328_2
aattcttctaagtaaacgggtaagatctaatttgcaaataaagcctcttgggaggctgctgatccttttgtagtgaaatgcgagtctcttactgtgagttgtcagaagagaggaggaagacagttagaataactgcaraataaattgaagatgtgtgtcacgttcctgtgtgcctgtggtcatgggaaaagtgccctttaattgtggtggtgtggggaatctcatagcagagatttcataagactagccagataaatgaccaaagaaagtactttgcatgtttaggggtgactggaattraaacctgcttcatttttgctctcaccttcaaaactctgaaagtaacatctggccgtgggcaaagggagcaatttttggccattgggctgtttggacagcaagtagttactcaacaaacacattatcccaaactgtttaattgtgaggcattggaaagatcagcaaaattagattctctttttgttaactctaaggtagatttgaatttagatcaaaactgaactgtatcttccctgtgaaggactgtagaaatcttagaccaaggctggttgctggtaggacagcttgtatttttttcta

SEQ ID NO: 76292 - DNA, 599 bp, Chicken  19866894361333_1
  misc_feature (1)..(30): n is any nucleotide
nnnnnnnnnnnnnnnnnnnnnnnnnnnnnngttcgtgtgtggctggggagggattggtcaccgctggaaaggctttagaatagaaaacgttagctaggtgaagctattcgtggtcctaggtgttagctttccgtgtcgtaaaaattgcattgggttcctaaagctgctgatcagattactgctcagcctggtgaatgtgcagacgagcagccctgtgatggctagcgggcaggatccagaaagaaacaccactgtaggtgagggatgtagcacagaacttctgtaaccaaaattcagagrggggcaggatggatattccccttttgatcaccgtttggggctcgccatctctgctgtgtttgtagaactttactccctttgcagtatgctgccaaagttctgggcttggtgttgtgaactacgtactgctgcaccaacctcggcagcgctgtcctgtaaaatgaggtttgatcagagctccattttagggcactggattaggtccttttgatcactgcctgcagaactgttttcatgaactgggaggtctatgtcttctgatagcttagtcgttgctggaaatgagcaatgaaaagggc

SEQ ID NO: 76293 - DNA, 600 bp, Chicken  19866894361333_2
caccgtttggggctcgccatctctgctgtgtttgtagaactttactccctttgcagtatgctgccaaagttctgggcttggtgttgtgaactacgtactgctgcaccaacctcggcagcgctgtcctgtaaaatgaggtttgatcagagctccattttagggcactggattaggtccttttgatcactgcctgcagaactgttttcatgaactgggaggtctatgtcttctgatagcttagtcgttgctggaaatgagcaatgaaaagggcaaacttccctttgctgcgtctgcccgttyctctttttgagccctaggaaggatcagttgtgcaacgctgtgatctgagtggttaaaattaagaaacgtgctgctcagggkggaaaagtgagaaggtcagaagtattcctccagtgggaatggagcttgcatccttgagatgcgagctttagtcccagggtgttgaagatgcagatgttttaatggcttttcacagtaccaaagacaaaaatgggcacaggggtatttcaggtgcagcctcatcctagaagtgaattaatcttgagatggagcctcaaaactaggtcactttggtttctg

SEQ ID NO: 76294 - DNA, 600 bp, Chicken  19866894361333_3
tgttgtgaactacgtactgctgcaccaacctcggcagcgctgtcctgtaaaatgaggtttgatcagagctccattttagggcactggattaggtccttttgatcactgcctgcagaactgttttcatgaactgggaggtctatgtcttctgatagcttagtcgttgctggaaatgagcaatgaaaagggcaaacttccctttgctgcgtctgcccgttyctctttttgagccctaggaaggatcagttgtgcaacgctgtgatctgagtggttaaaattaagaaacgtgctgctcagggkggaaaagtgagaaggtcagaagtattcctccagtgggaatggagcttgcatccttgagatgcgagctttagtcccagggtgttgaagatgcagatgttttaatggcttttcacagtaccaaagacaaaaatgggcacaggggtatttcaggtgcagcctcatcctagaagtgaattaatcttgagatggagcctcaaaactaggtcactttggtttctgtgttacagtagaattggatgaatttgcaaacaggattcacatgctccttcaagcctccgtgacttagaaaactctccaaaa

SEQ ID NO: 76295 - DNA, 577 bp, Chicken  19866894361333_4
aaaacaatgcaaatatcagtcttttttgcttttgcagatgcctttcaggcaagcttggaggcctgcaggaactgcaggactgctaacgttcgagggcataaaccccagtatgtttggtaggctgcttggctttgggtaggggatggggggctttgagtcacttacagccttgcctgcagtgtcatgatctttcttacattaaaccagaggggattctgttctccctgctgctgggggaaggatgcctggggcttttttcctcgcacagcaaaaagtttttacagctactctggaaactcrtcgaaactgctctggtagtttctgtgctggggaatctgcttttcgtctgagaagccttcacttttcaacttgccacccaggtggcaattagcagtccttgcttacagctgacggtcagattctgacagtgatccagcagatggataagtacctcctgagctggattcagcagcagttttggaggaggttgtattcaataaggcagtcgttgagatgcttggagcagtggagttgttctcatctgcttttagagagctgtggggctggctgactctta

SEQ ID NO: 76296 - DNA, 599 bp, Chicken  19866894361335_1
  misc_feature (1)..(59): n is any nucleotide
nnnnnnnnnnnnnnnnnnnnnnnnnnnnnnnnnnnnnnnnnnnnnnnnnnnnnnnnnnnaattgcaccttcgagatgggatgtcggaataattctatgtcttgtcactcggtaatgattctaatggtatctcctacttagctgccttcattaatgacttgatggtgagagcatgtttcagcagttgtgaacatgtggagcactctgtgttctgggggaaaagattagcttaatgaggagaaagccaatttcctgaagaagtgtcttacacagttcctgcttttaaaggaaggactgagamgcggacaatttgtcattacaaggtataaaaaacatttaacttcacagtttgctgcacttacagctctcctgcaaagggaagagagatkaatagatttttctcacccagtaaaatagaaggtgaaatctgtccctccgagtcctttcgctcaatagagaagtgctcattactcagactgtgctcaaggagcagcccagcgttcagctcctcgggcaccgcacaacttgcactcgcagttcattacaccctcgggcacctttgaaagtgtggccaacagacaccaaaaccctgcgacagag

SEQ ID NO: 76297 - DNA, 600 bp, Chicken  19866894361335_2
taattctatgtcttgtcactcggtaatgattctaatggtatctcctacttagctgccttcattaatgacttgatggtgagagcatgtttcagcagttgtgaacatgtggagcactctgtgttctgggggaaaagattagcttaatgaggagaaagccaatttcctgaagaagtgtcttacacagttcctgcttttaaaggaaggactgagamgcggacaatttgtcattacaaggtataaaaaacatttaacttcacagtttgctgcacttacagctctcctgcaaagggaagagagatkaatagatttttctcacccagtaaaatagaaggtgaaatctgtccctccgagtcctttcgctcaatagagaagtgctcattactcagactgtgctcaaggagcagcccagcgttcagctcctcgggcaccgcacaacttgcactcgcagttcattacaccctcgggcacctttgaaagtgtggccaacagacaccaaaaccctgcgacagagctttgataaatgctgaatcactcctcatatctttcagatacaacacagttgggcgagtagactgaacttcagcagtcaagcagtacgag

SEQ ID NO: 76298 - DNA, 600 bp, Chicken  19866894361336_1
ggtgcagacagtggataaatctcttgcaatagttgtgatccagctgtgtgctcaaatgaagagaggctggtgcacctcagtttagatgtggtgtcagagcccatccttcactctgataccaaggcagttttgaggtttgtacatcttgggttaagttcagtgttgtccccttgaaggcaccccagtggctctttaaaatcataatctcctctttcagatttgtggtcccagaatgctttcagcaaatattttccatgggtgctcattgaaaatatacattaacatttgtttttcaatttygttactgtattgtgctttctcagtggtggacagcrtyaaagacttgtgccagtagtggtgcaaactgtattttttcccctttgcattatagttcactgttcactctcactgctgcttgctcttagcttgggcttgatgccagacctgaaaggctttgtgtattttgctcactagtgtgctttgttatcttttctgaagctaattgtagctgttgaacaagatgaaattccaagactcaaagctctgtatgaaagagggctgcagaacaacgtccgaggtctgaaattgattggagcaaaa

SEQ ID NO: 76299 - DNA, 600 bp, Chicken  19866894361336_2
tgatccagctgtgtgctcaaatgaagagaggctggtgcacctcagtttagatgtggtgtcagagcccatccttcactctgataccaaggcagttttgaggtttgtacatcttgggttaagttcagtgttgtccccttgaaggcaccccagtggctctttaaaatcataatctcctctttcagatttgtggtcccagaatgctttcagcaaatattttccatgggtgctcattgaaaatatacattaacatttgtttttcaatttygttactgtattgtgctttctcagtggtggacagcrtyaaagacttgtgccagtagtggtgcaaactgtattttttcccctttgcattatagttcactgttcactctcactgctgcttgctcttagcttgggcttgatgccagacctgaaaggctttgtgtattttgctcactagtgtgctttgttatcttttctgaagctaattgtagctgttgaacaagatgaaattccaagactcaaagctctgtatgaaagagggctgcagaacaacgtccgaggtctgaaattgattggagcaaaagaaatacaggcaaaagaacccttctgcagggtaag

SEQ ID NO: 76300 - DNA, 600 bp, Chicken  19866894361336_3
atccagctgtgtgctcaaatgaagagaggctggtgcacctcagtttagatgtggtgtcagagcccatccttcactctgataccaaggcagttttgaggtttgtacatcttgggttaagttcagtgttgtccccttgaaggcaccccagtggctctttaaaatcataatctcctctttcagatttgtggtcccagaatgctttcagcaaatattttccatgggtgctcattgaaaatatacattaacatttgtttttcaatttygttactgtattgtgctttctcagtggtggacagcrtyaaagacttgtgccagtagtggtgcaaactgtattttttcccctttgcattatagttcactgttcactctcactgctgcttgctcttagcttgggcttgatgccagacctgaaaggctttgtgtattttgctcactagtgtgctttgttatcttttctgaagctaattgtagctgttgaacaagatgaaattccaagactcaaagctctgtatgaaagagggctgcagaacaacgtccgaggtctgaaattgattggagcaaaagaaatacaggcaaaagaacccttctgcagggtaaggg

SEQ ID NO: 76301 - DNA, 600 bp, Chicken  19866894361338_1
tctttctatgagcaccagctgggggatgtaaggatagagaacagcccttgatgaaaaggacttggaggaactaggggatggcagttggaaatgagctagcactgtgcccttgcagcccagaaagtaaaccatattctgggctgcatcccaaaacagcatggccagaagggcgagggaggggatctgtccctctgctctgcagtgtgagacctcacctggagcactgcatccggatgtggagtcctcagtacaggagagacatggacaggtccatgtcctgctggagtgtgtccagaggarggccacgaaaatggtagaagggatggaacacctctcctacaaggacaggctgagggagctggggctctgcagcccggagaagggwaggctttaggaagacctatgtgtggcccttcartatctttagtaggcctgttagaaggaaggagtcagactctttagcagggtctgttgtgatatgacaagggaaactaaaagaggggagattcagactggatataaagaagttttttacaataggagtagtgaagcactggcacaggttgcccagagaggtggtggtgccctatccctggagac

SEQ ID NO: 76302 - DNA, 600 bp, Chicken  19866894361338_2
tggaaatgagctagcactgtgcccttgcagcccagaaagtaaaccatattctgggctgcatcccaaaacagcatggccagaagggcgagggaggggatctgtccctctgctctgcagtgtgagacctcacctggagcactgcatccggatgtggagtcctcagtacaggagagacatggacaggtccatgtcctgctggagtgtgtccagaggarggccacgaaaatggtagaagggatggaacacctctcctacaaggacaggctgagggagctggggctctgcagcccggagaagggwaggctttaggaagacctatgtgtggcccttcartatctttagtaggcctgttagaaggaaggagtcagactctttagcagggtctgttgtgatatgacaagggaaactaaaagaggggagattcagactggatataaagaagttttttacaataggagtagtgaagcactggcacaggttgcccagagaggtggtggtgccctatccctggagacacccaaggtcaggctggacagggctctgagcacctgatcaaattgcaggtatcaatgtcaattgcagatggactagctggccttt

SEQ ID NO: 76303 - DNA, 600 bp, Chicken  19866894361338_3
agaaagtaaaccatattctgggctgcatcccaaaacagcatggccagaagggcgagggaggggatctgtccctctgctctgcagtgtgagacctcacctggagcactgcatccggatgtggagtcctcagtacaggagagacatggacaggtccatgtcctgctggagtgtgtccagaggarggccacgaaaatggtagaagggatggaacacctctcctacaaggacaggctgagggagctggggctctgcagcccggagaagggwaggctttaggaagacctatgtgtggcccttcartatctttagtaggcctgttagaaggaaggagtcagactctttagcagggtctgttgtgatatgacaagggaaactaaaagaggggagattcagactggatataaagaagttttttacaataggagtagtgaagcactggcacaggttgcccagagaggtggtggtgccctatccctggagacacccaaggtcaggctggacagggctctgagcacctgatcaaattgcaggtatcaatgtcaattgcagatggactagctggcctttaaatgtcccttccaacttaaaacattctatgat

SEQ ID NO: 76304 - DNA, 599 bp, Chicken  19866894361344_1
  misc_feature (1)..(19): n is any nucleotide
nnnnnnnnnnnnnnnnnnnatttgctgtttgtttgtttgtttaaagaaggaagggaagttctttctatcaatctttggttgagtgcaattttgagcttagaagtcattgtgaacatgagttgaggcagcagcaaaccacccttatgcttcatttgtcatacaatttgtagaatgctttttcctgcaaagagcaatgaatttctagggcatagtcttccttgagattgccacacagaatgatgtaattttgcttcccactttttttgtttgtttgtttttttccagtttcactggagattrtctgaaattaaagccaaataaaacacgtaacttcattatttagaaccatcatatatttctaaagaaatttactttgattgaatcartgattgaattaattaaaatttttttgctactaagcggaaggagtcgtgaaaagtctgtgaacagtctgtttcattcaaatagacttatctgatctttcattttcagtgttctttggcagaaatgtaaaaggattcagaatcctgtagggtcatttgtctcatatccaagcccaagctaggactgtgaagaaatttggcctcccagtgaagaaa

SEQ ID NO: 76305 - DNA, 600 bp, Chicken  19866894361344_2
aattttgagcttagaagtcattgtgaacatgagttgaggcagcagcaaaccacccttatgcttcatttgtcatacaatttgtagaatgctttttcctgcaaagagcaatgaatttctagggcatagtcttccttgagattgccacacagaatgatgtaattttgcttcccactttttttgtttgtttgtttttttccagtttcactggagattrtctgaaattaaagccaaataaaacacgtaacttcattatttagaaccatcatatatttctaaagaaatttactttgattgaatcartgattgaattaattaaaatttttttgctactaagcggaaggagtcgtgaaaagtctgtgaacagtctgtttcattcaaatagacttatctgatctttcattttcagtgttctttggcagaaatgtaaaaggattcagaatcctgtagggtcatttgtctcatatccaagcccaagctaggactgtgaagaaatttggcctcccagtgaagaaatgagaagagaaaggttgtgctctgccatggaacccctccatccaatcatccatccatccatccatcaatctttccattcctcctttt

SEQ ID NO: 76306 - DNA, 599 bp, Chicken  19866894361345_1
  misc_feature (1)..(31): n is any nucleotide
nnnnnnnnnnnnnnnnnnnnnnnnnnnnnnnaactcaaggatgataagtagcagtggccaggttagggcacacatgcctttaagcccaacagtgaggggggacacagcatatccagcatccctcctcactcacttcattatagccaggtgcctgggctgcatggggacctgccaccaccaccccacatggctgcggtgccaacagcagcatgcagcccagaaggtcagcaggatctcacctgcttgactccacaatctgtcttctttgtgatttgcctcgggtgatttttattattctgrggaggcttgcatcaaggatcaactatgagtagtttatgaacttygaaaatgacttcagttgaaataccagacttgaatgactctaagaggccagacttttggagtatgatgaactcccagttccctgtccactggrttctattgacatattttgcacttcaagtcaggctcatgtactaattgcttttaaaaatgttatccttggtaggttaacccaaaatttctgtatttctgcaagtcaaagtcagcacttcaattttattaaaacattgactgctgaaagtaccctgaaagttctt

SEQ ID NO: 76307 - DNA, 600 bp, Chicken  19866894361345_2
taagtagcagtggccaggttagggcacacatgcctttaagcccaacagtgaggggggacacagcatatccagcatccctcctcactcacttcattatagccaggtgcctgggctgcatggggacctgccaccaccaccccacatggctgcggtgccaacagcagcatgcagcccagaaggtcagcaggatctcacctgcttgactccacaatctgtcttctttgtgatttgcctcgggtgatttttattattctgrggaggcttgcatcaaggatcaactatgagtagtttatgaacttygaaaatgacttcagttgaaataccagacttgaatgactctaagaggccagacttttggagtatgatgaactcccagttccctgtccactggrttctattgacatattttgcacttcaagtcaggctcatgtactaattgcttttaaaaatgttatccttggtaggttaacccaaaatttctgtatttctgcaagtcaaagtcagcacttcaattttattaaaacattgactgctgaaagtaccctgaaagttcttagtctcacacctgggagcctctccaaaaaggggaacctgaatcct

SEQ ID NO: 76308 - DNA, 600 bp, Chicken  19866894361345_3
attatagccaggtgcctgggctgcatggggacctgccaccaccaccccacatggctgcggtgccaacagcagcatgcagcccagaaggtcagcaggatctcacctgcttgactccacaatctgtcttctttgtgatttgcctcgggtgatttttattattctgrggaggcttgcatcaaggatcaactatgagtagtttatgaacttygaaaatgacttcagttgaaataccagacttgaatgactctaagaggccagacttttggagtatgatgaactcccagttccctgtccactggrttctattgacatattttgcacttcaagtcaggctcatgtactaattgcttttaaaaatgttatccttggtaggttaacccaaaatttctgtatttctgcaagtcaaagtcagcacttcaattttattaaaacattgactgctgaaagtaccctgaaagttcttagtctcacacctgggagcctctccaaaaaggggaacctgaatcctccagacagcaggactcaagcaagcaagcaatttgtcctggcaaacaaacagctttccctggctggaatgtgaactctttaagggcactcttt

SEQ ID NO: 76309 - DNA, 599 bp, Chicken  19866894361352_1
  misc_feature (1)..(153): n is any nucleotide
nnnnnnnnnnnnnnnnnnnnnnnnnnnnnnnnnnnnnnnnnnnnnnnnnnnnnnnnnnnnnnnnnnnnnnnnnnnnnnnnnnnnnnnnnnnnnnnnnnnnnnnnnnnnnnnnnnnnnnnnnnnnnnnnnnnnnnnnnnnnnnnnnnnnnnnnntgtccttggcttacctcggatctcgcagttgtgctcatcctgcagtacagcaagggcggcggcgtggttgttttccagctgtaatattgaagcttggtgggcagctgtgatgtcggacacctgttcaatgacagcagatggaaacamgggcacacggttagacgtgctgcagcacactgacaagccactgttagacagctgcagtgagctggaaacagcaaagggatctactgagtgtgacactccctgtacacgagccaggcttattcattacgaaagaggcctgttacctccttgagcgtcagcattacctccactgctgctcgtcgcttytctcttccagttttaaaatgatgaatgaggtacataagaaagcacaaagcaaaaatgtgaaaaaaaggctgcgttcaaaaatctcaacattcaattaatctaaattgcattca

SEQ ID NO: 76310 - DNA, 600 bp, Chicken  19866894361352_2
ctcatcctgcagtacagcaagggcggcggcgtggttgttttccagctgtaatattgaagcttggtgggcagctgtgatgtcggacacctgttcaatgacagcagatggaaacamgggcacacggttagacgtgctgcagcacactgacaagccactgttagacagctgcagtgagctggaaacagcaaagggatctactgagtgtgacactccctgtacacgagccaggcttattcattacgaaagaggcctgttacctccttgagcgtcagcattacctccactgctgctcgtcgcttytctcttccagttttaaaatgatgaatgaggtacataagaaagcacaaagcaaaaatgtgaaaaaaaggctgcgttcaaaaatctcaacattcaattaatctaaattgcattcatagcctggctccctctgacggtcagatacacttgcacwgttcagagtaatcctayttttctctttgtggcgctctgctgcagtgagtttaattgcasagtcttgaattatctttcatggaaagtgcctatgaattattcatagttgtaaaatattcatttcttgagaaacactaaacttatcatcag

SEQ ID NO: 76311 - DNA, 600 bp, Chicken  19866894361352_3
ccactgttagacagctgcagtgagctggaaacagcaaagggatctactgagtgtgacactccctgtacacgagccaggcttattcattacgaaagaggcctgttacctccttgagcgtcagcattacctccactgctgctcgtcgcttytctcttccagttttaaaatgatgaatgaggtacataagaaagcacaaagcaaaaatgtgaaaaaaaggctgcgttcaaaaatctcaacattcaattaatctaaattgcattcatagcctggctccctctgacggtcagatacacttgcacwgttcagagtaatcctayttttctctttgtggcgctctgctgcagtgagtttaattgcasagtcttgaattatctttcatggaaagtgcctatgaattattcatagttgtaaaatattcatttcttgagaaacactaaacttatcatcagtttaaaaatgaatcacaatctatcacacttctacttgaaaatgagcatcctacaaagccatcgatacgcaagttccaaagtcctcctgaatcctcttctttgagtccacatccaataaactgatgaaagacatgacagcacctgctctgat

SEQ ID NO: 76312 - DNA, 600 bp, Chicken  19866894361352_4
cagtgagctggaaacagcaaagggatctactgagtgtgacactccctgtacacgagccaggcttattcattacgaaagaggcctgttacctccttgagcgtcagcattacctccactgctgctcgtcgcttytctcttccagttttaaaatgatgaatgaggtacataagaaagcacaaagcaaaaatgtgaaaaaaaggctgcgttcaaaaatctcaacattcaattaatctaaattgcattcatagcctggctccctctgacggtcagatacacttgcacwgttcagagtaatcctayttttctctttgtggcgctctgctgcagtgagtttaattgcasagtcttgaattatctttcatggaaagtgcctatgaattattcatagttgtaaaatattcatttcttgagaaacactaaacttatcatcagtttaaaaatgaatcacaatctatcacacttctacttgaaaatgagcatcctacaaagccatcgatacgcaagttccaaagtcctcctgaatcctcttctttgagtccacatccaataaactgatgaaagacatgacagcacctgctctgatctgcagagattccttct

SEQ ID NO: 76313 - DNA, 600 bp, Chicken  19866894361352_5
tccctgtacacgagccaggcttattcattacgaaagaggcctgttacctccttgagcgtcagcattacctccactgctgctcgtcgcttytctcttccagttttaaaatgatgaatgaggtacataagaaagcacaaagcaaaaatgtgaaaaaaaggctgcgttcaaaaatctcaacattcaattaatctaaattgcattcatagcctggctccctctgacggtcagatacacttgcacwgttcagagtaatcctayttttctctttgtggcgctctgctgcagtgagtttaattgcasagtcttgaattatctttcatggaaagtgcctatgaattattcatagttgtaaaatattcatttcttgagaaacactaaacttatcatcagtttaaaaatgaatcacaatctatcacacttctacttgaaaatgagcatcctacaaagccatcgatacgcaagttccaaagtcctcctgaatcctcttctttgagtccacatccaataaactgatgaaagacatgacagcacctgctctgatctgcagagattccttcttcacttctaacctggcactgaactctgagtgtgaggaagacc

SEQ ID NO: 76314 - DNA, 600 bp, Chicken  19866894361371_1
tctgcattttgaagttgctcaaagccttgctgaacttcaccttttagcacaactgttggttgctgttgctattcttatcgtttaatggattttccaagtttcagtgaaagttggtcagcaatatttgagaaatagatttttcaagaggcgttctctctgctgtctcctcatttttaaagtataatgattatattgagaagttctgctatgtctatgtcatgatttggaaaacacagtaggaaggagatgacggtcagacagtgccttttggtacccctaggaaactgctgtcagttcagygtgggcaggatacagccgtgtggagaaatgctgctccccgatggaggaaatgctgcccagctctataggagatgctctcacaggcatttaatgctttcctcactggaaggcaaggactggggaagggtggagagcaaacagacctggagaagcaagacataaaaatcaggctgggcagtattagtgaaggaatggaaactgatggaggttctaaaaatataggagtagctgtgattcagaaggtgagactgaaaagaaaataagcactgatgatgcagatagagtgggtttaagtttcca

SEQ ID NO: 76315 - DNA, 600 bp, Chicken  19866894361371_2
acctgaggacaactctgaagttctcataatgcatcaccatttctctgtcaccaagcagtgctggtgacctccttgctccacagcaatgatcccactgcaccatgacagttgcttacaccatcagtgctagtggcattgcacttttgttgtacggttctgggatccaccttgctcaggatcctcaacagtgataccgttaagtgacggtttgctattttctctcatcttttttacagatcctccgtttaacaaaagttccaggaaacttgtgagtacaagtactcagcagctaggagatgkcagagttacagcatgccgctagcaaaattccagttttcttccttttgtgcaagtgaggtgtgataacaaatcaggtgtgataaggggtggtggtgagtaatatgactgtatgtatagttttctatacatctcatgaatgtaaaattttcatgaggcactgtgaagtgggtgacccagaattccagctgtgaaaaggaacagcagcagctgcttaacgctgcgcagcttcaggcacattctttctctcctctgcagtgataggaaagctaacaagtaacaaaataaataaataaaactaat

SEQ ID NO: 76316 - DNA, 600 bp, Chicken  19866894361375_1
gaagatagcatcatgtggaagtctgcaatgctttagctctactggtgggagctgagagcggatgaacagattgtttggtattaaactaattgatgctaaaagaatttaatattgcatacctgatagtcatcatcattcaaagcctacaaatatcctgagactgctgttcaccatataatgcaaatcattttttgttgtgatttttataaactattttttgtagctgctaaattgcctaggccaactcattcctcatcagagctgtataacgtttcatacacagctgagccttagataggwrtaattgtaacatcacccagttcctatccccaaagttagcagtgtgttttttacctaggattgctgtataaatattggttattggaactaatatgccatttgttgctgacggaactgcttgttctttcctgcaccattgaacgctgtgaactcgttacggtgtatatctcatctaaatttgtttctaggaaagattgtacggggaagtaggcattgtaatagcaataaaaatctttctttgtgtattcaaattaggtcagtttaaaaactggatttttgccttaacatagggtaggattt

SEQ ID NO: 76317 - DNA, 600 bp, Chicken  19866894361375_2
aagatagcatcatgtggaagtctgcaatgctttagctctactggtgggagctgagagcggatgaacagattgtttggtattaaactaattgatgctaaaagaatttaatattgcatacctgatagtcatcatcattcaaagcctacaaatatcctgagactgctgttcaccatataatgcaaatcattttttgttgtgatttttataaactattttttgtagctgctaaattgcctaggccaactcattcctcatcagagctgtataacgtttcatacacagctgagccttagataggwrtaattgtaacatcacccagttcctatccccaaagttagcagtgtgttttttacctaggattgctgtataaatattggttattggaactaatatgccatttgttgctgacggaactgcttgttctttcctgcaccattgaacgctgtgaactcgttacggtgtatatctcatctaaatttgtttctaggaaagattgtacggggaagtaggcattgtaatagcaataaaaatctttctttgtgtattcaaattaggtcagtttaaaaactggatttttgccttaacatagggtaggatttc

SEQ ID NO: 76318 - DNA, 600 bp, Chicken  19866894361376_1
atgagagctaagggaattaatatctctgtctgaggcagaaagcaatgaatttcctgccatgagcttgtgtatatttatcagtgcatttaaagttgggcagttctgctctatactcttctttttaatgaaaaaacagcagtattcacagagctattctgcttgtgttatttatagcatgagtaacttaagagtacctctctttatgcttttcaacatgcttaaaactgcttggagaaagcgggctggatgagatgggccactaatctgatccagcctgacaattcaggtatttctatcacrtagcagagatcctactgtactgttcatttatcagctatgtgggaacttaacctaaatgatgcatgaaaatgtattgggcagaaaatctgattaaattcaacatactcacctaaatcaacttttactgtctagtaatccttgtagaatattaaaacttctgccagttttgcttttgatttttctcttgcattacctgccaattttaagcttttattttaaatatcctttttttcctctcatttataattctttccaaagctttggagctgctaaccctccaaatcctttacttcaaacctg

SEQ ID NO: 76319 - DNA, 394 bp, Chicken  19866894361376_2
ctcacctaaatcaacttttactgtctagtaatccttgtagaatattaaaacttctgccagttttgcttttgatttttctcttgcattacctgccaattttaagcttttattttaaatatcctttttttcctctcatttataattctttccaaagctttggagctgctaaccctccaaatcctttacttcaaacctgccctcaccaaatcttatctgagttatcataactctgacccattaaaggagattggaggatgtttggacccatagacagtactattttgcctttggtaaaatcarttaaagataatgaattgtactgctgggaaaacttttcatctgtgcttaagattaaaagaagcccaactgattagaagtaatgcaattcatagtt

SEQ ID NO: 76320 - DNA, 600 bp, Chicken  19866894361378_1
tggtaaatatttacagacaaggcttaacttctaagccaggtaaggtaacaaacacaattaagttgtgagattgtagttctctctttcacttcaagtgttgcaggcagcttgggtgtgcaaagccacgcatgctgaagctgcggtgggagcttcagtgaccaaagtcttaggtacagacaaagccagctgatgcaaaagcaggagttctgcattttacataggattctccaagatagcctttcagttccccttcatcactgaaatgcaaaataatgccaccacagtgaaaagaaacaactrcattgctttttacaaaaaaacaaacaagcacctcaacactgaagccctacacaactttataggaaaagtacagtaggcataaaatgtgctacatattttaattgtcaagatgtaaacggggatttaaagtcatgctatgaagcattacctaaaacatccagctacaacttcagcatgcctgcaggctttttaaagcagttatgggaaattattgcattcaattctgtagcttcaacgccaagctccccaaagggttgttacagtttggcaacaggatggcagttctcccaacactcgcag

SEQ ID NO: 76321 - DNA, 600 bp, Chicken  19866894361384_1
aacccctctcagtttcctctctcagagaaaagaataagttgaatgtacgtcaatggtacatcatcaaggcaagagttcaatgtacagaaagagaataaatgagttcagacttaccctactgaccacggcaaagaaggtaagagaaatggatggaaggaccatgagttgcccaggtttttatacttcatcccaagttgtccaacaacttggaacattctttgtgcatgaaattatttatgagctggtactgattacatggttttttgcctcagtatttgtgcttattactgttttgcttcyttatcttgtggcatgtatatctgaccacaggtttctttcatcttaaaatattctgggccaagttaatttctggtaacattataataattaattcagaatttatccagccttgaataccctttgggatctgcctggtgtcattaaagtagattaagcagaatttgcataatgcagcaccrtggacaagccctcctctgcaaggtaaatgctgttgcaaatcatgatggatttcagcttttatgagtgggaagccagtccatgagcagytgtagctgggagattccagatgctctaagggag

SEQ ID NO: 76322 - DNA, 600 bp, Chicken  19866894361384_2
atacttcatcccaagttgtccaacaacttggaacattctttgtgcatgaaattatttatgagctggtactgattacatggttttttgcctcagtatttgtgcttattactgttttgcttcyttatcttgtggcatgtatatctgaccacaggtttctttcatcttaaaatattctgggccaagttaatttctggtaacattataataattaattcagaatttatccagccttgaataccctttgggatctgcctggtgtcattaaagtagattaagcagaatttgcataatgcagcaccrtggacaagccctcctctgcaaggtaaatgctgttgcaaatcatgatggatttcagcttttatgagtgggaagccagtccatgagcagytgtagctgggagattccagatgctctaagggagaaaaagagttttccagaaaatggcaaggaaggcacacacagttcacacccaactcaggccccaaaatgagagaagaaaccatgaatagtgcgaagggaagggctgtgaaaaactcaatgagagctgggagggactgagaagagttataactttctgcaaaggccatgtagacagaaaag

SEQ ID NO: 76323 - DNA, 600 bp, Chicken  19866894361384_3
ctcagtatttgtgcttattactgttttgcttcyttatcttgtggcatgtatatctgaccacaggtttctttcatcttaaaatattctgggccaagttaatttctggtaacattataataattaattcagaatttatccagccttgaataccctttgggatctgcctggtgtcattaaagtagattaagcagaatttgcataatgcagcaccrtggacaagccctcctctgcaaggtaaatgctgttgcaaatcatgatggatttcagcttttatgagtgggaagccagtccatgagcagytgtagctgggagattccagatgctctaagggagaaaaagagttttccagaaaatggcaaggaaggcacacacagttcacacccaactcaggccccaaaatgagagaagaaaccatgaatagtgcgaagggaagggctgtgaaaaactcaatgagagctgggagggactgagaagagttataactttctgcaaaggccatgtagacagaaaagcatttaagttgctgattctttgacatgaaagaagagtacaaaaaaatcatgtccaatgagatattatcaagctattgtgtttctgtgg

SEQ ID NO: 76324 - DNA, 386 bp, Chicken  19866894361384_4
gtgcgaagggaagggctgtgaaaaactcaatgagagctgggagggactgagaagagttataactttctgcaaaggccatgtagacagaaaagcatttaagttgctgattctttgacatgaaagaagagtacaaaaaaatcatgtccaatgagatattatcaagctattgtgtttctgtggaagactcagaaggaaaatcttatacagcatcttgcttgtctggctccagttctgggctcttaggagctttgtatcccaagagtccatagatatacctcagttcttatctcagacctcatyacatccacagctgcttttagattaacttccatatgggtgaatgtgttgccatttgttctcaagggaagagtcttgcaaaagataag

SEQ ID NO: 76325 - DNA, 600 bp, Chicken  19866894361391_1
gtaaataattccagagtatattaaagcaggagaaatacctgaaataaataattgatggcgatgcagaggggaatgcggtgctggatctgaatctggacctgttaatggtggagagaaatgaaagacccgatccagcaacttccacgcaacgtgtttattggtatttgcgtagtgttttggtctttgccctgtccggcaggggatttggatatttgaacagagcacttacccaaacagcagctggctcctatagccagcagtgtcagagccacacagacaatgcacttctatgctgcactrccatgcattcgcaggctttccttttccagccccctctcctcccacccctcaggaagatggtttatgaactgtgtacaaatgttttcattcaatgggaggaatgttgttttcctaaaatcgggaattaggactggggctcatttcaggaattaaggtgttaagcctcaggaatccaactgcaaagacacatggcatccaaggtacagcaatgccaacaagcaggaatctgggtgcggagactgcaatgttaattggyttttttttaatttttaagataggtttatcctggttagcggaagg

SEQ ID NO: 76326 - DNA, 600 bp, Chicken  19866894361391_2
gcagtgtcagagccacacagacaatgcacttctatgctgcactrccatgcattcgcaggctttccttttccagccccctctcctcccacccctcaggaagatggtttatgaactgtgtacaaatgttttcattcaatgggaggaatgttgttttcctaaaatcgggaattaggactggggctcatttcaggaattaaggtgttaagcctcaggaatccaactgcaaagacacatggcatccaaggtacagcaatgccaacaagcaggaatctgggtgcggagactgcaatgttaattggyttttttttaatttttaagataggtttatcctggttagcggaaggcattttgtgcaccctcgtcgaataartgcttggacaaaagccctgggggacttctttccagaccttgtattcattggaaacgatcgggttgtatcgtcctacttcatccatggtttgctcccctgtgggaatgcagcgcggtggtatcggcacatggctgcctcccaactctgcgcctggggtggaatgcagggagcacagacagagcagcccaggaatgcagtgggtgtttccttgggtcttgtttctgtgtttt

SEQ ID NO: 76327 - DNA, 600 bp, Chicken  19866894361391_3
cagccccctctcctcccacccctcaggaagatggtttatgaactgtgtacaaatgttttcattcaatgggaggaatgttgttttcctaaaatcgggaattaggactggggctcatttcaggaattaaggtgttaagcctcaggaatccaactgcaaagacacatggcatccaaggtacagcaatgccaacaagcaggaatctgggtgcggagactgcaatgttaattggyttttttttaatttttaagataggtttatcctggttagcggaaggcattttgtgcaccctcgtcgaataartgcttggacaaaagccctgggggacttctttccagaccttgtattcattggaaacgatcgggttgtatcgtcctacttcatccatggtttgctcccctgtgggaatgcagcgcggtggtatcggcacatggctgcctcccaactctgcgcctggggtggaatgcagggagcacagacagagcagcccaggaatgcagtgggtgtttccttgggtcttgtttctgtgttttaattgctttaaaaataatagtaagtgtgattaaaaaaaaaaaatagataaaaatttgtgatgtgaagggg

SEQ ID NO: 76328 - DNA, 600 bp, Chicken  19866894361393_1
tcacttataaaagattgctattagcagaaatcttcctgtcacgtatgcagaatgattcttctttccagtatggctttggatacctgcctttatagacattctagaaacctagcttccatctcagatttgcttattttctgatacacattttctgtgccagctgctttgtattttccagactcgagttttcagtactaatttccctttatgcaggtggttgagggctttcttcagttattatttttagaccccaagatccatgtgcttggaattgaggtagatagatagctttccaattaygtttgtataacaattttgcttggggacgtactgtttacacattacagatgcacaccagccaaggtatgtgtgtaaatcaaggattgatttgaaaattaaacttactggccctgtagcaatttctaagtttacastgacaaaacaataacagggaattagagagaacctctcctaaaatcaaatcaagctcttgttttgcagcaagtaattagattgcagtttgtctcactataaaacttactgtggccagtaaattaaactattacttgtcttacaaaaatagttgcctttggactgttt

SEQ ID NO: 76329 - DNA, 600 bp, Chicken  19866894361393_2
tttctgatacacattttctgtgccagctgctttgtattttccagactcgagttttcagtactaatttccctttatgcaggtggttgagggctttcttcagttattatttttagaccccaagatccatgtgcttggaattgaggtagatagatagctttccaattaygtttgtataacaattttgcttggggacgtactgtttacacattacagatgcacaccagccaaggtatgtgtgtaaatcaaggattgatttgaaaattaaacttactggccctgtagcaatttctaagtttacastgacaaaacaataacagggaattagagagaacctctcctaaaatcaaatcaagctcttgttttgcagcaagtaattagattgcagtttgtctcactataaaacttactgtggccagtaaattaaactattacttgtcttacaaaaatagttgcctttggactgtttaactgtggcttttctttgcccatatgttcccttttctgttatcaaatcaaatagtattttttcattaacatcagtggaagccactgctgttacatttgtaaaagtctgtttattctgggcatcattattaaatg

SEQ ID NO: 76330 - DNA, 600 bp, Chicken  19866894361405_1
ataagttcagcatctactttaagtcaagacagagatccagttagaagaggttagacagtgatacatttcattctggtgcaggcatctgatcatctgaattgttcttcaggctccactgatttcactaactagacctctgttgttataatgagaacttaattcacatgtagaaatctacatgtagatgcctaaatttaagtgtttgagtctataggagatttctactcttgcttaaataactattttagttagaatagctgcaaaacatacatctacgtctgagctgttttctgtattctytttgtaattaataatgaagaatctcacttgtgaattgaggttcatctcaccctgcagtaaatacctcaaataagtcagaatgagttgcaccacagaatatgtattatattccactgaaagcaacrgaagactagctcagatgaatgcttatacaagtagggcatgtcccttcttcggtcccaagtgtcattaggagatgaaaagatttaaagattttgaagataataatgttgcttgtagaagwgtttataattgttggtgagattgatctcccaaaggagaacaccattgatgatctca

SEQ ID NO: 76331 - DNA, 600 bp, Chicken  19866894361405_2
taactagacctctgttgttataatgagaacttaattcacatgtagaaatctacatgtagatgcctaaatttaagtgtttgagtctataggagatttctactcttgcttaaataactattttagttagaatagctgcaaaacatacatctacgtctgagctgttttctgtattctytttgtaattaataatgaagaatctcacttgtgaattgaggttcatctcaccctgcagtaaatacctcaaataagtcagaatgagttgcaccacagaatatgtattatattccactgaaagcaacrgaagactagctcagatgaatgcttatacaagtagggcatgtcccttcttcggtcccaagtgtcattaggagatgaaaagatttaaagattttgaagataataatgttgcttgtagaagwgtttataattgttggtgagattgatctcccaaaggagaacaccattgatgatctcatctgaactttaaccaaaagatggtaggtatctgccagatactctgacttcaccatgaagtattaataagtgaagaaagtgagaaatataatgttcagtgtaatgagcacagggaattagaagagt

SEQ ID NO: 76332 - DNA, 600 bp, Chicken  19866894361405_3
ttagttagaatagctgcaaaacatacatctacgtctgagctgttttctgtattctytttgtaattaataatgaagaatctcacttgtgaattgaggttcatctcaccctgcagtaaatacctcaaataagtcagaatgagttgcaccacagaatatgtattatattccactgaaagcaacrgaagactagctcagatgaatgcttatacaagtagggcatgtcccttcttcggtcccaagtgtcattaggagatgaaaagatttaaagattttgaagataataatgttgcttgtagaagwgtttataattgttggtgagattgatctcccaaaggagaacaccattgatgatctcatctgaactttaaccaaaagatggtaggtatctgccagatactctgacttcaccatgaagtattaataagtgaagaaagtgagaaatataatgttcagtgtaatgagcacagggaattagaagagtgacttgagaaactgagctcatgagcttgaaaaattgttactgtttttctcttttgaataggtaaatataaacaagaaccaacagcagttgtcaatgcctaagacgggtgctgttcttta

SEQ ID NO: 76333 - DNA, 600 bp, Chicken  19866894361409_1
ttgctcagcgccccatccagcctgactttcagtatctcctgggatggggcacccaccacctctctgggcaacctgtttcagtgcttcactaccactacctgaaaaacccatactttgaaaacatactactttataagcactacattattggctacaaacctgttcaaatggaacacttcttgccagaagttttattaaatctctagccctgatgattgcatacggatcaaaagtcttcttagtagtagtgactgtcatgcttccttcaattagatccagcgttgcattcacatactgcarcatgtgaaaataaacagcaaagcaatctctaaataagaatctaagatcacatttctggtagcacaaagttaagaaatataaaactacacactgcaccggcatgcaaatccattatgaaaacractctcagcttaaagacattcagacacatacacaaaagaagaagaagaaaaaaaaaaaacagactgacaggctctatgcacctcaaggcctgaaacacatctccctcatctcctttaaagttggcagaccgtggacaatatctgctcctgcagcatacttttatgcaaaagtaacacc

SEQ ID NO: 76334 - DNA, 600 bp, Chicken  19866894361409_2
atactactttataagcactacattattggctacaaacctgttcaaatggaacacttcttgccagaagttttattaaatctctagccctgatgattgcatacggatcaaaagtcttcttagtagtagtgactgtcatgcttccttcaattagatccagcgttgcattcacatactgcarcatgtgaaaataaacagcaaagcaatctctaaataagaatctaagatcacatttctggtagcacaaagttaagaaatataaaactacacactgcaccggcatgcaaatccattatgaaaacractctcagcttaaagacattcagacacatacacaaaagaagaagaagaaaaaaaaaaaacagactgacaggctctatgcacctcaaggcctgaaacacatctccctcatctcctttaaagttggcagaccgtggacaatatctgctcctgcagcatacttttatgcaaaagtaacacctatgcctcccaaataagaaagctcagacccacaacagtaagtactcatacatgctcactcagggctttctggacaagcggccagcactccttcaggtaggcttctctgtacttggggaataa

SEQ ID NO: 76335 - DNA, 600 bp, Chicken  19866894361412_1
ctttgcttgtgatatccccttaaaaactgaaggccaatgcttgattttgtgtacgcatgatggccttttctctataggaatatgaaaccaagcccaggataaactttctgcagcctgaactacgtaagttagcatagagctccagggtgatcctggtgctgcagagcaaagcatgtgtatggcttcatcccaaggccagtatgcagtcttgctgttcagactcttaacagcctttcccagtccagagttctgtgaaatgttggtttgctgctgcattgctctgtctgtccccaccccttrctggtgggagctaccacatagagatgcataccatgtactgggttgcctctgaggtgctggaatagcatcagctgctgggttgcctgtacagcgaaggcgagggctgtgcagatggaggctgcagtactggatggctgttggcgttacagtagcattacagatctcttgcttttgcacttcatcctggagcttgtttttgaatatgaaacattatgtatagctatttatagatttgccaggcctcttctgaagctcaatgatatgcttgttatgaataaactcctctggttctttagactt

SEQ ID NO: 76336 - DNA, 600 bp, Chicken  19866894361415_1
ttcctttcttcttggcagtaggttttatgaaagtgcatagactgaacacgtctgactatgtgccatgctggcatagataaaggatagaatggctgaagtttctccaagcattacctgcagtcatatttgaaattattttgtccaagttgcttttcatttaattctcatcatatactgtgatacctgtatgactgtggacgtacatcagcacgtctttggcttattgtttatagttgatttatccagaatctgcatgtatgttttgtggaggcattcttagccatgtaggactgtgtgacrgtgctcttaagaaacaacaaggagctgcctccatggaattcagatgtaaagtaagacagttcattatgtttcaagtgatttttgctaaaacatagaattaaatgtaagcatgagttgaatttaagcaccgtaacattccaaaagcagtgggttttctttgttggatgctccctaccccaatcatgtcctgtaagtttctgtgaaatacttcacayatactgagtgcccttttaaattaataatccccttaagatgataaacagaaaattcctctttctattcatcagagacttgctcatc

SEQ ID NO: 76337 - DNA, 600 bp, Chicken  19866894361415_10
atttgtcacgattaacaattagttggggaaaasagaaatgccaacttttcacrcatggctttastttaccaccagtttttgaccagaattgatgtccaagtcaagatgcgcatttgcatttccttcttcaaaattgagttgggcagttccaaagmgaggaaastatcaggccagaccagaaggaggcagatggtacagcctctgtttagagccacagagacagagcacgtcataaagatgtggcaactgcagccatgtagctcatacagaggccaaaggaaaaaaaagacgattaaaaasaacaacaaaaaggaggtggtcacaagtttctgarcatttggataggtcaggatctgtgacaaagataaaatctgttgagtgaatgttctgtgagtatccaatgaaaaaaggaatgaggatagggaatctgaaaacttaaacaatatatctgagcatagaaagtgrgaatgacaaaaatgagctattaaaaagaaatctgggcaaactaggaaaggtcgagtcaggcacacaacagcagaaccacagaaagccggacagcttgaagttacctgtcccacaaattaatgaccaacccatttg

SEQ ID NO: 76338 - DNA, 600 bp, Chicken  19866894361415_11
gaaatgccaacttttcacrcatggctttastttaccaccagtttttgaccagaattgatgtccaagtcaagatgcgcatttgcatttccttcttcaaaattgagttgggcagttccaaagmgaggaaastatcaggccagaccagaaggaggcagatggtacagcctctgtttagagccacagagacagagcacgtcataaagatgtggcaactgcagccatgtagctcatacagaggccaaaggaaaaaaaagacgattaaaaasaacaacaaaaaggaggtggtcacaagtttctgarcatttggataggtcaggatctgtgacaaagataaaatctgttgagtgaatgttctgtgagtatccaatgaaaaaaggaatgaggatagggaatctgaaaacttaaacaatatatctgagcatagaaagtgrgaatgacaaaaatgagctattaaaaagaaatctgggcaaactaggaaaggtcgagtcaggcacacaacagcagaaccacagaaagccggacagcttgaagttacctgtcccacaaattaatgaccaacccatttgaacaatgttgtattggcagcttgagtttatactg

SEQ ID NO: 76339 - DNA, 600 bp, Chicken  19866894361415_12
tcaggccagaccagaaggaggcagatggtacagcctctgtttagagccacagagacagagcacgtcataaagatgtggcaactgcagccatgtagctcatacagaggccaaaggaaaaaaaagacgattaaaaasaacaacaaaaaggaggtggtcacaagtttctgarcatttggataggtcaggatctgtgacaaagataaaatctgttgagtgaatgttctgtgagtatccaatgaaaaaaggaatgaggatagggaatctgaaaacttaaacaatatatctgagcatagaaagtgrgaatgacaaaaatgagctattaaaaagaaatctgggcaaactaggaaaggtcgagtcaggcacacaacagcagaaccacagaaagccggacagcttgaagttacctgtcccacaaattaatgaccaacccatttgaacaatgttgtattggcagcttgagtttatactgattcagccgctagatcacgatgtttttgttttggtactagatgtcctaaagtttgaactactgttttgtaagctacggaccaagggatgtgctaaatggtgtgcttcccacttactcaaatgtattgtttc

SEQ ID NO: 76340 - DNA, 600 bp, Chicken  19866894361415_2
ttggcttattgtttatagttgatttatccagaatctgcatgtatgttttgtggaggcattcttagccatgtaggactgtgtgacrgtgctcttaagaaacaacaaggagctgcctccatggaattcagatgtaaagtaagacagttcattatgtttcaagtgatttttgctaaaacatagaattaaatgtaagcatgagttgaatttaagcaccgtaacattccaaaagcagtgggttttctttgttggatgctccctaccccaatcatgtcctgtaagtttctgtgaaatacttcacayatactgagtgcccttttaaattaataatccccttaagatgataaacagaaaattcctctttctattcatcagagacttgctcatctttccagtggagactacagtatgaatacaagttaccctacagatttttgtaacaagtgtcaacttaaaccagttttactactagcttcagtatttgtttttagtaagcaaagtatttattgaaacattaccttgtgtataatgacctaatgcacagatttctcccttcccaaatttccattctttctactgaagtctaaactgcagtaattattt

SEQ ID NO: 76341 - DNA, 600 bp, Chicken  19866894361415_3
ggagactacagtatgaatacaagttaccctacagatttttgtaacaagtgtcaacttaaaccagttttactactagcttcagtatttgtttttagtaagcaaagtatttattgaaacattaccttgtgtataatgacctaatgcacagatttctcccttcccaaatttccattctttctactgaagtctaaactgcagtaattattttagctgtaagacagccatgtgtatgatctataaatatttctattacaaaccatttgctgcttctattaaaatatacttagtgtttaataaaarcttctatttctctgcagcttttctggcacaagacttaaagggcataaaacttgcctgtttgtgaaactaygtacacttacccactctgagaacatttaggtaagtggttgtatgtgagtatacaagtgatcacagctgttttctgcatactacacacacaaaaaagtgtaatttgtagtgttgttctaaaaacttatgtcagtaagttgacatcgatgaaactatacatttcactttgtatatagttataatagtaaatattataatttcaaatattaacatttgcaataaaatttccat

SEQ ID NO: 76342 - DNA, 600 bp, Chicken  19866894361415_4
tactagcttcagtatttgtttttagtaagcaaagtatttattgaaacattaccttgtgtataatgacctaatgcacagatttctcccttcccaaatttccattctttctactgaagtctaaactgcagtaattattttagctgtaagacagccatgtgtatgatctataaatatttctattacaaaccatttgctgcttctattaaaatatacttagtgtttaataaaarcttctatttctctgcagcttttctggcacaagacttaaagggcataaaacttgcctgtttgtgaaactaygtacacttacccactctgagaacatttaggtaagtggttgtatgtgagtatacaagtgatcacagctgttttctgcatactacacacacaaaaaagtgtaatttgtagtgttgttctaaaaacttatgtcagtaagttgacatcgatgaaactatacatttcactttgtatatagttataatagtaaatattataatttcaaatattaacatttgcaataaaatttccatattccacagcattttaaaatatcattgtgattcattaacatttgctaaataagtgatcaactgttggagt

SEQ ID NO: 76343 - DNA, 600 bp, Chicken  19866894361415_5
tagccttccagccagaaaaaatgcacagtgtatccagataggctatcaaggctgcttgctgatagagtcaagtctgctcattcttaggatgacaagaaggtgacagagttgctactatagaaggcatgcgtgggcatactgaatttgtggagagagaagtgatggctgctgtagctgacagaaaatctcactgttatgggaaatgtctagagacagagcttcactctcctgagctaaaatcctatcccctctgatacaccatctccaatttgtcacgattaacaattagttggggaaaasagaaatgccaacttttcacrcatggctttastttaccaccagtttttgaccagaattgatgtccaagtcaagatgcgcatttgcatttccttcttcaaaattgagttgggcagttccaaagmgaggaaastatcaggccagaccagaaggaggcagatggtacagcctctgtttagagccacagagacagagcacgtcataaagatgtggcaactgcagccatgtagctcatacagaggccaaaggaaaaaaaagacgattaaaaasaacaacaaaaaggaggtggtcacaagtttctga

SEQ ID NO: 76344 - DNA, 600 bp, Chicken  19866894361415_6
atgcacagtgtatccagataggctatcaaggctgcttgctgatagagtcaagtctgctcattcttaggatgacaagaaggtgacagagttgctactatagaaggcatgcgtgggcatactgaatttgtggagagagaagtgatggctgctgtagctgacagaaaatctcactgttatgggaaatgtctagagacagagcttcactctcctgagctaaaatcctatcccctctgatacaccatctccaatttgtcacgattaacaattagttggggaaaasagaaatgccaacttttcacrcatggctttastttaccaccagtttttgaccagaattgatgtccaagtcaagatgcgcatttgcatttccttcttcaaaattgagttgggcagttccaaagmgaggaaastatcaggccagaccagaaggaggcagatggtacagcctctgtttagagccacagagacagagcacgtcataaagatgtggcaactgcagccatgtagctcatacagaggccaaaggaaaaaaaagacgattaaaaasaacaacaaaaaggaggtggtcacaagtttctgarcatttggataggtcaggat

SEQ ID NO: 76345 - DNA, 600 bp, Chicken  19866894361415_7
atccagataggctatcaaggctgcttgctgatagagtcaagtctgctcattcttaggatgacaagaaggtgacagagttgctactatagaaggcatgcgtgggcatactgaatttgtggagagagaagtgatggctgctgtagctgacagaaaatctcactgttatgggaaatgtctagagacagagcttcactctcctgagctaaaatcctatcccctctgatacaccatctccaatttgtcacgattaacaattagttggggaaaasagaaatgccaacttttcacrcatggctttastttaccaccagtttttgaccagaattgatgtccaagtcaagatgcgcatttgcatttccttcttcaaaattgagttgggcagttccaaagmgaggaaastatcaggccagaccagaaggaggcagatggtacagcctctgtttagagccacagagacagagcacgtcataaagatgtggcaactgcagccatgtagctcatacagaggccaaaggaaaaaaaagacgattaaaaasaacaacaaaaaggaggtggtcacaagtttctgarcatttggataggtcaggatctgtgacaaag

SEQ ID NO: 76346 - DNA, 600 bp, Chicken  19866894361415_8
ggcatgcgtgggcatactgaatttgtggagagagaagtgatggctgctgtagctgacagaaaatctcactgttatgggaaatgtctagagacagagcttcactctcctgagctaaaatcctatcccctctgatacaccatctccaatttgtcacgattaacaattagttggggaaaasagaaatgccaacttttcacrcatggctttastttaccaccagtttttgaccagaattgatgtccaagtcaagatgcgcatttgcatttccttcttcaaaattgagttgggcagttccaaagmgaggaaastatcaggccagaccagaaggaggcagatggtacagcctctgtttagagccacagagacagagcacgtcataaagatgtggcaactgcagccatgtagctcatacagaggccaaaggaaaaaaaagacgattaaaaasaacaacaaaaaggaggtggtcacaagtttctgarcatttggataggtcaggatctgtgacaaagataaaatctgttgagtgaatgttctgtgagtatccaatgaaaaaaggaatgaggatagggaatctgaaaacttaaacaatatatctgagca

SEQ ID NO: 76347 - DNA, 600 bp, Chicken  19866894361415_9
tgggcatactgaatttgtggagagagaagtgatggctgctgtagctgacagaaaatctcactgttatgggaaatgtctagagacagagcttcactctcctgagctaaaatcctatcccctctgatacaccatctccaatttgtcacgattaacaattagttggggaaaasagaaatgccaacttttcacrcatggctttastttaccaccagtttttgaccagaattgatgtccaagtcaagatgcgcatttgcatttccttcttcaaaattgagttgggcagttccaaagmgaggaaastatcaggccagaccagaaggaggcagatggtacagcctctgtttagagccacagagacagagcacgtcataaagatgtggcaactgcagccatgtagctcatacagaggccaaaggaaaaaaaagacgattaaaaasaacaacaaaaaggaggtggtcacaagtttctgarcatttggataggtcaggatctgtgacaaagataaaatctgttgagtgaatgttctgtgagtatccaatgaaaaaaggaatgaggatagggaatctgaaaacttaaacaatatatctgagcatagaaagt

SEQ ID NO: 76348 - DNA, 600 bp, Chicken  19866894361417_1
ctagctatttctggctagtacgtgcctcatgtgagaagtgctgtatttttggacacctctgagggcaagcgagtacccttgcaggcatggatgggagcaggaggcaaggagatttctgaactttaagagctacgaaggatgtctattgaagataccttgattggtcaaggaagccttgtgtcagggaggcgtcatgaggagtgctgttgtggctagggagtgtatcgcaagcaagataatgagtctaattggtttcactgaacaaccacagtatgtgccaagtgtcacattcatgaaacragctgatcctcagtgaaatcttacaaccaacttgcctgcaataaatataagtagcatgaagctatctgcaaaagtagatcaatagggataccgtatgagtgtaagtcaggtaggactgaatcagggttgggcttcaggagaactcacaggctgctggcagcaatgggttgaaatgggtgtgtgctgtagggagaaaggccataaatcatggctgtcctggtgtagcgtgggtagaggatggctgcagtggagcactgtgccaacaggcggtgtgcctctgccactgccctgcattctgcg

SEQ ID NO: 76349 - DNA, 600 bp, Chicken  19866894361417_2
accaacttgcctgcaataaatataagtagcatgaagctatctgcaaaagtagatcaatagggataccgtatgagtgtaagtcaggtaggactgaatcagggttgggcttcaggagaactcacaggctgctggcagcaatgggttgaaatgggtgtgtgctgtagggagaaaggccataaatcatggctgtcctggtgtagcgtgggtagaggatggctgcagtggagcactgtgccaacaggcggtgtgcctctgccactgccctgcattctgcgcatcagcgctctgctgttgggaacrtgccaggaatcagccctaccagttactgcctgcrtggacccctgctggggtgaattcagttctccagatggatgcttccttttccttttttttttttttgtgtgtgtgtgtgtgttatgtgaaaaattcaaaagctgctggtaattgatcattcttctattttggtccccggtgttacaagtgccagtagaaaagagggtggcttctcccacagaattagtgttttctttgtcaataatggtaattcttactatgcgtattcttccaatcttacctttccttcccggggtttccttcagt

SEQ ID NO: 76350 - DNA, 600 bp, Chicken  19866894361417_3
agctatctgcaaaagtagatcaatagggataccgtatgagtgtaagtcaggtaggactgaatcagggttgggcttcaggagaactcacaggctgctggcagcaatgggttgaaatgggtgtgtgctgtagggagaaaggccataaatcatggctgtcctggtgtagcgtgggtagaggatggctgcagtggagcactgtgccaacaggcggtgtgcctctgccactgccctgcattctgcgcatcagcgctctgctgttgggaacrtgccaggaatcagccctaccagttactgcctgcrtggacccctgctggggtgaattcagttctccagatggatgcttccttttccttttttttttttttgtgtgtgtgtgtgtgttatgtgaaaaattcaaaagctgctggtaattgatcattcttctattttggtccccggtgttacaagtgccagtagaaaagagggtggcttctcccacagaattagtgttttctttgtcaataatggtaattcttactatgcgtattcttccaatcttacctttccttcccggggtttccttcagtagtcgtatgtagcctagtcatttctctctttaat

SEQ ID NO: 76351 - DNA, 600 bp, Chicken  19866894361433_1
agcaacctcttcccagtcagcccccacacgagcaggcaccccactgaaaggtcactcgtactgcattcagcgcaggggaagggctgccacagaagaggtatggtcaccaggagggttgcgggctcacacaatgacctgctgacaaagccatgaatgagtgactgaatgaatgcactgcctggacgcgaagccaagaggatttgtgaaagaattatgtcagagcatctcatcagagctcacaggggctgttctctgctagctgagtttgaatgtgtccctcccaggatgctgacaaagtgsgaacatcaccaggccttcccatggaaggtaggctcagacacatcctaagcctctgacgggctgttcatggtttgctctgccatgctgggtagccaaattcagctccagtgttttcccacattatccccttacaggtcaactgagcacactgagtatgggcaaagatgctctcacttcatcagtctgaaatattcctacaacaaagcaaagctcctctgaggctagagagtataagttctgtgcctccagattactgttaaaattaaaaacattcattaaaaacagtgcttcttttagaat

SEQ ID NO: 76352 - DNA, 600 bp, Chicken  19866894361434_1
aacaatgcctaaatacagtttgtatgtatagtagatggcaagaaaaggaataacaatatcttaatgataattagtaaacataatcatgaagcttcttaaagaaaatattaagctctgagtattcatggggtaacttccacgtgttggtttctcactcggatagttatacctttggaatggcttgcctgtggttacagcctgctcttggataaggtgaggggactcctggtaaggctgtccttgtttgtaacaacctgaaccacggatacaggagcagccccagctgaatgggaggtgccsggggctgagtgctgtgcctgggagtgggaggcatggccgggaagactgcagcactccagtgctgaggttgccgggytgggatccattccttgctcacttgttgcctgggagacaaatactatccagggatttttttcctttcttgctggtttttgattggagacactattgacttttggcttggaggaggtagtgaagcagcacgccaagtgtcatgagatggaaattaatcgctaaccgattggtctgagttccagtgatttcctttcctgtgactgctctgtgtatggaagactaatg

SEQ ID NO: 76353 - DNA, 600 bp, Chicken  19866894361434_2
aacataatcatgaagcttcttaaagaaaatattaagctctgagtattcatggggtaacttccacgtgttggtttctcactcggatagttatacctttggaatggcttgcctgtggttacagcctgctcttggataaggtgaggggactcctggtaaggctgtccttgtttgtaacaacctgaaccacggatacaggagcagccccagctgaatgggaggtgccgggggctgagtgctgtgcctgggagtgggaggcatggccgggaagactgcagcactccagtgctgaggttgccgggytgggatccattccttgctcacttgttgcctgggagacaaatactatccagggatttttttcctttcttgctggtttttgattggagacactattgacttttggcttggaggaggtagtgaagcagcacgccaagtgtcatgagatggaaattaatcgctaaccgattggtctgagttccagtgatttcctttcctgtgactgctctgtgtatggaagactaatgacacatcttcacagacagctaacggagctgttcacacctcaggctgtcaggaaggagccttaaccaggggacactt

SEQ ID NO: 76354 - DNA, 600 bp, Chicken  19866894361434_3
ttttgattggagacactattgacttttggcttggaggaggtagtgaagcagcacgccaagtgtcatgagatggaaattaatcgctaaccgattggtctgagttccagtgatttcctttcctgtgactgctctgtgtatggaagactaatgacacatcttcacagacagctaacggagctgttcacacctcaggctgtcaggaaggagccttaaccaggggacacttcagttttctttgtgtttctgtctgttgtgtgattgtggcagtgcaaaggtaaatatcatagaaaaagaactttscrtggttgragagctttgctttaaattgtgtttattgttgctgctaaattatacatcagctcagctgcagtgaaaatagggcaaaatatattagcgaaaaaatatagcactgccttctcagtgtttcctctaacaagaataccttcccaatctcttgtgtgagagtttctgttttccactgagattatttttggctttcacaaggatatccgcaagccaaatgaatgcagcatagcagcgatgcatggtttgaagtcagccttcggcagtgacctcaccctgtaaaccccttgactcgtg

SEQ ID NO: 76355 - DNA, 600 bp, Chicken  19866894361434_4
ttgattggagacactattgacttttggcttggaggaggtagtgaagcagcacgccaagtgtcatgagatggaaattaatcgctaaccgattggtctgagttccagtgatttcctttcctgtgactgctctgtgtatggaagactaatgacacatcttcacagacagctaacggagctgttcacacctcaggctgtcaggaaggagccttaaccaggggacacttcagttttctttgtgtttctgtctgttgtgtgattgtggcagtgcaaaggtaaatatcatagaaaaagaactttscrtggttgragagctttgctttaaattgtgtttattgttgctgctaaattatacatcagctcagctgcagtgaaaatagggcaaaatatattagcgaaaaaatatagcactgccttctcagtgtttcctctaacaagaataccttcccaatctcttgtgtgagagtttctgttttccactgagattatttttggctttcacaaggatatccgcaagccaaatgaatgcagcatagcagcgatgcatggtttgaagtcagccttcggcagtgacctcaccctgtaaaccccttgactcgtgct

SEQ ID NO: 76356 - DNA, 600 bp, Chicken  19866894361434_5
gagacactattgacttttggcttggaggaggtagtgaagcagcacgccaagtgtcatgagatggaaattaatcgctaaccgattggtctgagttccagtgatttcctttcctgtgactgctctgtgtatggaagactaatgacacatcttcacagacagctaacggagctgttcacacctcaggctgtcaggaaggagccttaaccaggggacacttcagttttctttgtgtttctgtctgttgtgtgattgtggcagtgcaaaggtaaatatcatagaaaaagaactttscrtggttgragagctttgctttaaattgtgtttattgttgctgctaaattatacatcagctcagctgcagtgaaaatagggcaaaatatattagcgaaaaaatatagcactgccttctcagtgtttcctctaacaagaataccttcccaatctcttgtgtgagagtttctgttttccactgagattatttttggctttcacaaggatatccgcaagccaaatgaatgcagcatagcagcgatgcatggtttgaagtcagccttcggcagtgacctcaccctgtaaaccccttgactcgtgctcactctg

SEQ ID NO: 76357 - DNA, 600 bp, Chicken  19866894361435_1
ttagtatttcatatttcagttttccctcttcaaagaattaagctataatgtgcatttgtgttctgtttgaattctccatgccaatcaccacagagatgcttgcaactcacactccttttgtgcagccacatagcatcacagtgtggaataatttacttctcaaaagctgctattcatggtttctgttctaccagaagagcttgcccaaacattttgtctgtttgagatccattcctcctaaccatctccccaggtataaatagcatctccttgtcctccctatatttattttcatcaaamaggcaagggctgtgtgacatctgttatgacatttccatgcaaaatgcatgaagagagctttgcaacacattgcagtggggagaaccacaaatgcttcgtgccagtggggtgcagtaagtgttgagctctccaaaagcatcctcaggaggcacgtggaatgcactgcctctgggcaccccatggtttggttgctctcagttgggttacttggagctccctcagataaaaagggcttaaaactcagccttcggcctggcctcctctacttgtgttttaaatgcagaagcgctttttaagcaa

SEQ ID NO: 76358 - DNA, 599 bp, Chicken  19866894361437_1
  misc_feature (1)..(80): n is any nucleotide
nnnnnnnnnnnnnnnnnnnnnnnnnnnnnnnnnnnnnnnnnnnnnnnnnnnnnnnnnnnnnnnnnnnnnnnnnnnnnnnngaagggccttcagaaaatggtaggaatgtacaggtttaaacatggagaaccaacaaaccagatatttctgatacgtaccacttatacagtcacacaacttgaactgtaagttttatctcacctaactagtctttctaccacagaactgaaaatatcctttccccagtgataacaaaggaaagtcttacaacgtctacaagtgcagcttttaggaaacagygcttaacatgaacagtgtactccaaataaattatagatttaaatgtttccttttgctcttcttcatacaagaatacatttttaagagacaaatggctatcaaaggtactcagaatgcagttgagtccttcaaacacaaatttaggttataacagtcctcactttaaggcaagcctatgccttagtttctgctcatgcctaacaagagcatttttgttcatttggtttcctttggaccacacagtttttttgtgctcaagctattttaatcacaattttatctgaagtccaattaattgt

SEQ ID NO: 76359 - DNA, 600 bp, Chicken  19866894361452_1
aatgtttatatttgagaagttgttgcattctgaaaagagagattgtggtgctgctgagtgagttttgtggcagagaatttcatttaaaaaaatgaaattgaaagggtaacaaaaattatctccaaattcatagtatattatctttaattaatataacctctttgttcagacatcctgtcctaacaggagaaataaagtaatacatgcttaaaaccattaaatcagcctgggtcaaagaatacagcagctcctacactttatttggaccctgatttcctgaaatgtttgggaaaaattaawggaaaaaaaatttctagctgattttcttttccttctcctcacactggcattttcctctttttaagtttgcattttgggagtaattgcagccacatcagtgggagaaccagagagtatctaacttatttggattcatttttcttttttttcagactgacaggaattgaatttgtataggtctttgcattggagacctcctatgtggagcagcatctacagtagcagctgatctgagcagacggaaattagaaggaaaagggccacactggaaaacatacagtgggaacaccccagaaaaga

SEQ ID NO: 76360 - DNA, 600 bp, Chicken  19866894361455_1
agcttctcaaggctgtaaccatcacacttaatttggtcacaggtgaaaatgagtcatcagggctcttccttgtcctcgtttatttatgtatttgaaaagcagtgctcagggccgtctctcttgattatttgactgtcagtctctacttgagaggccgagctctgaagtaataggtgaagttgaaggtcaagactctggcataaaggagtgtttctttcatgaggcttgcctacattatttctggctgaagtgaatgacatttaacgcctcttttttcactgttaactatgagtatttctrtgtgaagctgtggcttccaattgtaaccgtaaaatcagacaagctttcaaatcctcagaatggtcagcaggtgtttcattttagttttgatgagtctaaaatgatgacattcagtaatcgttatgatttctgtcacctcacggttttgttgatttggtggctttggtttttcttcttcctgtctgggacagctttataaatagtcttctgtgatatctagacagctttgtttttcctgatttcaatttctttcaatttccaaaatgtaaattaggttcaatttttcactccgatagcata

SEQ ID NO: 76361 - DNA, 600 bp, Chicken  19866894361456_1
tccctttgcttatctccatacaaacgtaacctggtaggtcacaccaagggctggattctttcagccttctcagggagaactttattctgcctgtctctttcttcctcttagggatcttgagccagttagctgtaatcagcatttctatttactcttagtaagggaaacatcttcactcttctgggaaagatcttaaacgttgttaccctcttctgaaacgtatccagtagaattggtgttcaatctgcatgatgtgaagatctgtctgatgcaccctgtgtgtgtcagcctcaaaggtcycaatttccaggcataatgcaaggttaattttattgccaactaggatgtgggacttgtactttagttttatttgacaagcgygcttgtttctgtgatgtgttctggccatcctaagtcattaagtctttgattttagctgcacggttcttaaatgctgaaagtgtttgagaagctgttttgcrcggcagagggagttgggcaaagaagatggttttcataaccatttaaaaagagaagttgaccaaaattatctttggtcctcacatttgaaataaaggggtgaagagaaataacatatgc

SEQ ID NO: 76362 - DNA, 600 bp, Chicken  19866894361456_2
ttattctgcctgtctctttcttcctcttagggatcttgagccagttagctgtaatcagcatttctatttactcttagtaagggaaacatcttcactcttctgggaaagatcttaaacgttgttaccctcttctgaaacgtatccagtagaattggtgttcaatctgcatgatgtgaagatctgtctgatgcaccctgtgtgtgtcagcctcaaaggtcycaatttccaggcataatgcaaggttaattttattgccaactaggatgtgggacttgtactttagttttatttgacaagcgygcttgtttctgtgatgtgttctggccatcctaagtcattaagtctttgattttagctgcacggttcttaaatgctgaaagtgtttgagaagctgttttgcrcggcagagggagttgggcaaagaagatggttttcataaccatttaaaaagagaagttgaccaaaattatctttggtcctcacatttgaaataaaggggtgaagagaaataacatatgcatttttatagcaataattttgtagcatatagatatcctaaatggaagcatttactgtttttaaggaagcgtatctttgcac

SEQ ID NO: 76363 - DNA, 600 bp, Chicken  19866894361456_3
gggaaagatcttaaacgttgttaccctcttctgaaacgtatccagtagaattggtgttcaatctgcatgatgtgaagatctgtctgatgcaccctgtgtgtgtcagcctcaaaggtcycaatttccaggcataatgcaaggttaattttattgccaactaggatgtgggacttgtactttagttttatttgacaagcgygcttgtttctgtgatgtgttctggccatcctaagtcattaagtctttgattttagctgcacggttcttaaatgctgaaagtgtttgagaagctgttttgcrcggcagagggagttgggcaaagaagatggttttcataaccatttaaaaagagaagttgaccaaaattatctttggtcctcacatttgaaataaaggggtgaagagaaataacatatgcatttttatagcaataattttgtagcatatagatatcctaaatggaagcatttactgtttttaaggaagcgtatctttgcaccaggagaagtaacctggggattttaaaacttagctgtttcatgaaaagctaactgaaaaggaggaggagaagatgctgcctggcatgtaatgaaactttaa

SEQ ID NO: 76364 - DNA, 599 bp, Chicken  19866894361462_1
  misc_feature (1)..(94): n is any nucleotide
nnnnnnnnnnnnnnnnnnnnnnnnnnnnnnnnnnnnnnnnnnnnnnnnnnnnnnnnnnnnnnnnnnnnnnnnnnnnnnnnnnnnnnnnnnnnnnatcccagcaggcactcctgggtttggtctgctgcacacagaactggggagagtagaatgtcttcccccaccactgcccagggatgtgaggctgtgcgccctgggtcttacctggcaaagtccctctgaacacagcaagatcaaaagaggctactccagaacttcccccaggcatgcacgccccacaagccttgattcaggcatatrcacttcaggttcccatttgcaagcttggcactcggggagttaaggagcaggaagtgacacacgagctccaagccagcctggagcaggagagcgaagcagcacaccgcagagaaccggaagcatgcagggagctgggagcacgctgcacccatgcacccaccccaaggagcaaactgagctccaagcaaacacctcacatgcccaccaccagccctgatcccaaaagaaaaatatcactgctttgagaattaagtaaatctgaaactgtgacccctcggttcttaaaaaggccaatacat

SEQ ID NO: 76365 - DNA, 600 bp, Chicken  19866894361464_1
gggtttgcagagtgtctgtcttgtatttcacttggccttaaaaactggctgatataagtccgctcagctaattaattaaaacctacacttccactgaaactagcttgcttcactaatgatgccaagggaaacatttctgttggcttcttccaaagtccacaattggtcttacatggacatagcttaaaaagccagaaacagataaattcagtgttactggaaactgttcccagcccaaaactcccactgcaaggaagccactaggaatttcacagtttcaattccagatacggtgctatycaggtcgtcttatgaacctgaagactragatcacagacaacaacgatttcacagacattcacatggtaccccagtagtatctttaacagcaaaaatatattcaccttttcaacttacaacacatgcattcaaagctcatccagttaagggcaacacccctaatctagcacagaatgctgcatatcctttgctccatgtaacacatcttcatcttccatcatctctraaaggraagcaacgtgttacagcagacagtgctctgcgcctcasagacaggagactgcagataaataccatgag

SEQ ID NO: 76366 - DNA, 600 bp, Chicken  19866894361464_2
tcacttggccttaaaaactggctgatataagtccgctcagctaattaattaaaacctacacttccactgaaactagcttgcttcactaatgatgccaagggaaacatttctgttggcttcttccaaagtccacaattggtcttacatggacatagcttaaaaagccagaaacagataaattcagtgttactggaaactgttcccagcccaaaactcccactgcaaggaagccactaggaatttcacagtttcaattccagatacggtgctatycaggtcgtcttatgaacctgaagactragatcacagacaacaacgatttcacagacattcacatggtaccccagtagtatctttaacagcaaaaatatattcaccttttcaacttacaacacatgcattcaaagctcatccagttaagggcaacacccctaatctagcacagaatgctgcatatcctttgctccatgtaacacatcttcatcttccatcatctctraaaggraagcaacgtgttacagcagacagtgctctgcgcctcasagacaggagactgcagataaataccatgagtctgcaagagtttaaacccacttgact

SEQ ID NO: 76367 - DNA, 591 bp, Chicken  19866894361464_3
ttcccagcccaaaactcccactgcaaggaagccactaggaatttcacagtttcaattccagatacggtgctatycaggtcgtcttatgaacctgaagactragatcacagacaacaacgatttcacagacattcacatggtaccccagtagtatctttaacagcaaaaatatattcaccttttcaacttacaacacatgcattcaaagctcatccagttaagggcaacacccctaatctagcacagaatgctgcatatcctttgctccatgtaacacatcttcatcttccatcatctctraaaggraagcaacgtgttacagcagacagtgctctgcgcctcasagacaggagactgcagataaataccatgagtctgcaagagtttaaacccacttgacttcgaggayacctttactatttttttttaatattgagaagctcagttttttccaggatcacggtgctaaatgccagggagatggacttaagatgtgaaaaacagattagatgctaaatgctcccacatttccagattgagctatcatgaatagatgactaagaaagctacgttcaggcaaatacaaaaaaa

SEQ ID NO: 76368 - DNA, 585 bp, Chicken  19866894361464_4
gcccaaaactcccactgcaaggaagccactaggaatttcacagtttcaattccagatacggtgctatycaggtcgtcttatgaacctgaagactragatcacagacaacaacgatttcacagacattcacatggtaccccagtagtatctttaacagcaaaaatatattcaccttttcaacttacaacacatgcattcaaagctcatccagttaagggcaacacccctaatctagcacagaatgctgcatatcctttgctccatgtaacacatcttcatcttccatcatctctraaaggraagcaacgtgttacagcagacagtgctctgcgcctcasagacaggagactgcagataaataccatgagtctgcaagagtttaaacccacttgacttcgaggayacctttactatttttttttaatattgagaagctcagttttttccaggatcacggtgctaaatgccagggagatggacttaagatgtgaaaaacagattagatgctaaatgctcccacatttccagattgagctatcatgaatagatgactaagaaagctacgttcaggcaaatacaaaaaaa

SEQ ID NO: 76369 - DNA, 547 bp, Chicken  19866894361464_5
cacagtttcaattccagatacggtgctatycaggtcgtcttatgaacctgaagactragatcacagacaacaacgatttcacagacattcacatggtaccccagtagtatctttaacagcaaaaatatattcaccttttcaacttacaacacatgcattcaaagctcatccagttaagggcaacacccctaatctagcacagaatgctgcatatcctttgctccatgtaacacatcttcatcttccatcatctctraaaggraagcaacgtgttacagcagacagtgctctgcgcctcasagacaggagactgcagataaataccatgagtctgcaagagtttaaacccacttgacttcgaggayacctttactatttttttttaatattgagaagctcagttttttccaggatcacggtgctaaatgccagggagatggacttaagatgtgaaaaacagattagatgctaaatgctcccacatttccagattgagctatcatgaatagatgactaagaaagctacgttcaggcaaatacaaaaaaa

SEQ ID NO: 76370 - DNA, 482 bp, Chicken  19866894361464_6
gacaacaacgatttcacagacattcacatggtaccccagtagtatctttaacagcaaaaatatattcaccttttcaacttacaacacatgcattcaaagctcatccagttaagggcaacacccctaatctagcacagaatgctgcatatcctttgctccatgtaacacatcttcatcttccatcatctctraaaggraagcaacgtgttacagcagacagtgctctgcgcctcasagacaggagactgcagataaataccatgagtctgcaagagtttaaacccacttgacttcgaggayacctttactatttttttttaatattgagaagctcagttttttccaggatcacggtgctaaatgccagggagatggacttaagatgtgaaaaacagattagatgctaaatgctcccacatttccagattgagctatcatgaatagatgactaagaaagctacgttcaggcaaatacaaaaaaa

SEQ ID NO: 76371 - DNA, 600 bp, Chicken  19866894361472_1
gacaaatgccaccaagattgttctgattaggacaaacattggctatctggtgatttgagccatctcttatgtatgccttttatagattttctttagaatggaatggcatgattagaaagtcccaccatcaagcaaacaagacgacaaaaataaaaataaaagtgacttaagagtagccactcacaactccgagttgatcaaataatttgaacatttgcagaaagagagagcttcaatttattatatctttataaaaataaatatattatattcttagctttgcagaaaacttttttttcractaaaggacacattgagtctgcattaaaatctattggacaaaccttcagtaaagcatgtatcagccgaagtcagtgaagtgtcaccttgcagaaagcaaaggcatagatccatatttcaaggtttgtctttgtattttttgcagcaacaaaaacactttccctctgaaatttacctattctctttttaaagcacaaatgcatcctcggcacatatgcctgtagaatagaacagcatgttagcccagataattcacctagctctaaaactgcatgcttttttttttttttttttcaaaat

SEQ ID NO: 76372 - DNA, 600 bp, Chicken  19866894361474_1
caactattccacgttcagtggagttcaatgtaaaaaaacaaacaagcagaccccaaatgtttagctgtagggatgtactttctgcactggtgcatctaattgtggatcttcgttttctattcagtgatgttcagttcagtgaaaaggaaaatgttgagtcttaaataagaagtttactgattcagtttgttggcatcctctcctcctgagttgtcacagtttgcagtagtatcttgaaaataaatacatgaataaataaataaggtcattggaaggcatctccccaggggaacccttacygcagcacccaaacaaggaggatgtgatgtgccactgtgttaaatgccatggagctgaagttgagaaagtagagcttgttaggcagggctccactcaagcagaggtgctgcacctttttctgagaagccctttccctgcagcctccataacttggtacatacgagaagcatagctcaagtcaacgatgtcactgctctttgtgatgaagaaaaggatgttgtaacrtaccacggatcatttggatcagtgtgtgagtaggaagctttgggctacaygtgctttcattatacattgaagtag

SEQ ID NO: 76373 - DNA, 600 bp, Chicken  19866894361474_2
gtagtatcttgaaaataaatacatgaataaataaataaggtcattggaaggcatctccccaggggaacccttacygcagcacccaaacaaggaggatgtgatgtgccactgtgttaaatgccatggagctgaagttgagaaagtagagcttgttaggcagggctccactcaagcagaggtgctgcacctttttctgagaagccctttccctgcagcctccataacttggtacatacgagaagcatagctcaagtcaacgatgtcactgctctttgtgatgaagaaaaggatgttgtaacrtaccacggatcatttggatcagtgtgtgagtaggaagctttgggctacaygtgctttcattatacattgaagtagccttatgtaactgcagawcacgtacagtacttagacataaacttcagaatctgctgtcttacctgaacttctagacacacaattaccaaccttcctaaaattcccagatggggaggaaaagaaatgaattgcagtattatttttcctcctgttgcacaaaaataactttatccaaaatttcatttggcaacgtactaaaaatgtgcaaacacattctatgatatt

SEQ ID NO: 76374 - DNA, 600 bp, Chicken  19866894361474_3
gcatctccccaggggaacccttacygcagcacccaaacaaggaggatgtgatgtgccactgtgttaaatgccatggagctgaagttgagaaagtagagcttgttaggcagggctccactcaagcagaggtgctgcacctttttctgagaagccctttccctgcagcctccataacttggtacatacgagaagcatagctcaagtcaacgatgtcactgctctttgtgatgaagaaaaggatgttgtaacrtaccacggatcatttggatcagtgtgtgagtaggaagctttgggctacaygtgctttcattatacattgaagtagccttatgtaactgcagawcacgtacagtacttagacataaacttcagaatctgctgtcttacctgaacttctagacacacaattaccaaccttcctaaaattcccagatggggaggaaaagaaatgaattgcagtattatttttcctcctgttgcacaaaaataactttatccaaaatttcatttggcaacgtactaaaaatgtgcaaacacattctatgatatttttattactttgtgtgtctaatttacaaggcagaaaattgattttattaa

SEQ ID NO: 76375 - DNA, 600 bp, Chicken  19866894361474_4
ggatgtgatgtgccactgtgttaaatgccatggagctgaagttgagaaagtagagcttgttaggcagggctccactcaagcagaggtgctgcacctttttctgagaagccctttccctgcagcctccataacttggtacatacgagaagcatagctcaagtcaacgatgtcactgctctttgtgatgaagaaaaggatgttgtaacrtaccacggatcatttggatcagtgtgtgagtaggaagctttgggctacaygtgctttcattatacattgaagtagccttatgtaactgcagawcacgtacagtacttagacataaacttcagaatctgctgtcttacctgaacttctagacacacaattaccaaccttcctaaaattcccagatggggaggaaaagaaatgaattgcagtattatttttcctcctgttgcacaaaaataactttatccaaaatttcatttggcaacgtactaaaaatgtgcaaacacattctatgatatttttattactttgtgtgtctaatttacaaggcagaaaattgattttattaaatagtagtgcataatttaagtaacgtttggcacaaaaccttgg

SEQ ID NO: 76376 - DNA, 600 bp, Chicken  19866894361481_1
aggtgatcctgcccttctagtacacattggtgaggcctcacctggagtactgtgtcctgatgtggagtcttcagtacagaagatacatgaacctgttgaagcatgtccagagaagggcaacaaaaatgatccatggaatggaacacctttcctacaaggacaggctgagaaagctggggttgtacagcctagagaagagaaggctctgggcctttctgtatctaaaggggagctacaggaaagaaggggacagactctttagcagggcctgtgatgatagaacaaagagaaattgtttcragctcaaagagggtagatttaggttagatataaggaaaaggtattttacagtgagattggtgaggcactggcacaggttgcccgggaatgtggttgatgctttatccctggagactttaaaggtatggctgcactaggttttggtgaagacctgatctaactgtggtgttcctgttcattgccagggagttggaccagatggcctttggaggtcccttccaattttaaggattctatgattctatgattttcacctaagtgaagtgcttgagaaacttccatacctttgcataagttcct

SEQ ID NO: 76377 - DNA, 599 bp, Chicken  19866894363479_1
  misc_feature (1)..(164): n is any nucleotide
nnnnnnnnnnnnnnnnnnnnnnnnnnnnnnnnnnnnnnnnnnnnnnnnnnnnnnnnnnnnnnnnnnnnnnnnnnnnnnnnnnnnnnnnnnnnnnnnnnnnnnnnnnnnnnnnnnnnnnnnnnnnnnnnnnnnnnnnnnnnnnnnnnnnnnnnnnnnnnnnnnnnaagggagcagggcaaatcctgggcccgaatttgaaactttttttttttcatttgggggtgattttctgtttgaatttgggagggtttgcccacagcatgggggctgcggctcagaagtgagctgagtgggagtgakgtacacagtttgcaccctgagcaatgatggctctcccaactcagcccatgtggaaacactagtctctccttgcgttctgctacattctgatgccctttcatctgtcacttcaaaaagcaagcagaaacagggaaggaaacttaggtttagcaaagaggrggagcaggaagggttgaccagccttgacctcctctgctgttggagcccaaggctgatggtggggttgtgcctcattggccccagctatgtggagctmatgaggttgtggacagtccggattgccagctgggagatgaacc

SEQ ID NO: 76378 - DNA, 599 bp, Chicken  19866894363479_2
  misc_feature (1)..(5): n is any nucleotide
nnnnnaagggagcagggcaaatcctgggcccgaatttgaaactttttttttttcatttgggggtgattttctgtttgaatttgggagggtttgcccacagcatgggggctgcggctcagaagtgagctgagtgggagtgakgtacacagtttgcaccctgagcaatgatggctctcccaactcagcccatgtggaaacactagtctctccttgcgttctgctacattctgatgccctttcatctgtcacttcaaaaagcaagcagaaacagggaaggaaacttaggtttagcaaagaggrggagcaggaagggttgaccagccttgacctcctctgctgttggagcccaaggctgatggtggggttgtgcctcattggccccagctatgtggagctmatgaggttgtggacagtccggattgccagctgggagatgaaccaatgtggatgggtgctcccygaagtggctggtttctgtcctctgcgtcttggcgcgccagagcagttggctgtgtgggttgtagggtcagggtggttggccacagtgacatttctgagggtaacccagcaaccctggggctttcagtggtggttttctc

SEQ ID NO: 76379 - DNA, 600 bp, Chicken  19866894363479_3
cagcatgggggctgcggctcagaagtgagctgagtgggagtgakgtacacagtttgcaccctgagcaatgatggctctcccaactcagcccatgtggaaacactagtctctccttgcgttctgctacattctgatgccctttcatctgtcacttcaaaaagcaagcagaaacagggaaggaaacttaggtttagcaaagaggrggagcaggaagggttgaccagccttgacctcctctgctgttggagcccaaggctgatggtggggttgtgcctcattggccccagctatgtggagctmatgaggttgtggacagtccggattgccagctgggagatgaaccaatgtggatgggtgctcccygaagtggctggtttctgtcctctgcgtcttggcgcgccagagcagttggctgtgtgggttgtagggtcagggtggttggccacagtgacatttctgagggtaacccagcaaccctggggctttcagtggtggttttctcttcctcctggtcctcctcactcaccctgcagtgccttcgctaaaggcaaattccagttacctggctggttcatgtcttggttttgggggcacttgtca

SEQ ID NO: 76380 - DNA, 600 bp, Chicken  19866894363479_4
agcaatgatggctctcccaactcagcccatgtggaaacactagtctctccttgcgttctgctacattctgatgccctttcatctgtcacttcaaaaagcaagcagaaacagggaaggaaacttaggtttagcaaagaggrggagcaggaagggttgaccagccttgacctcctctgctgttggagcccaaggctgatggtggggttgtgcctcattggccccagctatgtggagctmatgaggttgtggacagtccggattgccagctgggagatgaaccaatgtggatgggtgctcccygaagtggctggtttctgtcctctgcgtcttggcgcgccagagcagttggctgtgtgggttgtagggtcagggtggttggccacagtgacatttctgagggtaacccagcaaccctggggctttcagtggtggttttctcttcctcctggtcctcctcactcaccctgcagtgccttcgctaaaggcaaattccagttacctggctggttcatgtcttggttttgggggcacttgtcaggggtgccgcaattcaccctccacatgatagcagctttactcttctaggttygctgctgaatt

SEQ ID NO: 76381 - DNA, 600 bp, Chicken  19866894363479_5
gggtgctcccygaagtggctggtttctgtcctctgcgtcttggcgcgccagagcagttggctgtgtgggttgtagggtcagggtggttggccacagtgacatttctgagggtaacccagcaaccctggggctttcagtggtggttttctcttcctcctggtcctcctcactcaccctgcagtgccttcgctaaaggcaaattccagttacctggctggttcatgtcttggttttgggggcacttgtcaggggtgccgcaattcaccctccacatgatagcagctttactcttctaggttygctgctgaattagtgagaagaaaatgctgcgtgataaagctataggagtttcagcactgctccagggtccaacccaggctctgacgaggtagctctcagtgagactggacaaggacaacagtcctgtggtagaaccttcttctctatctgcactattgagctccaagagccttttctttcttgcacaagkactttwcywtctagccaaggactgtgagtttgatacaatctctgatgtgtggagggcagttgcccttcatctgaacaacatacaaaccagagtgatgcagtggcagggaa

SEQ ID NO: 76382 - DNA, 600 bp, Chicken  19866894363479_6
taaaggcaaattccagttacctggctggttcatgtcttggttttgggggcacttgtcaggggtgccgcaattcaccctccacatgatagcagctttactcttctaggttygctgctgaattagtgagaagaaaatgctgcgtgataaagctataggagtttcagcactgctccagggtccaacccaggctctgacgaggtagctctcagtgagactggacaaggacaacagtcctgtggtagaaccttcttctctatctgcactattgagctccaagagccttttctttcttgcacaagkactttwcywtctagccaaggactgtgagtttgatacaatctctgatgtgtggagggcagttgcccttcatctgaacaacatacaaaccagagtgatgcagtggcagggaaatcacagctgcccaccttgatctgacagcggtgtgaatggacaggtgaatcatctgccatgatggtaactgggatgaggaggcctaaagcaatgggtaaccatggtaggggacctttttcattatccatagtgaacagtgatccctccatgtcttgtgcagaggtggtttgagggaggattttatttaga

SEQ ID NO: 76383 - DNA, 600 bp, Chicken  19866894363479_7
caaattccagttacctggctggttcatgtcttggttttgggggcacttgtcaggggtgccgcaattcaccctccacatgatagcagctttactcttctaggttygctgctgaattagtgagaagaaaatgctgcgtgataaagctataggagtttcagcactgctccagggtccaacccaggctctgacgaggtagctctcagtgagactggacaaggacaacagtcctgtggtagaaccttcttctctatctgcactattgagctccaagagccttttctttcttgcacaagkactttwcywtctagccaaggactgtgagtttgatacaatctctgatgtgtggagggcagttgcccttcatctgaacaacatacaaaccagagtgatgcagtggcagggaaatcacagctgcccaccttgatctgacagcggtgtgaatggacaggtgaatcatctgccatgatggtaactgggatgaggaggcctaaagcaatgggtaaccatggtaggggacctttttcattatccatagtgaacagtgatccctccatgtcttgtgcagaggtggtttgagggaggattttatttagaccgtta

SEQ ID NO: 76384 - DNA, 600 bp, Chicken  19866894363479_8
aattccagttacctggctggttcatgtcttggttttgggggcacttgtcaggggtgccgcaattcaccctccacatgatagcagctttactcttctaggttygctgctgaattagtgagaagaaaatgctgcgtgataaagctataggagtttcagcactgctccagggtccaacccaggctctgacgaggtagctctcagtgagactggacaaggacaacagtcctgtggtagaaccttcttctctatctgcactattgagctccaagagccttttctttcttgcacaagkactttwcywtctagccaaggactgtgagtttgatacaatctctgatgtgtggagggcagttgcccttcatctgaacaacatacaaaccagagtgatgcagtggcagggaaatcacagctgcccaccttgatctgacagcggtgtgaatggacaggtgaatcatctgccatgatggtaactgggatgaggaggcctaaagcaatgggtaaccatggtaggggacctttttcattatccatagtgaacagtgatccctccatgtcttgtgcagaggtggtttgagggaggattttatttagaccgttaga

SEQ ID NO: 76385 - DNA, 600 bp, Chicken  19866894363479_9
attccagttacctggctggttcatgtcttggttttgggggcacttgtcaggggtgccgcaattcaccctccacatgatagcagctttactcttctaggttygctgctgaattagtgagaagaaaatgctgcgtgataaagctataggagtttcagcactgctccagggtccaacccaggctctgacgaggtagctctcagtgagactggacaaggacaacagtcctgtggtagaaccttcttctctatctgcactattgagctccaagagccttttctttcttgcacaagkactttwcywtctagccaaggactgtgagtttgatacaatctctgatgtgtggagggcagttgcccttcatctgaacaacatacaaaccagagtgatgcagtggcagggaaatcacagctgcccaccttgatctgacagcggtgtgaatggacaggtgaatcatctgccatgatggtaactgggatgaggaggcctaaagcaatgggtaaccatggtaggggacctttttcattatccatagtgaacagtgatccctccatgtcttgtgcagaggtggtttgagggaggattttatttagaccgttagaa

SEQ ID NO: 76386 - DNA, 600 bp, Chicken  19866894363480_1
aagcacagtttataaatcctgaatactatcggattgttccaatggtctgataaaatcttgaaagttttggacatttcagacagaaaaagaaaagttaaaaattgacatttttggccaatttttggtcaaaaaatcaattcataaaaatctctggttacttcttttaaactacactgtttcttctcctgtgcttatacagctacttcaatcgttatatgtttttagagaatattgccaaggtgacaactctattcctgtcattcttcttgagaatttatagaattccttcttcttatcacygactaaagacatgaacgctgatgaataaagactgatgagactacttttacagtaatttatagaagatgctgttcatatcttccctgttacttcaaaccatctccatacaatatttacccccttgtattcaaatctagtgccctacagtgccttatcaggtgacctaagccttgtaaatatccttatctttttgaactattccattgctcacctccagcctctagccttgagccaggaatagactccagggctcactgtggtgcaaactgctgatgagcatgcagttgtgtagtgcactgc

SEQ ID NO: 76387 - DNA, 512 bp, Chicken  19866894363485_1
gcatcaatccatgtgcttgccatacggcgccaactgcaagagctggaagtggagaccttgtcatctgaagggaggtactttggagacagctgactttcttaaatggtcacagatgagcatctgaatcagtggtttaacattttattgccactttgacccacttgcttctttccatgctcaccataagccttttgaccttatgccaagcacttcctacacatgctcatatgttgtcaaatagattatgagcagattcggcccaatacgaaatgataatttgctttctccttctaacaaccrcgggcatggctttgagagcaacatgaattgtccatggcttttgtgtgctgcattggaacttgctgctgccaaagttgtggtctggaagctggtagtgctgtgagcaaaagagcagtgcctgcccactgccattgcttctgctgctcagagccctgtacgggctgtgggatcccaccctgcctgcccccatagcacgatcaagtaccaggtca

SEQ ID NO: 76388 - DNA, 600 bp, Chicken  19866894363489_1
acagaaggaaaaagccccctattatcatgacatgtgcgaactcctgcaaactttcccagaaaaaaaatgcaataagggcataatatcaatacatattttaagagtttgaaagtatttagacttccttgtgtctgtgactttatagagaaatgtatttatactcattaaatcatttatgctgctatttcacttgaaactgaaattcatacttatgtatcagtaacactgatgcaatatagctgacatagggaaaatgccaatagaacagaccagtttctacagagggaatcctttgagtcytctctgcaataattctacctaaagctgatatcagtcttaaggaagactcaaatactgtaagagtatttaaagtccttttgttccagagagatttttacctaggtgaaaacaccaaaatagcaaccaaatcagtaagaagcaatcaagaatttcaaaacaaaatgatggctcagaaaacactatatgctaaacaaatctgaatatgtttcattacagataatatcagtctcagattcattacagcaatcttcacaattgacaaaaattcatagcagagatgaaaagttatcagttttaaaa

SEQ ID NO: 76389 - DNA, 600 bp, Chicken  19866894363492_1
atttaatttaattctgtcctctccttcacaagttgggctctggtacttgctgttggtcagccatcttttgccagctcctttgccttgcgaactcacatcactagatggcagtgtaatggcacacacgtgccctgcctgtactgctggggagaaaagtcaaatttcacctaaaaagttgatgaaatttaaaatttgagtgcaaggcaacttccagaccttaaaacagaagatagtgctttgtccaccttcagttcccttaacgctcaatgctaagacctaggacgaggtcttatgacgcartggcgtaggtgctacagcaatttacagcacctccaggttcagcctatggagctcaagtggatgtcacagccatgcttgcagtttggaggcatgctgtgctaggtcaggaaatctggagaaggcttaaaaagcaaaagcagtaaagcaaataagcatgatattttccttcaagttaaactttcccccactcttcagtttttgcttttgcttccccacaggataatgggataatgttttgagttgctttgcagtcttaggccttgtggcacaacagattaagtaacagcatgtctctgtgca

SEQ ID NO: 76390 - DNA, 600 bp, Chicken  19866894363494_1
gtaaagaacatctgttaacataaaaatatcccagatatattatagtggtttaactgtagttagtttagcagtgcttggttaacatctaaaggttgaggagagaacaaatgtcttatatttggcaattgtaagctagaacttttatccattgcttggctttgtttggctttagacaaagttcctctgtttcccttcaaactgcagtaatccttcagcccttgatgtcatgaattctagttttccataccctttataacactctttgaaccctcagcccatatcgtatgttatgaatattcyttttttggacaaaagatgctggcaatcattttagactgcaggaaccctacctctgacatttccctgtgtgccaaagccatggagcaacagcagaagtgacagaaagaccagtttggaaagattgtttgggatgagtaaaagtaaaggtgggggaagatcaatgaaatacatgacttttaagggtcagaacatcactgcccttgaggggcaattcaaactgtacctagaaatgcctcatgatggtcaaccctcggttaaaggtgggaacatagacagaaggagctgacagaaggacagaag

SEQ ID NO: 76391 - DNA, 599 bp, Chicken  19866894363504_1
  misc_feature (1)..(218): n is any nucleotide
nnnnnnnnnnnnnnnnnnnnnnnnnnnnnnnnnnnnnnnnnnnnnnnnnnnnnnnnnnnnnnnnnnnnnnnnnnnnnnnnnnnnnnnnnnnnnnnnnnnnnnnnnnnnnnnnnnnnnnnnnnnnnnnnnnnnnnnnnnnnnnnnnnnnnnnnnnnnnnnnnnnnnnnnnnnnnnnnnnnnnnnnnnnnnnnnnnnnnnnnnnnnnnnnnnnnnnnnnnataattagagaaggagccttgggtaagctaaagtcaggaatgaagaagaaatatgaagaagaataaagcaaatttgctttakgttaatatttgtggtccccactctaacctttacatctgtcagtattgtgatagctgtaaattaattcactcggttctcgagcaatttattccaagaaattatttagttgcatgcttagtctctgtacgtaactcggcgtaatatattcatttaaaccttgccataaaaacaacaaaaggccaccgcgactgtacaccggatgagaaaaatatgtctcccaatgttttacaggcccaaaactttcacgatgggtttgctatacgtatctacagctagatatacatttcagaataaaccca

SEQ ID NO: 76392 - DNA, 599 bp, Chicken  19866894363506_1
  misc_feature (1)..(53): n is any nucleotide
nnnnnnnnnnnnnnnnnnnnnnnnnnnnnnnnnnnnnnnnnnnnnnnnnnnnnatactagagttaagagggacctcctagttttattttccaagctactcacccataaggtagtcatacagtagtattagttgttggaggtaattatatacaatagtgttgcatattcctcatgctttagaagagagatatgttttcaggctgcaggtctagtagttttaactctgtactctaaaaaatttcccctaaggtaacacagcttttgaggcaaacacatcaatgtttatttcttagatatctmtctctgtaatttaaaaggrtagcttagctgaaagaaaataactgaaattatcaatatttttaatattaagaaatcctgagtatgtgayaccctaattccacagaaaagagctaaagttataatttattacagtggcctaatgaattacattagtaggacaattgagtattccttgtarcaacrctatccatcataaagcattcaaatgtagaagtatttttattttttttgtcacaatttatgtatttatgttaaattttataaggaaatacttygagtcagtatgccctgttttcaga

SEQ ID NO: 76393 - DNA, 599 bp, Chicken  19866894363506_2
  misc_feature (1)..(34): n is any nucleotide
nnnnnnnnnnnnnnnnnnnnnnnnnnnnnnnnnnatactagagttaagagggacctcctagttttattttccaagctactcacccataaggtagtcatacagtagtattagttgttggaggtaattatatacaatagtgttgcatattcctcatgctttagaagagagatatgttttcaggctgcaggtctagtagttttaactctgtactctaaaaaatttcccctaaggtaacacagcttttgaggcaaacacatcaatgtttatttcttagatatctmtctctgtaatttaaaaggrtagcttagctgaaagaaaataactgaaattatcaatatttttaatattaagaaatcctgagtatgtgayaccctaattccacagaaaagagctaaagttataatttattacagtggcctaatgaattacattagtaggacaattgagtattccttgtarcaacrctatccatcataaagcattcaaatgtagaagtatttttattttttttgtcacaatttatgtatttatgttaaattttataaggaaatacttygagtcagtatgccctgttttcagataggtgcctcctcaactac

SEQ ID NO: 76394 - DNA, 600 bp, Chicken  19866894363506_3
tccaagctactcacccataaggtagtcatacagtagtattagttgttggaggtaattatatacaatagtgttgcatattcctcatgctttagaagagagatatgttttcaggctgcaggtctagtagttttaactctgtactctaaaaaatttcccctaaggtaacacagcttttgaggcaaacacatcaatgtttatttcttagatatctmtctctgtaatttaaaaggrtagcttagctgaaagaaaataactgaaattatcaatatttttaatattaagaaatcctgagtatgtgayaccctaattccacagaaaagagctaaagttataatttattacagtggcctaatgaattacattagtaggacaattgagtattccttgtarcaacrctatccatcataaagcattcaaatgtagaagtatttttattttttttgtcacaatttatgtatttatgttaaattttataaggaaatacttygagtcagtatgccctgttttcagataggtgcctcctcaactacaattatgtggcacactgatgacatccagtggttagaaggatgatcttagctatgttttctcyaggagtgt

SEQ ID NO: 76395 - DNA, 600 bp, Chicken  19866894363506_4
agaagagagatatgttttcaggctgcaggtctagtagttttaactctgtactctaaaaaatttcccctaaggtaacacagcttttgaggcaaacacatcaatgtttatttcttagatatctmtctctgtaatttaaaaggrtagcttagctgaaagaaaataactgaaattatcaatatttttaatattaagaaatcctgagtatgtgayaccctaattccacagaaaagagctaaagttataatttattacagtggcctaatgaattacattagtaggacaattgagtattccttgtarcaacrctatccatcataaagcattcaaatgtagaagtatttttattttttttgtcacaatttatgtatttatgttaaattttataaggaaatacttygagtcagtatgccctgttttcagataggtgcctcctcaactacaattatgtggcacactgatgacatccagtggttagaaggatgatcttagctatgttttctcyaggagtgtcagttttaatgcaaatagcaactggtctccttcaaagaaaaagtaggcaatttcaaccaattttctrcataacaaactcagaaattaaga

SEQ ID NO: 76396 - DNA, 600 bp, Chicken  19866894363506_5
agagatatgttttcaggctgcaggtctagtagttttaactctgtactctaaaaaatttcccctaaggtaacacagcttttgaggcaaacacatcaatgtttatttcttagatatctmtctctgtaatttaaaaggrtagcttagctgaaagaaaataactgaaattatcaatatttttaatattaagaaatcctgagtatgtgayaccctaattccacagaaaagagctaaagttataatttattacagtggcctaatgaattacattagtaggacaattgagtattccttgtarcaacrctatccatcataaagcattcaaatgtagaagtatttttattttttttgtcacaatttatgtatttatgttaaattttataaggaaatacttygagtcagtatgccctgttttcagataggtgcctcctcaactacaattatgtggcacactgatgacatccagtggttagaaggatgatcttagctatgttttctcyaggagtgtcagttttaatgcaaatagcaactggtctccttcaaagaaaaagtaggcaatttcaaccaattttctrcataacaaactcagaaattaagacattc

SEQ ID NO: 76397 - DNA, 600 bp, Chicken  19866894363506_6
tcaatgtttatttcttagatatctmtctctgtaatttaaaaggrtagcttagctgaaagaaaataactgaaattatcaatatttttaatattaagaaatcctgagtatgtgayaccctaattccacagaaaagagctaaagttataatttattacagtggcctaatgaattacattagtaggacaattgagtattccttgtarcaacrctatccatcataaagcattcaaatgtagaagtatttttattttttttgtcacaatttatgtatttatgttaaattttataaggaaatacttygagtcagtatgccctgttttcagataggtgcctcctcaactacaattatgtggcacactgatgacatccagtggttagaaggatgatcttagctatgttttctcyaggagtgtcagttttaatgcaaatagcaactggtctccttcaaagaaaaagtaggcaatttcaaccaattttctrcataacaaactcagaaattaagacattcatttatcatccaaattaacctgtaacatttttttttcaattctagaagcaacaagaaaagagaaaaaaaacaggaaaaaaactttgcctgtt

SEQ ID NO: 76398 - DNA, 600 bp, Chicken  19866894363506_7
tatgtgayaccctaattccacagaaaagagctaaagttataatttattacagtggcctaatgaattacattagtaggacaattgagtattccttgtarcaacrctatccatcataaagcattcaaatgtagaagtatttttattttttttgtcacaatttatgtatttatgttaaattttataaggaaatacttygagtcagtatgccctgttttcagataggtgcctcctcaactacaattatgtggcacactgatgacatccagtggttagaaggatgatcttagctatgttttctcyaggagtgtcagttttaatgcaaatagcaactggtctccttcaaagaaaaagtaggcaatttcaaccaattttctrcataacaaactcagaaattaagacattcatttatcatccaaattaacctgtaacatttttttttcaattctagaagcaacaagaaaagagaaaaaaaacaggaaaaaaactttgcctgttcttttttgtgtatcttggtattcatttcaggctctcctagtgctgggaacgaaaatgttgacaacacactgacaggttagtacctggtcccagactctgaagcag

SEQ ID NO: 76399 - DNA, 600 bp, Chicken  19866894363506_8
ggacaattgagtattccttgtarcaacrctatccatcataaagcattcaaatgtagaagtatttttattttttttgtcacaatttatgtatttatgttaaattttataaggaaatacttygagtcagtatgccctgttttcagataggtgcctcctcaactacaattatgtggcacactgatgacatccagtggttagaaggatgatcttagctatgttttctcyaggagtgtcagttttaatgcaaatagcaactggtctccttcaaagaaaaagtaggcaatttcaaccaattttctrcataacaaactcagaaattaagacattcatttatcatccaaattaacctgtaacatttttttttcaattctagaagcaacaagaaaagagaaaaaaaacaggaaaaaaactttgcctgttcttttttgtgtatcttggtattcatttcaggctctcctagtgctgggaacgaaaatgttgacaacacactgacaggttagtacctggtcccagactctgaagcagacmttactagtatccttggttaccttttactgtgactattttctgattagccaagcttcttaacaatcaaaaatt

SEQ ID NO: 76400 - DNA, 600 bp, Chicken  19866894363506_9
agtgtcagttttaatgcaaatagcaactggtctccttcaaagaaaaagtaggcaatttcaaccaattttctrcataacaaactcagaaattaagacattcatttatcatccaaattaacctgtaacatttttttttcaattctagaagcaacaagaaaagagaaaaaaaacaggaaaaaaactttgcctgttcttttttgtgtatcttggtattcatttcaggctctcctagtgctgggaacgaaaatgttgacaacacactgacaggttagtacctggtcccagactctgaagcagacmttactagtatccttggttaccttttactgtgactattttctgattagccaagcttcttaacaatcaaaaattttataacctactgattttattttttctggcattattcttacctgttttggcatctttccactcttcagataggaaagtttttgactggatagtgtatttagaaatagggctatgattgtctgttccacgactccaggtaagtgctacagcagtgtctctaatttcttctattcttatacctcctggagggcctggaggacctgaggaaaagaaaagtaaataaataat

SEQ ID NO: 76401 - DNA, 600 bp, Chicken  19866894363507_1
taaccatcagtgaagtaaagataaggatgaactgcataaaagagaaaactagttgatgatttttaccctactgtgtaaggagacttcagcaaaaggctccctggaggaacatgagatcttgctgtagaattagcagtatttgaaaaatgcatttttcacttggttttgattgggagaatgctttcgcgtggtgaatatggtcacaggtaagccatgctcaatggatgctctgtcagtatttaaaagctgtgactaaagaatgcttttatctacaaggcattataagggaagcatgaataragttgcaccctttttgtttccaataaacactgaagcaagtcagaggtttgaatgtttgtgaatccagtgattgttggatggatagtagtgaacatttctggaaagaaatgccaaattaatcaatggagaggaatctgtattatttataagtataaattgtatcaggaaactgaaagaagatgatgtagttgttgtgccaaaatgaaaatgacccaggctcggtcagttaatatgaacagtatgtacattgttggtagagtggctctgtatatagtaaaagtcaaagaagaagatgatgct

SEQ ID NO: 76402 - DNA, 600 bp, Chicken  19866894363508_1
aggtgggggaagtgcttttctccagagaggaatttatacttttaaacgtattatctagtgggctgatgttaaaagcacatgcatttgtaatacaaagcacgtgcatcactgactgtggcacagataaaatgccaggccttctgttcacaaaggaacaacatatttattagggagggaatacgacggcagttgttctaagtaggatggtctcctaatagagcctgtgcggtgctttgcttagcaaggtttgccacgtgcttggtcttgcagtggtccccagcaaaaactctgtttggagargcaacatctstctgcagctttgcagacatcattaaatccgggtgatgttgagcttcagatgggaatgcggtcaacattaatttgtcactttgactgactcctcacaccatgttttgaccttttcctctgtggaccctttctgagtttcccttatctactcctctcttaatctcctttaatctaaagtgcatcttggtcatactgagaaattctttctcatcttgaaaccacgctttggaaagagaaaaagaaatattaaaaaagggaaatacacggcggcgtgctgctgttggatggtaa

SEQ ID NO: 76403 - DNA, 600 bp, Chicken  19866894363508_2
agtgcttttctccagagaggaatttatacttttaaacgtattatctagtgggctgatgttaaaagcacatgcatttgtaatacaaagcacgtgcatcactgactgtggcacagataaaatgccaggccttctgttcacaaaggaacaacatatttattagggagggaatacgacggcagttgttctaagtaggatggtctcctaatagagcctgtgcggtgctttgcttagcaaggtttgccacgtgcttggtcttgcagtggtccccagcaaaaactctgtttggagargcaacatctstctgcagctttgcagacatcattaaatccgggtgatgttgagcttcagatgggaatgcggtcaacattaatttgtcactttgactgactcctcacaccatgttttgaccttttcctctgtggaccctttctgagtttcccttatctactcctctcttaatctcctttaatctaaagtgcatcttggtcatactgagaaattctttctcatcttgaaaccacgctttggaaagagaaaaagaaatattaaaaaagggaaatacacggcggcgtgctgctgttggatggtaacgcgctgcct

SEQ ID NO: 76404 - DNA, 600 bp, Chicken  19866894363512_1
accacccgcattctattagcaatcactgcccttacttcacacgtgcacttttaaatacctttacattgataatccatccccttaaaaagaagaggaacaagtaagaaaaaaatgggggaaaaaagagggacagggaagaaaaaaaaaaacacagagaaaggtggaaaaaacagaagtattttaaagtactgtatgcgttcttgggtagctacaagtcaatggtaatttatgagaattaggaatgacacttcggccatcaacactaaatagtagaggcatctttgaatgcagacaggagcmaaaaaaaacaaacaaaaaaaaaaaacaaatcacacacacaacccataaatacattttaaatcattcaccagggatttcactttactcgagcgaaaccaaccctgctgcgaaggaccagagccacattcacacatcactccagtcccactgaacctaaacctcatggctgcaacaggccttgaacatcaccacagggctgagagggaacccaagtggtgggcaggccttcccctgttgaatttcagctgcaatgtgctgtgactgcaccatgaaatatttaatacaagcagctcataggcc

SEQ ID NO: 76405 - DNA, 600 bp, Chicken  19866894363514_1
atggtctttcctctcagcacagctgccatgatgaagaatggaaaggaataattattgtgatgtatcagtcaagcatttttgctgccaggcagtttcagagttgatagtatatagtctgaattggatttcaatttcaagatatgatttgtttaaaatacaaaactttaagaaccacactgtggttcattacttcttgttgcaaggaggaatgtggatatatttcccaggaatacacactcataaaacaatgaaatttaggatggcaattttaaatggttataggaagaagtaaaaaatgaygagtgtgcatattcttagcagtcttccactgcaaagttacctgcaaaactttttatggtttatggtaacaggactagtgcagcaaggatagtatttagttctggcctttgtccactaatggcattcatgactattgctatacaacgttttcctcctgaactatagtttgaaaaaaaaaaccaccataaatgacaaagggtttagggatgtctgtaacatttgatgaatgccatgtgagttgtttcatccttattgagtggtttaggaagggtttaagcagaagtagctgtctctgagcag

SEQ ID NO: 76406 - DNA, 600 bp, Chicken  19866894363519_1
caaagctgttacatgtggtgatctgcactgcaaaagctaattctggaatgaaaaatcattgttttaattaagaaatgcatttggctttggattattttttctttccttttggctgcactctttctaaacacagacacagaagatttttttccccccaggtctcgagggagtcttctaaatccacactgcagggcatggagaccatcaggtctgcctgttctcctcctccttctttcttcaagacctcctttttaccttttcttcattctgactgttgagaacagaagatccccattactytgcttcgctgctctgtaaaaagactcttaaaactcctaatatgacttaatcacagctttcagtgcccctgctgccataaaacattattacaatgggctggcacttcatcaattgtaatgtgctgatattacagtcacagccgcgctcctcgtaattgccctgctccaccacagactcraaaggcttcttgatcatggggaatgcctctctgctctgggcctgcaggctgggtttctggtcaaacagctctgctttttgtagtttccagccatccaaacaggatttggaccttccaatact

SEQ ID NO: 76407 - DNA, 600 bp, Chicken  19866894363519_2
atccacactgcagggcatggagaccatcaggtctgcctgttctcctcctccttctttcttcaagacctcctttttaccttttcttcattctgactgttgagaacagaagatccccattactytgcttcgctgctctgtaaaaagactcttaaaactcctaatatgacttaatcacagctttcagtgcccctgctgccataaaacattattacaatgggctggcacttcatcaattgtaatgtgctgatattacagtcacagccgcgctcctcgtaattgccctgctccaccacagactcraaaggcttcttgatcatggggaatgcctctctgctctgggcctgcaggctgggtttctggtcaaacagctctgctttttgtagtttccagccatccaaacaggatttggaccttccaatactcgacacactgttgccctctaattcctgcacacctatatctatcagaacactctatcatcttcattgttctcaattttatatgtagcagcactatacttataacttccaagcagagataatagcagttattaagaatgaaggagctagctcaaagacagtaaaataaaagaaatccagt

SEQ ID NO: 76408 - DNA, 599 bp, Chicken  19866894363520_1
  misc_feature (1)..(149): n is any nucleotide
nnnnnnnnnnnnnnnnnnnnnnnnnnnnnnnnnnnnnnnnnnnnnnnnnnnnnnnnnnnnnnnnnnnnnnnnnnnnnnnnnnnnnnnnnnnnnnnnnnnnnnnnnnnnnnnnnnnnnnnnnnnnnnnnnnnnnnnnnnnnnnnnnnnnnagatgtgtttgaacctgcctcttaagcaggagcgctgtaaagacacatctactaaatgcaggaatgctcttttcctgcagagctcctttccagttttctttgactactgagtaaaattctagatttttatttcatcctctattttgaagtycttggagtgattttatacctgtttgttgtggtcagtgagtcttattatggacagtattccttttcagtacatggtgtttcacacaacaagaaaatactgttgcatacactgcatacactatataatgttgcttcttctatgattcttctgggagactgttcactcattatatctctgtttattaaataacagagtagcagagatcattgaataaatggaaataggttctttaaccacctctgccttcatagtcaatgtagcagtgggraaaaaaaaaagaaaaaaaaaagcttgtatta

SEQ ID NO: 76409 - DNA, 600 bp, Chicken  19866894363520_2
tagatttttatttcatcctctattttgaagtycttggagtgattttatacctgtttgttgtggtcagtgagtcttattatggacagtattccttttcagtacatggtgtttcacacaacaagaaaatactgttgcatacactgcatacactatataatgttgcttcttctatgattcttctgggagactgttcactcattatatctctgtttattaaataacagagtagcagagatcattgaataaatggaaataggttctttaaccacctctgccttcatagtcaatgtagcagtgggraaaaaaaaaagaaaaaaaaaagcttgtattagtcataagggatggtgttattgctttttactccttttaggaatacaaacactcagtcttattcagagtaatgcctcagaacattggccgtgttttttgtcttcagtgcagatgtgactgagtcatctcctcatctctgttctttcctatttatagtacagctatgacataatatctaatgatttctaattctgttgaattattattattattatttaatttgtgtactgtgggtcatccatgctcttaatcatgcaagggtaagcttag

SEQ ID NO: 76410 - DNA, 600 bp, Chicken  19866894363522_1
taccaatgaaaactgcacattcttctttgtacagtctggatgttcacaattctgaaaataaacttagaacaatcccatttgcagacacatttttagtcatggatctggaagaaaagcagttactcctttacctctctttcatgatggtcaagaccttcatcgggatttctgagattgaggacatgcacctcttgtggtaggcctgttgtgcctcggcttgcacagccagataagactgtgaaactctccaacagggcatggactgggtgtgaactgttaacaggagatagcacacactcrctccttggcacaggacctgcaggggaagagatagatgcacatcatttagagaaaaaaagcaattcgtagatcccatctgtcaaataataaagtcccttttggtcacaaaaccaatgggaacacaaacagaggcatcatgttcattatccgcattatgaacaaattttaatttagcatattctcctgagtatgttaaattgttaatttatttctctctctgaaagtctaaatttaaaatacatttttaaaaatttaagatagtgttgtcattatcagaaagaaaattaagggagggaaaaa

SEQ ID NO: 76411 - DNA, 600 bp, Chicken  19866894363526_1
agaattgtttccaaaatacacagttcaaagtgggcagaacaacagaagctgggattgtctcagcaaggagccaataaagaccggaggaatggaggagatgctatttgaggttcttacatgatggcatatcccgaccatattaaccactcacatctcagctcctgaggacaagaggcaccaaagagggctgagaacccctgtgtactttatagctaatggctggaacaggctgtgtgctcacggaaggaccttcctgcagaaaaacccctttccctataatttctctagctctcatttctyaggaattagatgacaaaatggcttttgcttccttcctctccccatttgacttccgtgtgggaagcactcccaagacagccctatcctccccccttcaaatagcagtggggaagcagcacgcgtatcagtgcaggagctgatatgcaaagcacttcacaggcagatgcagtgcaggcagctgaacctgtgcttgcccttagctgaagggcagtgtcgaaacttcattttctttttgattaaccctcggattaagtaatttaaaaggaaggaaagtggttctgctgagtgacactaatttca

SEQ ID NO: 76412 - DNA, 600 bp, Chicken  19866894363526_2
ttgcccttagctgaagggcagtgtcgaaacttcattttctttttgattaaccctcggattaagtaatttaaaaggaaggaaagtggttctgctgagtgacactaatttcagtctgattcattttacaatgttgtaaaaacaattatgtgcctggcaccctccagaacattgagcactgctcagtaaccatcagatctactgagatgaaactgatgcagcttgttagagcagaaacttattgaaaatgtgctttgcagccagagcaagtggacagtggcttatttttttttttgtagtacracctcggctggttttcctcctcttaaataaagaggtgcagttctcagatctcaaggatccgctatcctggtcaaactcactggtcagcactctgatggaccctcaaaattccagttctcctgctttgatttgctgtttcctgactatgattacaatgctggccattttaatccctacactgatactctaattggtcagaacaaggctgtagagatgaatgttatgggatctccccactgcctaagagtcagtaagggctgacactactgaggggcatctttgctgtctgatccagccctg

SEQ ID NO: 76413 - DNA, 465 bp, Chicken  19866894363531_1
gactcccatgctgtgggagctagtgaacagagtgagaacgtaacacgaagagtgtaaagcaccttgaagtgtttcagtctgctttctctgctgcagctgcggaacatctgggtgggaagatcctttggccccgggactccccagagcacagtgtggttactcgagtggtgcacagggagtatgatttgcctctctacatttcctgttgtgaaattttaacttactctgattgttgtttgtttttatatgactgccaagctattggaagttctcccgctcccctcgcctgccctggatgtygcgcacacatgtacacacatggattattagacttgttatagcttcaaataattaaggcacatgctttgcaataaaaaaaaaaatcttaacttctctgtggaaattttgcagggtttagttccatacaccaaaagtttaaccttatgagctatcaaaattcccaat

SEQ ID NO: 76414 - DNA, 599 bp, Chicken  19866894363533_1
  misc_feature (1)..(57): n is any nucleotide
nnnnnnnnnnnnnnnnnnnnnnnnnnnnnnnnnnnnnnnnnnnnnnnnnnnnnnnnnattgaggctttgcaataagcagagcatcagcagtgatcaccgggaggggctccgaccggtcagcagtggggatctgtagtgtgaagatgaaccccaagcaagctcacggggttttctcatcatccttagtctcaggagttgctttgcttgcaataacacaaaggcaacagagagattcggggagttacgtccgtgttcagccgcagaaactcaaccatggcaaatccacagggctctgtgccygaagcgagcaggaagagatgataacaagaagtcccatttccaagcccaagcagacagcacttatgaaggagataactttttgactgcagacaggcggatggttgatcctttttaatagaagttgcatgggacagtatcatagctttcttggcaagccaagaactgctccttgygagttgttccttggaagctcatccctcactctgtttccacacatgacaatgaggcctgaccccatttggggtgaygctgtgagtccatgtgcacccatatctggggtcaggaaatcaggactgggt

SEQ ID NO: 76415 - DNA, 600 bp, Chicken  19866894363533_2
tcatcatccttagtctcaggagttgctttgcttgcaataacacaaaggcaacagagagattcggggagttacgtccgtgttcagccgcagaaactcaaccatggcaaatccacagggctctgtgccygaagcgagcaggaagagatgataacaagaagtcccatttccaagcccaagcagacagcacttatgaaggagataactttttgactgcagacaggcggatggttgatcctttttaatagaagttgcatgggacagtatcatagctttcttggcaagccaagaactgctccttgygagttgttccttggaagctcatccctcactctgtttccacacatgacaatgaggcctgaccccatttggggtgaygctgtgagtccatgtgcacccatatctggggtcaggaaatcaggactgggttgcaagcagagatgtatgcggccccacagycatgcagcagatccaygcagtgctgcttcctggccacattaaggcccctttatgctccttgagccatgtaaagaggcctctaagtgagtgtaaattaaatttaagttagttctgcttccttctgaaggcccctttacggttcca

SEQ ID NO: 76416 - DNA, 600 bp, Chicken  19866894363533_3
cgtgttcagccgcagaaactcaaccatggcaaatccacagggctctgtgccygaagcgagcaggaagagatgataacaagaagtcccatttccaagcccaagcagacagcacttatgaaggagataactttttgactgcagacaggcggatggttgatcctttttaatagaagttgcatgggacagtatcatagctttcttggcaagccaagaactgctccttgygagttgttccttggaagctcatccctcactctgtttccacacatgacaatgaggcctgaccccatttggggtgaygctgtgagtccatgtgcacccatatctggggtcaggaaatcaggactgggttgcaagcagagatgtatgcggccccacagycatgcagcagatccaygcagtgctgcttcctggccacattaaggcccctttatgctccttgagccatgtaaagaggcctctaagtgagtgtaaattaaatttaagttagttctgcttccttctgaaggcccctttacggttccagcgaggggtgaaagtgctgcgctgtgccgacgcgatagggatggagtcccagggaggatacagcaggaatcccac

SEQ ID NO: 76417 - DNA, 600 bp, Chicken  19866894363533_4
agtcccatttccaagcccaagcagacagcacttatgaaggagataactttttgactgcagacaggcggatggttgatcctttttaatagaagttgcatgggacagtatcatagctttcttggcaagccaagaactgctccttgygagttgttccttggaagctcatccctcactctgtttccacacatgacaatgaggcctgaccccatttggggtgaygctgtgagtccatgtgcacccatatctggggtcaggaaatcaggactgggttgcaagcagagatgtatgcggccccacagycatgcagcagatccaygcagtgctgcttcctggccacattaaggcccctttatgctccttgagccatgtaaagaggcctctaagtgagtgtaaattaaatttaagttagttctgcttccttctgaaggcccctttacggttccagcgaggggtgaaagtgctgcgctgtgccgacgcgatagggatggagtcccagggaggatacagcaggaatcccacggccatgctcctccttcccaagggtggagcagatcagggatgtgggttttgaacatccaggaacactttttcccaggcagg

SEQ ID NO: 76418 - DNA, 600 bp, Chicken  19866894363533_5
ccaagcagacagcacttatgaaggagataactttttgactgcagacaggcggatggttgatcctttttaatagaagttgcatgggacagtatcatagctttcttggcaagccaagaactgctccttgygagttgttccttggaagctcatccctcactctgtttccacacatgacaatgaggcctgaccccatttggggtgaygctgtgagtccatgtgcacccatatctggggtcaggaaatcaggactgggttgcaagcagagatgtatgcggccccacagycatgcagcagatccaygcagtgctgcttcctggccacattaaggcccctttatgctccttgagccatgtaaagaggcctctaagtgagtgtaaattaaatttaagttagttctgcttccttctgaaggcccctttacggttccagcgaggggtgaaagtgctgcgctgtgccgacgcgatagggatggagtcccagggaggatacagcaggaatcccacggccatgctcctccttcccaagggtggagcagatcagggatgtgggttttgaacatccaggaacactttttcccaggcaggtgaaggcattctgcca

SEQ ID NO: 76419 - DNA, 599 bp, Chicken  19866894363539_1
  misc_feature (1)..(122): n is any nucleotide
nnnnnnnnnnnnnnnnnnnnnnnnnnnnnnnnnnnnnnnnnnnnnnnnnnnnnnnnnnnnnnnnnnnnnnnnnnnnnnnnnnnnnnnnnnnnnnnnnnnnnnnnnnnnnnnnnnnnnnnnnntttcttgcttttgtggttctgctttatctcagatcaaatcagacctaatcatgtttaccctgtaggacaggtaggagtttcttgctgtttacactgaactacttgttaatctgttgctgtgaagtgctggcagtgaacttggcttgcggcagtcatggggcagggtgcagtacttccyctgggggaactggaatttgtcttgcattgtcaatctcacaaatgatgtccaaataagagaaatcacagcaatgagacgcttagcttcctgcatccttcctgcctgtcggagctggtgctgagatgctccctcttcccctgtsttacctcagtaacacctgcatctggatgtgggtccttggaaatctgcaaggctgcaggagtgagcctgggctcattgctctgcggtgtgcagggctgggcarctttccycytgctcacacctcggttacgttctgcacctctgccatgagcatgata

SEQ ID NO: 76420 - DNA, 600 bp, Chicken  19866894363539_2
gctttatctcagatcaaatcagacctaatcatgtttaccctgtaggacaggtaggagtttcttgctgtttacactgaactacttgttaatctgttgctgtgaagtgctggcagtgaacttggcttgcggcagtcatggggcagggtgcagtacttccyctgggggaactggaatttgtcttgcattgtcaatctcacaaatgatgtccaaataagagaaatcacagcaatgagacgcttagcttcctgcatccttcctgcctgtcggagctggtgctgagatgctccctcttcccctgtsttacctcagtaacacctgcatctggatgtgggtccttggaaatctgcaaggctgcaggagtgagcctgggctcattgctctgcggtgtgcagggctgggcarctttccycytgctcacacctcggttacgttctgcacctctgccatgagcatgatagaagcagatcctgttgccagggctttattgcctctgaattcctgacagaattatttgatctttaagctcaagagaaaacagtttgtatgatgaatggcttggggggagactacggggaaaatggcagttaaagacggggaggg

SEQ ID NO: 76421 - DNA, 600 bp, Chicken  19866894363539_3
agtgctggcagtgaacttggcttgcggcagtcatggggcagggtgcagtacttccyctgggggaactggaatttgtcttgcattgtcaatctcacaaatgatgtccaaataagagaaatcacagcaatgagacgcttagcttcctgcatccttcctgcctgtcggagctggtgctgagatgctccctcttcccctgtsttacctcagtaacacctgcatctggatgtgggtccttggaaatctgcaaggctgcaggagtgagcctgggctcattgctctgcggtgtgcagggctgggcarctttccycytgctcacacctcggttacgttctgcacctctgccatgagcatgatagaagcagatcctgttgccagggctttattgcctctgaattcctgacagaattatttgatctttaagctcaagagaaaacagtttgtatgatgaatggcttggggggagactacggggaaaatggcagttaaagacggggagggggaggcaagtcaagcttttttcttctcaatcaggggtcttctccaactgaagagtttcttctgagcatggctgaagtgaacttaggctcaatttccatcctc

SEQ ID NO: 76422 - DNA, 600 bp, Chicken  19866894363539_4
gcagtgaacttggcttgcggcagtcatggggcagggtgcagtacttccyctgggggaactggaatttgtcttgcattgtcaatctcacaaatgatgtccaaataagagaaatcacagcaatgagacgcttagcttcctgcatccttcctgcctgtcggagctggtgctgagatgctccctcttcccctgtsttacctcagtaacacctgcatctggatgtgggtccttggaaatctgcaaggctgcaggagtgagcctgggctcattgctctgcggtgtgcagggctgggcarctttccycytgctcacacctcggttacgttctgcacctctgccatgagcatgatagaagcagatcctgttgccagggctttattgcctctgaattcctgacagaattatttgatctttaagctcaagagaaaacagtttgtatgatgaatggcttggggggagactacggggaaaatggcagttaaagacggggagggggaggcaagtcaagcttttttcttctcaatcaggggtcttctccaactgaagagtttcttctgagcatggctgaagtgaacttaggctcaatttccatcctccttgtat

SEQ ID NO: 76423 - DNA, 600 bp, Chicken  19866894363539_5
agtgaacttggcttgcggcagtcatggggcagggtgcagtacttccyctgggggaactggaatttgtcttgcattgtcaatctcacaaatgatgtccaaataagagaaatcacagcaatgagacgcttagcttcctgcatccttcctgcctgtcggagctggtgctgagatgctccctcttcccctgtsttacctcagtaacacctgcatctggatgtgggtccttggaaatctgcaaggctgcaggagtgagcctgggctcattgctctgcggtgtgcagggctgggcarctttccycytgctcacacctcggttacgttctgcacctctgccatgagcatgatagaagcagatcctgttgccagggctttattgcctctgaattcctgacagaattatttgatctttaagctcaagagaaaacagtttgtatgatgaatggcttggggggagactacggggaaaatggcagttaaagacggggagggggaggcaagtcaagcttttttcttctcaatcaggggtcttctccaactgaagagtttcttctgagcatggctgaagtgaacttaggctcaatttccatcctccttgtatcc

SEQ ID NO: 76424 - DNA, 600 bp, Chicken  19866894363540_1
atcacagcacctcagttttgaaccaagataagacagaacagctcagcacagcatttttcaaaactggctccgatggtatcttgagaccagaaaacagcaaacaaagaggtggccaaacccagccccggtattttcagttcctttcagctgccacccgtaacacaaagatatcttaagcagacaaacactgagctaagaaatgctgaacctacaggtctaagtgtggtgactctgaagtacgtcacacagcttcactgatcactcacgtttcgtcatttcagtgtaggtaaggaagggctsaggcacagcccttttcaacctsagcaccacagcacacagaaggttaagttctcacattcagcacaacrcarttttccacattcctgtacagtccaaatgaaatgatctccagaaaccattctgaaacacttcatgaaatgttccttttccccttcacccagaatccaagtcaaagacggtaagaaaaagcatctagaaaaagggtgcttttttacacacttgcaaagaaacaataaatccaaactgatacagacccttctatgaggataaatggagtgatgcatacaccaccctcatttt

SEQ ID NO: 76425 - DNA, 600 bp, Chicken  19866894363540_2
ccaagataagacagaacagctcagcacagcatttttcaaaactggctccgatggtatcttgagaccagaaaacagcaaacaaagaggtggccaaacccagccccggtattttcagttcctttcagctgccacccgtaacacaaagatatcttaagcagacaaacactgagctaagaaatgctgaacctacaggtctaagtgtggtgactctgaagtacgtcacacagcttcactgatcactcacgtttcgtcatttcagtgtaggtaaggaagggctsaggcacagcccttttcaacctsagcaccacagcacacagaaggttaagttctcacattcagcacaacrcarttttccacattcctgtacagtccaaatgaaatgatctccagaaaccattctgaaacacttcatgaaatgttccttttccccttcacccagaatccaagtcaaagacggtaagaaaaagcatctagaaaaagggtgcttttttacacacttgcaaagaaacaataaatccaaactgatacagacccttctatgaggataaatggagtgatgcatacaccaccctcatttttatgtctgccaagcacacacag

SEQ ID NO: 76426 - DNA, 600 bp, Chicken  19866894363540_3
tccgatggtatcttgagaccagaaaacagcaaacaaagaggtggccaaacccagccccggtattttcagttcctttcagctgccacccgtaacacaaagatatcttaagcagacaaacactgagctaagaaatgctgaacctacaggtctaagtgtggtgactctgaagtacgtcacacagcttcactgatcactcacgtttcgtcatttcagtgtaggtaaggaagggctsaggcacagcccttttcaacctsagcaccacagcacacagaaggttaagttctcacattcagcacaacrcarttttccacattcctgtacagtccaaatgaaatgatctccagaaaccattctgaaacacttcatgaaatgttccttttccccttcacccagaatccaagtcaaagacggtaagaaaaagcatctagaaaaagggtgcttttttacacacttgcaaagaaacaataaatccaaactgatacagacccttctatgaggataaatggagtgatgcatacaccaccctcatttttatgtctgccaagcacacacagtattcaaaccaaaatcctgttacaaagtcatatatcaaactcagcc

SEQ ID NO: 76427 - DNA, 600 bp, Chicken  19866894363540_4
gatggtatcttgagaccagaaaacagcaaacaaagaggtggccaaacccagccccggtattttcagttcctttcagctgccacccgtaacacaaagatatcttaagcagacaaacactgagctaagaaatgctgaacctacaggtctaagtgtggtgactctgaagtacgtcacacagcttcactgatcactcacgtttcgtcatttcagtgtaggtaaggaagggctsaggcacagcccttttcaacctsagcaccacagcacacagaaggttaagttctcacattcagcacaacrcarttttccacattcctgtacagtccaaatgaaatgatctccagaaaccattctgaaacacttcatgaaatgttccttttccccttcacccagaatccaagtcaaagacggtaagaaaaagcatctagaaaaagggtgcttttttacacacttgcaaagaaacaataaatccaaactgatacagacccttctatgaggataaatggagtgatgcatacaccaccctcatttttatgtctgccaagcacacacagtattcaaaccaaaatcctgttacaaagtcatatatcaaactcagcctgc

SEQ ID NO: 76428 - DNA, 600 bp, Chicken  19866894363541_1
ataaacaaaagtctggttctccacagagaaacaagctaattgtaacactataactactatttttttttttttggtctgtaggctacttgtataatctaagtcattagaagtaatcagaataaatcaaagtgaaacaaaatgctgtgcagagaaagtagttttctatccatttaccacttttcccaaaacaaggcaaagtaaaattagtatcaagtcttgtaagaagagttcactgacactgcagataagaaaatctattaactaacaggagcagtagaggtgcagatactgaaggtattwacaccttttaaaaagcactgacagcttccacttgccccttgagcataatagtttattgtgctacttaaaacaatgctaccytggaactgctgtgtagaaacggttactgcaagaagtcagtctagagcttaaggtgactgtctttcagtccaygggcaagaaaatgaagtcatactggcacatacgcaggaaacttggctgtaaggagtccttggtgtcctcctacgctgaaaatattttgtaacatttccaaccaagcatctctgcccttcatgtgtataacttattgtacgctacttg

SEQ ID NO: 76429 - DNA, 600 bp, Chicken  19866894363541_2
gctacttgtataatctaagtcattagaagtaatcagaataaatcaaagtgaaacaaaatgctgtgcagagaaagtagttttctatccatttaccacttttcccaaaacaaggcaaagtaaaattagtatcaagtcttgtaagaagagttcactgacactgcagataagaaaatctattaactaacaggagcagtagaggtgcagatactgaaggtattwacaccttttaaaaagcactgacagcttccacttgccccttgagcataatagtttattgtgctacttaaaacaatgctaccytggaactgctgtgtagaaacggttactgcaagaagtcagtctagagcttaaggtgactgtctttcagtccaygggcaagaaaatgaagtcatactggcacatacgcaggaaacttggctgtaaggagtccttggtgtcctcctacgctgaaaatattttgtaacatttccaaccaagcatctctgcccttcatgtgtataacttattgtacgctacttggagcagaaactgcatcttatttgggactttgaaagcacctctcatgctttaccatgtactgcagtaaattataactggctt

SEQ ID NO: 76430 - DNA, 600 bp, Chicken  19866894363541_3
agtagttttctatccatttaccacttttcccaaaacaaggcaaagtaaaattagtatcaagtcttgtaagaagagttcactgacactgcagataagaaaatctattaactaacaggagcagtagaggtgcagatactgaaggtattwacaccttttaaaaagcactgacagcttccacttgccccttgagcataatagtttattgtgctacttaaaacaatgctaccytggaactgctgtgtagaaacggttactgcaagaagtcagtctagagcttaaggtgactgtctttcagtccaygggcaagaaaatgaagtcatactggcacatacgcaggaaacttggctgtaaggagtccttggtgtcctcctacgctgaaaatattttgtaacatttccaaccaagcatctctgcccttcatgtgtataacttattgtacgctacttggagcagaaactgcatcttatttgggactttgaaagcacctctcatgctttaccatgtactgcagtaaattataactggcttgagaatcacttaaaagtgtacattttttggctgtccctgttcacattaagtaactgcagtctatcacgtctg

SEQ ID NO: 76431 - DNA, 599 bp, Chicken  19866894363543_1
  misc_feature (1)..(24): n is any nucleotide
nnnnnnnnnnnnnnnnnnnnnnnngtggcattttctcccttaaccttcactggaactgagtgactgaaaagcaaagaagagacaaaaccaaaggagagacgaaccccagagaaccgcaggtaacaaaacaacacagggaaggatggccgggtcctttcccgaggcaggatgaccagagctaccagcagctgggggatttcgaggcttgagctcatctctcagcatgcaggctcacgcagggacaacttcccagggaaagtgagtcactcctggtgaaacagcagcccttcccacgccccyrcatcttcctcagatgcagcacaaagctttgtcgtgccctcgccaactccaatccctttgctatatgggactgcagttaattcagcccagaagccggactcatagttggggaacataatgtgtatccccctttccctccactgcctgcgtgaatccaaatcaagcatctccctcctgccctggagccatcaggcctgcagacagtgcagctccttagggcacagagcattgcccttgtcccttaccccagggcttgtctctaagccacrcggtcacgctttatatcgacttttgttcca

SEQ ID NO: 76432 - DNA, 599 bp, Chicken  19866894363543_2
  misc_feature (1)..(23): n is any nucleotide
nnnnnnnnnnnnnnnnnnnnnnngtggcattttctcccttaaccttcactggaactgagtgactgaaaagcaaagaagagacaaaaccaaaggagagacgaaccccagagaaccgcaggtaacaaaacaacacagggaaggatggccgggtcctttcccgaggcaggatgaccagagctaccagcagctgggggatttcgaggcttgagctcatctctcagcatgcaggctcacgcagggacaacttcccagggaaagtgagtcactcctggtgaaacagcagcccttcccacgccccyrcatcttcctcagatgcagcacaaagctttgtcgtgccctcgccaactccaatccctttgctatatgggactgcagttaattcagcccagaagccggactcatagttggggaacataatgtgtatccccctttccctccactgcctgcgtgaatccaaatcaagcatctccctcctgccctggagccatcaggcctgcagacagtgcagctccttagggcacagagcattgcccttgtcccttaccccagggcttgtctctaagccacrcggtcacgctttatatcgacttttgttccaa

SEQ ID NO: 76433 - DNA, 600 bp, Chicken  19866894363543_3
ctggtgaaacagcagcccttcccacgccccyrcatcttcctcagatgcagcacaaagctttgtcgtgccctcgccaactccaatccctttgctatatgggactgcagttaattcagcccagaagccggactcatagttggggaacataatgtgtatccccctttccctccactgcctgcgtgaatccaaatcaagcatctccctcctgccctggagccatcaggcctgcagacagtgcagctccttagggcacagagcattgcccttgtcccttaccccagggcttgtctctaagccacrcggtcacgctttatatcgacttttgttccaaagttaagacaagcagaaagcaacaacaacaacaacaatgaagaaaagaaactctgaggaagataattaaatctgctggagaggtcccatgggagccaagacattggagacagctcggtctgttgtccccaggtagatgaagggtatccaggcactatctgggctatcagcaggaaaagagataacccagttctgatatagactagaccttgaacttgtctgctaagctcagctatgcagggagccttaaagcgcctaagaaaggaggtc

SEQ ID NO: 76434 - DNA, 600 bp, Chicken  19866894363550_1
ttccagatgtgaggtgtccccaaggactcccgatgctgcccccagtgggaaagtgcggtggggacagtggggaatgtgcagtgtgggcatgttggggaccacatgtaacagcccttgtgggacacctcaatgcagccatgtgtgctgcagttgggatctcatggggacacccagcaagggcacgcacaggcagcctttttgggccagtgtgtgacagctgacagctgtcagcctgtgtgggacaccgcagtaacggttgtatgtaccactccacgtgtgtcatcccatcctgggccccayrgtgccacggcatggggaggagaattgtcagatgaggaggacatcatgtcactgtgtctccaaggggaagtgagagtggatctccagacactccttgtcctcactgcagtctcactgtccccaagctgctcctgcctcatggcacaaatggcggtggccctcatccttggtgagtgacaatgggaacgtggtgccacggggggttggtggccctgtgtgggaccaggaccgtgtcccttgcaggttggtggctggtggctgcgagcagggcacagcacggtgagtatggggacaggggga

SEQ ID NO: 76435 - DNA, 600 bp, Chicken  19866894363550_2
tccagatgtgaggtgtccccaaggactcccgatgctgcccccagtgggaaagtgcggtggggacagtggggaatgtgcagtgtgggcatgttggggaccacatgtaacagcccttgtgggacacctcaatgcagccatgtgtgctgcagttgggatctcatggggacacccagcaagggcacgcacaggcagcctttttgggccagtgtgtgacagctgacagctgtcagcctgtgtgggacaccgcagtaacggttgtatgtaccactccacgtgtgtcatcccatcctgggccccayrgtgccacggcatggggaggagaattgtcagatgaggaggacatcatgtcactgtgtctccaaggggaagtgagagtggatctccagacactccttgtcctcactgcagtctcactgtccccaagctgctcctgcctcatggcacaaatggcggtggccctcatccttggtgagtgacaatgggaacgtggtgccacggggggttggtggccctgtgtgggaccaggaccgtgtcccttgcaggttggtggctggtggctgcgagcagggcacagcacggtgagtatggggacagggggag

SEQ ID NO: 76436 - DNA, 600 bp, Chicken  19866894363551_1
cacactgatgattcctctcaactttgattttatttaatctaagctttcactttagctaaaaaacacagtgcaagtaaaatatatttatgctgaaaaggtttctctttttttcctttttttccttttttaactttacagctttacaaactatagcaaataaaatgcatttttacagatgctgctaaaacattcagaagtaaccctcctttacgggattccagggcctctaataagcaataatgtgattaaaattgaggttatgtttaaaattaactgtatatccctctagattttgaccakttgggggggaaaagataaatattcttaaaaaaatcagtttgctttgctaactgactgttcaaaacaaaacaaagctaaatgaaatgaggtcatctgctgtagacatatgcctatataattgatttagttgaataaaactgaactaaaacgcacaattaatgtcaaaactgctacagggctgacagggtagctagttatttgctaaacgattccatcagtctttatatatggcttgtttggcaagaaggccactcaatcaagagatgagttaaagtttaattgtccttttatagtatccac

SEQ ID NO: 76437 - DNA, 600 bp, Chicken  19866894363553_1
aatgcccctgtgctgtgccgtagcatcctgctgtggctgacggctctttggttatgcacagagctcgcgttcatcctttcgggctgaaatcattcgaatcagaggacaaggagagaactttcccacccaaaagggaaatgatgttgcgttactgagcggccagcccaagttataatataatcttagaaaaatgcagttcccccgagtaaaagaagctctgtaaacttcagctcctccaggctgcccgcggagctgttgcctgcattgtagaagtgctgcttgcaacgaggacctgtgctrgggtcggagtggtgaggtctgtaatgcaggggttaggaygctgggtcccatcccttccctgctgttagctttttcttggcgggcccaccctgaagaggtggcagctggagcaaggtgaaacacccgcagggttttgttggtggagatgctggggtcagaattccacccgtgtgaaagtggggcagaagatagtttgttcttagggcagtcagcgtttaggcggagagaaagagatgataaacccgtataaaattcacaaggaatagaaatatcttttattcggtgagctaaatgcacaag

SEQ ID NO: 76438 - DNA, 600 bp, Chicken  19866894363553_2
acggctctttggttatgcacagagctcgcgttcatcctttcgggctgaaatcattcgaatcagaggacaaggagagaactttcccacccaaaagggaaatgatgttgcgttactgagcggccagcccaagttataatataatcttagaaaaatgcagttcccccgagtaaaagaagctctgtaaacttcagctcctccaggctgcccgcggagctgttgcctgcattgtagaagtgctgcttgcaacgaggacctgtgctrgggtcggagtggtgaggtctgtaatgcaggggttaggaygctgggtcccatcccttccctgctgttagctttttcttggcgggcccaccctgaagaggtggcagctggagcaaggtgaaacacccgcagggttttgttggtggagatgctggggtcagaattccacccgtgtgaaagtggggcagaagatagtttgttcttagggcagtcagcgtttaggcggagagaaagagatgataaacccgtataaaattcacaaggaatagaaatatcttttattcggtgagctaaatgcacaagccaacccatcctccgtggtgctggtgtccacattcagtc

SEQ ID NO: 76439 - DNA, 599 bp, Chicken  19866894363558_1
  misc_feature (1)..(135): n is any nucleotide
nnnnnnnnnnnnnnnnnnnnnnnnnnnnnnnnnnnnnnnnnnnnnnnnnnnnnnnnnnnnnnnnnnnnnnnnnnnnnnnnnnnnnnnnnnnnnnnnnnnnnnnnnnnnnnnnnnnnnnnnnnnnnnnnnnnnnnntttacagtgggtacagtggtgtttctgggttggtccctgccagtctgaacttgcagaatcactgccactagttttatgggggagaaggctggtctttagagaagcaccgtgaagaacctcctgtgcttcagaccttgtggtgcaggaacaatttgctgccacagrtacagcatctgcctgagaggaagaggaatgtcccttgctgtgcatatggcatagctcagagcagggaatgcctgcttcttgtctaccaaaacaacccacacaatgtgggaaaggaacgtggcagttctgggagctttcccttactactgcaaagccgaaattgccatgacttatcctatgcagtaggttgcactgcaaagattacagagctgagcactgctgggtggagactccagacggagccctgatgacagggtgcacctcatcactatattaatgccgctgtacaggttgtggat

SEQ ID NO: 76440 - DNA, 600 bp, Chicken  19866894363561_1
atatctgcctctcaacaaccctgcctttccgtccccatccatctcctcaaatggccacagtttcctgttgttgagcagcagtgtagtgttcctgcagtggtggagaggcgtggcagtgctgttgatgaggcagtgtggtagactgtactgggagggaagcaaaacttgcctccgctataagcttttttgtagaagagagggagagcatgggttattctgagatgtcctcatgtgttgcagactgccctcacccagggaagcccaaacagtgtgagtggtagagggttcttccttccttargaggacttccatgctttacatgtgtggtatgtcactgtcatgccctggctgtaatactttaacacttgaacttagtctttcagctgctggtagaaattaagatgataccctagaactatggttatccaactggttgttgagatgggaagaatgcttcgcatgaacggtgtccaacagccgtgctacatcgtgttatagctggagagtgaggcaacctgcaggaattggtgctgtatgggagccagggaatcataaaaattattaaatttggaaaagaccactaaggtcatcttgtccaac

SEQ ID NO: 76441 - DNA, 600 bp, Chicken  19866894363564_1
aaaaacaaaaatgagaaacagtaactattagaaatcccacctggtgctttctctgtgttaatgatgcttcttaaattgcatgtgggtaaatggtaattttgtctcacaccattaaaaactaatggaacccttgatgataagaaatgccatagctagcttgttggaaaacgtttaattaataaagtaataaaattattgtaaactagtgcagtttcacagaggattcaatgggatataaaacagataaaacatccttgagagttggtacaagaaataaatgctactctataaaaagcagcrctataaagttaagctggcctgtgttgtacagagataagatgagatattgaaataataaggctatttgggttattcttccaggggaagtgctgggaaaaccccatgagcggaggagcaggtatattcttccagggccagaagggaagcgcacgtttcatctgagctggcacagagctggagaaagctgcttcactgctgcaacactgtgagcctgtgtgaatgtattgctcttattaccgctattattaatatttgccattcagcccaggctgagctcattgcagcctcacgcgcagcctg

SEQ ID NO: 76442 - DNA, 600 bp, Chicken  19866894363566_1
cctagccaggttctgagcagccccgagaatggaggtcctcaggagagggagagcacccagtattcccaggcagcttcccagccaagtactagccaggcccaccctaaaggctccagagatcagaggaggcccagctgtgctcccagtggtacagccacatgcaataggctgtacagatttcctacaacaaaatcctctcctgaagggtaattcctaggacaactttgattgaaaacaatacgcatccaatatcacttggcacattcaaacaaataccttcgacaagatttaaataactgstgttaactctgttgtaatttacgcaagcacgagaaaaatcagtaagctcaaaattcattgtgtgaatgaacatgcatattttaagagcctaaaattatttaattctacctcaaaccatatgacatcacaggcactccttctaccttgtatatgtcaggctattgtagcatattcttaattgggaatgatagcagcccatggtcagcatccagcctgcagtactgaagaactagacccaaaccgctgaaggacagcagtgttcccatctctcaaagtcttgactggattttacactttcca

SEQ ID NO: 76443 - DNA, 600 bp, Chicken  19866894363573_1
tacagaagtgtattgaagagcaatatgattagattatttctggatagatattttgttttgtaaatttaaaaaatgctgttacacagcgttaagttatagagactagtgtataaacatgttgcttgctcaatggcaaatacaatacagggtgtatatttttttctctctgtgttgcaaagttcttttagtttgctcttctgtgaggataatacgttattgatgtatatactgtacagtttgctacacatcaggtacaagattggggctttctcaatgttttgttctttttccctcttttgyttcattttgtcttccttttgtgttaaccactatgctttgtatttttgctgctgtttggtttgagcaacatataaagctttcaggtgttttgattatatatatgaggttgaaggagtctgcttaaataaagaacaccattctccgctgtgggctggggatgtcccgaagaggaaaagtaaactgggagttaaatcatccagctctcatcatccctcagcagcattgcgacatctgttttctttgtgtgtttgataacttgcgcctggtgtgcccctttctggaaagagaagatgtgcgtgg

SEQ ID NO: 76444 - DNA, 464 bp, Chicken  19866894363573_2
ttatatatatgaggttgaaggagtctgcttaaataaagaacaccattctccgctgtgggctggggatgtcccgaagaggaaaagtaaactgggagttaaatcatccagctctcatcatccctcagcagcattgcgacatctgttttctttgtgtgtttgataacttgcgcctggtgtgcccctttctggaaagagaagatgtgcgtggaatgcatctgtgtcagcgtttaaacccagtattgtcacaaggtagtctttgacctgctcccttgctttccttgctgcaaacatgcacccttyaaggccaggagagaaaccaccacgtgttgttagctaaagaaagggattttgctgttcctcttctccttacaggagtcaagtccttggaggtgcagtgtggatgcatctcccctaccatccagcatggagacttcacagcattttccaaaactgtagccaggaaa

SEQ ID NO: 76445 - DNA, 599 bp, Chicken  19866894363575_1
  misc_feature (1)..(118): n is any nucleotide
nnnnnnnnnnnnnnnnnnnnnnnnnnnnnnnnnnnnnnnnnnnnnnnnnnnnnnnnnnnnnnnnnnnnnnnnnnnnnnnnnnnnnnnnnnnnnnnnnnnnnnnnnnnnnnnnnnnnnnggataatcccaaatatatgtacagattgagggatgagaggctggagaacagccccacagaagggcatctgaggattctggttgaatctgagccagcagtgtgccctggcagccaaagggccaaccataccctggggtgcaccaggcccagctctgccaccagggagggcaggggctgtcccrctctactctgcattgtgcaacttcaacttgagcactgagaacaagtttaggtgccacaacataagaaaaacataaaactatcagagaacatctaaagaagaagatagtgaagggtctgtagggcaaggtatatgaggaacaactgcagtccctgtgtttgttcaacacagagcagaggaggctgaggggaggcttcatagcagcatgcagctcctcacagggagcggaggggcagtgctgagctctgctctttatcacagcaacagggcccgagggaacggcatgaagatgtgataggg

SEQ ID NO: 76446 - DNA, 600 bp, Chicken  19866894363600_1
aaaaaaacattatagaagttcacttttattaacaataataatccagattttttgaaggaaaagtctctatatgccctttccacaacagagcctcataacaagacctgagcctaaagcaggtggcattctgacttcatcataaaactgagagcacaataagtctagagttttggaatgccattttgttcacagttataatttacccttcatatgatatctttgtaatgaccaatcatatctgcaatgcacagaccttttcttcttagtgcatgcctttccatgaatttatccatggtaatygcaccccagatactatgtctttcctttaattataccatctttgcagtagtctccaataaaataaacaaataaaaactgtccatgtgtgaatacactgtaaactaccaaaatagctgcttcactgaagagtatccattatatacagcaacagtgatttgttttgcaacatctattttatgctttaaagcaatataaaaaacactcttgtcctgcagtaattaaaagcaagacaacacagacaaatctctactcctacataacagagatgagcctgaagggacaaaagttctgtctgtcttg

SEQ ID NO: 76447 - DNA, 600 bp, Chicken  19866894363607_1
tttagcaaatcacactttgtgtcccagagaggtatgctgggaggctcttcttcgttctcctggggctgtgcttacacctgaaagaggaaagttccgtgcggtggaaagaggtttttattctgaattcattccaccattgtaaagctgtggttggagttgtgctggcgtgcattcaggatcctgtctgttttcatcaagttgcagcgtgctaatttctcccatctgaaagcctgaaatggaggcccttcgtttcgttgatttaggatttgatcaggtttgtgttcgtgacaacgttggctstgtctgagctgtgatttggtaatgaattgcgtgtgcttttgtgatccgtagtaacggaaggcaaaacaggttctctgaaaccactgctgaggactaaataactgagaatggaaagggtggaaaccagggaaagttgcctgatacagctgcaattgagtggccttatttgtaggcttctaagcagtcctgagcaccattttgatagtgtggtatttctcttttcagtgcatccacttctcagtcggaccattctgctcatacaaaatctgcctctcttgtatcatcagactcggtctccac

SEQ ID NO: 76448 - DNA, 600 bp, Chicken  19866894363611_1
tctactctgctcagcttccaccttcatcaattacatgcatagtgctaactgtaaatttgcctcagcttctgtgcagtatctgtgccagcaagcctgggaattctttccatttcatgcattaagccatactcacatgaacataaaacatgccatctgacactgctactagtcaacacaccacactgatagaagtgctgtttgttggatgtatttaggctgcaggcaaatacagtggggcatattcataccatgccaggtgacagttcacacaacttgcccttcagaggtgctctgacgttyccactgactctgtgagaaactcaggctcctaaattttgttgtaccagactgtgtctcactctggtatctaaaacacacagtgagataatcagctcccatgtaggcgattatctccttgtatcccttttggcatatacagtatttgagcaagatcacatacaaaaaacctcccagaagtgctcaggttgaaaaacatcactggctcaaatacttccaaaaggaggagcccaatcctaatttaaatggacttgtttttaagtgcaggtgatagcacaggatatattttgtagttttcgtgca

SEQ ID NO: 76449 - DNA, 599 bp, Chicken  19866894363619_1
  misc_feature (1)..(168): n is any nucleotide
nnnnnnnnnnnnnnnnnnnnnnnnnnnnnnnnnnnnnnnnnnnnnnnnnnnnnnnnnnnnnnnnnnnnnnnnnnnnnnnnnnnnnnnnnnnnnnnnnnnnnnnnnnnnnnnnnnnnnnnnnnnnnnnnnnnnnnnnnnnnnnnnnnnnnnnnnnnnnnnnnnnnnnnnacttgtattatgctgcaccaatgcaaaaccaaaaaataccactgcttgtggaaatcaaaacaggctaatacaaagcaagacctggagactttacaacaggagctgagccagaccttggaagtcccaatgacrctggggtcckggtggccagcacagaacagaagacagtatcagttgttagtgagcatggtagggatggattgacagttagacttgatggtcttagtggtcttttccaaccgtaatgattctrtggatgtatgagcagcctgcatgatgttagggattcataaagcattttttcagctccatcctcctgaaggaaycatcctgcatgactagaataactcatttcaaaacactaacacttcaaaatcatggctggcagctaacttctttcaagagatagatgtttttattcgtgatttacc

SEQ ID NO: 76450 - DNA, 599 bp, Chicken  19866894363619_2
  misc_feature (1)..(158): n is any nucleotide
nnnnnnnnnnnnnnnnnnnnnnnnnnnnnnnnnnnnnnnnnnnnnnnnnnnnnnnnnnnnnnnnnnnnnnnnnnnnnnnnnnnnnnnnnnnnnnnnnnnnnnnnnnnnnnnnnnnnnnnnnnnnnnnnnnnnnnnnnnnnnnnnnnnnnnnnnnnnnnacttgtattatgctgcaccaatgcaaaaccaaaaaataccactgcttgtggaaatcaaaacaggctaatacaaagcaagacctggagactttacaacaggagctgagccagaccttggaagtcccaatgacrctggggtcckggtggccagcacagaacagaagacagtatcagttgttagtgagcatggtagggatggattgacagttagacttgatggtcttagtggtcttttccaaccgtaatgattctrtggatgtatgagcagcctgcatgatgttagggattcataaagcattttttcagctccatcctcctgaaggaaycatcctgcatgactagaataactcatttcaaaacactaacacttcaaaatcatggctggcagctaacttctttcaagagatagatgtttttattcgtgatttaccatatgtttca

SEQ ID NO: 76451 - DNA, 599 bp, Chicken  19866894363619_3
  misc_feature (1)..(47): n is any nucleotide
nnnnnnnnnnnnnnnnnnnnnnnnnnnnnnnnnnnnnnnnnnnnnnnacttgtattatgctgcaccaatgcaaaaccaaaaaataccactgcttgtggaaatcaaaacaggctaatacaaagcaagacctggagactttacaacaggagctgagccagaccttggaagtcccaatgacrctggggtcckggtggccagcacagaacagaagacagtatcagttgttagtgagcatggtagggatggattgacagttagacttgatggtcttagtggtcttttccaaccgtaatgattctrtggatgtatgagcagcctgcatgatgttagggattcataaagcattttttcagctccatcctcctgaaggaaycatcctgcatgactagaataactcatttcaaaacactaacacttcaaaatcatggctggcagctaacttctttcaagagatagatgtttttattcgtgatttaccatatgtttcagtgattcaagaaactggttacaacgaaagttctttcacgcatttttccccacagacatctctcaaagttgccagagattaatttggaactcctgtttagtatcgtacacta

SEQ ID NO: 76452 - DNA, 600 bp, Chicken  19866894363619_4
aaccaaaaaataccactgcttgtggaaatcaaaacaggctaatacaaagcaagacctggagactttacaacaggagctgagccagaccttggaagtcccaatgacrctggggtcckggtggccagcacagaacagaagacagtatcagttgttagtgagcatggtagggatggattgacagttagacttgatggtcttagtggtcttttccaaccgtaatgattctrtggatgtatgagcagcctgcatgatgttagggattcataaagcattttttcagctccatcctcctgaaggaaycatcctgcatgactagaataactcatttcaaaacactaacacttcaaaatcatggctggcagctaacttctttcaagagatagatgtttttattcgtgatttaccatatgtttcagtgattcaagaaactggttacaacgaaagttctttcacgcatttttccccacagacatctctcaaagttgccagagattaatttggaactcctgtttagtatcgtacactaaacttctcctctttcrtcaaattggcatgtttatagcaagttttttgcattgtgaaagaaactcttccaacaag

SEQ ID NO: 76453 - DNA, 600 bp, Chicken  19866894363619_5
cctgcatgatgttagggattcataaagcattttttcagctccatcctcctgaaggaaycatcctgcatgactagaataactcatttcaaaacactaacacttcaaaatcatggctggcagctaacttctttcaagagatagatgtttttattcgtgatttaccatatgtttcagtgattcaagaaactggttacaacgaaagttctttcacgcatttttccccacagacatctctcaaagttgccagagattaatttggaactcctgtttagtatcgtacactaaacttctcctctttcrtcaaattggcatgtttatagcaagttttttgcattgtgaaagaaactcttccaacaagaaacatctaacttccttttcaaaacgtaagcataaacacaagtatgacaactgaaaccccttactcattcacctctctagtgataggagagtttgcctcctaacaaaatgtaagctgttctctgaccttcacattatatcatgtttattcatatgcttatttcttttgatttctgtaggtagattctgaagggtatcctttctttccagtgaagtcccacttcagcaaggtagttgagaata

SEQ ID NO: 76454 - DNA, 600 bp, Chicken  19866894363627_1
catatttctgtggacttcatgacaacaatttgcttttggattctgcagaaactgtccaggcacattgtagcaattcaaaacctcagcataccagtgagccagctacagacaatgccacttggagactcctccatgctggttaatgttgaaacaaagggatgttatcagctcaatcaactgctgctaccaagccaccagaatcactggtggttcaaaagtgacttagtggtcacagaccaaattgttttcctttgaccctcaagatgcttcatggctattttagaaggctttggcactgcyacagttggtcttcactgcagcagctcacacatctggcagcccatcttccccctccattgccatcatcagtgactttggatgtcttatgctccaaacagccagagagagmctggaaaactgattggcagcataaccaataaacagaaagtactcaggcagaatgtccaattcactaaaattgttgagaccttgttaagttttagactctgctttataccaaggtgctagctagaagaaatgtgtagcatgtatggagaaagaagtcagggccagctgactgaccagtctatgttctgtcar

SEQ ID NO: 76455 - DNA, 600 bp, Chicken  19866894363627_2
caatgccacttggagactcctccatgctggttaatgttgaaacaaagggatgttatcagctcaatcaactgctgctaccaagccaccagaatcactggtggttcaaaagtgacttagtggtcacagaccaaattgttttcctttgaccctcaagatgcttcatggctattttagaaggctttggcactgcyacagttggtcttcactgcagcagctcacacatctggcagcccatcttccccctccattgccatcatcagtgactttggatgtcttatgctccaaacagccagagagagmctggaaaactgattggcagcataaccaataaacagaaagtactcaggcagaatgtccaattcactaaaattgttgagaccttgttaagttttagactctgctttataccaaggtgctagctagaagaaatgtgtagcatgtatggagaaagaagtcagggccagctgactgaccagtctatgttctgtcartctttcagyttcttcaggctgtttactctctaagtaggaagtctgcatttttaaggttgtatgtgtcaatctaaatttgtatgtgttcctgctaagtggttttacttca

SEQ ID NO: 76456 - DNA, 600 bp, Chicken  19866894363627_3
acagttggtcttcactgcagcagctcacacatctggcagcccatcttccccctccattgccatcatcagtgactttggatgtcttatgctccaaacagccagagagagmctggaaaactgattggcagcataaccaataaacagaaagtactcaggcagaatgtccaattcactaaaattgttgagaccttgttaagttttagactctgctttataccaaggtgctagctagaagaaatgtgtagcatgtatggagaaagaagtcagggccagctgactgaccagtctatgttctgtcartctttcagyttcttcaggctgtttactctctaagtaggaagtctgcatttttaaggttgtatgtgtcaatctaaatttgtatgtgttcctgctaagtggttttacttcataatttgttccatgccaagtgccagaaaaataacagctacattcaaaacaaagtttatgtaaagcaagtgggtaaatgttatgcatatcgtaataatgtagrctagagtaatttttctttactgaagtgtaactgagccatttaaagtaattaatgactgtggttgttccttgatttccattttgagtctt

SEQ ID NO: 76457 - DNA, 600 bp, Chicken  19866894363627_4
cttcactgcagcagctcacacatctggcagcccatcttccccctccattgccatcatcagtgactttggatgtcttatgctccaaacagccagagagagmctggaaaactgattggcagcataaccaataaacagaaagtactcaggcagaatgtccaattcactaaaattgttgagaccttgttaagttttagactctgctttataccaaggtgctagctagaagaaatgtgtagcatgtatggagaaagaagtcagggccagctgactgaccagtctatgttctgtcartctttcagyttcttcaggctgtttactctctaagtaggaagtctgcatttttaaggttgtatgtgtcaatctaaatttgtatgtgttcctgctaagtggttttacttcataatttgttccatgccaagtgccagaaaaataacagctacattcaaaacaaagtttatgtaaagcaagtgggtaaatgttatgcatatcgtaataatgtagrctagagtaatttttctttactgaagtgtaactgagccatttaaagtaattaatgactgtggttgttccttgatttccattttgagtcttacttttagc

SEQ ID NO: 76458 - DNA, 600 bp, Chicken  19866894363627_5
ttataccaaggtgctagctagaagaaatgtgtagcatgtatggagaaagaagtcagggccagctgactgaccagtctatgttctgtcartctttcagyttcttcaggctgtttactctctaagtaggaagtctgcatttttaaggttgtatgtgtcaatctaaatttgtatgtgttcctgctaagtggttttacttcataatttgttccatgccaagtgccagaaaaataacagctacattcaaaacaaagtttatgtaaagcaagtgggtaaatgttatgcatatcgtaataatgtagrctagagtaatttttctttactgaagtgtaactgagccatttaaagtaattaatgactgtggttgttccttgatttccattttgagtcttacttttagcagataggggccaagcagattttgaaaatctgacctctttcttctcttgactggattaacaaaatcacttagcagaattagaaaataattgcccgtacttcttgcttccatggcaaagaacaacattctcagatttttttaatagtgttatctttatctttttcttgttattttattgctactgaagtagaatgatgggtagg

SEQ ID NO: 76459 - DNA, 600 bp, Chicken  19866894363630_1
agaaaaaaaaggggatcgtagtccttggctatctaccactgggttttcatagttgatgctgatgaaagcaagttgttgtggtatgactttcttgtagctttgttaagtagtgttaagtactaggataagtgatgcatttgaacattcttttcaggtttcactgttgattccatctgtgacgtgtttgtttctgatgttggtggaggctctcactccccccatacaactcagccctttgcgagtcacagtgcctgcacaggatttcccaaagagaaactgagagcactgaagtattattcygtgttcagcagtccctgggaatggtagtttggtgccaagggtcaaatcaggagttttcctaagcatttcttgtgatactggctgaaggaagctttcagctcaatttctgtgtccttgctttccagttccccttctactaacaagtactggtggaaatcaggaggaaagggcytctttgtggctgtggatacgtactttcatcattcatctgctgtagctggggttgtgtcatccaccatagattggctcctgcaaagaaagaattgctgtcacaaagagagatgtcattgagtggttgga

SEQ ID NO: 76460 - DNA, 436 bp, Chicken  19866894363630_2
tctgtgacgtgtttgtttctgatgttggtggaggctctcactccccccatacaactcagccctttgcgagtcacagtgcctgcacaggatttcccaaagagaaactgagagcactgaagtattattcygtgttcagcagtccctgggaatggtagtttggtgccaagggtcaaatcaggagttttcctaagcatttcttgtgatactggctgaaggaagctttcagctcaatttctgtgtccttgctttccagttccccttctactaacaagtactggtggaaatcaggaggaaagggcytctttgtggctgtggatacgtactttcatcattcatctgctgtagctggggttgtgtcatccaccatagattggctcctgcaaagaaagaattgctgtcacaaagagagatgtcattgagtggttggacttgatga

SEQ ID NO: 76461 - DNA, 599 bp, Chicken  19866894363637_1
  misc_feature (1)..(151): n is any nucleotide
nnnnnnnnnnnnnnnnnnnnnnnnnnnnnnnnnnnnnnnnnnnnnnnnnnnnnnnnnnnnnnnnnnnnnnnnnnnnnnnnnnnnnnnnnnnnnnnnnnnnnnnnnnnnnnnnnnnnnnnnnnnnnnnnnnnnnnnnnnnnnnnnnnnnnnnccagtggaagtcagacctatgctcacaagggcactagttttgtaaaaggaatatgcttgggaaagagggattgggtgctgctgtgtggagccaggggtgggcgtcagtgatcctcgtgggacccttccagctcaggatattccatgatyctatgagttagcacagatsttccagagaggctctcatccgcagyccttcaacaattactgcttaagtaaaaagaaaaacagggattatttccaagagcagaagagagaatagaaataaaggcataaaaaccagtaggcttgggtcctcacctagctgaaagcaacagcaccaatggatagtgaggagaggaacaaatgcaggaaccctgtggtaggcaatagggaagccttgggcagagggwaccatgacaggtttctttatttyttctttggagaacgtaaatcaattagtgagctta

SEQ ID NO: 76462 - DNA, 599 bp, Chicken  19866894363637_2
  misc_feature (1)..(132): n is any nucleotide
nnnnnnnnnnnnnnnnnnnnnnnnnnnnnnnnnnnnnnnnnnnnnnnnnnnnnnnnnnnnnnnnnnnnnnnnnnnnnnnnnnnnnnnnnnnnnnnnnnnnnnnnnnnnnnnnnnnnnnnnnnnnnnnnnnnnccagtggaagtcagacctatgctcacaagggcactagttttgtaaaaggaatatgcttgggaaagagggattgggtgctgctgtgtggagccaggggtgggcgtcagtgatcctcgtgggacccttccagctcaggatattccatgatyctatgagttagcacagatsttccagagaggctctcatccgcagyccttcaacaattactgcttaagtaaaaagaaaaacagggattatttccaagagcagaagagagaatagaaataaaggcataaaaaccagtaggcttgggtcctcacctagctgaaagcaacagcaccaatggatagtgaggagaggaacaaatgcaggaaccctgtggtaggcaatagggaagccttgggcagagggwaccatgacaggtttctttatttyttctttggagaacgtaaatcaattagtgagcttaaatccagaccttttcccca

SEQ ID NO: 76463 - DNA, 599 bp, Chicken  19866894363637_3
  misc_feature (1)..(107): n is any nucleotide
nnnnnnnnnnnnnnnnnnnnnnnnnnnnnnnnnnnnnnnnnnnnnnnnnnnnnnnnnnnnnnnnnnnnnnnnnnnnnnnnnnnnnnnnnnnnnnnnnnnnnnnnnnnccagtggaagtcagacctatgctcacaagggcactagttttgtaaaaggaatatgcttgggaaagagggattgggtgctgctgtgtggagccaggggtgggcgtcagtgatcctcgtgggacccttccagctcaggatattccatgatyctatgagttagcacagatsttccagagaggctctcatccgcagyccttcaacaattactgcttaagtaaaaagaaaaacagggattatttccaagagcagaagagagaatagaaataaaggcataaaaaccagtaggcttgggtcctcacctagctgaaagcaacagcaccaatggatagtgaggagaggaacaaatgcaggaaccctgtggtaggcaatagggaagccttgggcagagggwaccatgacaggtttctttatttyttctttggagaacgtaaatcaattagtgagcttaaatccagaccttttccccagggaaaaatactaagtgaggtgaat

SEQ ID NO: 76464 - DNA, 600 bp, Chicken  19866894363637_4
caggggtgggcgtcagtgatcctcgtgggacccttccagctcaggatattccatgatyctatgagttagcacagatsttccagagaggctctcatccgcagyccttcaacaattactgcttaagtaaaaagaaaaacagggattatttccaagagcagaagagagaatagaaataaaggcataaaaaccagtaggcttgggtcctcacctagctgaaagcaacagcaccaatggatagtgaggagaggaacaaatgcaggaaccctgtggtaggcaatagggaagccttgggcagagggwaccatgacaggtttctttatttyttctttggagaacgtaaatcaattagtgagcttaaatccagaccttttccccagggaaaaatactaagtgaggtgaattctgaggcagacacaagcaggacaaaacatgtacrcacgtataccaggaggaacttctgctggaaagcagtggaggagatggctatctgagggtcagggattggaagagcagtttttgcctacatcaggaagtggtgctgccctgtgagggagccaagaaagatcccggtacaaacagcaccctcacccacagccacga

SEQ ID NO: 76465 - DNA, 600 bp, Chicken  19866894363637_5
cgtgggacccttccagctcaggatattccatgatyctatgagttagcacagatsttccagagaggctctcatccgcagyccttcaacaattactgcttaagtaaaaagaaaaacagggattatttccaagagcagaagagagaatagaaataaaggcataaaaaccagtaggcttgggtcctcacctagctgaaagcaacagcaccaatggatagtgaggagaggaacaaatgcaggaaccctgtggtaggcaatagggaagccttgggcagagggwaccatgacaggtttctttatttyttctttggagaacgtaaatcaattagtgagcttaaatccagaccttttccccagggaaaaatactaagtgaggtgaattctgaggcagacacaagcaggacaaaacatgtacrcacgtataccaggaggaacttctgctggaaagcagtggaggagatggctatctgagggtcagggattggaagagcagtttttgcctacatcaggaagtggtgctgccctgtgagggagccaagaaagatcccggtacaaacagcaccctcacccacagccacgacactgcagtgcctgagctgagct

SEQ ID NO: 76466 - DNA, 600 bp, Chicken  19866894363637_6
cagggattatttccaagagcagaagagagaatagaaataaaggcataaaaaccagtaggcttgggtcctcacctagctgaaagcaacagcaccaatggatagtgaggagaggaacaaatgcaggaaccctgtggtaggcaatagggaagccttgggcagagggwaccatgacaggtttctttatttyttctttggagaacgtaaatcaattagtgagcttaaatccagaccttttccccagggaaaaatactaagtgaggtgaattctgaggcagacacaagcaggacaaaacatgtacrcacgtataccaggaggaacttctgctggaaagcagtggaggagatggctatctgagggtcagggattggaagagcagtttttgcctacatcaggaagtggtgctgccctgtgagggagccaagaaagatcccggtacaaacagcaccctcacccacagccacgacactgcagtgcctgagctgagctgggtgctgtagtagggtccttcagcagccccaggcatggcaatgggggcagacccagccccagttttagccggggggttacagacagtaaaagagggctggagacaagcactg

SEQ ID NO: 76467 - DNA, 600 bp, Chicken  19866894363643_1
atgcctgagtaaatcaggcaggaaatgatccacccagccttggaggaactcacagatatttgactttctgcatctgtactgcagaatttggctataaagcactcgggataatttaagtccctaaaccccatggtttttttcacatctgtacaactgatacaactgcagttatttagcccaacttgtcagcttgaaccaaaagggcattcacaaaatcagacactgtattgtccctgccttggccagagtgtctgcatgtactgaacagaactaactgagatacaactggcgatcacatckctaaggattcaccaataactacaatgattcttcatttcagcactgtttcagccactgaggtgttaaaaacagcactggtaattgttttaaccaaatattacagctattgcttccctgcaaatagcgcacacaagaaaatgagggagagcctactgtgctttatttttatatacctcggaaaattatagcacagctaataaaataagggtgtcctacacaagctccaatattgtataaatcatgaataatacatcaggcaaaaatgagaaactgcaatggaatcaaacctatacggaaata

SEQ ID NO: 76468 - DNA, 600 bp, Chicken  19866894363643_2
aataactacaatgattcttcatttcagcactgtttcagccactgaggtgttaaaaacagcactggtaattgttttaaccaaatattacagctattgcttccctgcaaatagcgcacacaagaaaatgagggagagcctactgtgctttatttttatatacctcggaaaattatagcacagctaataaaataagggtgtcctacacaagctccaatattgtataaatcatgaataatacatcaggcaaaaatgagaaactgcaatggaatcaaacctatacggaaataaataaaacataamggcagcactgcaatcatgttagctctgctgataaaatgtgggtttgtttttgcgaggggaggcaggaggagactcctctagtaaatgattgtggaaacattagtaataataacgagatctacatggtaagccaaggaaaggggtaattaataaagaagcatccagttcaccaaagtgcgtttggtggacaaagaataaagatggaaaaggaaatagaacaatagcttgaaaaaggtttctcagatgaacctttaggatggattggaataaaacccctatcttgcagagcaaatccaaact

SEQ ID NO: 76469 - DNA, 600 bp, Chicken  19866894363666_1
actccccctacaaccagcagggacatctacagctccatcgggttctcagagcacactccaagtacgtggcatgcaccacacctctgggcaacccgttctcctgaaatttcccttgctgcagcctgtactctttgcctcttgtcttttcagtgcgcacctcataggaagactggtttcttcttccctgcagcctcccattagatagctgaaaggcagaaatttgattccttgcagtaaacttccttactgtgtacaattggaacagaaaaagagaatgaatgcagtcaaaagaaaattcayggtttgatgctcacagacgtttctgaatgcctgcccagctcacctaatacaatagaatttattggcatgtctctatcccctggtttaattgtctgaagcaacacatgaaagagagagcagaattttcctgccttttattttaagtgttctaaattagataattactcagcgccctgacagatttacaaaagtaattacctaattttatgatgcagcactactgaaaacaaagattacttggtctaaatcatgccttgaaaaagaacgccttgctgactgtggttgaataacagatgagaa

SEQ ID NO: 76470 - DNA, 599 bp, Chicken  19866894363681_1
  misc_feature (1)..(121): n is any nucleotide
nnnnnnnnnnnnnnnnnnnnnnnnnnnnnnnnnnnnnnnnnnnnnnnnnnnnnnnnnnnnnnnnnnnnnnnnnnnnnnnnnnnnnnnnnnnnnnnnnnnnnnnnnnnnnnnnnnnnnnnnntattttctagtacaggggaatagtgttctgtttgttagcaggaggctgtgacaaatgcaagtattcccaagctagaattttactaattatgatatggactagcgatgttaaccagaggatcctgaggaatagaaaatacagaataatgtcattttcctttgataacctggtgtccagaraagaattgcaggtttaagaacatttcctcaggaaasctaggtgtgttttgcacatagagtgtttgaactttggatgatggaaaaacagtttcagttttagccttctacctttccctcccctsgtagtatggggagtgagaatgaaagcagygctatcaacatggcaaagaaactccgtcttatgctgaagataaaagaaaaacattaaattgttgagatccaaataggatctttactgagaagagtaatcctaacagtgaatttttattactttatctgtttgcaatttattgcaaata

SEQ ID NO: 76471 - DNA, 599 bp, Chicken  19866894363681_2
  misc_feature (1)..(85): n is any nucleotide
nnnnnnnnnnnnnnnnnnnnnnnnnnnnnnnnnnnnnnnnnnnnnnnnnnnnnnnnnnnnnnnnnnnnnnnnnnnnnnnnnnnnntattttctagtacaggggaatagtgttctgtttgttagcaggaggctgtgacaaatgcaagtattcccaagctagaattttactaattatgatatggactagcgatgttaaccagaggatcctgaggaatagaaaatacagaataatgtcattttcctttgataacctggtgtccagaraagaattgcaggtttaagaacatttcctcaggaaasctaggtgtgttttgcacatagagtgtttgaactttggatgatggaaaaacagtttcagttttagccttctacctttccctcccctsgtagtatggggagtgagaatgaaagcagygctatcaacatggcaaagaaactccgtcttatgctgaagataaaagaaaaacattaaattgttgagatccaaataggatctttactgagaagagtaatcctaacagtgaatttttattactttatctgtttgcaatttattgcaaatacttttgtcttaaatttcacctaatactaaaactatc

SEQ ID NO: 76472 - DNA, 600 bp, Chicken  19866894363681_3
attttctagtacaggggaatagtgttctgtttgttagcaggaggctgtgacaaatgcaagtattcccaagctagaattttactaattatgatatggactagcgatgttaaccagaggatcctgaggaatagaaaatacagaataatgtcattttcctttgataacctggtgtccagaraagaattgcaggtttaagaacatttcctcaggaaasctaggtgtgttttgcacatagagtgtttgaactttggatgatggaaaaacagtttcagttttagccttctacctttccctcccctsgtagtatggggagtgagaatgaaagcagygctatcaacatggcaaagaaactccgtcttatgctgaagataaaagaaaaacattaaattgttgagatccaaataggatctttactgagaagagtaatcctaacagtgaatttttattactttatctgtttgcaatttattgcaaatacttttgtcttaaatttcacctaatactaaaactatcaagttaaaaagtaagtgacacatgacatcatgtccctcagccaagttttggagacccacaaagcaagggttgaaccacactgggtac

SEQ ID NO: 76473 - DNA, 600 bp, Chicken  19866894363681_4
tttgttagcaggaggctgtgacaaatgcaagtattcccaagctagaattttactaattatgatatggactagcgatgttaaccagaggatcctgaggaatagaaaatacagaataatgtcattttcctttgataacctggtgtccagaraagaattgcaggtttaagaacatttcctcaggaaasctaggtgtgttttgcacatagagtgtttgaactttggatgatggaaaaacagtttcagttttagccttctacctttccctcccctsgtagtatggggagtgagaatgaaagcagygctatcaacatggcaaagaaactccgtcttatgctgaagataaaagaaaaacattaaattgttgagatccaaataggatctttactgagaagagtaatcctaacagtgaatttttattactttatctgtttgcaatttattgcaaatacttttgtcttaaatttcacctaatactaaaactatcaagttaaaaagtaagtgacacatgacatcatgtccctcagccaagttttggagacccacaaagcaagggttgaaccacactgggtacacaacattgttcctatggaaactgcagaa

SEQ ID NO: 76474 - DNA, 599 bp, Chicken  19866894363695_1
  misc_feature (1)..(159): n is any nucleotide
nnnnnnnnnnnnnnnnnnnnnnnnnnnnnnnnnnnnnnnnnnnnnnnnnnnnnnnnnnnnnnnnnnnnnnnnnnnnnnnnnnnnnnnnnnnnnnnnnnnnnnnnnnnnnnnnnnnnnnnnnnnnnnnnnnnnnnnnnnnnnnnnnnnnnnnnnnnnnnntaaatctgctctcttttactttgaatccatttcccctttacctgtcacaacagactctgctaaaatgtctatcaccttccttcttacagcctccctatagatactgaaaggccattctcagctctccctggagccttctcktctccaggctgaacagccccagctctctcagcctgtcttcacaggggaggtgttccatccattggatcatttctgtggtcctcctctggcctttgcgatgaggagctttccccttatatttaactgtaatttgttttctgcaatttttgacttgcattttggccattcagggcctatatctgagaaggatgccaaagtgtgctgctgacttacattcatcttgttttccagcaggacctcagggcttctcctgcagagctgcctcccatcttctatcgcctcagtctttactggcagcc

SEQ ID NO: 76475 - DNA, 599 bp, Chicken  19866894363706_1
  misc_feature (1)..(87): n is any nucleotide
nnnnnnnnnnnnnnnnnnnnnnnnnnnnnnnnnnnnnnnnnnnnnnnnnnnnnnnnnnnnnnnnnnnnnnnnnnnnnnnnnnnnnnntccctccaatttggaaaaggagttgactattcaataattttgttgcccctctttctctcccccttttaagggaaagcaatggcatcaacaccactctgctgtaaaacctcttttattactcaagctctgcagaacagccacaggcagctctgggcttcatttgcagggtgactttccagcaaagcctgaagccgttggtccctgtgccatcayctctgctccgctgggcacagtccagctgggagatggactgggagctttgtctaggctgaaaaatggccttctcttcatgggaacatatcagcaagagtgcacggctcgagcagtactcccttgactaacaactgcagccagaacccggcacactgcttagtgcttctggacagccaggtctgagggcctctggatgcatgagcactggcagaatgcccattcytggctgcagcctgagyccttgctttcagctgctgatgttaactgtgttgactgcctgatcccaggtggccctttta

SEQ ID NO: 76476 - DNA, 600 bp, Chicken  19866894363706_2
gccacaggcagctctgggcttcatttgcagggtgactttccagcaaagcctgaagccgttggtccctgtgccatcayctctgctccgctgggcacagtccagctgggagatggactgggagctttgtctaggctgaaaaatggccttctcttcatgggaacatatcagcaagagtgcacggctcgagcagtactcccttgactaacaactgcagccagaacccggcacactgcttagtgcttctggacagccaggtctgagggcctctggatgcatgagcactggcagaatgcccattcytggctgcagcctgagyccttgctttcagctgctgatgttaactgtgttgactgcctgatcccaggtggcccttttagtgacaactgattatacttttcatgatataatcagtagatgattttcctgcctcattacatgtctggacgactgttgccttagtcatattcatatattccaagtattaatattacctgtttacctttatctacagggagctataatttgttttgctccagagcttctatagctgtatccctgcgctattatcctttatatatgcccatagcagcatgaggctta

SEQ ID NO: 76477 - DNA, 600 bp, Chicken  19866894363706_3
ggcttcatttgcagggtgactttccagcaaagcctgaagccgttggtccctgtgccatcayctctgctccgctgggcacagtccagctgggagatggactgggagctttgtctaggctgaaaaatggccttctcttcatgggaacatatcagcaagagtgcacggctcgagcagtactcccttgactaacaactgcagccagaacccggcacactgcttagtgcttctggacagccaggtctgagggcctctggatgcatgagcactggcagaatgcccattcytggctgcagcctgagyccttgctttcagctgctgatgttaactgtgttgactgcctgatcccaggtggcccttttagtgacaactgattatacttttcatgatataatcagtagatgattttcctgcctcattacatgtctggacgactgttgccttagtcatattcatatattccaagtattaatattacctgtttacctttatctacagggagctataatttgttttgctccagagcttctatagctgtatccctgcgctattatcctttatatatgcccatagcagcatgaggcttagggagcttccttcctt

SEQ ID NO: 76478 - DNA, 600 bp, Chicken  19866894363712_1
cgttctaggctttcaggaacagaaacagtaataaaacaaatacaaacccaaacattgaagtcattgtctttttcacctaataccaaagcttacgctgggcttgctaacactcctaaatctgactggctgtactgtcctcatatttaggagcagagctagcggtcagctgtgtgagaaattcactcttactgctaatgacaaagtagtttatttcaaagcatttgtggaagcactaactgcaaagtattaaaagcttccgtgtttgcagttaattaaaaaaaatcccctggaagttacttyaagcctttcaaaaaggcactctgtgcacataaattcagtgagatggcaatgaagtccacaatccygagctcctttcatattagattaaattggagatcagtatacaaagacatttcaagaactgactcacttgtttttgttccatttactacagcacatggtacgtttactctttggagaagtttcatttaattatattccaactataaaagataaagacctgcgtatgagtcttttactattgaagtgcaataatgtcaaggtattaagctgccctctaaccctaggaactggtcccac

SEQ ID NO: 76479 - DNA, 600 bp, Chicken  19866894363712_2
gtctttttcacctaataccaaagcttacgctgggcttgctaacactcctaaatctgactggctgtactgtcctcatatttaggagcagagctagcggtcagctgtgtgagaaattcactcttactgctaatgacaaagtagtttatttcaaagcatttgtggaagcactaactgcaaagtattaaaagcttccgtgtttgcagttaattaaaaaaaatcccctggaagttacttyaagcctttcaaaaaggcactctgtgcacataaattcagtgagatggcaatgaagtccacaatccygagctcctttcatattagattaaattggagatcagtatacaaagacatttcaagaactgactcacttgtttttgttccatttactacagcacatggtacgtttactctttggagaagtttcatttaattatattccaactataaaagataaagacctgcgtatgagtcttttactattgaagtgcaataatgtcaaggtattaagctgccctctaaccctaggaactggtcccaccagaacaggtgctgccactgacttgcactacctgttctggaataagtaaaatatttcactcccta

SEQ ID NO: 76480 - DNA, 600 bp, Chicken  19866894363719_1
acttcattctcaacttagttctgtgccaaccctgctgatagaacagggaccgcatacagacaggagaggcgggtttgctcctcccaccctcctcaggcccgcagtgcacaaccacagctacctctgacacaaggggagctgcctggagctgtggatcagccatggggttgctggaagccagctcctgtgctccaggcctcgtcatgttgcaaacacatgggtggccttgagtgagtccatcaacacatctctgaatttccccatccaggggaaaaaagcctgcttcatggaggcactacrtgcactaagaatctgatgcttttacagcacattttaaaacatcrtgcacatgctttgccttctgccagctctccagtttcaataaagaaggccatacaatctgtgctcagtcaaggccactttaaaccagccagagtgtgcagagggacttacacagcaacaaaaaacgagagttacattcaaggtgtgatccctagggtacatttaccaaacatacagccatcttttactgcttctcataggggctgaggaataatgaggcgggtttgttactaaaaagcatttctttctgcagcagtt

SEQ ID NO: 76481 - DNA, 600 bp, Chicken  19866894363719_2
agggaccgcatacagacaggagaggcgggtttgctcctcccaccctcctcaggcccgcagtgcacaaccacagctacctctgacacaaggggagctgcctggagctgtggatcagccatggggttgctggaagccagctcctgtgctccaggcctcgtcatgttgcaaacacatgggtggccttgagtgagtccatcaacacatctctgaatttccccatccaggggaaaaaagcctgcttcatggaggcactacrtgcactaagaatctgatgcttttacagcacattttaaaacatcrtgcacatgctttgccttctgccagctctccagtttcaataaagaaggccatacaatctgtgctcagtcaaggccactttaaaccagccagagtgtgcagagggacttacacagcaacaaaaaacgagagttacattcaaggtgtgatccctagggtacatttaccaaacatacagccatcttttactgcttctcataggggctgaggaataatgaggcgggtttgttactaaaaagcatttctttctgcagcagttttaatacaaatttgtacttcagcaaggagtatgtgaatttggct

SEQ ID NO: 76482 - DNA, 600 bp, Chicken  19866894363722_1
aaggtgcagagcctttcaaacaagtgttggtctgtggaacagcacagtcccagagctctgagggagcagctagcttagagagaggaaagccaccacttcatcagagaacactttgctctagaggagacaagtaacagttggtcaaaggtggcagcagcagtttatggcaatgacgatggatgttacgatgttccaaccctctcaagctcagctggaaatgagaaagatgtcttttatttctgaaacaggtgcagtacttcttcaagatcctggacaactgagagcccccacccccaaagyagaaggcaagggcacagagcagtgttcattcatttatttgtccaatacgtcaacctgactgaaatacaagatcaacaagagcactgtactcctggctagtattacatgttagaacatagagttttgcactttagacaacatttaacaccattctatggggtactgcattgcttttataaagtttaaaataaagatttattttcaaacatgtgactttggtttatttcatacattacacttccttgcagaaaaaaaataaaattgtacaactgcataaatataaaattcattcaccatgaa

SEQ ID NO: 76483 - DNA, 600 bp, Chicken  19866894363725_1
tcagccctgtgcaggaagcctgtgagcacagcagccccgtcatctgattaggccccgtcctacgtgtgcttcctggagcacagcacagggctatgggagctgtgttcatccctcccagtgcaccccatggggcagaggtgcccgagtgctgcttctgctcagggtgctgccaaagcaatgggacatctccatgccgacagcagggaaaggactgaagcagtgcttgcagatgtgcacacctggaacgcccagcagctcctggagcacaaagctgccattcatcccattcctttggaagarccacctcctaagaacccggtaattcgaacctcattggaaggagctgtgagcagctccagaaccgcagaagaagctcaccctgagcctgcaggagctggaacactggcttccccactgcagacggcgaggaattctgcttggcagcccacaggagatacagctgcatcccaagaatgtgttccagggccgagagcaccgcgtttgtcttgggactgtaagaacagctcgctgccctggggaagccatgggatgctggaaaatcacccagggctccatccaaagccctctccttggcaatgg

SEQ ID NO: 76484 - DNA, 600 bp, Chicken  19866894363726_1
attgctttcttacatgtggcttttactgataaaaaattcactgacaaaaaagttttgatgtcttcccttcacaaattgagttctgcaggaaaatgctcagatcacatctggatataagttctgcacagtttactctgtacgttgagaaataatacttgcctgacagtgaatgttattccacaagattttaacaaagatgtatagcacgtacaccttctgacccatcggccactcttggagacaggatgctgcactggacagtcatgatgcctgttccactgaggtgtttcctccagcacyaagaagcaagaatgaatttctgcaaagcccctctgtagcggacttaacactgagaccaaagggctttgctttcctttccaaatcgaaattgttaaagtctaaattaacttccaaaactgaaaatccagagacttctctttttagaataacaaggattattaactaaaacaataaaacgttagctcctacttcttcatctccccaattccaggagttactcaacaacaacaacaacaaaaaaaaaaaaaacagaaaaaaatcctctctcttgacaagtgaacaatagcaaaagtataaaca

SEQ ID NO: 76485 - DNA, 600 bp, Chicken  19866894363734_1
caaggtattgctgcttatgctgaggcagagttaagcgtcctctactggtatttatccgtttggtttgccctgctatctgccgaatgggggtactggaaaaatcagtgggaaatgcctgaggcttgggacaggctgagggtgagagctcactgcaggaggtgggagagggcccaccacagggagagcagccctgacctgtatctttcatggtttgagggtctcagctgtagcacgtgtgatggatgcagccagacacagcctgctgcaaacccagccgtgctcctccttggagcccttgcragaagagtggagctcactgctcacacaggacaagtgatggatgtgtgtgtccctgtaacaacaaggggagggctgagattgccacctgaagtagcgtgctggaagaaaactgcacacacccagccaraacttgagttgggaggtctgggsggagggagagaagcacacagcgggttgagcagaktatgccaataataaaagagtacaaagcgatgtgtgagctgggagatgcatcttccaaagctgatgtgcagcttcctgcagccattggcaggtgctggtggagctgggtccttgctt

SEQ ID NO: 76486 - DNA, 600 bp, Chicken  19866894363734_2
acaggctgagggtgagagctcactgcaggaggtgggagagggcccaccacagggagagcagccctgacctgtatctttcatggtttgagggtctcagctgtagcacgtgtgatggatgcagccagacacagcctgctgcaaacccagccgtgctcctccttggagcccttgcragaagagtggagctcactgctcacacaggacaagtgatggatgtgtgtgtccctgtaacaacaaggggagggctgagattgccacctgaagtagcgtgctggaagaaaactgcacacacccagccaraacttgagttgggaggtctgggsggagggagagaagcacacagcgggttgagcagaktatgccaataataaaagagtacaaagcgatgtgtgagctgggagatgcatcttccaaagctgatgtgcagcttcctgcagccattggcaggtgctggtggagctgggtccttgcttgcccaggtgctgcaggattacctctttgctgcagtttgagttgtttatcccccagctctgcgttggcagaattttcctgctattgagttaccgcttgctgcagtttctgtaggggaatgagggattg

SEQ ID NO: 76487 - DNA, 600 bp, Chicken  19866894363734_3
tgcaggaggtgggagagggcccaccacagggagagcagccctgacctgtatctttcatggtttgagggtctcagctgtagcacgtgtgatggatgcagccagacacagcctgctgcaaacccagccgtgctcctccttggagcccttgcragaagagtggagctcactgctcacacaggacaagtgatggatgtgtgtgtccctgtaacaacaaggggagggctgagattgccacctgaagtagcgtgctggaagaaaactgcacacacccagccaraacttgagttgggaggtctgggsggagggagagaagcacacagcgggttgagcagaktatgccaataataaaagagtacaaagcgatgtgtgagctgggagatgcatcttccaaagctgatgtgcagcttcctgcagccattggcaggtgctggtggagctgggtccttgcttgcccaggtgctgcaggattacctctttgctgcagtttgagttgtttatcccccagctctgcgttggcagaattttcctgctattgagttaccgcttgctgcagtttctgtaggggaatgagggattgtatgaaaatgctgaaggggaaaa

SEQ ID NO: 76488 - DNA, 600 bp, Chicken  19866894363734_4
gcagccctgacctgtatctttcatggtttgagggtctcagctgtagcacgtgtgatggatgcagccagacacagcctgctgcaaacccagccgtgctcctccttggagcccttgcragaagagtggagctcactgctcacacaggacaagtgatggatgtgtgtgtccctgtaacaacaaggggagggctgagattgccacctgaagtagcgtgctggaagaaaactgcacacacccagccaraacttgagttgggaggtctgggsggagggagagaagcacacagcgggttgagcagaktatgccaataataaaagagtacaaagcgatgtgtgagctgggagatgcatcttccaaagctgatgtgcagcttcctgcagccattggcaggtgctggtggagctgggtccttgcttgcccaggtgctgcaggattacctctttgctgcagtttgagttgtttatcccccagctctgcgttggcagaattttcctgctattgagttaccgcttgctgcagtttctgtaggggaatgagggattgtatgaaaatgctgaaggggaaaatcattagatttgctttaatgaattagagctctac

SEQ ID NO: 76489 - DNA, 599 bp, Chicken  19866894363737_1
  misc_feature (1)..(126): n is any nucleotide
nnnnnnnnnnnnnnnnnnnnnnnnnnnnnnnnnnnnnnnnnnnnnnnnnnnnnnnnnnnnnnnnnnnnnnnnnnnnnnnnnnnnnnnnnnnnnnnnnnnnnnnnnnnnnnnnnnnnnnnnnnnnnnctgagtgttcaccctttggggcttccaggggggagagattttaaatatgtttttaaataaatggtaccttcataatttattcatagctagcatgccagctgaaaatggaaagagctataccagttatttcaacaaagctttggttgttttccaatccaactcctgtcaacagaraaaataggacccaataattttgtccacttcaaagctttacccaaatgatctgtttacttcatgaatggtattggatttagatatgagtgctttgttttcrtgtgttgcttttttgtttgtttgcactgatwgttaaaactgtaaatttgggacatgtctgactcagcagcataaattatgtctgtagcagctactgatctttctatgcaacatgggatcgtgagttgttttccttttctgaactccctatgagcctcagtccctctgccacttaaataataatttcttttttttttttc

SEQ ID NO: 76490 - DNA, 599 bp, Chicken  19866894363737_2
  misc_feature (1)..(26): n is any nucleotide
nnnnnnnnnnnnnnnnnnnnnnnnnnctgagtgttcaccctttggggcttccaggggggagagattttaaatatgtttttaaataaatggtaccttcataatttattcatagctagcatgccagctgaaaatggaaagagctataccagttatttcaacaaagctttggttgttttccaatccaactcctgtcaacagaraaaataggacccaataattttgtccacttcaaagctttacccaaatgatctgtttacttcatgaatggtattggatttagatatgagtgctttgttttcrtgtgttgcttttttgtttgtttgcactgatwgttaaaactgtaaatttgggacatgtctgactcagcagcataaattatgtctgtagcagctactgatctttctatgcaacatgggatcgtgagttgttttccttttctgaactccctatgagcctcagtccctctgccacttaaataataatttcttttttttttttctttccccagagagtatgtgttttgcctgtttcccttgagctggaacttcagtacctgacagaacttggccgcatgtgtgatttttctggaattcacaggt

SEQ ID NO: 76491 - DNA, 600 bp, Chicken  19866894363737_3
tgttcaccctttggggcttccaggggggagagattttaaatatgtttttaaataaatggtaccttcataatttattcatagctagcatgccagctgaaaatggaaagagctataccagttatttcaacaaagctttggttgttttccaatccaactcctgtcaacagaraaaataggacccaataattttgtccacttcaaagctttacccaaatgatctgtttacttcatgaatggtattggatttagatatgagtgctttgttttcrtgtgttgcttttttgtttgtttgcactgatwgttaaaactgtaaatttgggacatgtctgactcagcagcataaattatgtctgtagcagctactgatctttctatgcaacatgggatcgtgagttgttttccttttctgaactccctatgagcctcagtccctctgccacttaaataataatttcttttttttttttctttccccagagagtatgtgttttgcctgtttcccttgagctggaacttcagtacctgacagaacttggccgcatgtgtgatttttctggaattcacaggtaaaatgttcatgtgcctgaatctgggacctga

SEQ ID NO: 76492 - DNA, 600 bp, Chicken  19866894363738_1
attactgcttaattgcactgtactcttccctcagatatatgtcagaaaacagactcagctcctgtgaaacttaacgagtgatgagaatgagtgagataaaggcaagatattcatagcccagtcatccctgccccataattttcaagttagtttgaatgaaagaaaataaaattcttcctgtccactgcatgtcaccattatagcacagagatgtgcccaatgcagcccagtgcattgctggatgcatccatttggatatggggagatgtttggacaaaggagcctgggctacctggcaayctgacactcttttctatgaccagagaccctagtaatacttctgaggcaaagggatgttctctgaattcagccatggccatgtgaaaagctgctgtgttgttttgcatctgaagacatctattttcagtgcaaggggtaactccttgcaattttttggaaggacagtgagagaagactttgtggataatgaaacagaaaattcctagtcttatctttgtgcctctgctcaatgaataactctctccagccttttatattaagtgattagaaagagttaaatgagcatgattgccatggaaa

SEQ ID NO: 76493 - DNA, 600 bp, Chicken  19866894363740_1
aagataactgtaaagtatagaaaataacaagaaaagaagaggtccagagacctcttataaccacatatcattctgtgattctgtccaagtatttatcggagctacagtacaaaagagtttcaaataccacctaagagaatagaaagcatattaaaggtggtatagttccacacagtcagaataactgcatgtgctgcatgcaaagaatcgtaatgtcttaggaacttaagtcttgcgtagatccctctattgagaaacctgaatttgtatgtcttatctcctcagtttgcatcctttgcrgaagcatgaagccttgggctatttgttcaggtgggaaaaartatgaaagatcatatccatcattttccagaggttcaagaagttctctagagaattactattactagtactactaccactagaatctgagctagcagtatgccctagtagccaaaagggccaatattaccctggggtacaccaggcccagctttccaactgttggtagtctatttttctatactactactactatttttacaactgctactacctactctgcttttatacttctctaaatatttgccattggttacaggg

SEQ ID NO: 76494 - DNA, 600 bp, Chicken  19866894363740_2
gtccagagacctcttataaccacatatcattctgtgattctgtccaagtatttatcggagctacagtacaaaagagtttcaaataccacctaagagaatagaaagcatattaaaggtggtatagttccacacagtcagaataactgcatgtgctgcatgcaaagaatcgtaatgtcttaggaacttaagtcttgcgtagatccctctattgagaaacctgaatttgtatgtcttatctcctcagtttgcatcctttgcrgaagcatgaagccttgggctatttgttcaggtgggaaaaartatgaaagatcatatccatcattttccagaggttcaagaagttctctagagaattactattactagtactactaccactagaatctgagctagcagtatgccctagtagccaaaagggccaatattaccctggggtacaccaggcccagctttccaactgttggtagtctatttttctatactactactactatttttacaactgctactacctactctgcttttatacttctctaaatatttgccattggttacaggggtggaagacaaatcagaacaagtatttggcctgacctgctg

SEQ ID NO: 76495 - DNA, 600 bp, Chicken  19866894363742_1
gattcagcagaggctcactaggggctggagcacttgctctgtgagtggagcctgaggtagctgggcttattcagcctagagaagacactgttttggactaatctaactgcagcctccagcatctacgaagaggttactgagaggacagagataagctcttcacagtagtgtatagcagagggtacgatacattaaactaaaacagtggatggaacaagcattgtttaccaaaaggactgcgaaacatcggagaaagttgccccaagaggctgccaaatgctatctttgaaggctttcaaygctcatttggaataaaagccctgaatgatccagcctgaattcactgtcaayccctgctctgagcagaaggctgacctagacccttctggtctgaatgactctcycaacactagtaaataggcacacttgcctttcactccatgcacctacatcccctaaacaagtctgctgcctgttgagtaatgagataagaaagcaagtcagctactcatgagttgtaagactcaggcaagcaaaagctgcaccatacttggaatctactgaagggaaatattatcaggcccacaaagcacagggaat

SEQ ID NO: 76496 - DNA, 600 bp, Chicken  19866894363742_2
ctgaggtagctgggcttattcagcctagagaagacactgttttggactaatctaactgcagcctccagcatctacgaagaggttactgagaggacagagataagctcttcacagtagtgtatagcagagggtacgatacattaaactaaaacagtggatggaacaagcattgtttaccaaaaggactgcgaaacatcggagaaagttgccccaagaggctgccaaatgctatctttgaaggctttcaaygctcatttggaataaaagccctgaatgatccagcctgaattcactgtcaayccctgctctgagcagaaggctgacctagacccttctggtctgaatgactctcycaacactagtaaataggcacacttgcctttcactccatgcacctacatcccctaaacaagtctgctgcctgttgagtaatgagataagaaagcaagtcagctactcatgagttgtaagactcaggcaagcaaaagctgcaccatacttggaatctactgaagggaaatattatcaggcccacaaagcacagggaatcagctatacagatatgctctgtttgtctgctgtcattttaagcttttgttc

SEQ ID NO: 76497 - DNA, 600 bp, Chicken  19866894363742_3
aactgcagcctccagcatctacgaagaggttactgagaggacagagataagctcttcacagtagtgtatagcagagggtacgatacattaaactaaaacagtggatggaacaagcattgtttaccaaaaggactgcgaaacatcggagaaagttgccccaagaggctgccaaatgctatctttgaaggctttcaaygctcatttggaataaaagccctgaatgatccagcctgaattcactgtcaayccctgctctgagcagaaggctgacctagacccttctggtctgaatgactctcycaacactagtaaataggcacacttgcctttcactccatgcacctacatcccctaaacaagtctgctgcctgttgagtaatgagataagaaagcaagtcagctactcatgagttgtaagactcaggcaagcaaaagctgcaccatacttggaatctactgaagggaaatattatcaggcccacaaagcacagggaatcagctatacagatatgctctgtttgtctgctgtcattttaagcttttgttcagcagggcactacacagattggagttgtgtgacaacctcagcttgatgcatag

SEQ ID NO: 76498 - DNA, 600 bp, Chicken  19866894363747_1
gagaaattggcacattatagcatcttaatgctgtcaagtttctatttcattttttttttttctgatgatgaatgagaacagcattgaggtagtgaggaagttgtcactggtaagtcattcaggtgaggttttgttttatagaggtttgagggtattaaagggtataagtgacactattaaagggtataagtgacactaatgtaattaaagatcttctcagctttagatatctcactttgaagacttgtagagcacagcctattagttttaacatcatacagttttattacagcttttggratacttgaggggcttgtacatgggagatacaagctgaggaagactactaaaggcataagtctactggacagttactaaagatttgacccaaaaacagatgaagtgaacataaaccagagcattacatctactttaatctaacgctcctttcttactctacatgatactctacatgtgataatrtctgcaaacagaccaaagatttgatttgtcacaggagccagragtaccacatctcacactgtacaagtaaaaaaatgttaataaatgatttgtgcaggacatcagattttggtgagg

SEQ ID NO: 76499 - DNA, 600 bp, Chicken  19866894363747_2
gtataagtgacactaatgtaattaaagatcttctcagctttagatatctcactttgaagacttgtagagcacagcctattagttttaacatcatacagttttattacagcttttggratacttgaggggcttgtacatgggagatacaagctgaggaagactactaaaggcataagtctactggacagttactaaagatttgacccaaaaacagatgaagtgaacataaaccagagcattacatctactttaatctaacgctcctttcttactctacatgatactctacatgtgataatrtctgcaaacagaccaaagatttgatttgtcacaggagccagragtaccacatctcacactgtacaagtaaaaaaatgttaataaatgatttgtgcaggacatcagattttggtgaggcaagggtcaaggtagaaacagatgcagcagaggtgtctttgtgccaccctggttctgagcactcgtggaaggccaaagctgagctgcctcagcttctgttcagagcatttctaacttgtttttacccaacattgactacttcagctgtcaaggataactacaacataaacatcacaaaaacct

SEQ ID NO: 76500 - DNA, 600 bp, Chicken  19866894363747_3
gatatctcactttgaagacttgtagagcacagcctattagttttaacatcatacagttttattacagcttttggratacttgaggggcttgtacatgggagatacaagctgaggaagactactaaaggcataagtctactggacagttactaaagatttgacccaaaaacagatgaagtgaacataaaccagagcattacatctactttaatctaacgctcctttcttactctacatgatactctacatgtgataatrtctgcaaacagaccaaagatttgatttgtcacaggagccagragtaccacatctcacactgtacaagtaaaaaaatgttaataaatgatttgtgcaggacatcagattttggtgaggcaagggtcaaggtagaaacagatgcagcagaggtgtctttgtgccaccctggttctgagcactcgtggaaggccaaagctgagctgcctcagcttctgttcagagcatttctaacttgtttttacccaacattgactacttcagctgtcaaggataactacaacataaacatcacaaaaacctcttggcatggaaattccctttgtaccatacagtcagtccccg

SEQ ID NO: 76501 - DNA, 599 bp, Chicken  19866894363756_1
  misc_feature (1)..(95): n is any nucleotide
nnnnnnnnnnnnnnnnnnnnnnnnnnnnnnnnnnnnnnnnnnnnnnnnnnnnnnnnnnnnnnnnnnnnnnnnnnnnnnnnnnnnnnnnnnnnnnnttgtacagagtttatgtaaaagtaaaaataagcatgttgacttgtatcctagagttactttgaatagctactcaaacttttgcttttctatagcttcttgcaatgttttcacacactgtgtatttcaggaacccaccatgcagaggctaatattgtaggtaacttctctgttatagattttgccatatgaagaggatgaaatggraagttgctagatttttattacacatacctaaaagcacagattgtagaggaggcaaagaaaacactagcacacatgaaaataattggcttagtctattacatttttcctttctgaattatgcatagataacataacagattactcctctctgccccctaacaattcatcacttgatagatagatagataggtggaacttcagaaataaattactaccattaggaaaaaaataatcaagtgtaagaacttgattaccactgcaagtattgtcccactattaaatctgcagtgtgtgctgca

SEQ ID NO: 76502 - DNA, 600 bp, Chicken  19866894363756_2
atttttattacacatacctaaaagcacagattgtagaggaggcaaagaaaacactagcacacatgaaaataattggcttagtctattacatttttcctttctgaattatgcatagataacataacagattactcctctctgccccctaacaattcatcacttgatagatagatagataggtggaacttcagaaataaattactaccattaggaaaaaaataatcaagtgtaagaacttgattaccactgcaagtattgtcccactattaaatctgcagtgtgtgctgcatacaaatgccrgagttgtgtggtaaataataaaatggatggccctactaccgtgtgcttactaattaactagcactgaaagtagccttgtcatgagagaattgtcatcaccactataactaagaagcaaatgatttttcttctgtgaccaaaagattaatatagaaacagactggcaatggatgtcactgggaataaaatgaaaggtcacagaagactctcaggtatcaaagacacttttttattctgtatcaagcttttgggcaatataacattaccagacttgcagttttttactagtagccctaaagt

SEQ ID NO: 76503 - DNA, 600 bp, Chicken  19866894363759_1
gataatgccattaccaacatcaccactacagcactacttcagttattctgaaatggggaacctctcattccaacctgatgaattttgacacagttctgtgagaaagtggacactttgagccctgaagaacaacagccagtttgattcactgtgtcagtggcccaaagcattaagatcagtagcagaagtgatctgggttcagcttttgaactcattactgaagatatttgtgcactgccacttttatcttaatgctaatatctggctggtcacattccatgcttttagtgctgcagaagytaagcagttatcagctcccaaaaggaaataagaggacactactacagccagcatgaatgaagcaggataggagccacacatctccattttctgcatctatttcccagtctttccatcagtgtgggaattagagaagagctcataaagaacatgtataaaaaaataatwatcaagaactgatgagttaaaaagcaggcagatgggagggctcaccaccagacatggtgtgcatgtcagggagaagtggggatagcaagtgcttgtctggagaatcctcacaagagaaagcttaaggcagaa

SEQ ID NO: 76504 - DNA, 600 bp, Chicken  19866894363759_2
attaagatcagtagcagaagtgatctgggttcagcttttgaactcattactgaagatatttgtgcactgccacttttatcttaatgctaatatctggctggtcacattccatgcttttagtgctgcagaagytaagcagttatcagctcccaaaaggaaataagaggacactactacagccagcatgaatgaagcaggataggagccacacatctccattttctgcatctatttcccagtctttccatcagtgtgggaattagagaagagctcataaagaacatgtataaaaaaataatwatcaagaactgatgagttaaaaagcaggcagatgggagggctcaccaccagacatggtgtgcatgtcagggagaagtggggatagcaagtgcttgtctggagaatcctcacaagagaaagcttaaggcagaaatgttacaaagtgggtttctacacaaagggagcagaaacaagcagttaagtgcacaaaaagcgttactggttycggtggacttcagcttattccaagctttaacaccacctcacacaggtggtcttayggatcaatctgtgtctagtggcaaagagaacaccaatctt

SEQ ID NO: 76505 - DNA, 523 bp, Chicken  19866894363759_3
ccacacatctccattttctgcatctatttcccagtctttccatcagtgtgggaattagagaagagctcataaagaacatgtataaaaaaataatwatcaagaactgatgagttaaaaagcaggcagatgggagggctcaccaccagacatggtgtgcatgtcagggagaagtggggatagcaagtgcttgtctggagaatcctcacaagagaaagcttaaggcagaaatgttacaaagtgggtttctacacaaagggagcagaaacaagcagttaagtgcacaaaaagcgttactggttycggtggacttcagcttattccaagctttaacaccacctcacacaggtggtcttayggatcaatctgtgtctagtggcaaagagaacaccaatctttctcaaacccaggccctaaacacttacttgggacttgctgtccaggctgctgccacgtctgggtaggtactgccccaacccctgcgtcatgaacgcctgaggaccactgcagaggataaaaaggcatg

SEQ ID NO: 76506 - DNA, 468 bp, Chicken  19866894363759_4
tagagaagagctcataaagaacatgtataaaaaaataatwatcaagaactgatgagttaaaaagcaggcagatgggagggctcaccaccagacatggtgtgcatgtcagggagaagtggggatagcaagtgcttgtctggagaatcctcacaagagaaagcttaaggcagaaatgttacaaagtgggtttctacacaaagggagcagaaacaagcagttaagtgcacaaaaagcgttactggttycggtggacttcagcttattccaagctttaacaccacctcacacaggtggtcttayggatcaatctgtgtctagtggcaaagagaacaccaatctttctcaaacccaggccctaaacacttacttgggacttgctgtccaggctgctgccacgtctgggtaggtactgccccaacccctgcgtcatgaacgcctgaggaccactgcagaggataaaaaggcatg

SEQ ID NO: 76507 - DNA, 599 bp, Chicken  19866894363760_1
  misc_feature (1)..(141): n is any nucleotide
nnnnnnnnnnnnnnnnnnnnnnnnnnnnnnnnnnnnnnnnnnnnnnnnnnnnnnnnnnnnnnnnnnnnnnnnnnnnnnnnnnnnnnnnnnnnnnnnnnnnnnnnnnnnnnnnnnnnnnnnnnnnnnnnnnnnnnnnnnnnnttataggttaggatttattattaagcaagtagagaacaaaatggaaaggataattatgttgctgttgaagtccatataccactgtaaaaatccaaggtttgcatgcttgaatacagcatgcagttctatcttggaaaaggcatgctggaactaataaakattcttgggatagcagcgatgattagtcacatactgtgacttccatacagcatacaaggaacttcatacatggaatagtcgaaactctggaaagatatgactggggaaatgtaagaaggtatctgcagaactgagaggcctgcagagcagaggagtgggcttggctttttgccttctctcctaatacaagaatgaagtataccgaaagaagctggtaagggttttatccagaacaaactgaaggaactatttcttcaggcaacctgtgtggactggtggtggtattcttcaaagaactt

SEQ ID NO: 76508 - DNA, 600 bp, Chicken  19866894363762_1
tcagctgaaaccattgagagacttgtgtgatggctccatggtgccactcctggaccaaactcctgctggttgtgtccttgagcagatcacaggtcctaatctgtgctgctaggtgcaccacccacactctcagagccaggtgaaagtggctcccagatgaccctgtaacaaatccctactgacagctactagcaagtatccactaaccttcccctgagatttttctctgttgtggcccctgaccctgagaagttcttgcaccttgtgcttgcctcccatgggcacaaactgttttgcttkttcccaggatgagaggtttgtgatgaattttgcatatactttgaaccatgagcttttgtactgytacagtaagccatagttttccatgcatgcgaggctcccgttacccacaatggttttcctgaccttgtgtttgtgataactatcagctcttcaaggttggaagagaacaggggctcctgtgatttaaactttctgtggtactgcaaaaattttaataaggatctcacacaaagtttttcccttactcgatgcacacagtgttagtgttcagagcaagacttggcatcggggagtcca

SEQ ID NO: 76509 - DNA, 600 bp, Chicken  19866894363762_2
gctggttgtgtccttgagcagatcacaggtcctaatctgtgctgctaggtgcaccacccacactctcagagccaggtgaaagtggctcccagatgaccctgtaacaaatccctactgacagctactagcaagtatccactaaccttcccctgagatttttctctgttgtggcccctgaccctgagaagttcttgcaccttgtgcttgcctcccatgggcacaaactgttttgcttkttcccaggatgagaggtttgtgatgaattttgcatatactttgaaccatgagcttttgtactgytacagtaagccatagttttccatgcatgcgaggctcccgttacccacaatggttttcctgaccttgtgtttgtgataactatcagctcttcaaggttggaagagaacaggggctcctgtgatttaaactttctgtggtactgcaaaaattttaataaggatctcacacaaagtttttcccttactcgatgcacacagtgttagtgttcagagcaagacttggcatcggggagtccaatcatgccttattagctgggtgtagcaacagttcttcagaaaaaataataataataaaaaaaaa

SEQ ID NO: 76510 - DNA, 600 bp, Chicken  19866894363762_3
attagctgggtgtagcaacagttcttcagaaaaaataataataataaaaaaaaatgccatgtatagcccagcatggtgttgtatttgagtcaatggaaactcgctgtcagccaagatgaggatccaggtcagcacttcaggggtattctccctgggaccaccccagccctcacacacaacttatttcagtgtgtttcaagtacgaacaagattgttcttcagaagtacttttatgagcctcgagggtaagtcatctctggcaaggatgatttagcagtgtgcctttgagaaggtgaactmcaacagaggcagggatattggactttctaacacagacaccgagagcctcttcttgcccctctgtagcacagccccagcagatgcatatcagagctctacagcctgcatcataccggagacttgcaaaagtaataaaaaatatgttgtaggctgaaggtaagtgcctgctgctgccagtctgaaggtatcaaacactggatgctttgaggacaaggtggctcagatatagcgtgaatgacaagaaggcaatgaggggacaattccaggaaacatgagcacatgctgatgtcctgtcggaca

SEQ ID NO: 76511 - DNA, 599 bp, Chicken  19866894363763_1
  misc_feature (1)..(42): n is any nucleotide
nnnnnnnnnnnnnnnnnnnnnnnnnnnnnnnnnnnnnnnnnnaaaacatacattgtagcaaatgtgtagaaatgaatcaattttccatttcagaagatgtgaaaggaggaatggacaggatgtctccttaaatgaagtaaaacacatgctttattaaaaattttaaataaaaactttttttttatgtttataatttccttgttgtacatatctaatagaaactctggattcgatctttatgcctaaattgtctggggtaaaatgcagatcactgtttcacttagatttctgtctgtgtcmtggacagcattaatataatgaagctatgtaggtacgaagtaacaggtgtgctaggaagcttagaatctgarttctcttttgacttacttttcctcatcattcctcctactacacctgaaagtaagaaacatgaagtagcatatctgatgaataagttacttcttgtgctctctgtactctcaygtacatctcaaaacttacttatggtgatttttgaagagaagaaatcaatagaaatgccatactttttgggttaaggtgatcggagaagcgattgtatctgattggctaagtttaag

SEQ ID NO: 76512 - DNA, 599 bp, Chicken  19866894363763_2
  misc_feature (1)..(38): n is any nucleotide
nnnnnnnnnnnnnnnnnnnnnnnnnnnnnnnnnnnnnnaaaacatacattgtagcaaatgtgtagaaatgaatcaattttccatttcagaagatgtgaaaggaggaatggacaggatgtctccttaaatgaagtaaaacacatgctttattaaaaattttaaataaaaactttttttttatgtttataatttccttgttgtacatatctaatagaaactctggattcgatctttatgcctaaattgtctggggtaaaatgcagatcactgtttcacttagatttctgtctgtgtcttggmcagcattaatataatgaagctatgtaggtacgaagtaacaggtgtgctaggaagcttagaatctgarttctcttttgacttacttttcctcatcattcctcctactacacctgaaagtaagaaacatgaagtagcatatctgatgaataagttacttcttgtgctctctgtactctcaygtacatctcaaaacttacttatggtgatttttgaagagaagaaatcaatagaaatgccatactttttgggttaaggtgatcggagaagcgattgtatctgattggctaagtttaagatgt

SEQ ID NO: 76513 - DNA, 600 bp, Chicken  19866894363763_3
atgaatcaattttccatttcagaagatgtgaaaggaggaatggacaggatgtctccttaaatgaagtaaaacacatgctttattaaaaattttaaataaaaactttttttttatgtttataatttccttgttgtacatatctaatagaaactctggattcgatctttatgcctaaattgtctggggtaaaatgcagatcactgtttcacttagatttctgtctgtgtcttggacagcattaatataatgaagctatgtaggtacgaagtaacaggtgtgctaggaagcttagaatctgarttctcttttgacttacttttcctcatcattcctcctactacacctgaaagtaagaaacatgaagtagcatatctgatgaataagttacttcttgtgctctctgtactctcaygtacatctcaaaacttacttatggtgatttttgaagagaagaaatcaatagaaatgccatactttttgggttaaggtgatcggagaagcgattgtatctgattggctaagtttaagatgtgagtggaaaattgaggctttttttgtttgatatgtccraatgaggatttttggaggagagaagagatg

SEQ ID NO: 76514 - DNA, 582 bp, Chicken  19866894363763_4
atgtttataatttccttgttgtacatatctaatagaaactctggattcgatctttatgcctaaattgtctggggtaaaatgcagatcactgtttcacttagatttctgtctgtgtcttggacagcattaatataatgaagctatgtaggtacgaagtaacaggtgtgctaggaagcttagaatctgarttctcttttgacttacttttcctcatcattcctcctactacacctgaaagtaagaaacatgaagtagcatatctgatgaataagttacttcttgtgctctctgtactctcaygtacatctcaaaacttacttatggtgatttttgaagagaagaaatcaatagaaatgccatactttttgggttaaggtgatcggagaagcgattgtatctgattggctaagtttaagatgtgagtggaaaattgaggctttttttgtttgatatgtccraatgaggatttttggaggagagaagagatgggctaaaagtactttttaaactgttattgctttcagcaggaattttggatacattcattaaaattggcatttttctttttatagttgctggaaa

SEQ ID NO: 76515 - DNA, 424 bp, Chicken  19866894363763_5
acaggtgtgctaggaagcttagaatctgarttctcttttgacttacttttcctcatcattcctcctactacacctgaaagtaagaaacatgaagtagcatatctgatgaataagttacttcttgtgctctctgtactctcaygtacatctcaaaacttacttatggtgatttttgaagagaagaaatcaatagaaatgccatactttttgggttaaggtgatcggagaagcgattgtatctgattggctaagtttaagatgtgagtggaaaattgaggctttttttgtttgatatgtccraatgaggatttttggaggagagaagagatgggctaaaagtactttttaaactgttattgctttcagcaggaattttggatacattcattaaaattggcatttttctttttatagttgctggaaa

SEQ ID NO: 76516 - DNA, 600 bp, Chicken  19866894363767_1
tgatcaagatttggcttgttgaagtatatagaaagttgctcagtgtcttctgatgtctgagcaaatctttagatgctggaaggaatataaaatagttcaacagatttaaaatcagttgctgtcctctctgttgtgccaacatatagccaagctgaacagaaatcaggtacagctgacttagaacccagtgtttcagctgcagaagtatgtgggcctggcttatggtgcaaccacatatgctctcgtggtcctccattccccagtaggaacaggggtgggttgaacaagaatgggctgcaraggtcagtttaatcagcacagtcacctgttctgtaaaagcagcctaatcttaatttaaggtctaagcatttttgaagtaaacraggcatcagccaaaatacatttaaaatttcctagtagcttatttttctgaatcaaggttaaaaatactaggactgtcattagcaggacatgaagaaaawtcagtagtaatgtgatgtcttgtgccacttacrtacatgatcttttccttcaagctgtcattttaaaaatccctttgggaacagtccatcagtcacttgggtttgaattaagcactgc

SEQ ID NO: 76517 - DNA, 600 bp, Chicken  19866894363767_2
aatataaaatagttcaacagatttaaaatcagttgctgtcctctctgttgtgccaacatatagccaagctgaacagaaatcaggtacagctgacttagaacccagtgtttcagctgcagaagtatgtgggcctggcttatggtgcaaccacatatgctctcgtggtcctccattccccagtaggaacaggggtgggttgaacaagaatgggctgcaraggtcagtttaatcagcacagtcacctgttctgtaaaagcagcctaatcttaatttaaggtctaagcatttttgaagtaaacraggcatcagccaaaatacatttaaaatttcctagtagcttatttttctgaatcaaggttaaaaatactaggactgtcattagcaggacatgaagaaaawtcagtagtaatgtgatgtcttgtgccacttacrtacatgatcttttccttcaagctgtcattttaaaaatccctttgggaacagtccatcagtcacttgggtttgaattaagcactgctgctcaggtattttgtacagaaatgtgctggttttgttactttctccccttgaaaataagagagtaaattaaaatgtctcctt

SEQ ID NO: 76518 - DNA, 600 bp, Chicken  19866894363767_3
acccagtgtttcagctgcagaagtatgtgggcctggcttatggtgcaaccacatatgctctcgtggtcctccattccccagtaggaacaggggtgggttgaacaagaatgggctgcaraggtcagtttaatcagcacagtcacctgttctgtaaaagcagcctaatcttaatttaaggtctaagcatttttgaagtaaacraggcatcagccaaaatacatttaaaatttcctagtagcttatttttctgaatcaaggttaaaaatactaggactgtcattagcaggacatgaagaaaawtcagtagtaatgtgatgtcttgtgccacttacrtacatgatcttttccttcaagctgtcattttaaaaatccctttgggaacagtccatcagtcacttgggtttgaattaagcactgctgctcaggtattttgtacagaaatgtgctggttttgttactttctccccttgaaaataagagagtaaattaaaatgtctcctttgccttgaaattttgacctgaatcccacttacagtatagatgcactaataaattacggaggaatccaagtgctgatacatgagtgagttccagcagatc

SEQ ID NO: 76519 - DNA, 600 bp, Chicken  19866894363767_4
tggcttatggtgcaaccacatatgctctcgtggtcctccattccccagtaggaacaggggtgggttgaacaagaatgggctgcaraggtcagtttaatcagcacagtcacctgttctgtaaaagcagcctaatcttaatttaaggtctaagcatttttgaagtaaacraggcatcagccaaaatacatttaaaatttcctagtagcttatttttctgaatcaaggttaaaaatactaggactgtcattagcaggacatgaagaaaawtcagtagtaatgtgatgtcttgtgccacttacrtacatgatcttttccttcaagctgtcattttaaaaatccctttgggaacagtccatcagtcacttgggtttgaattaagcactgctgctcaggtattttgtacagaaatgtgctggttttgttactttctccccttgaaaataagagagtaaattaaaatgtctcctttgccttgaaattttgacctgaatcccacttacagtatagatgcactaataaattacggaggaatccaagtgctgatacatgagtgagttccagcagatctagctgaggcaagttttatcccttgctgtttgt

SEQ ID NO: 76520 - DNA, 600 bp, Chicken  19866894363767_5
cagtatagatgcactaataaattacggaggaatccaagtgctgatacatgagtgagttccagcagatctagctgaggcaagttttatcccttgctgtttgtcctgccccattgccggaagctgtagcccatgtactgaggcagcagttaaggttgtatccatagtacctctaccacctcagttcatagcttgttatttttatctatagttagcagtggctttatgcagaggacagagatttgcaaccaggaccaacccttcttttggactgctgatggtgacagtgacaggagtggtctrtcttgtttctctgctgcctggatgtttgaacttctttttttagtcagatcctttgcaggtgttgtttatactatactgttttaagataaattgtcacaaatattgttttaaaatattccatatattgtgaactaatggataagtagttcagatatccacacgctggaggtaaaagctgtcatttgactgataactcagctgtccatatttctcagtgaaatacagccttcaaacactagcctgccaattctgtttaaactataagaacacagttacttcccttccactcattacaggtag

SEQ ID NO: 76521 - DNA, 600 bp, Chicken  19866894363797_1
gcaaagacaagcagaattagaagcagcacggttagcaaaagaaaaagaggaggaagaagttaggcaacaagcattagtagcaaagaaggaaaaagagatacagaaaaaagcaatcaagaaggaaaggcaaaaattgagaacaacgtgcaaggtacttcagtgttaccgtagtgaaatacaggttatgtgagtgaaattattatgcttgcttagatcagacacttgttcttgtggtcagagatgggtatggaaagtgggtttgctaaacagcaaaatgctgaagtgcatacttaccatgcrgttttgagtaaggctgaccgaataggcccaagcacagcagtggctgaagaatgctgtgtgttaagattttgtctgaagggacaggacaataaagttcaagaactttgcagaacatgtatttctgcttccagaactggaattacttttctgataatgaggcagattgtgttaaaatgatggaggaggtggaaaagctttgtgatcgtcttgagctagcaaggtaagctttcttgctccctgttcctgctcgtattgatatccacctttctactagcgatgcgttgtaacttaatcgtttat

SEQ ID NO: 76522 - DNA, 600 bp, Chicken  19866894363797_2
ctctactacccatgacctggggctggatccacagaaggatttacatgctatatacacatggaaaggccagtgggttggatgccaaagtataggaaaagcaagacacttatgctcaaggttcatgaacctccacaaggatttgcttcaatttgtcaggaaagcaaatccatttggagtaacaaggctgaacccatgtcttgcagagagaataagatgctttctctcatccactttcgagtgatgtctgtgaacttcatttcctgatggagaagatcatctgcccccatcccagggttagawttactcatcagacaactgaaattaagattcaaatccctcttgcactgcatatgatttattcygatttcccagtctccaggagagtgttccaaaataggatattgacctttctgtccctctgttaaagctgttctacttctgctttaataaaaattatctaaggtagtttttcttttgtcgagaagacttaattaagagatggtgggcgtccttccaacaggtgcaagtgtgcatcgttttaatgtcatcaggaccatactgtacatcctgttatctactcagaaggagatatgtgaatgg

SEQ ID NO: 76523 - DNA, 600 bp, Chicken  19866894363797_3
aaggccagtgggttggatgccaaagtataggaaaagcaagacacttatgctcaaggttcatgaacctccacaaggatttgcttcaatttgtcaggaaagcaaatccatttggagtaacaaggctgaacccatgtcttgcagagagaataagatgctttctctcatccactttcgagtgatgtctgtgaacttcatttcctgatggagaagatcatctgcccccatcccagggttagawttactcatcagacaactgaaattaagattcaaatccctcttgcactgcatatgatttattcygatttcccagtctccaggagagtgttccaaaataggatattgacctttctgtccctctgttaaagctgttctacttctgctttaataaaaattatctaaggtagtttttcttttgtcgagaagacttaattaagagatggtgggcgtccttccaacaggtgcaagtgtgcatcgttttaatgtcatcaggaccatactgtacatcctgttatctactcagaaggagatatgtgaatggtatttaactgctgtctaaagatgcgattacagttcacaaagatgtgtgacagataaattcag

SEQ ID NO: 76524 - DNA, 600 bp, Chicken  19866894363797_4
tgtgacagataaattcagttctgcttgccaacaaactgtacatatggccacctaagcctgagtaaacgctgaatagctgaggtctgtgttgttgcaattaatgctaatttagctagcctattaaagctttcacttgaactataatcgtaataattgagaatttctggcctcaccagggttaggtagcagggttacgtagttttactggaagctttgggagttactgtactcagaatggatgtcggactgtccccactagccagttcaggttcttaatccttctgtggatctgtctcctgrtgtcagatgttagtgtggatattcccattatattcagaaatcttgccttaatccttgtgtttcttagtgaacttgggatggacttctactgtagctgctaatctgggatgactacatttgtgcacacaatggagggaaataatgctgaatcagatgagctctgtttcttcatgcatcatgggcagaacagaaactaagcaaaattcaaggctcaaagcaatcccagagcggggggtttgtagcaacataaaatgtttcttccttgaaaatgaaaatgctcatttacaactyctcagatag

SEQ ID NO: 76525 - DNA, 600 bp, Chicken  19866894363797_5
gtctcctgrtgtcagatgttagtgtggatattcccattatattcagaaatcttgccttaatccttgtgtttcttagtgaacttgggatggacttctactgtagctgctaatctgggatgactacatttgtgcacacaatggagggaaataatgctgaatcagatgagctctgtttcttcatgcatcatgggcagaacagaaactaagcaaaattcaaggctcaaagcaatcccagagcggggggtttgtagcaacataaaatgtttcttccttgaaaatgaaaatgctcatttacaactyctcagatagaagaaataaatgaacaaataaggcgagagaaagaagaggctgaggctcgtatgcgccaagcaacaaagagttcagagaagtcaacracaggtggtggaggtgggagcaaaaactggccagaagatgatttacagttattaattaaagcagtgaacctcttcccagcagggactaattcaaggtacttctttgttttggtgttaaaagctaactaatagttttaagtaaataacaagtataatacagcttacgttcagaccatcttaaatgtgtcagtaggactctttaaat

SEQ ID NO: 76526 - DNA, 600 bp, Chicken  19866894363797_6
tactgtagctgctaatctgggatgactacatttgtgcacacaatggagggaaataatgctgaatcagatgagctctgtttcttcatgcatcatgggcagaacagaaactaagcaaaattcaaggctcaaagcaatcccagagcggggggtttgtagcaacataaaatgtttcttccttgaaaatgaaaatgctcatttacaactyctcagatagaagaaataaatgaacaaataaggcgagagaaagaagaggctgaggctcgtatgcgccaagcaacaaagagttcagagaagtcaacracaggtggtggaggtgggagcaaaaactggccagaagatgatttacagttattaattaaagcagtgaacctcttcccagcagggactaattcaaggtacttctttgttttggtgttaaaagctaactaatagttttaagtaaataacaagtataatacagcttacgttcagaccatcttaaatgtgtcagtaggactctttaaatttccttgactgttgaacagcctctggtttctcttctgttaatactgcactgtacatgtgtctggaattacttctggccctatttgtttcactcaa

SEQ ID NO: 76527 - DNA, 600 bp, Chicken  19866894363802_1
tgaggagagaaagaaaaacccagtctcctacaaataggctgcctaccaaactatgctcgatcactcctcgttacacagggaggcagcatgaaagcagatgttttaggttgttcctccatactgtagagagcccagactaagccaaatgcagaaactgccaggttgtggcagtgcatctctcctggacaggagcagccgaagtcccactggtaagtatcaccaaagggcagaaagcactggagacgtagggctctatcatgcatcacagaagcactgtgtttatatgaatttctgaaagargggggaagttcagagagtggaaataaaatctgaatgaagtcatcttttggatccattattcctccacagttacacgtcagtatgaagaaggacaatacatgaaacagtagtgttaaattcagtggggcattttcagtaagatccctcctgcagcccctgggtacaatctctcctcctaagctgccatgttggtcaattatagagattggtcaattagacagtagatataggcaaatagctcatttagtattggcagcaaatgaaactgaggctccattttgacaatatggatataaaaaa

SEQ ID NO: 76528 - DNA, 599 bp, Chicken  19866894363810_1
  misc_feature (1)..(16): n is any nucleotide
nnnnnnnnnnnnnnnntcccggtgaaaagagttattttctcttctggatttgacttctgcttatgcagggttatccttaaacagaggagagtttcaaaatgagagagtatgatcacacttttaagattttacttaagaaagagaggttggagacccacgtaactttttgttgttgttgttggacttttattttagtctccagattttgcctgattctcactcattttcacatgtaagtttaaatccacttctgaaagtcatcatctaactgcatcagatttcatgtgaagtctcagcatrtgtgaaatatttagacsatcactaaacgtataatggaaaattagactgggaagaccttagggaggtyccagacccagaatggaataagcagatcgcgtgggatcctagactgataggtactgaacctttctatgagtatggagattgcaaggactcaaggattggaggactcaagctatttttaagacttttctgatgcctatcctgaaccttaccttgtttcttatatgcgtgggtgtaaaaaacattgcattttctttcaaacaaccttgtgaatatttggtgcttactatcatttt

SEQ ID NO: 76529 - DNA, 600 bp, Chicken  19866894363810_2
cccggtgaaaagagttattttctcttctggatttgacttctgcttatgcagggttatccttaaacagaggagagtttcaaaatgagagagtatgatcacacttttaagattttacttaagaaagagaggttggagacccacgtaactttttgttgttgttgttggacttttattttagtctccagattttgcctgattctcactcattttcacatgtaagtttaaatccacttctgaaagtcatcatctaactgcatcagatttcatgtgaagtctcagcatrtgtgaaatatttagacsatcactaaacgtataatggaaaattagactgggaagaccttagggaggtyccagacccagaatggaataagcagatcgcgtgggatcctagactgataggtactgaacctttctatgagtatggagattgcaaggactcaaggattggaggactcaagctatttttaagacttttctgatgcctatcctgaaccttaccttgtttcttatatgcgtgggtgtaaaaaacattgcattttctttcaaacaaccttgtgaatatttggtgcttactatcattttcccttcagttttctcagt

SEQ ID NO: 76530 - DNA, 600 bp, Chicken  19866894363810_3
gggttatccttaaacagaggagagtttcaaaatgagagagtatgatcacacttttaagattttacttaagaaagagaggttggagacccacgtaactttttgttgttgttgttggacttttattttagtctccagattttgcctgattctcactcattttcacatgtaagtttaaatccacttctgaaagtcatcatctaactgcatcagatttcatgtgaagtctcagcatrtgtgaaatatttagacsatcactaaacgtataatggaaaattagactgggaagaccttagggaggtyccagacccagaatggaataagcagatcgcgtgggatcctagactgataggtactgaacctttctatgagtatggagattgcaaggactcaaggattggaggactcaagctatttttaagacttttctgatgcctatcctgaaccttaccttgtttcttatatgcgtgggtgtaaaaaacattgcattttctttcaaacaaccttgtgaatatttggtgcttactatcattttcccttcagttttctcagtcccagttccttcagcttttccctgcaggttatgacttctagacctcttac

SEQ ID NO: 76531 - DNA, 599 bp, Chicken  19866894363815_1
  misc_feature (1)..(111): n is any nucleotide
nnnnnnnnnnnnnnnnnnnnnnnnnnnnnnnnnnnnnnnnnnnnnnnnnnnnnnnnnnnnnnnnnnnnnnnnnnnnnnnnnnnnnnnnnnnnnnnnnnnnnnnnnnnnnnncccccctttacacctattagtacaatttgctttgtactgatggatttgaaagcagtgctggagttgaaatatctgcatttcaatgacctcgagcagtccccttatacagggcaaacagccacagtcaggagcagtaattttgcactgaccgtatcaaaccgattttaaacagtaaaacagcagtgggargactgaggtgttgataaagcttttgagtcgttactgatgagtgatacagcaccacagcacctgattttgctttttgcccattggattttttaattacagccattatttcagaagttgtctggtctgcataaagataaaatgcaccattctgtttattccaagcttatcaatcgcacaacataagaaagcagctcttggaatccctacgattgcttgaaagcctttcctttgtgcatctagcagcaataaagcatgtgttattgaagtatctacttttaccctcagraatatagaayatg

SEQ ID NO: 76532 - DNA, 600 bp, Chicken  19866894363815_2
aacagcagtgggargactgaggtgttgataaagcttttgagtcgttactgatgagtgatacagcaccacagcacctgattttgctttttgcccattggattttttaattacagccattatttcagaagttgtctggtctgcataaagataaaatgcaccattctgtttattccaagcttatcaatcgcacaacataagaaagcagctcttggaatccctacgattgcttgaaagcctttcctttgtgcatctagcagcaataaagcatgtgttattgaagtatctacttttaccctcagraatatagaayatgtactttaagctcaggaggaatctagtaaatcaacagaagaaaaacccttcatcatgtataggtctctgtttcctccaaaggtagctaattttatatgaaagtttcaatggctgcttgcatgcaccaaacttcataaaggactgcatttcccttatgcttgactcggcaaaggactgcyatttttcacagtctttgggttaaataatgtgatctggcatttcttaagagtccccacatgctggctaaaaacatttggctgtgaatctggatctagaaggacgaagcaa

SEQ ID NO: 76533 - DNA, 600 bp, Chicken  19866894363815_3
ggargactgaggtgttgataaagcttttgagtcgttactgatgagtgatacagcaccacagcacctgattttgctttttgcccattggattttttaattacagccattatttcagaagttgtctggtctgcataaagataaaatgcaccattctgtttattccaagcttatcaatcgcacaacataagaaagcagctcttggaatccctacgattgcttgaaagcctttcctttgtgcatctagcagcaataaagcatgtgttattgaagtatctacttttaccctcagraatatagaayatgtactttaagctcaggaggaatctagtaaatcaacagaagaaaaacccttcatcatgtataggtctctgtttcctccaaaggtagctaattttatatgaaagtttcaatggctgcttgcatgcaccaaacttcataaaggactgcatttcccttatgcttgactcggcaaaggactgcyatttttcacagtctttgggttaaataatgtgatctggcatttcttaagagtccccacatgctggctaaaaacatttggctgtgaatctggatctagaaggacgaagcaaaacacatatc

SEQ ID NO: 76534 - DNA, 600 bp, Chicken  19866894363815_4
acataagaaagcagctcttggaatccctacgattgcttgaaagcctttcctttgtgcatctagcagcaataaagcatgtgttattgaagtatctacttttaccctcagraatatagaayatgtactttaagctcaggaggaatctagtaaatcaacagaagaaaaacccttcatcatgtataggtctctgtttcctccaaaggtagctaattttatatgaaagtttcaatggctgcttgcatgcaccaaacttcataaaggactgcatttcccttatgcttgactcggcaaaggactgcyatttttcacagtctttgggttaaataatgtgatctggcatttcttaagagtccccacatgctggctaaaaacatttggctgtgaatctggatctagaaggacgaagcaaaacacatatctattttaagacaatgaaatacatagtcttacaggagcagattttaaaaacttgaacaaagaagacaaaaaaagggaaggtaagaatttgcgtatgaaaaactgacaggacctatgtgtgtatacagcccggtgcagcatttagttggtgatacgtttctttactttcctcattaatcatga

SEQ ID NO: 76535 - DNA, 599 bp, Chicken  19866894363832_1
  misc_feature (1)..(62): n is any nucleotide
nnnnnnnnnnnnnnnnnnnnnnnnnnnnnnnnnnnnnnnnnnnnnnnnnnnnnnnnnnnnnntagaagtatgcaacgaggcctaacaataagaggacactcgatttctaacttgctgctgaggaaccgtttgcctgaactaagtaagctgcacagcaagggtactgcagtgcctccattgctccactcctgtacgggaaggcactcatgactgaaaggagcagagttacagagcagctcaatggaaagatacaacatctctcaactcctcacataaactgagtaagaaacacggctgtgwgaaagcacttttctgttacacccacgtacatttctggcaagaagcctcaaatggatgtcagcatcacaagcttgttctaatgcacagcaccagcaaactcccctccctggggatcattgtcttaaataatgcagtttccccaccccccactgtctcctggtcttttcagatccagaaatgtgcaataagcactgtagttgcaattcttaacttaattggcagtctttcaagtgcaattatatctaaaagactggcctttaatcttgccacattgctactttaaatgcctgatttttttt

SEQ ID NO: 76536 - DNA, 600 bp, Chicken  19866894363836_1
gctgttgtaacccctccaggaggctaaatgcattcaggcaagctgctgggaactttaaaggatgatctctagggataattttccttctgaatgtttctgaaggaaatttctgagtaacaagtcagcacagcactttatgggatcacactcagctttcttacacatactgctgtgaaacaaagtgagttaatacctgactgaaatgagcacagagtttcaatgtttatacctctcttcaggctccttttaaactcaagaaggaatagatcaagtgtatgattactttttatttttaatgargatttagaatctggaggaagaaaattctatacaaatttaccacactctgtcctaattcacatcttgtttataattgatatgagtcactgtctgatggatatgctgctgcagaaatgtgaatatatgcagcaatattaatgcagtgattctcacyctgtagttctatacraagaaagaaggctgcaactttagctggaatggagcccaagacccaatcagtaccacagttagctgcagaaccaggcaggagatgactaggcttggattagacatagatattccataactatctgctgcaca

SEQ ID NO: 76537 - DNA, 600 bp, Chicken  19866894363836_2
ttcttacacatactgctgtgaaacaaagtgagttaatacctgactgaaatgagcacagagtttcaatgtttatacctctcttcaggctccttttaaactcaagaaggaatagatcaagtgtatgattactttttatttttaatgargatttagaatctggaggaagaaaattctatacaaatttaccacactctgtcctaattcacatcttgtttataattgatatgagtcactgtctgatggatatgctgctgcagaaatgtgaatatatgcagcaatattaatgcagtgattctcacyctgtagttctatacraagaaagaaggctgcaactttagctggaatggagcccaagacccaatcagtaccacagttagctgcagaaccaggcaggagatgactaggcttggattagacatagatattccataactatctgctgcacagtgaagatatactctaagcaaatacaaccagcattaaattggaaccaatattgtataccgaggccatcttttcaagtcaagatcttcaagtgagaaacagagccagtcactcttgtactccttgccattcattcttatctccacaaaggctctg

SEQ ID NO: 76538 - DNA, 600 bp, Chicken  19866894363836_3
ctgtgaaacaaagtgagttaatacctgactgaaatgagcacagagtttcaatgtttatacctctcttcaggctccttttaaactcaagaaggaatagatcaagtgtatgattactttttatttttaatgargatttagaatctggaggaagaaaattctatacaaatttaccacactctgtcctaattcacatcttgtttataattgatatgagtcactgtctgatggatatgctgctgcagaaatgtgaatatatgcagcaatattaatgcagtgattctcacyctgtagttctatacraagaaagaaggctgcaactttagctggaatggagcccaagacccaatcagtaccacagttagctgcagaaccaggcaggagatgactaggcttggattagacatagatattccataactatctgctgcacagtgaagatatactctaagcaaatacaaccagcattaaattggaaccaatattgtataccgaggccatcttttcaagtcaagatcttcaagtgagaaacagagccagtcactcttgtactccttgccattcattcttatctccacaaaggctctgaactttcagactaac

SEQ ID NO: 76539 - DNA, 600 bp, Chicken  19866894363839_1
tccggtgctttccttttctctttacaagtcttcaggaaatacttgatcattgaaagcactgctgccagcatcatacacagcgaaataaactccaagtaaaccacaaagaactgatgctttcatcctctatcttttgtgtagaatccatgatcagaaacaacttttcaatcactgactgtttcagtgtttcccaaccagttcataaagcggctttcaggacatgacgtaaaacagcagttcaaagccatagatctttctagttaatctagaagattaagcacctcacagccactggaaagwgctccttggaactacagtattatggcctggataaatctggttttataatcctgcttagtcaacactgatctggataagcagagacccatcgtttgagaatgaagctcagaaagaatgatttaggcaaagagaggaaaacagcagcacatattttcaacagggacaggaaggtggcataggatgttaaaccatgccagggacaaaggataatccccaattgccctttacgatggtgtttcacagagagtcaccttattggtgtgttctgggctgagtgcagtgggcagggccagcttggtc

SEQ ID NO: 76540 - DNA, 599 bp, Chicken  19866894363840_1
  misc_feature (1)..(84): n is any nucleotide
nnnnnnnnnnnnnnnnnnnnnnnnnnnnnnnnnnnnnnnnnnnnnnnnnnnnnnnnnnnnnnnnnnnnnnnnnnnnnnnnnnnntaatgtcagagtgcttgtttctctagaaggaaagggtgtgagctgcagaatggccagatctagagcagacagttaactgtaaaatctaattcattttctgatagcactaccaccactcatcaccactttttccaactgcagaacaccaaaagtcactatttgctaccggcctcattaaaagcctcagagaatcctaccaaataatgaaaatatatktaattcttgcattgccagtgatggaaaaatagatgtagcatagtctggtgaagacaaatttggaaactttcacacycccaaacatagagctctcagtttggaaagtcagtacggtaccctgcatcattaagaaggatattaaaatacctccttacatattaccacatgggaggaactaaaccaattgctcagtatcatagggcttatcagcaaggaaagccctagcagaactacagcatttctatggtctctgaggtctacctccccttaaaatcaggaaacagctacttacagtgaac

SEQ ID NO: 76541 - DNA, 599 bp, Chicken  19866894363840_2
  misc_feature (1)..(8): n is any nucleotide
nnnnnnnntaatgtcagagtgcttgtttctctagaaggaaagggtgtgagctgcagaatggccagatctagagcagacagttaactgtaaaatctaattcattttctgatagcactaccaccactcatcaccactttttccaactgcagaacaccaaaagtcactatttgctaccggcctcattaaaagcctcagagaatcctaccaaataatgaaaatatatktaattcttgcattgccagtgatggaaaaatagatgtagcatagtctggtgaagacaaatttggaaactttcacacycccaaacatagagctctcagtttggaaagtcagtacggtaccctgcatcattaagaaggatattaaaatacctccttacatattaccacatgggaggaactaaaccaattgctcagtatcatagggcttatcagcaaggaaagccctagcagaactacagcatttctatggtctctgaggtctacctccccttaaaatcaggaaacagctacttacagtgaacctttaaaaatacatgcatctgaagcaggagatacaaaaagaccacaataactcattcattaagtgacatttctgtg

SEQ ID NO: 76542 - DNA, 599 bp, Chicken  19866894363844_1
  misc_feature (1)..(166): n is any nucleotide
nnnnnnnnnnnnnnnnnnnnnnnnnnnnnnnnnnnnnnnnnnnnnnnnnnnnnnnnnnnnnnnnnnnnnnnnnnnnnnnnnnnnnnnnnnnnnnnnnnnnnnnnnnnnnnnnnnnnnnnnnnnnnnnnnnnnnnnnnnnnnnnnnnnnnnnnnnnnnnnnnnnnnnaaggatggatttaagcctccagctcatcacaagaaaggggagcgacgtctgaggcatcacttcttggcagcctctgatcttccacaggttggagagaaatttggtaggctaaaatatctctgagccatccctgyagtttaatggcactaatagggactgtgacgacgaggagctgraagtgcatgaaggggactccgtgtccccccatggccgtacttggggacacactgaagcaaacagrtccttgrctgtcatgtcgaggggtcacataaggaccgagttcagctgaccttaaccctgcgtttcctggctctgcctgatgtaagccagacctattgccttgtttgcacactggctttgcggcgggggtgatggattgcagtgtgagctttaccacccttcatcgctgcttcctgtgctcttttggcccgtt

SEQ ID NO: 76543 - DNA, 599 bp, Chicken  19866894363844_2
  misc_feature (1)..(124): n is any nucleotide
nnnnnnnnnnnnnnnnnnnnnnnnnnnnnnnnnnnnnnnnnnnnnnnnnnnnnnnnnnnnnnnnnnnnnnnnnnnnnnnnnnnnnnnnnnnnnnnnnnnnnnnnnnnnnnnnnnnnnnnnnnnnaaggatggatttaagcctccagctcatcacaagaaaggggagcgacgtctgaggcatcacttcttggcagcctctgatcttccacaggttggagagaaatttggtaggctaaaatatctctgagccatccctgyagtttaatggcactaatagggactgtgacgacgaggagctgraagtgcatgaaggggactccgtgtccccccatggccgtacttggggacacactgaagcaaacagrtccttgrctgtcatgtcgaggggtcacataaggaccgagttcagctgaccttaaccctgcgtttcctggctctgcctgatgtaagccagacctattgccttgtttgcacactggctttgcggcgggggtgatggattgcagtgtgagctttaccacccttcatcgctgcttcctgtgctcttttggcccgttatgttcagttcagtcagagtttattataaataacttcagata

SEQ ID NO: 76544 - DNA, 599 bp, Chicken  19866894363844_3
  misc_feature (1)..(59): n is any nucleotide
nnnnnnnnnnnnnnnnnnnnnnnnnnnnnnnnnnnnnnnnnnnnnnnnnnnnnnnnnnnaaggatggatttaagcctccagctcatcacaagaaaggggagcgacgtctgaggcatcacttcttggcagcctctgatcttccacaggttggagagaaatttggtaggctaaaatatctctgagccatccctgyagtttaatggcactaatagggactgtgacgacgaggagctgraagtgcatgaaggggactccgtgtccccccatggccgtacttggggacacactgaagcaaacagrtccttgrctgtcatgtcgaggggtcacataaggaccgagttcagctgaccttaaccctgcgtttcctggctctgcctgatgtaagccagacctattgccttgtttgcacactggctttgcggcgggggtgatggattgcagtgtgagctttaccacccttcatcgctgcttcctgtgctcttttggcccgttatgttcagttcagtcagagtttattataaataacttcagatagatgaaatatcccgggcttgctttttttttytcttttttcttggcagttgcagagcatgaatcgg

SEQ ID NO: 76545 - DNA, 599 bp, Chicken  19866894363844_4
  misc_feature (1)..(52): n is any nucleotide
nnnnnnnnnnnnnnnnnnnnnnnnnnnnnnnnnnnnnnnnnnnnnnnnnnnnaaggatggatttaagcctccagctcatcacaagaaaggggagcgacgtctgaggcatcacttcttggcagcctctgatcttccacaggttggagagaaatttggtaggctaaaatatctctgagccatccctgyagtttaatggcactaatagggactgtgacgacgaggagctgraagtgcatgaaggggactccgtgtccccccatggccgtacttggggacacactgaagcaaacagrtccttgrctgtcatgtcgaggggtcacataaggaccgagttcagctgaccttaaccctgcgtttcctggctctgcctgatgtaagccagacctattgccttgtttgcacactggctttgcggcgggggtgatggattgcagtgtgagctttaccacccttcatcgctgcttcctgtgctcttttggcccgttatgttcagttcagtcagagtttattataaataacttcagatagatgaaatatcccgggcttgctttttttttytcttttttcttggcagttgcagagcatgaatcggctttgag

SEQ ID NO: 76546 - DNA, 512 bp, Chicken  19866894363844_5
atggccgtacttggggacacactgaagcaaacagrtccttgrctgtcatgtcgaggggtcacataaggaccgagttcagctgaccttaaccctgcgtttcctggctctgcctgatgtaagccagacctattgccttgtttgcacactggctttgcggcgggggtgatggattgcagtgtgagctttaccacccttcatcgctgcttcctgtgctcttttggcccgttatgttcagttcagtcagagtttattataaataacttcagatagatgaaatatcccgggcttgctttttttttytcttttttcttggcagttgcagagcatgaatcggctttgaggcaattgaggtattttaacgtagcatttacagcccctatctatacaaaatgtgacttgtgtttatagaagtgtgcctttaacagtctcttatcaaaacatatgggactctacggttggatgctggggttcctctaaagcattccccagacaacacagttccacattacatt

SEQ ID NO: 76547 - DNA, 599 bp, Chicken  19866894363848_1
  misc_feature (1)..(2): n is any nucleotide
nncgagtaatgggacctggcagatatggttgctgtggttcaaagtggtgatgctttctagctctgtatgcacgactgcaacaagagtagatactgaaatttgtacttaattttggtttaaagtatgggcaattaagtaagctagtgagaaatagcatggagtgtgaacttgcagagtgaggttctccatggtaactacttcagtggaagccttgtgctagtgtgagacaacttccttttcagtgacaactggatagctcctttattgtgatggagagtcactgtggaattgctctctcartctttagatcagatctgtgcttaaactgtaggagcttattgaggctcccgtagagttcataaaaatgttctttatgcttctgtgtaaataattcagctgtaccttcaatcaggaaaatatacttctcatgtaaactttatttctctaatagtatcattgatagaaagaaaatgttgtatctcttatagcaggaagatattccgtgtatttagttgcgtatttgagaattaactgtcactgtttatcagtggtacctctggatgtaacaataagagagtgggttacaatatgtagtagta

SEQ ID NO: 76548 - DNA, 600 bp, Chicken  19866894363859_1
agctaggaggctccgagggaacagctgcgtacctctgcatgaagtcatgcacctcagggttcacctggtctatgatgggcatcaggtaattcaaaatgtgcttggtattatccattgttgggtccataaaatccctgagaaaagattttaaaagaattctgtcaagagacaacgtcagtgagttctcctccagtgaggcacacagaaagtcaataaatggccttgcaataagcagctttgcaggtagggtggctcccagtcccagggaattctggttgtttgcagcagctcccttcctaycaatgtgggtcacaaagagctcatgtgcacacaaaacctgcacccggccaatcatggccgtgtcaatggacacttctttctttgctgtacacgagccctaaagcctttccagcttgtcacatgggaggggaggcaaaatccttccaaagcactcaccggattgaaggcttgctctcatttcaatgcacgaagaggaaaggcacttaagctggggcttaggacactggctgtacagaccacagcttcagtacagaaccctgccagggttctataaaggttgagtgggaagcactgtgctga

SEQ ID NO: 76549 - DNA, 600 bp, Chicken  19866894363860_1
gtcctgctattcagaagcaccaccttgtaacgaagctgttccccagcagttagtacaaacgctggttattcttcacaacctacacacagaaactcaatccgtggtcacaggagaagctcacaaccttcaaccagtccaatccagaagcgtttgccatccatcttctgacagcaactcatctcttttcttcacaacacacttgtagtggttgaccttaaaattggttctccctccctaaactatttaaaagctgaataaattcaaaataccaagggctgtgagatggtagacagcggtctrtctgaaaggagtgctgagggtgttaacttagggaaaatgccaccgagatttctagcaaagcgagctttgacatccttccctgctttgtcctttgcgactggatgttcccagaaagtgaaaagcaccacaaaaatctaggagaaactttcccttgactccaatgttttcctccctggcttgtttaaggattcactgcatgactttggctgtccttgcagaaaccctctcagcagcaaggcagtggccaggcctgccagtatgttttctgcacagactgacagctttccaagcttacaaaag

SEQ ID NO: 76550 - DNA, 599 bp, Chicken  19866894363866_1
  misc_feature (1)..(8): n is any nucleotide
nnnnnnnntgataagccgagctgttattttttgtgatactaacatgaatagttccacgaagcattctgatcgaaggtaatgttgacatatgctccagctgcagatctaccaatttgcttccaaactgtgagcagaagaacattttcaccactttactgtgctgctaagcaggcaggcaagcaggagtgacagggaagagctgactaatttccaaatgtcagggtttgcctttgactctctttccctcgcagttgcacagaggccggctgcccgcttgtgattgcagtgccttaggcaagrgaactgctcatgttttctgaatgttggctacagatgcttcacattgctccctgacatgtactgaagtcttgtcacaaagtaatccccraggaatctatttctccggggactgctttctccaatctgtgtaatatcgtatgaggagcttctgcaaagacctgtgcaaatatcagctgtgctttgcttgtcagtggagagctgagctcttgacacagatgctgggtttatgcagtaccagcatgtacctacttactcgttttatggacagataaggtgcgttgcctacaagaatcttcaga

SEQ ID NO: 76551 - DNA, 600 bp, Chicken  19866894363866_2
atgctccagctgcagatctaccaatttgcttccaaactgtgagcagaagaacattttcaccactttactgtgctgctaagcaggcaggcaagcaggagtgacagggaagagctgactaatttccaaatgtcagggtttgcctttgactctctttccctcgcagttgcacagaggccggctgcccgcttgtgattgcagtgccttaggcaagrgaactgctcatgttttctgaatgttggctacagatgcttcacattgctccctgacatgtactgaagtcttgtcacaaagtaatccccraggaatctatttctccggggactgctttctccaatctgtgtaatatcgtatgaggagcttctgcaaagacctgtgcaaatatcagctgtgctttgcttgtcagtggagagctgagctcttgacacagatgctgggtttatgcagtaccagcatgtacctacttactcgttttatggacagataaggtgcgttgcctacaagaatcttcagagagcacatacatagtttaataatatctccaaatgtattccttttcacagacagaagacacagcatttcccaaataaacaatctaagaaa

SEQ ID NO: 76552 - DNA, 599 bp, Chicken  19866894363867_1
  misc_feature (1)..(48): n is any nucleotide
nnnnnnnnnnnnnnnnnnnnnnnnnnnnnnnnnnnnnnnnnnnnnnnncctcctgtcctccctgtaatgattattttcaaggtctgtgttggttcctagagagcgtgatgccactgtagactgagaaatagagatccatgactggacagcagatctgaaagtggctctgtagctctcttcttgtgtgggaaataagacttcatgataatcagcagctttcttgccaaggcttgtagttattctcatgcaagcaatggtgcagacctcataaataatcatatcagtgtccctaccaagaayacaaacttacaaaagaaggaacacacaaggaagaaacccacgaagttatctctcacttcagaaacaccacaccaaaacacgaacacccccctacttctgcatttttaaagttagtgcagaaactgcctgctttttttcaagagtagttggtgagtgtaggacctttacaatgcaaccttcatgcttgagtatcttaaaaaaaaaaaaaaaaagactcagaggtacttcccagttccatctatttgattagtttatagtgtttaagggtgktaagcaaaaaaaagttctggcttgccaca

SEQ ID NO: 76553 - DNA, 518 bp, Chicken  19866894363867_2
aataatcatatcagtgtccctaccaagaayacaaacttacaaaagaaggaacacacaaggaagaaacccacgaagttatctctcacttcagaaacaccacaccaaaacacgaacacccccctacttctgcatttttaaagttagtgcagaaactgcctgctttttttcaagagtagttggtgagtgtaggacctttacaatgcaaccttcatgcttgagtatcttaaaaaaaaaaaaaaaaagactcagaggtacttcccagttccatctatttgattagtttatagtgtttaagggtgktaagcaaaaaaaagttctggcttgccacagaactcaaggtactgttgagatggtaagctcaggcaacgttactaacctcacacactgcatgcaaagtttcctcttcttgctttgcttgccttcaagttcctttttgcatcagaacacatacaagaaaatcaactggataagctaattcctgatacctgctactaagccgtgcctaaaatgccagtaag

SEQ ID NO: 76554 - DNA, 600 bp, Chicken  19866894363887_1
cttttcctaataaaggagcaaatttagtagctcaggaggagctaatgggcaggtttctccatcatcctcagaagcattagtgctcatatcttccctctcagtacagcacatttgtatgtttaatttaagaaggttatctgtcagaagtgatatctcaaggtagcgctgagctagataaatatgtcaggaacaatagctcctgctgagagaaacaaatgttcagaaaatttgtattttggaggatcacaggccttagaaaatcaggccagaatgacagttctgcttcggagccattccctrcaccatctctgtgcctctccacagccycagaaaagccgtatctcacctggcttcccccactctcccatgggtgtccagtagtgtaaaaactcatttaggcttcttggatcagctcctaaaggaccacaggacgtggtctggggaagaaaacttcctaccagcacagtgggacctggacctaggggtgacacacgagatgtcagagcaaaacaacctctcactgtggctcacagtggggaaatggggtttccttctcagatttcataatgcacaaaatgaaaacataaataaataaaagaa

SEQ ID NO: 76555 - DNA, 600 bp, Chicken  19866894363887_2
tagctcaggaggagctaatgggcaggtttctccatcatcctcagaagcattagtgctcatatcttccctctcagtacagcacatttgtatgtttaatttaagaaggttatctgtcagaagtgatatctcaaggtagcgctgagctagataaatatgtcaggaacaatagctcctgctgagagaaacaaatgttcagaaaatttgtattttggaggatcacaggccttagaaaatcaggccagaatgacagttctgcttcggagccattccctrcaccatctctgtgcctctccacagccycagaaaagccgtatctcacctggcttcccccactctcccatgggtgtccagtagtgtaaaaactcatttaggcttcttggatcagctcctaaaggaccacaggacgtggtctggggaagaaaacttcctaccagcacagtgggacctggacctaggggtgacacacgagatgtcagagcaaaacaacctctcactgtggctcacagtggggaaatggggtttccttctcagatttcataatgcacaaaatgaaaacataaataaataaaagaatcaccccaaagccattattttccactg

SEQ ID NO: 76556 - DNA, 600 bp, Chicken  19866894363890_1
tctttgataaggctacaaaggttgcatggaaatcttccacagtgcttgtcttaatgcagcgagctggctcttcagacttcctggattaaagcattaccacagaagaatcattattgctctttgagggacatggtttagcgggaaccattggtgaagggcgaatggttggactggatgatcctgtgggtcttttccaaccttagcgattctatgattttaaagtaaaatgtagaagcaaaagagacactgggaaaaatgcatttgcaaatatacagaaaaagactattataaggtatatarcataattccctgttattgaatggagatattttcaccaaaaaytggagggaataaaaaaakacctaaacaaataaacaagataacagtcacagcagctgggaagaacatccactcagtaaaagctttgagagtctgatggtgcttttgtacacatccagtagttaaagcacgtccttgcgctgtgagtgctttgattgaaattctacctaaaggacttcaaggctttccaacttctaactgtttccactaattaatggtgctattcttaggttatttccctttcgctcctcctcctggagc

SEQ ID NO: 76557 - DNA, 600 bp, Chicken  19866894363890_2
tgcttgtcttaatgcagcgagctggctcttcagacttcctggattaaagcattaccacagaagaatcattattgctctttgagggacatggtttagcgggaaccattggtgaagggcgaatggttggactggatgatcctgtgggtcttttccaaccttagcgattctatgattttaaagtaaaatgtagaagcaaaagagacactgggaaaaatgcatttgcaaatatacagaaaaagactattataaggtatatarcataattccctgttattgaatggagatattttcaccaaaaaytggagggaataaaaaaakacctaaacaaataaacaagataacagtcacagcagctgggaagaacatccactcagtaaaagctttgagagtctgatggtgcttttgtacacatccagtagttaaagcacgtccttgcgctgtgagtgctttgattgaaattctacctaaaggacttcaaggctttccaacttctaactgtttccactaattaatggtgctattcttaggttatttccctttcgctcctcctcctggagcctattgcatttggtgtgaataacgaaattttaatgtgttctg

SEQ ID NO: 76558 - DNA, 600 bp, Chicken  19866894363890_3
gagctggctcttcagacttcctggattaaagcattaccacagaagaatcattattgctctttgagggacatggtttagcgggaaccattggtgaagggcgaatggttggactggatgatcctgtgggtcttttccaaccttagcgattctatgattttaaagtaaaatgtagaagcaaaagagacactgggaaaaatgcatttgcaaatatacagaaaaagactattataaggtatatarcataattccctgttattgaatggagatattttcaccaaaaaytggagggaataaaaaaakacctaaacaaataaacaagataacagtcacagcagctgggaagaacatccactcagtaaaagctttgagagtctgatggtgcttttgtacacatccagtagttaaagcacgtccttgcgctgtgagtgctttgattgaaattctacctaaaggacttcaaggctttccaacttctaactgtttccactaattaatggtgctattcttaggttatttccctttcgctcctcctcctggagcctattgcatttggtgtgaataacgaaattttaatgtgttctgataaagatgttgtaattg

SEQ ID NO: 76559 - DNA, 600 bp, Chicken  19866894363892_1
aaatgtttcccaagccactttgttcaacaaagtaaacaagcccactgcagaatgagtctgttcttgtatccaccctgatttcaacctcataatcttcacagttgctacttgactgttagcaccaacatttttctgtttgagagaatatgcaaaatgaacaaacaaacaaaaaacaaataaacaatcaacaagaagaataacaacaaaatagatgttattttgctgtacatcacctactggcattttcaagatactttttggcatgatgagataaaaactggctgcagaagatgattctcraacgacagttttgcatatctttcaattagtagtctaaatcaaaggtagaaagatgtactagaatgttttccagtggcttttcctattactcacttctctctctttgctgaactttgtaactctcattccaggtgctcaaatcttccacagtattttctagggaaactatgtgataaattaaaggctgaggattctatcagagagcagagtttttaaagtcagtttctgtaattcatgaaatgctcagttatcataggataactgggtttaggaaggatctcaggagttcttgagtccaac

SEQ ID NO: 76560 - DNA, 599 bp, Chicken  19866894363900_1
  misc_feature (1)..(50): n is any nucleotide
nnnnnnnnnnnnnnnnnnnnnnnnnnnnnnnnnnnnnnnnnnnnnnnnnnggaaatcgtcatgcattacatgaactgaaagctcctacaacctcactgtaaagactggaaaccacacggatgctttcagaaagcattaattctcatcacaagtgacctttatttctcacttggtgcaaggagctgccctttttataaagacagtttatgcagtggtgccaccttaacatggatgatcacaacttcaaattttaggtgggttttgtttgtatgtaaccaaagatacatgttctgtataatsaaacatgcatatatccactgaaatatataactttttgatgtaattataacctgattttatttttaactctgttctcacctttgctggcagctcagagaaatgtctcggagaggaaggatgtgcatgttaaagttcaaatccgaatggaatttgcaggaaactgtcctgtagcttgaaggggttcttcctgttgcatttctcaaatgcactgatagtgttgttgcagcctatcagagccctttaccaattctattcggtaattctaccaattctctgcaacctaatacagatgaaggctg

SEQ ID NO: 76561 - DNA, 600 bp, Chicken  19866894363908_1
ttcccctatcaaatgtacacagcttaattgtttaaagatgctttttttcgctaactttcagcagtgcaaactcagcaagtgatcagctctcctctcagtcagctgagcataaccagcaaaaatgcaagaatcctgtccaatctttggcacagtacaagaagaccaattactatctacacttgaaatatattaagctccttctaacccacaaatctgtgcacattcattcaggcattctgaaaatgacagtgttttcaatctgcttggctattggctaaatgattttttgagaaaagaaarcaaatatctgtaatcagctggatgtgtcccatgaatattctaaagctgggaccaattccaaaacaarggtcttgcagaatrcttcttacattcartatttgagaatcttctattgtgaaatagttgtaaagaggcagtaaagcatgactgaacccttgcagatcaacaaagaactgtagatgttctcttcaaagggatgtaatttaccattaaagcaagggctctcttagcaatcaacaatgccagacctcaagctgggaaacaagttgtatactcagagatttaattatcctctgtatt

SEQ ID NO: 76562 - DNA, 600 bp, Chicken  19866894363908_2
aaactcagcaagtgatcagctctcctctcagtcagctgagcataaccagcaaaaatgcaagaatcctgtccaatctttggcacagtacaagaagaccaattactatctacacttgaaatatattaagctccttctaacccacaaatctgtgcacattcattcaggcattctgaaaatgacagtgttttcaatctgcttggctattggctaaatgattttttgagaaaagaaarcaaatatctgtaatcagctggatgtgtcccatgaatattctaaagctgggaccaattccaaaacaarggtcttgcagaatrcttcttacattcartatttgagaatcttctattgtgaaatagttgtaaagaggcagtaaagcatgactgaacccttgcagatcaacaaagaactgtagatgttctcttcaaagggatgtaatttaccattaaagcaagggctctcttagcaatcaacaatgccagacctcaagctgggaaacaagttgtatactcagagatttaattatcctctgtatttgtctttatcatcgctttctttatattacttattttcaggaaacctgaggcacccaagttttgtcag

SEQ ID NO: 76563 - DNA, 600 bp, Chicken  19866894363908_3
atcagctctcctctcagtcagctgagcataaccagcaaaaatgcaagaatcctgtccaatctttggcacagtacaagaagaccaattactatctacacttgaaatatattaagctccttctaacccacaaatctgtgcacattcattcaggcattctgaaaatgacagtgttttcaatctgcttggctattggctaaatgattttttgagaaaagaaarcaaatatctgtaatcagctggatgtgtcccatgaatattctaaagctgggaccaattccaaaacaarggtcttgcagaatrcttcttacattcartatttgagaatcttctattgtgaaatagttgtaaagaggcagtaaagcatgactgaacccttgcagatcaacaaagaactgtagatgttctcttcaaagggatgtaatttaccattaaagcaagggctctcttagcaatcaacaatgccagacctcaagctgggaaacaagttgtatactcagagatttaattatcctctgtatttgtctttatcatcgctttctttatattacttattttcaggaaacctgaggcacccaagttttgtcagggatgacgaaatta

SEQ ID NO: 76564 - DNA, 600 bp, Chicken  19866894363908_4
cagtcagctgagcataaccagcaaaaatgcaagaatcctgtccaatctttggcacagtacaagaagaccaattactatctacacttgaaatatattaagctccttctaacccacaaatctgtgcacattcattcaggcattctgaaaatgacagtgttttcaatctgcttggctattggctaaatgattttttgagaaaagaaarcaaatatctgtaatcagctggatgtgtcccatgaatattctaaagctgggaccaattccaaaacaarggtcttgcagaatrcttcttacattcartatttgagaatcttctattgtgaaatagttgtaaagaggcagtaaagcatgactgaacccttgcagatcaacaaagaactgtagatgttctcttcaaagggatgtaatttaccattaaagcaagggctctcttagcaatcaacaatgccagacctcaagctgggaaacaagttgtatactcagagatttaattatcctctgtatttgtctttatcatcgctttctttatattacttattttcaggaaacctgaggcacccaagttttgtcagggatgacgaaattaatcatcatgtaaac

SEQ ID NO: 76565 - DNA, 600 bp, Chicken  19866894363916_1
gctagacattgtgtcatggtacgcttttcctgctttatacagttaggttgacaccaagaagtattgtcctcctcttgttggctgtgaccttatggctcaggggtcaggcctgttggccatctgagtggacaaaatactgcattataaacaagtgtatacatatgttagaatttgttttctgcatgatatatgcagtgactttaatgaaatggtgcactgatacagaaaagtctaaggtgtcttggacaacttggtactttgtgaatagataagaaagatgtttcttttgtttttagtgcrctactttgctacaattattagtgttttaagcaaactttgtcargttgagtaagtgagctttactttcactaaatataacttctttttattaaagttacagctcttactcttgccatatgcagctaattttcctttggggggaaaaatgcttgttacttttttagtggagcaatctgttaccttgtctgtagtctgtgaagtcagtgcaattctaatttgcatcagctaataaaaaatgtgtgggtttttaagtggaaatcatgcaaaaattaaaaagaaaaagaaaaaagagaaggtgaa

SEQ ID NO: 76566 - DNA, 600 bp, Chicken  19866894363916_2
taggttgacaccaagaagtattgtcctcctcttgttggctgtgaccttatggctcaggggtcaggcctgttggccatctgagtggacaaaatactgcattataaacaagtgtatacatatgttagaatttgttttctgcatgatatatgcagtgactttaatgaaatggtgcactgatacagaaaagtctaaggtgtcttggacaacttggtactttgtgaatagataagaaagatgtttcttttgtttttagtgcrctactttgctacaattattagtgttttaagcaaactttgtcargttgagtaagtgagctttactttcactaaatataacttctttttattaaagttacagctcttactcttgccatatgcagctaattttcctttggggggaaaaatgcttgttacttttttagtggagcaatctgttaccttgtctgtagtctgtgaagtcagtgcaattctaatttgcatcagctaataaaaaatgtgtgggtttttaagtggaaatcatgcaaaaattaaaaagaaaaagaaaaaagagaaggtgaactaacaactgatcaactatgcaaaaacagggctggaaatgtga

SEQ ID NO: 76567 - DNA, 600 bp, Chicken  19866894363916_3
ttaaagttacagctcttactcttgccatatgcagctaattttcctttggggggaaaaatgcttgttacttttttagtggagcaatctgttaccttgtctgtagtctgtgaagtcagtgcaattctaatttgcatcagctaataaaaaatgtgtgggtttttaagtggaaatcatgcaaaaattaaaaagaaaaagaaaaaagagaaggtgaactaacaactgatcaactatgcaaaaacagggctggaaatgtgatcaaattaggtcatggcagtgcagttttgtgcagggctgtgagcrtatctgcagacctygtgtgttttatcttgggaagcaaagctcttagaaagcgtgcatacaagggatgaagagagagcttttttccatcctctttttctgagctgtcgtcagcaaagcacaatcgtatgttgcacgaagtgacaaattttaagctgaaggttcagttcttaaaattgttctgatgcaacagaaacaactcccagtctgtgtgatctgctatacgatgaagtaattaatgcttttattatttgttacattattgcagtgcataaaaatgggaagggtcatctcccaagggtc

SEQ ID NO: 76568 - DNA, 600 bp, Chicken  19866894363916_4
cttactcttgccatatgcagctaattttcctttggggggaaaaatgcttgttacttttttagtggagcaatctgttaccttgtctgtagtctgtgaagtcagtgcaattctaatttgcatcagctaataaaaaatgtgtgggtttttaagtggaaatcatgcaaaaattaaaaagaaaaagaaaaaagagaaggtgaactaacaactgatcaactatgcaaaaacagggctggaaatgtgatcaaattaggtcatggcagtgcagttttgtgcagggctgtgagcrtatctgcagacctygtgtgttttatcttgggaagcaaagctcttagaaagcgtgcatacaagggatgaagagagagcttttttccatcctctttttctgagctgtcgtcagcaaagcacaatcgtatgttgcacgaagtgacaaattttaagctgaaggttcagttcttaaaattgttctgatgcaacagaaacaactcccagtctgtgtgatctgctatacgatgaagtaattaatgcttttattatttgttacattattgcagtgcataaaaatgggaagggtcatctcccaagggtctttcagattaagtg

SEQ ID NO: 76569 - DNA, 599 bp, Chicken  19866894363917_1
  misc_feature (1)..(235): n is any nucleotide
nnnnnnnnnnnnnnnnnnnnnnnnnnnnnnnnnnnnnnnnnnnnnnnnnnnnnnnnnnnnnnnnnnnnnnnnnnnnnnnnnnnnnnnnnnnnnnnnnnnnnnnnnnnnnnnnnnnnnnnnnnnnnnnnnnnnnnnnnnnnnnnnnnnnnnnnnnnnnnnnnnnnnnnnnnnnnnnnnnnnnnnnnnnnnnnnnnnnnnnnnnnnnnnnnnnnnnnnnnnnnnnnnnnnnnnnnnncaagggcattctgtgcagtgtaaatgcaatcccatgaatgctgtctggagggatttgccctgcaytggccctaaggaacagaagaacacaaaagaggaactcattttctctctttatatacatagacaatctaacagctaacctaacagcaaagactatatgatgaaattgctgccattcttatgctatcactatactgtcatttttggtaatgctatgtttgatttacatcaagatccaagtcccctgcgtgcaaaactgcattgttaattcattcctttcctgttacagctattagaggaatcagcaactgaattccaaaaccactggatgggcatggaaggcaattgtaggcaccagtaaa

SEQ ID NO: 76570 - DNA, 415 bp, Chicken  19866894363921_1
taaaacacactgtgctgtcttgaatggtgtggatgtccctcttgactttcctatagcctctgcactaaaaatcttgtcagatttgttaacactcattccaaatgaccatagctgggacctggtgaagctaaggtctttttgctaccaccatttatgctaatacaaatcaaactctgacactgttcctttaaaattttctttcagtacagctgaaagacatgaggattgagtgcaaattacctccttggggtggtgagtgactttgcaagcaggggtttggaggtgcccggaaggagggaraaggcatctgtgctctttaaaagagcaagatgagaaaggaaggctttcagactcctctcctgttgccttttttagtcgtggttggattgggatattatgaactcaaggaatggtg

SEQ ID NO: 76571 - DNA, 600 bp, Chicken  19866894363932_1
ttttagaagtgcctaaagagaaagcagtccttaattctaatcacattttgaggctgtgtacttagggacagcagaaaccacggtacctatttcaccactgcagctgtgatccttgcaagtcattgtttgtgtaacacctttatctgaatggaagcatgggatccaaatgtatcttttgcaacgttaatgcacaaagcacgtagagaatggaatgctgtttcccaaactattttgcatgcgcctattttaactttacagaaaggaggatttcatgtttttgatgcatttggagaaatgtgrataactcaaaagttctggactaaagactgagccttctgtacacgttccaccaagacagacaacaagcgaatgctgaaggtgcctttccctgcagccttcccatgccattgggaaccygtytccttgccttacgggtttgaaaaccacctttaaaagtcacaacttctctacaaaacccataagcatttgaggatctacatctgaaagctcattctttcctctcttccaacatgaagctctgatgatcagcccatctgatgggcgctgccgggtcccaaagcattatctctagatgccaac

SEQ ID NO: 76572 - DNA, 600 bp, Chicken  19866894363932_2
agtcattgtttgtgtaacacctttatctgaatggaagcatgggatccaaatgtatcttttgcaacgttaatgcacaaagcacgtagagaatggaatgctgtttcccaaactattttgcatgcgcctattttaactttacagaaaggaggatttcatgtttttgatgcatttggagaaatgtgrataactcaaaagttctggactaaagactgagccttctgtacacgttccaccaagacagacaacaagcgaatgctgaaggtgcctttccctgcagccttcccatgccattgggaaccygtytccttgccttacgggtttgaaaaccacctttaaaagtcacaacttctctacaaaacccataagcatttgaggatctacatctgaaagctcattctttcctctcttccaacatgaagctctgatgatcagcccatctgatgggcgctgccgggtcccaaagcattatctctagatgccaaccagcgatctgttcactgacccctgctgtggaactctgccaccagggctctgccaaagagtcctccagtcctgccacagctgttggcatgagttctgtgcactgaagacacattttat

SEQ ID NO: 76573 - DNA, 600 bp, Chicken  19866894363932_3
cattgtttgtgtaacacctttatctgaatggaagcatgggatccaaatgtatcttttgcaacgttaatgcacaaagcacgtagagaatggaatgctgtttcccaaactattttgcatgcgcctattttaactttacagaaaggaggatttcatgtttttgatgcatttggagaaatgtgrataactcaaaagttctggactaaagactgagccttctgtacacgttccaccaagacagacaacaagcgaatgctgaaggtgcctttccctgcagccttcccatgccattgggaaccygtytccttgccttacgggtttgaaaaccacctttaaaagtcacaacttctctacaaaacccataagcatttgaggatctacatctgaaagctcattctttcctctcttccaacatgaagctctgatgatcagcccatctgatgggcgctgccgggtcccaaagcattatctctagatgccaaccagcgatctgttcactgacccctgctgtggaactctgccaccagggctctgccaaagagtcctccagtcctgccacagctgttggcatgagttctgtgcactgaagacacattttatcat

SEQ ID NO: 76574 - DNA, 599 bp, Chicken  19866894363934_1
  misc_feature (1)..(77): n is any nucleotide
nnnnnnnnnnnnnnnnnnnnnnnnnnnnnnnnnnnnnnnnnnnnnnnnnnnnnnnnnnnnnnnnnnnnnnnnnnnnncagtgtatcagcagtgttgccatgatttttgctctctttctagtgagtagatcctcacctacattgtcctctcttggttagacctgtttggagctgtagagctaaggaggatattaagatgaaatttgtctttcatcagaatacaagatcttgtggagatgtcaattatcctccaactctgggtagaagtggagttttcattataaagttttaccagaaatgwgtatttggcttccatttcacacatggtcccaaaatttgggtaactttcatcatctctgctgagcagcagaatggctgttgagtggacagactccttggggcattgtgaatgttcgctaaataaaagagcagggagggtttcacagtgagacagcccagccacagccctggcaccaggagtggcacagtgagattctcaccccacatgtggagaatgacttcagatataacaaatggagaagcttttaatctgtagtggggaccagtgcgtgttagcagctatccccattgctttcagta

SEQ ID NO: 76575 - DNA, 600 bp, Chicken  19866894363947_1
gcatttgatgtgagattttaaaatactaattgatactcttatataaatgtgacctgtctttcaaagacagtcattgatcatgattaaattgaaatgataaagtgaggtcatatttatctctgagctttatatggatttaaaggcataactgtagacattcaggtctgtaaatcttggccttaggttgcagccaaaatatccccagggttttctgggaattaccagttattcaattaagactatgtgcaatactgttgactatggcataattaaagagagacaataaagtactgagaactsagctttaaaatactgtaaaatcacttgtaaccactgaacaaaatgatgattgttatttttcattgttgaaaaaaaaccttcaaagtattgacagctatgaaagttaaacaattctgaagatctgctggttgaagcaataatcactctaggcctgatccaagacgagatcaagtgaatagaactctctttgctttctatggctttcagatcatgcagttcctgacaaatttcccctctacttctccctgacataatcctcatatcacacaaggcagctgagcacagaaagtacatagacat

SEQ ID NO: 76576 - DNA, 600 bp, Chicken  19866894363951_1
agccacgcggtgaaataccgtttcacctctcgcgtaccgcacgctgactttgcgtcccagtagcacaattcacccacagcctggggaaaagcagctctcggccgaattctctgcacgtgcacccggactgcgtgacctgcaggacgcaaccgatgaatgaaaggacacggcagttcgatgcgcgaagccgcgctgcggcgcgcagccccgtgcggtgacctgaagcgctccggtgaagccttccccggctccgacggatggatgcggcgggggcacagcggggaggaagacgccctccgytttccccaggagccggcacggatgggcgccgcgagagaacgcgtccgtccaaccaacggcaccaacttcgggggagcggacagctgacggagaaccgctccgcggggcggtaggtgcgctgcctcccggttgcggcgcggagccccgcagcgccgcacgccaccaaaaaacttcagggcaggcgatttttcatcgactgcgccccggcagccacgagaggggaagcgaagagccgagctccgaccttcctcccccgtatccatccccgcttcccctctcggtgcgccgctcgaccgaacc

SEQ ID NO: 76577 - DNA, 599 bp, Chicken  19866894363953_1
  misc_feature (1)..(169): n is any nucleotide
nnnnnnnnnnnnnnnnnnnnnnnnnnnnnnnnnnnnnnnnnnnnnnnnnnnnnnnnnnnnnnnnnnnnnnnnnnnnnnnnnnnnnnnnnnnnnnnnnnnnnnnnnnnnnnnnnnnnnnnnnnnnnnnnnnnnnnnnnnnnnnnnnnnnnnnnnnnnnnnnnnnnnnnnngggtgttccagagcagtcagcgtttcagagcctatagctggcttcccccatgtgtgtggctcaatttcaaacataggttttatttcttttccccggggtttcaaagttttctctgcactgctcgggcttgrgacagcagagggcagcaagagacagcaaagacggtttcgtaaactgggttgtgtcccaaattctgacatctgtgcctttgatgcagtggttgcaaacaggccagccctggggaaaagaacaacctggcctcaccctgctgtgcattgctgagtgggtttgaagggaaatcatgctgctctggccggttaacaagagtgccattatratattttatcatgttcatgttgaagtgaagagctatgaaagtctgaaattagccctggttagcattcactgggcagcaaaatgtaccacttgc

SEQ ID NO: 76578 - DNA, 600 bp, Chicken  19866894363953_2
ctggcttcccccatgtgtgtggctcaatttcaaacataggttttatttcttttccccggggtttcaaagttttctctgcactgctcgggcttgrgacagcagagggcagcaagagacagcaaagacggtttcgtaaactgggttgtgtcccaaattctgacatctgtgcctttgatgcagtggttgcaaacaggccagccctggggaaaagaacaacctggcctcaccctgctgtgcattgctgagtgggtttgaagggaaatcatgctgctctggccggttaacaagagtgccattatratattttatcatgttcatgttgaagtgaagagctatgaaagtctgaaattagccctggttagcattcactgggcagcaaaatgtaccacttgcttggactatgaataagtgatttcttacacaatcatgagaactgctgaattgcattctttctctcttgtgctctctctgaaaagaaatgggtgtttggaaaatgtattgtagtgaaggacaaagaagaggggccgttgttgctgctttgtgatttttgacatgatgatttttcccatcactgtgcttgtttgtttagatgawtttttt

SEQ ID NO: 76579 - DNA, 600 bp, Chicken  19866894363953_3
attatratattttatcatgttcatgttgaagtgaagagctatgaaagtctgaaattagccctggttagcattcactgggcagcaaaatgtaccacttgcttggactatgaataagtgatttcttacacaatcatgagaactgctgaattgcattctttctctcttgtgctctctctgaaaagaaatgggtgtttggaaaatgtattgtagtgaaggacaaagaagaggggccgttgttgctgctttgtgatttttgacatgatgatttttcccatcactgtgcttgtttgtttagatgawttttttatgttctgaacaagcacttgcagaactcagcataatgttcgtgttacacagacttcctttgccaacaaaataattgaggaggttcactcctgtataacacagagagaagccatgttcatggcttccaacagcctgtgttcctccattctgggaacagaagtccttgaagaaatactgtgcgtgtgtgtgtgcaactgcaacttccagtccttgaagggagctgaaaagcaggagggggacagactttttacactgcctgatagtgatgggacgggggtttatgtctttaagcta

SEQ ID NO: 76580 - DNA, 600 bp, Chicken  19866894363979_1
tgaatcaagtgctgtgatatttgaaaaatcacaaaatacacaaataccatctttatttgctactggaacaacctgtaaaaaacagcaggaaaaaaaaattaaaaaacccacacaaaattcacatacagtgtttcatttttttttttggttatatctgttacttctcctcatcagtgttagcaatgaacattttactgtttctcaaaatcccagtgctttaaagctgagagcatcccaaagctgtaaaattgtttggggcgttcatttggcagcctatggaatgaaaaatcataacttttmatcagtgtttctgtgatacgtagttgaaagaagttagtatttctttctctcctattttccttagttagatcgattcaaggaaccacctgcatatggacctatgtgtgacatcctctggtcagatccagtagaggactttggaaatgagaagactcaggaacacttcactcacaacacagtcaggggatgctcgtacttctacaggtgaacattacttctttgattgtatggatttctgtgtgtgatcacattatagttcagcggtataaatgtttgcttgatgtttgcaacactcctttg

SEQ ID NO: 76581 - DNA, 599 bp, Chicken  19866894363983_1
  misc_feature (1)..(129): n is any nucleotide
nnnnnnnnnnnnnnnnnnnnnnnnnnnnnnnnnnnnnnnnnnnnnnnnnnnnnnnnnnnnnnnnnnnnnnnnnnnnnnnnnnnnnnnnnnnnnnnnnnnnnnnnnnnnnnnnnnnnnnnnnnnnnnnnntggtctatacaagatcaatattctcagagctctgtatttcacctcccacccccttgtttatttatttatttatttatttaacatgttactgtctttatagtaaataaacacatttcatttcatggttggcttcttttcttaggtttttttattcctggttttccgaaactkttgaggtttcaagaacatcatgacaaaatactgaataagtttttgtccaaacttaagcagcatttggtaagtactcacaagaacagtatttattaaggttggaaatggatgaagaaaaactgtaaggatggaaatcatgtttgtttgattaaaacaaagtatttcatgtagccaaaaaatattgatttcattggccacaaggccattgaataaagcctttttacatggacgttattaagtgttacttgatttttatgaatatttttaaaaattctgtggtttttacaggactctcaaga

SEQ ID NO: 76582 - DNA, 600 bp, Chicken  19866894363983_2
tggatgaagaaaaactgtaaggatggaaatcatgtttgtttgattaaaacaaagtatttcatgtagccaaaaaatattgatttcattggccacaaggccattgaataaagcctttttacatggacgttattaagtgttacttgatttttatgaatatttttaaaaattctgtggtttttacaggactctcaagagatgtccactagcttttacaccacaaaatggtttttccagtgtttccttgatcgcgtgagtatgttttccatattctttctctgtttttaattgtgggtttgaacrgactgtcttcactcttgattctttcattgcagactccctttatgttaagcctcaggatatgggatatctacatacttgaaggagagcgggttctcactgctatgtcgtacacaattctgaagatacacagaagtgagaaatctcttgagtgcttgaatgctaaataggctttctgctagttttgttcttattttgtgtgaaaaatcttagtttcttctttgccttgtgcaattcatgacaagtgtttttctctccttatgaataagcagagcaaaatctttcctttattaacgtaagtga

SEQ ID NO: 76583 - DNA, 600 bp, Chicken  19866894363983_3
aagcttttaaataaatgatgtatattgtaaagatctataccagtgttttgtaagttggggatgcaggctgaagaatgaagatcaaaaactgttggacataacataagcagaccaaaggcaggtggcttgtatttagcttttagaagatgctcctttttggaaaacattgtcctatatagaaagcatttctgtattaatttgcaagtgaatttctgatgcattttgtagatttttagtgtagaattctattttctgcttaataaataggccttttttgttcgttttaacaacaaaagcatytgatattgtacatacatttttgaaatgttatgttcataatcaagatatttttatttataatagtattttcttcttatrtagaacatctgatgaaattacaaatggaagaacttgtagaatttcttcaggagactctagctaaggatttcttctatgaagatgactatgtaatagaacagctccaaaattctatatcagaattgaaacgagcaaagttggatttaccagtagctggtaagatatttgtacagatgcagatttagatacttggagctttttatgccttgtccatttttaaag

SEQ ID NO: 76584 - DNA, 534 bp, Chicken  19866894363983_4
agatcaaaaactgttggacataacataagcagaccaaaggcaggtggcttgtatttagcttttagaagatgctcctttttggaaaacattgtcctatatagaaagcatttctgtattaatttgcaagtgaatttctgatgcattttgtagatttttagtgtagaattctattttctgcttaataaataggccttttttgttcgttttaacaacaaaagcatytgatattgtacatacatttttgaaatgttatgttcataatcaagatatttttatttataatagtattttcttcttatrtagaacatctgatgaaattacaaatggaagaacttgtagaatttcttcaggagactctagctaaggatttcttctatgaagatgactatgtaatagaacagctccaaaattctatatcagaattgaaacgagcaaagttggatttaccagtagctggtaagatatttgtacagatgcagatttagatacttggagctttttatgccttgtccatttttaaagtgtaaattaatt

SEQ ID NO: 76585 - DNA, 600 bp, Chicken  19866894363985_1
gattcttaactcttttatagcagtgtgattgtaggataacttctcactgtgggtttgcatcatctcattttcggactcagtctctcagtttttaaaataaataaataaatgtcatactgcagtttctggagtgcatgagttttctactccttttctcattcattaaagtcataaaacaatgaagtttttaagacataggtctcctagcacagcagtttgcatcatctctaaagataattttttaagtactgtggcagcattcacacagctgcatcagagggagaaaaactagagaaactyctatggcaactctagggctgcatccatacaactgctgcttgcatgggtgggccagatgctgttcacagctgggtacactgcagtggctgcatgtagccattagtgggttggatttttgaagtgagagagtgcactgatatccctgcaagtgtggtcagagattggccatcggagcttctttgggataccagaaatttgaaacaggagctgtgggtcctcacatttgttaggcaccctgctccagatgtccctgcttgagctggggttggacgagatggacctttgggtccctgccaacct

SEQ ID NO: 76586 - DNA, 599 bp, Chicken  19866894363987_1
  misc_feature (1)..(130): n is any nucleotide
nnnnnnnnnnnnnnnnnnnnnnnnnnnnnnnnnnnnnnnnnnnnnnnnnnnnnnnnnnnnnnnnnnnnnnnnnnnnnnnnnnnnnnnnnnnnnnnnnnnnnnnnnnnnnnnnnnnnnnnnnnnnnnnnnnttgtgagggctaccagccaatcagttatgctgcctgttgtatcagtgtccatcttgccctaggattcctaaatgaacatcctttatttgaagcagctaggagatgtgaggtacctctttttatgttcttctttgttgtgcgcagtctaagtacataatgtaaaaaaaaawaaatttacatgtcactaaacatggcatctgttgacctctgtttgatctcagaaaattttgttgctgatggaatgctttccatgtggctgcagtgcatggtactttatgaacctccaaagcacttagcaaatccaatttttttatgctaaccacgtgcttatagctctggaactcagtttctgaatttggtgaatgtttggatgttttaagatgtgacaaggagctgtactattatgtggattgatctcttattccaaggcaaaagaacttcaactgatctctttagaagtagttacgct

SEQ ID NO: 76587 - DNA, 600 bp, Chicken  19866894363987_2
tctgtttgatctcagaaaattttgttgctgatggaatgctttccatgtggctgcagtgcatggtactttatgaacctccaaagcacttagcaaatccaatttttttatgctaaccacgtgcttatagctctggaactcagtttctgaatttggtgaatgtttggatgttttaagatgtgacaaggagctgtactattatgtggattgatctcttattccaaggcaaaagaacttcaactgatctctttagaagtagttacgctcttgctgtaagatgtaatattgaatgtattcttgacwgtttgttttgaatcccctttgcaatgaccaagagagctgtcctggaaagctgatagagattcatgggaaagcaggcttatttatggaaggacagattcatcctgaattggaaggtgttgagattgtcattggtgaaaagggagcgccttcccctctcatcacagttttcactgatgacaaaggtgcttacaggtaactagcagatttcttttgatgttttggattctttcatttaagtaccatagtgacttgacaacacacttgtgtgatttccaaatgcttgttctaaagtgaactttt

SEQ ID NO: 76588 - DNA, 600 bp, Chicken  19866894363987_3; identical to SEQ ID NO: 76587

SEQ ID NO: 76589 - DNA, 600 bp, Chicken  19866894363987_4
ctgtttgatctcagaaaattttgttgctgatggaatgctttccatgtggctgcagtgcatggtactttatgaacctccaaagcacttagcaaatccaatttttttatgctaaccacgtgcttatagctctggaactcagtttctgaatttggtgaatgtttggatgttttaagatgtgacaaggagctgtactattatgtggattgatctcttattccaaggcaaaagaacttcaactgatctctttagaagtagttacgctcttgctgtaagatgtaatattgaatgtattcttgactwtttgttttgaatcccctttgcaatgaccaagagagctgtcctggaaagctgatagagattcatgggaaagcaggcttatttatggaaggacagattcatcctgaattggaaggtgttgagattgtcattggtgaaaagggagcgccttcccctctcatcacagttttcactgatgacaaaggtgcttacaggtaactagcagatttcttttgatgttttggattctttcatttaagtaccatagtgacttgacaacacacttgtgtgatttccaaatgcttgttctaaagtgaacttttc

SEQ ID NO: 76590 - DNA, 600 bp, Chicken  19866894363987_5
tgtttgatctcagaaaattttgttgctgatggaatgctttccatgtggctgcagtgcatggtactttatgaacctccaaagcacttagcaaatccaatttttttatgctaaccacgtgcttatagctctggaactcagtttctgaatttggtgaatgtttggatgttttaagatgtgacaaggagctgtactattatgtggattgatctcttattccaaggcaaaagaacttcaactgatctctttagaagtagttacgctcttgctgtaagatgtaatattgaatgtattcttgactgwttgttttgaatcccctttgcaatgaccaagagagctgtcctggaaagctgatagagattcatgggaaagcaggcttatttatggaaggacagattcatcctgaattggaaggtgttgagattgtcattggtgaaaagggagcgccttcccctctcatcacagttttcactgatgacaaaggtgcttacaggtaactagcagatttcttttgatgttttggattctttcatttaagtaccatagtgacttgacaacacacttgtgtgatttccaaatgcttgttctaaagtgaacttttct

SEQ ID NO: 76591 - DNA, 599 bp, Chicken  19866894363989_1
  misc_feature (1)..(46): n is any nucleotide
nnnnnnnnnnnnnnnnnnnnnnnnnnnnnnnnnnnnnnnnnnnnnnttctgtatccatttttgcttggctgggaataccctggagaataagaggggaaaaaaaaaaaaaaaaaagggcaagaataactgaataacttaaataattttcagttctatagaattttccagggttttgcatcaacctcctgtaacattgtattaataattaattgtctttatttattcaacttctaggaaagtcttgatttcaggaaatcaaccgcaataaccctctagaacataattttgtcctacacaggkcaggattacaaaaatacctgaggtggtcagcactagactggaaaattacagacaattcaggctcagtactrtgactctgttggttttaattcagcagcaaagctggcttgcagaaagtcctcttagctcagcctaaatgttgtgcaaatgttacagggacagaatttaaaatgcatctgttccaaagaatttttgaagtaatactgcttatagttttaaacttgaaggtatttcgtagtctgcttaaaaaggctatgaagccaaggaactacttctgggatgaaagctcaataagcagc

SEQ ID NO: 76592 - DNA, 600 bp, Chicken  19866894363989_2
ggaataccctggagaataagaggggaaaaaaaaaaaaaaaaaagggcaagaataactgaataacttaaataattttcagttctatagaattttccagggttttgcatcaacctcctgtaacattgtattaataattaattgtctttatttattcaacttctaggaaagtcttgatttcaggaaatcaaccgcaataaccctctagaacataattttgtcctacacaggkcaggattacaaaaatacctgaggtggtcagcactagactggaaaattacagacaattcaggctcagtactrtgactctgttggttttaattcagcagcaaagctggcttgcagaaagtcctcttagctcagcctaaatgttgtgcaaatgttacagggacagaatttaaaatgcatctgttccaaagaatttttgaagtaatactgcttatagttttaaacttgaaggtatttcgtagtctgcttaaaaaggctatgaagccaaggaactacttctgggatgaaagctcaataagcagctccacaaaccagtataacttaaggcaatcaagggttccacagtacagctatctactcctgcagagaactgca

SEQ ID NO: 76593 - DNA, 600 bp, Chicken  19866894363999_1
agcagagtcagctgttcatttttaagcatcaggtcctgaaaacttccaaggatagaaactgccgtgattaaaaaaagtctctctggtttcaatttatgcccatagttactcccagcatcccagaagggcctatctctgacttcaaagactgttgttggatcccccatgaagccttctcctttccaagataaataaaccagaatatgcaatattgcagataaaatgcaacagttagttatgtaagataggtatatttgttactgtgttaccttaaaagggcaggaactggagattattttwaaaaagtgggctacctaaatttaaacaaaattactatcaattttgatgagagcaaatgatactctcagtaaacaaaatgttaagcaaggcaattgatgtaatacgctaatataatgaagagaatgttaaacagttttaaagaacattaaaacttatgctaaaaataataatcctgaagtaaagtatctgattttatatcaagtgtttgaaaaacaccatctgtcaccattaattcaatcattaaattacccagcaatgcccttatttattagaagtgacagcagaatgggagggaagaaa

SEQ ID NO: 76594 - DNA, 599 bp, Chicken  19866894364019_1
  misc_feature (1)..(124): n is any nucleotide
nnnnnnnnnnnnnnnnnnnnnnnnnnnnnnnnnnnnnnnnnnnnnnnnnnnnnnnnnnnnnnnnnnnnnnnnnnnnnnnnnnnnnnnnnnnnnnnnnnnnnnnnnnnnnnnnnnnnnnnnnnnntaacactgatttatgtctgggttttatgcctagaatacgtagatgaccccatggctgtgctgggattttccccaaggttagacaaagcaaagtgtagggaacagaaccattcacaagttggaagctattagctttcccagcacagaagaaacagaaaatactcatagatggtaacytcctggaagcaaaggtcatcacagccatcccagctctggattccaggtgtaagacaagaactgccactgctgactcagctgcagccatcaggacctggaggccactgagatcatggcygtgctctgcacccagcacctacccagctcttccacacacgaaaaggacccctaacactaacagcagtgacaagccacttgatttgtcaaaattcagcatgtttccaagtgcttatcaacagctgtgaaaaacaaagagcaaaaagatattaacaycgtcagcaaaaaaaatccattccctc

SEQ ID NO: 76595 - DNA, 599 bp, Chicken  19866894364019_2
  misc_feature (1)..(6): n is any nucleotide
nnnnnntaacactgatttatgtctgggttttatgcctagaatacgtagatgaccccatggctgtgctgggattttccccaaggttagacaaagcaaagtgtagggaacagaaccattcacaagttggaagctattagctttcccagcacagaagaaacagaaaatactcatagatggtaacytcctggaagcaaaggtcatcacagccatcccagctctggattccaggtgtaagacaagaactgccactgctgactcagctgcagccatcaggacctggaggccactgagatcatggcygtgctctgcacccagcacctacccagctcttccacacacgaaaaggacccctaacactaacagcagtgacaagccacttgatttgtcaaaattcagcatgtttccaagtgcttatcaacagctgtgaaaaacaaagagcaaaaagatattaacaycgtcagcaaaaaaaatccattccctcacccatataagggattgcacgacacatttccaagaattagtttaccatataagacagcaawtcagatataaacagaagagtttacagaacccgggctggactggggggaaagagctcg

SEQ ID NO: 76596 - DNA, 600 bp, Chicken  19866894364019_3
aacagaaaatactcatagatggtaacytcctggaagcaaaggtcatcacagccatcccagctctggattccaggtgtaagacaagaactgccactgctgactcagctgcagccatcaggacctggaggccactgagatcatggcygtgctctgcacccagcacctacccagctcttccacacacgaaaaggacccctaacactaacagcagtgacaagccacttgatttgtcaaaattcagcatgtttccaagtgcttatcaacagctgtgaaaaacaaagagcaaaaagatattaacaycgtcagcaaaaaaaatccattccctcacccatataagggattgcacgacacatttccaagaattagtttaccatataagacagcaawtcagatataaacagaagagtttacagaacccgggctggactggggggaaagagctcgagtgtgtcaatcacatgtgtgagatcaaagcagggctccctgtgcctgggggcagacagaaacacgctgcgctctgcttacccttctgcagcctgcacacgggtagtgaaaacaaacacactgaaaacacaaacaaaacgccacctttgattttat

SEQ ID NO: 76597 - DNA, 600 bp, Chicken  19866894364019_4
ctgccactgctgactcagctgcagccatcaggacctggaggccactgagatcatggcygtgctctgcacccagcacctacccagctcttccacacacgaaaaggacccctaacactaacagcagtgacaagccacttgatttgtcaaaattcagcatgtttccaagtgcttatcaacagctgtgaaaaacaaagagcaaaaagatattaacaycgtcagcaaaaaaaatccattccctcacccatataagggattgcacgacacatttccaagaattagtttaccatataagacagcaawtcagatataaacagaagagtttacagaacccgggctggactggggggaaagagctcgagtgtgtcaatcacatgtgtgagatcaaagcagggctccctgtgcctgggggcagacagaaacacgctgcgctctgcttacccttctgcagcctgcacacgggtagtgaaaacaaacacactgaaaacacaaacaaaacgccacctttgattttatttgctcctgaattcggttgctttagtcgagtcctgcaggctctgcgcacacgggtgttggatgcacaatgccaagggaggagcacac

SEQ ID NO: 76598 - DNA, 600 bp, Chicken  19866894364019_5
agtgtgtcaatcacatgtgtgagatcaaagcagggctccctgtgcctgggggcagacagaaacacgctgcgctctgcttacccttctgcagcctgcacacgggtagtgaaaacaaacacactgaaaacacaaacaaaacgccacctttgattttatttgctcctgaattcggttgctttagtcgagtcctgcaggctctgcgcacacgggtgttggatgcacaatgccaagggaggagcacacagtgcacaacgaaccaagggaacgataagcgcccggtgcaattccccactcagcttycttgcatttctgatatttgttttcatcctacagagrtattaaggcaatcttcttccaaggcagaactacctgtttaactccagagacagagggaaaataaagcccacagtgatgctcgtcgcaataaataagataatgcacaaatgtctttgctttaagattctagctcagtcatcactgtacttagatggatcaactctggcttgtagtctcgcatcatcagaaagaccaagcagagaggaaggcaaacttctgttctcaaaaccacgtaaaacatctccacctgagctgttcagccat

SEQ ID NO: 76599 - DNA, 600 bp, Chicken  19866894364019_6
tccctgtgcctgggggcagacagaaacacgctgcgctctgcttacccttctgcagcctgcacacgggtagtgaaaacaaacacactgaaaacacaaacaaaacgccacctttgattttatttgctcctgaattcggttgctttagtcgagtcctgcaggctctgcgcacacgggtgttggatgcacaatgccaagggaggagcacacagtgcacaacgaaccaagggaacgataagcgcccggtgcaattccccactcagcttycttgcatttctgatatttgttttcatcctacagagrtattaaggcaatcttcttccaaggcagaactacctgtttaactccagagacagagggaaaataaagcccacagtgatgctcgtcgcaataaataagataatgcacaaatgtctttgctttaagattctagctcagtcatcactgtacttagatggatcaactctggcttgtagtctcgcatcatcagaaagaccaagcagagaggaaggcaaacttctgttctcaaaaccacgtaaaacatctccacctgagctgttcagccataggagaattgcatttactgggaaatcctgaactgca

SEQ ID NO: 76600 - DNA, 600 bp, Chicken  19866894364033_1
gaattggggaaattattacaactagtttgtatttaactctgataaaagcatttgtttgctcctttacttctgctggtctagctgttaaaggctggacaactagatgaaaggatataatattttaaagaagaatatctgagcttctagaggcttggtgtggctgtgtacttctcattctccatgtggcatctccacagacgtggacaactttccaccatctgggacaggttcaggtttgttacctgttaacccatttctgtcaaaactatagctatgttcattacttacagaagctggaakggtattctgaatggatataagcctaaaggaattgtaatataatgaaagtccattaaaaatggaaaactgcttactgacttaaatgcagtggtacatcacagttgctcttttaaactgcaattgtgcaatttggccccacctaattagctttctcrtgctttccactaagcaagggcatttcttgaagcttgtcattgtacctgggtgttgcaggtacagtctgcagtgtatttctcataataggagcaagaatgaaaaccactgggtaagggatacaaacaatgtctcaagctttatcag

SEQ ID NO: 76601 - DNA, 600 bp, Chicken  19866894364033_2
tgtggctgtgtacttctcattctccatgtggcatctccacagacgtggacaactttccaccatctgggacaggttcaggtttgttacctgttaacccatttctgtcaaaactatagctatgttcattacttacagaagctggaakggtattctgaatggatataagcctaaaggaattgtaatataatgaaagtccattaaaaatggaaaactgcttactgacttaaatgcagtggtacatcacagttgctcttttaaactgcaattgtgcaatttggccccacctaattagctttctcrtgctttccactaagcaagggcatttcttgaagcttgtcattgtacctgggtgttgcaggtacagtctgcagtgtatttctcataataggagcaagaatgaaaaccactgggtaagggatacaaacaatgtctcaagctttatcagtaagaggaaggcttttcagttgcagaaaacatcttttcagggagtgaagactaagtctccatgaactaggtgggaatggtaactagacacagkggtttgttccctttccatgcacctagttacatgcaggtgtcatcttaggttggctgctattc

SEQ ID NO: 76602 - DNA, 600 bp, Chicken  19866894364033_3
catcacagttgctcttttaaactgcaattgtgcaatttggccccacctaattagctttctcrtgctttccactaagcaagggcatttcttgaagcttgtcattgtacctgggtgttgcaggtacagtctgcagtgtatttctcataataggagcaagaatgaaaaccactgggtaagggatacaaacaatgtctcaagctttatcagtaagaggaaggcttttcagttgcagaaaacatcttttcagggagtgaagactaagtctccatgaactaggtgggaatggtaactagacacagkggtttgttccctttccatgcacctagttacatgcaggtgtcatcttaggttggctgctattcagcatgaaggaacacaacrcagtaagaaaattcttgacagtttgctgtactgtagtcacttagccttgaaacttctattttgaccgactctgaatacccacaatgaaacaatggctgccattcaaaccaacataggctctggtcacttttcctaatataaccacattaccctacttaaaaaaaaaaaataatcacagtcagctttttccatccgtacatttcaataaaaacaacgtat

SEQ ID NO: 76603 - DNA, 600 bp, Chicken  19866894364033_4
gcatttcttgaagcttgtcattgtacctgggtgttgcaggtacagtctgcagtgtatttctcataataggagcaagaatgaaaaccactgggtaagggatacaaacaatgtctcaagctttatcagtaagaggaaggcttttcagttgcagaaaacatcttttcagggagtgaagactaagtctccatgaactaggtgggaatggtaactagacacagkggtttgttccctttccatgcacctagttacatgcaggtgtcatcttaggttggctgctattcagcatgaaggaacacaacrcagtaagaaaattcttgacagtttgctgtactgtagtcacttagccttgaaacttctattttgaccgactctgaatacccacaatgaaacaatggctgccattcaaaccaacataggctctggtcacttttcctaatataaccacattaccctacttaaaaaaaaaaaataatcacagtcagctttttccatccgtacatttcaataaaaacaacgtataaaggcagtcagcaaatgagaggggttataatcagtaaggctcacgttgtaggtgcaagttgttggttttctttttaattc

SEQ ID NO: 76604 - DNA, 600 bp, Chicken  19866894364064_1
tgtatctactgctacctatgaatttttatggaaaaccagagaattagtatgctgtaggacaacctctttcagcaaacagctgaagaacaggagaggacggtgatacgttctattctttgagaagaggatacctgataatagtagtctgtacattcatcagtatactgatttaaaacagctttccatcttctattttattcttactagagtgcgctctagtgaagattatattttgaacatgctccatattttggtagttccagtgaggtttcttcctttctgcagctgtggatcatgagrgatttaactcatctttggccaaagacctgcccggcactttttgaatggcagcagagcaagagttgtcattagacttgctctctcattagatatttccttactcagctttatgaggtgaggtcctacatgacttcaaatttaacgatattgtcaaagatagtagtattgctgatttgtactttcaacttgaaaaaccattccagaaaagtctacgtgaatgtgattgggaaaaaaatgccacatatacatacaggctttaaaggatggtgctttcatggagtgctttatgtatttgatgtc

SEQ ID NO: 76605 - DNA, 600 bp, Chicken  19866894364068_1
atgcacaaaagtatgctatacacaaagaaagaaaaaggcagattaaaacgtagtaaaatactaaaagttaacatttcacagtgaataaataatacaaagaacaatcgctgctttgataagaattcagctactgctccagataaagccttcttcccctcagactggcataattttcctgatacaattaattctacagtaccacagactgtgatcaacagtggaaggctgctctggatgccctgtttgcattgacagcaaagatcaattagctagagtgggggaataaggataaagcagctyctcctgtaggaacagagtcagtgaagaggctctaaggacacagtttcagtgggataagaggatcctgggctgccactctctgccagaactaatgagatgaggaggggtggagtcactgctgaagagctccccagcaaagctgttcaggaggaaacctccatgttggagttcaaagcatcactgtccctctccttccttatacctgacagyrcattcaatagggcagtcacaaacccatgcactggagagtgcagctgcccttctacaggaccagttgggcaaggagaaaaccagctgtga

SEQ ID NO: 76606 - DNA, 600 bp, Chicken  19866894364068_2
atcaacagtggaaggctgctctggatgccctgtttgcattgacagcaaagatcaattagctagagtgggggaataaggataaagcagctyctcctgtaggaacagagtcagtgaagaggctctaaggacacagtttcagtgggataagaggatcctgggctgccactctctgccagaactaatgagatgaggaggggtggagtcactgctgaagagctccccagcaaagctgttcaggaggaaacctccatgttggagttcaaagcatcactgtccctctccttccttatacctgacagyrcattcaatagggcagtcacaaacccatgcactggagagtgcagctgcccttctacaggaccagttgggcaaggagaaaaccagctgtgaggctggtgtacttctgacacacataaatgtatcatactcagcttgatctcaatactatacagtcactggcattttatcctgcaaaatacacaactaaagagccagctagtgatcgggtgcatagcaggatgacatcatcctaaacttacacaggcaatactgcaaaaacaccccccaaagaaatgttttccaatcactgccattccatct

SEQ ID NO: 76607 - DNA, 600 bp, Chicken  19866894364068_3
tcaacagtggaaggctgctctggatgccctgtttgcattgacagcaaagatcaattagctagagtgggggaataaggataaagcagctyctcctgtaggaacagagtcagtgaagaggctctaaggacacagtttcagtgggataagaggatcctgggctgccactctctgccagaactaatgagatgaggaggggtggagtcactgctgaagagctccccagcaaagctgttcaggaggaaacctccatgttggagttcaaagcatcactgtccctctccttccttatacctgacagyrcattcaatagggcagtcacaaacccatgcactggagagtgcagctgcccttctacaggaccagttgggcaaggagaaaaccagctgtgaggctggtgtacttctgacacacataaatgtatcatactcagcttgatctcaatactatacagtcactggcattttatcctgcaaaatacacaactaaagagccagctagtgatcgggtgcatagcaggatgacatcatcctaaacttacacaggcaatactgcaaaaacaccccccaaagaaatgttttccaatcactgccattccatctg

SEQ ID NO: 76608 - DNA, 600 bp, Chicken  19866894364074_1
aacatcctcgcagagtactactacttaaaagaattttgcaaccatacatgagctatgtaaataaatctgttttttaacttctgtaaatgtaattcaaggttaacaactaacttacatttgccagcactgtaaaaggaagggacctaactccgccacttcttttaaagtggtctcatactaaagtccttcttccagtttacactcagtgctcatgcctaatgaaggccttgtctaatgatatgctggtggttttgtaacaaatcacttctactgcccatcttaacagttttctgacctgcrgtatattttggttagaaaaaccacaagttcaaaatggctagtgaaggtttgttattcaatagcaaaataatgctttccatagtttatcttctttattaaaacactagaaaaataagttagctttraattgaagaatctgggacaygtactaggagtgagtcataactcctaaaacttacttgttggtataggatagaaaattttaatttgtcccacagatgaactcaggctgctgttttcaaagagcatgtaggaggtgtgcatagatatcacattaatttcctaagagtccagtgtatc

SEQ ID NO: 76609 - DNA, 600 bp, Chicken  19866894364074_2
actgtaaaaggaagggacctaactccgccacttcttttaaagtggtctcatactaaagtccttcttccagtttacactcagtgctcatgcctaatgaaggccttgtctaatgatatgctggtggttttgtaacaaatcacttctactgcccatcttaacagttttctgacctgcrgtatattttggttagaaaaaccacaagttcaaaatggctagtgaaggtttgttattcaatagcaaaataatgctttccatagtttatcttctttattaaaacactagaaaaataagttagctttraattgaagaatctgggacaygtactaggagtgagtcataactcctaaaacttacttgttggtataggatagaaaattttaatttgtcccacagatgaactcaggctgctgttttcaaagagcatgtaggaggtgtgcatagatatcacattaatttcctaagagtccagtgtatcctgctgccatggtacttgtgtcttcaaagaattcagctctgtaaagctcttgctaggagtacctttttcattagtatgcccttttcctttactacatcaacattaaatcaataatgaacatcttc

SEQ ID NO: 76610 - DNA, 600 bp, Chicken  19866894364074_3
aactccgccacttcttttaaagtggtctcatactaaagtccttcttccagtttacactcagtgctcatgcctaatgaaggccttgtctaatgatatgctggtggttttgtaacaaatcacttctactgcccatcttaacagttttctgacctgcrgtatattttggttagaaaaaccacaagttcaaaatggctagtgaaggtttgttattcaatagcaaaataatgctttccatagtttatcttctttattaaaacactagaaaaataagttagctttraattgaagaatctgggacaygtactaggagtgagtcataactcctaaaacttacttgttggtataggatagaaaattttaatttgtcccacagatgaactcaggctgctgttttcaaagagcatgtaggaggtgtgcatagatatcacattaatttcctaagagtccagtgtatcctgctgccatggtacttgtgtcttcaaagaattcagctctgtaaagctcttgctaggagtacctttttcattagtatgcccttttcctttactacatcaacattaaatcaataatgaacatcttcagtttgtgtttgtctggttc

SEQ ID NO: 76611 - DNA, 600 bp, Chicken  19866894364076_1
cttcattttttgataaaacagctacttgaacaaaattctagcctaggcctagtgactaataatgtgctcaaatgacagataaaagcttgacttcgaaaaatattcttttctctttcctcagatcaaccggtagagagtatgctctgaaaataatcaaaaaaagtaaatgtagaggaaaagtaagtatgaaattttgaatgagactaaaacattttttcaagaaatgttttatgagacattggtttgggaaactgttcatatttatcttcttcctggcaagagttagaatcttcttggctyaagcctttgccagccagccatcttgagacccttggagtatcagtataaaagacttgaaggtgctttccaaaatgcatgtgttgactacatttgattggttgtgtgtgggtacacttactcctcttgctcttgacttctgttattatgtcagctacctttctcaatcccagatactacagaaaacagcaaaataataatagtaattgcaaaaacaccagtcagtatcaccaggttaatcaaactgatgtcagcgtttatataaaatgaatttttttactttttaaaattttataacaaaaa

SEQ ID NO: 76612 - DNA, 569 bp, Chicken  19866894364077_1
caggagacatctgtctggccaggacccttgtggtgaagcctgaccgcgcagaacctgtcagagtgcctccattcccatgtattacacctattttcaagtttctgaagtttttagaattttgcagcacttattaagagttatttttagatgtttcagatccacttgatagtgatagaacaagtgagaatggctttaactgagacagtggaggatttaggttggatattaggggggaagtttttcacacgaagggtggtgatgcactggaacaggttgcccaaggaggctgtggatgccccmcctggaggcattcaaggccaggctggatgtggctctggacagcctggtctgacggttggtgaccctgcacatagcagggggggttgaaactcaatggtcatttgcggtccttttcaacccaggccattctgtgattctatgattctatgactctaaaatccaatggttggtagatagggctgttagcatatctttacattaagtttttttgcttgttcggtcctattgttattgtggtaaggaaaagagtctggatccttaagcagagt

SEQ ID NO: 76613 - DNA, 600 bp, Chicken  19866894364082_1
ccttgctttggcaagaagcaatagcactgatggtggtgagacctctggtgaggatgttccctgtgatccgtggctctacagacccacccagtagttgataattctttcaaatgtacacacagtcacagcatccccattgatatatttcctataaatctctattaagctgaaaagaggctcattctactgggatttacattacaaaggcttttcacagcaatgtgggttcttcacagccacagggatttctctttctaccatcagaagagacgagggaggctgagattgcaggatggtctmcttgaattgtctctcttacaggagctgggagcatttttctgcctgcccaaagtgccaaaactactgcccacctatctatgcattctgctgtcaccttcccttcacgaaggtaccatcgtttacatagtgcacccaacaccctctagctggaatcaccactcaagcactgttttgatgttgtattgcttttgtgtatgtatgtatacacatatgtatacaaatatgcttataaagggttgtggtagcatttgtcctgttgattcatccaaggagaggctgattagtttgactcgttactcc

SEQ ID NO: 76614 - DNA, 600 bp, Chicken  19866894364087_1
gtcatgaagctccatggagaagggatctgcctagcagaatgcttgttgcctctaacagaacacacagaccccagtgtatagtttgagaacaaatcttcgtttagaaatgcatatttctttcccaggtgctcacattggcagctatcaaggctgcagttaagtgccactggcatctctacaatatggtttcatctctgtgccatactcaatttggatgagaaactagcaatattttctcaagaaaatgctcaaatctcatttgagatttctgtgttttatgtaagctgcctgtatgtttgratctgatgatgggaagtgtacagaatccttctcttttccaaacaagattaatttaagtccagcaggaagakcttaactatggaagaatctatagatagaatattttccttttgtgtacagctgaacatatttccagatccccttagtgactgtcatgctgaggataaacacaaaacatggcccaccttgaaagtccagtgatcacaaaacttgggaagaaggctcttccttcctctgaatgcaaatattcattgtttgatagcatggttgttgatatacttacagtttttgttgtgactg

SEQ ID NO: 76615 - DNA, 600 bp, Chicken  19866894364087_2
cagtgtatagtttgagaacaaatcttcgtttagaaatgcatatttctttcccaggtgctcacattggcagctatcaaggctgcagttaagtgccactggcatctctacaatatggtttcatctctgtgccatactcaatttggatgagaaactagcaatattttctcaagaaaatgctcaaatctcatttgagatttctgtgttttatgtaagctgcctgtatgtttgratctgatgatgggaagtgtacagaatccttctcttttccaaacaagattaatttaagtccagcaggaagakcttaactatggaagaatctatagatagaatattttccttttgtgtacagctgaacatatttccagatccccttagtgactgtcatgctgaggataaacacaaaacatggcccaccttgaaagtccagtgatcacaaaacttgggaagaaggctcttccttcctctgaatgcaaatattcattgtttgatagcatggttgttgatatacttacagtttttgttgtgactgttcaaaccagctcacagatgctcagaagcactgaaaaacttaagttagaggtgacctggagatcgcctagt

SEQ ID NO: 76616 - DNA, 600 bp, Chicken  19866894364087_3
tatttccagatccccttagtgactgtcatgctgaggataaacacaaaacatggcccaccttgaaagtccagtgatcacaaaacttgggaagaaggctcttccttcctctgaatgcaaatattcattgtttgatagcatggttgttgatatacttacagtttttgttgtgactgttcaaaccagctcacagatgctcagaagcactgaaaaacttaagttagaggtgacctggagatcgcctagtcccgtgctcagaacagggccagcttctccgttagatctaatgtaaaagttagatcrcattgctcagggtcttgcctagtccaggtttaaatatttcaagtacagagatttcatggccttcctggccaacttgtttgagtgactgactagccaaagaatgaaaaactgcttgaactaattataataaagactgatttaaatataaacaaaccatttggtgccaaatggaagagaagtgtttaccacctcaaaaatgcaggattgtcaaaagcctcaaataagaaatttagtgttgtcagcaacgtagaactacaaatgttataacttaaaagaaaaaagtccattcagcacattctc

SEQ ID NO: 76617 - DNA, 599 bp, Chicken  19866894364095_1
  misc_feature (1)..(91): n is any nucleotide
nnnnnnnnnnnnnnnnnnnnnnnnnnnnnnnnnnnnnnnnnnnnnnnnnnnnnnnnnnnnnnnnnnnnnnnnnnnnnnnnnnnnnnnnnnncttagaaaatatacctatatatttaaaatatattacatgcataggcgttttgtgcaaataaaactgatagcttgaaaaacaaaaacccactttagcactcataccaaagacatgtaccatctatgcttaaccccactattagtcaccagacaacttgcacaggtgagcctttaatagggtagcagaacatgaggttttatcaatacttycttcctaaaataaagccatcaaaaacaaacttgaaagtatgatgaacttagacttgcttcaagatgctattaataaattatatcaaagcagctgtagttgtttctttgtttccaaagtttcaaaggacaagacaacactcagctgatggaagactggcaaagacttgggagcactaaacctccatttgaaaagagaaggcaggaaaaaatttcttcagtacttcggtttattcaactatttcatcatgtaagttaaattctaaatgaagatattctaagcaaaaaaaatgttctgttct

SEQ ID NO: 76618 - DNA, 600 bp, Chicken  19866894364114_1
aaagattaaaacttatttaaaaattataccaaatttatttgtgagtttgcaagaaaaatctaaagttgtgttttatccctttttaaactaaattttattaaagatcaaggtataaggaaggctcatatgttgatactcaaaacaatgttcttcctgtgtattttaactgctctgagtagttttaataacaggcttgtttatcccatttagcttttgttttgctctaacagttgagcattaagactgtcatcataatttcctggttcttgaggaacactgctgcaacagagttttgagttrtattgtttcttgtaaaagacactctactatttacacagcaatattgtgcattctcttttgagaatgaatgcaagatttatgttgtgtgttcttatgttaaacctcaactacacgtagtaaccagtaataggaggaaactgaaagaggagagtggatttcatctatttgtctatatctgaaatcatagttttagatctctagtatccatcctaaatttaacctctcttggtttaaagccacttaacatagagggcaactctcttgcctctcctgccttacctatctcttctgaaaagcttg

SEQ ID NO: 76619 - DNA, 600 bp, Chicken  19866894364138_1
gcctctgcagaacagaatgattattttctcttgttctctgtgtgagaattgagggctgcaagccatgttggtgtctgcggcagagaagtggaaagcagcacgaatatattttcatgtcctacagctgaattctacaaggcacaacacatccttctggaggtcatgagcctccccagctaggtcagatcaaacacattccgggtttgcacccctaaggagagaacacactttttattatataaatgtcaaagagctacagcctgttaaaatgtgttagtgccttctgggtagttctacacygactttaattatgcaccaccttcatttgaaagcctgattagagtacagttcagtcraagccacattgcccacccagctgtacacaagcccatgtagagagaacttgagagaaatgtcagagacgcaacagacactgagctacattctttcacatttgtaccagtttagtacccaaaagaagtaaaagacacttctgccatttcaggctctgagctttgaggctagaaacacagctctgacttaaaattatgcaattaagccaaattccatattcctattccttcatgaaagataagggaa

SEQ ID NO: 76620 - DNA, 600 bp, Chicken  19866894364138_2
tgcaagccatgttggtgtctgcggcagagaagtggaaagcagcacgaatatattttcatgtcctacagctgaattctacaaggcacaacacatccttctggaggtcatgagcctccccagctaggtcagatcaaacacattccgggtttgcacccctaaggagagaacacactttttattatataaatgtcaaagagctacagcctgttaaaatgtgttagtgccttctgggtagttctacacygactttaattatgcaccaccttcatttgaaagcctgattagagtacagttcagtcraagccacattgcccacccagctgtacacaagcccatgtagagagaacttgagagaaatgtcagagacgcaacagacactgagctacattctttcacatttgtaccagtttagtacccaaaagaagtaaaagacacttctgccatttcaggctctgagctttgaggctagaaacacagctctgacttaaaattatgcaattaagccaaattccatattcctattccttcatgaaagataagggaattgtcccattttagacataatgaagactaaaactagagtttgaagttgtagtccat

SEQ ID NO: 76621 - DNA, 600 bp, Chicken  19866894364195_1
cctgtgcgcctgctttgattgcattcagagaagggactgataagcgtgggttcatttgctgaaacttttcaataaaacttctctttggttagaggaatgtgagtgataagtcagagccctctgttcttctgagttctgacaatacagtggaaatatttttaaacaaaggcacgaaaaaaattacatatttatctaatgaaaaaatcaccctttgtgcataaacagaccaggcaggtcttcaccatggcaatgcgtgaatatttacagcgtctgggccagagaatagcaatctaatcagcraatccttatgtacagaatccccaaagcagggatctgaaaacagcaaacatctcacatgaaaattcagtagcatcactgcaacttcaccatccttcacacatttgaataaggccggtttctgacaaagcaagagctctgccataccgaaaccattcaagatgagctgcttgaggtctcaaacttagcactgagcactaccagcatgttgggaaaagcccctggcactgagtccatggtaaaactgaaggatactgaacaaacaaagtagcccagaaatgggacatcaatggctgcacatcc

SEQ ID NO: 76622 - DNA, 600 bp, Chicken  19866894364195_2
ctccagctgtcagcagtaaaggctcctgtgcagggaacaaagacactgacaccactattggtccatacagttccaacaaagtcaacagaggccaagtggaggatgcagcccatgtaatcagagccctaaaacaggaggggtggcaggcagtgctcatgagagccagacccactccgcatgcactgcagccctaccaccactgcatcagcaaagctgtgcagatggacaccaatggatgtatctgccccagggctggaggaacatctcaaagtgaagaaatagtaaaaattcgacatgctraagttcaaatgcactcctgagagatgttgaatgcttccatatcctcatccagctgggctttcagatgcaacagtcagaatagttctatcccacaagggataactgatttatatcacctcaatgtgacctgagagcaagacatattcatcttgcaagaagaggaattcaagtcatcctgaattgaggccttgaagaagcaaaaacaaaagtcaagaggagctccactgactgatgtgctttcaattgcttaataaagagagctgccacggcagacagaaaaactaatgcaaatttcatttc

SEQ ID NO: 76623 - DNA, 600 bp, Chicken  19866894364203_1
tggcttgacctgttcattgatcagggttgttgatattttgatatgttgtattttccaggtcatatttttcttgcagctttttatctatttgtctactgaaaataagtaaaatatctagtgaatatacagaaagaaaaaggtattttatgaacagtggaaggtatgtattaagttaaagatgaagcatctggtaacagtttaggtaacgcatttctcttaaatagtacaaggtgtatccataatgtggcattctggaagttttcgtagtcttgttttagtgtacagtattttctactacayrttctttgttcatcaatgaaacttccttcagtttcctttgcaatgttttgatatattccatttaacttcraattaatgctgcagagatgattgaaaatttatgggggctaactcaacagaagcacttgttcttataacattccaggaatagaactctccatcagctctcatagagcctctccaagcaggyttgagggctgctacagaatgggaagtttttgtaaaagtgtgcctgatactgctcttcctggcttcttttaacaaagataatacagagtttcatttatagattctttgaca

SEQ ID NO: 76624 - DNA, 600 bp, Chicken  19866894364203_2
ggcttgacctgttcattgatcagggttgttgatattttgatatgttgtattttccaggtcatatttttcttgcagctttttatctatttgtctactgaaaataagtaaaatatctagtgaatatacagaaagaaaaaggtattttatgaacagtggaaggtatgtattaagttaaagatgaagcatctggtaacagtttaggtaacgcatttctcttaaatagtacaaggtgtatccataatgtggcattctggaagttttcgtagtcttgttttagtgtacagtattttctactacayrttctttgttcatcaatgaaacttccttcagtttcctttgcaatgttttgatatattccatttaacttcraattaatgctgcagagatgattgaaaatttatgggggctaactcaacagaagcacttgttcttataacattccaggaatagaactctccatcagctctcatagagcctctccaagcaggyttgagggctgctacagaatgggaagtttttgtaaaagtgtgcctgatactgctcttcctggcttcttttaacaaagataatacagagtttcatttatagattctttgacag

SEQ ID NO: 76625 - DNA, 600 bp, Chicken  19866894364203_3
ttgcagctttttatctatttgtctactgaaaataagtaaaatatctagtgaatatacagaaagaaaaaggtattttatgaacagtggaaggtatgtattaagttaaagatgaagcatctggtaacagtttaggtaacgcatttctcttaaatagtacaaggtgtatccataatgtggcattctggaagttttcgtagtcttgttttagtgtacagtattttctactacayrttctttgttcatcaatgaaacttccttcagtttcctttgcaatgttttgatatattccatttaacttcraattaatgctgcagagatgattgaaaatttatgggggctaactcaacagaagcacttgttcttataacattccaggaatagaactctccatcagctctcatagagcctctccaagcaggyttgagggctgctacagaatgggaagtttttgtaaaagtgtgcctgatactgctcttcctggcttcttttaacaaagataatacagagtttcatttatagattctttgacagtaatataatttgagaagtatgtatactttcatttaaaactatcagtcacctaagggagataaaaagccc

SEQ ID NO: 76626 - DNA, 600 bp, Chicken  19866894364203_4
gtaacagtttaggtaacgcatttctcttaaatagtacaaggtgtatccataatgtggcattctggaagttttcgtagtcttgttttagtgtacagtattttctactacayrttctttgttcatcaatgaaacttccttcagtttcctttgcaatgttttgatatattccatttaacttcraattaatgctgcagagatgattgaaaatttatgggggctaactcaacagaagcacttgttcttataacattccaggaatagaactctccatcagctctcatagagcctctccaagcaggyttgagggctgctacagaatgggaagtttttgtaaaagtgtgcctgatactgctcttcctggcttcttttaacaaagataatacagagtttcatttatagattctttgacagtaatataatttgagaagtatgtatactttcatttaaaactatcagtcacctaagggagataaaaagccctttgatttttgttaaagtatagaaacgtttcatgttgtctgactgccctgcagtttaactaaatggaatagatgtattaaacatagaaaacattctgagtagataggtgaaagtacacat

SEQ ID NO: 76627 - DNA, 455 bp, Chicken  19866894364221_1
caacccctggaagaggaattagctagagaaatctttacagctagaattaatagtgacactttttctgtgagatgacacaaaagtactgtaacatggcccatactgacagcacagacgtctgttgttatgagagccccagggctgctggcagcagtgctgctggagtccagcacaccacaagcacacctggagctgccctttgtgccactgctcattcacccatctttagattcagagacaaaaaaaattacattatgcttctatatatattaagtcttatgagaagtcatttctctttcyacatcagagcgcaagctaagaatgggggggtattccttccacctttttcctatcaatagcaggagaaaggtgagtttcagtattttcataggccttcacttatggaaaaatggattttggttctgcctgtaagaaaactggaccaagatgggcaa

SEQ ID NO: 76628 - DNA, 600 bp, Chicken  19866894364222_1
gaaattgtttttatgtctagacgtgaagccttttgacagtacgtgtgttctagcaaaaacctgatattagaaacaagcattggaaaagctttattctacattctttgttctgcggttacttagctttactctgcattcttcccctaagtgacttctttagcctgtgtgtattggaaggtggggaatgaatgctaagctgttgaagtttgagttctagattttggaaattctgcatgcaacttagcatttgtcacacagcttcattttctggtgtcttgtcctctctcctccatatatttyctgactatgtgggggtgatgaatcttcagaggttttctggaaaaaactcaagattaatcctctctaaatgtttttgactctcattattaataatatttcatagagtacagatgtgaggtgttgttgtcagacagacagatgttcttaaactaaaatctaggaaaagcctttttttatttcacatatatgagagggttcatgttaagatgaagctgtcttatttctctctttcaaggactgttctgtgtatggtgtaattagtcacacctgtgactctctggatatgggcacaagaattcc

SEQ ID NO: 76629 - DNA, 600 bp, Chicken  19866894364222_2
attggaaaagctttattctacattctttgttctgcggttacttagctttactctgcattcttcccctaagtgacttctttagcctgtgtgtattggaaggtggggaatgaatgctaagctgttgaagtttgagttctagattttggaaattctgcatgcaacttagcatttgtcacacagcttcattttctggtgtcttgtcctctctcctccatatatttyctgactatgtgggggtgatgaatcttcagaggttttctggaaaaaactcaagattaatcctctctaaatgtttttgaytctcattattaataatatttcatagagtacagatgtgaggtgttgttgtcagacagacagatgttcttaaactaaaatctaggaaaagcctttttttatttcacatatatgagagggttcatgttaagatgaagctgtcttatttctctctttcaaggactgttctgtgtatggtgtaattagtcacacctgtgactctctggatatgggcacaagaattccttgaggtattgcagttggaacgaggaagcatttgccctgmtacaattgtcctaacaattgaaatctagttatggctac

SEQ ID NO: 76630 - DNA, 600 bp, Chicken  19866894364222_3
ttggaaaagctttattctacattctttgttctgcggttacttagctttactctgcattcttcccctaagtgacttctttagcctgtgtgtattggaaggtggggaatgaatgctaagctgttgaagtttgagttctagattttggaaattctgcatgcaacttagcatttgtcacacagcttcattttctggtgtcttgtcctctctcctccatatatttyctgactatgtgggggtgatgaatcttcagaggttttctggaaaaaactcaagattaatcctctctaaatgtttttgacyctcattattaataatatttcatagagtacagatgtgaggtgttgttgtcagacagacagatgttcttaaactaaaatctaggaaaagcctttttttatttcacatatatgagagggttcatgttaagatgaagctgtcttatttctctctttcaaggactgttctgtgtatggtgtaattagtcacacctgtgactctctggatatgggcacaagaattccttgaggtattgcagttggaacgaggaagcatttgccctgmtacaattgtcctaacaattgaaatctagttatggctact

SEQ ID NO: 76631 - DNA, 600 bp, Chicken  19866894364222_4
aaaaaactcaagattaatcctctctaaatgtttttgactctcattattaataatatttcatagagtacagatgtgaggtgttgttgtcagacagacagatgttcttaaactaaaatctaggaaaagcctttttttatttcacatatatgagagggttcatgttaagatgaagctgtcttatttctctctttcaaggactgttctgtgtatggtgtaattagtcacacctgtgactctctggatatgggcacaagaattccttgaggtattgcagttggaacgaggaagcatttgccctgmtacaattgtcctaacaattgaaatctagttatggctactgttagataaaggttattggacacatctagaaacaggatggtgtgaatgtgccacatcgtagtcagacaacaaatctgtgtagagtaactgatgtgctgaagggttacacttcagcttattgtttgatgtagataggcatgccctctatagtggccactgcttgctgcttctgcgagactgatgttatgaagttaacatttcttcagtattcacgttgaagaaaagtactcttctatggtttttggttctttgcattgctca

SEQ ID NO: 76632 - DNA, 600 bp, Chicken  19866894364235_1
agtacgtatctttgtggtggtgtttttattaattgcttatttagaagcagtggtttcttcggagtttctaaacaaaacttggaattatttccactgcacttattttgtaaaagcctggtctggctttaagtaagtccaaatgcagagtttcactgtaccttcaaaacctatttgtaaaattacagattgaagaaaagtcaaggcagtacatttctttttggagtgcttaataatattgtgtcaccaattcaagcactacagtttgcgttgtaaccaccagcgtacttgtagctgtggccragattgaccacaaaggccttccagggtttttagttgttttgcttagacagacttaagcctgggaggaagaaagatgactttccagtagcaatttgtatttactggaactaatttttcatcaatgtttgtgktttttttcccctcacttttgcttcctcaccaatgtgcagtgagggcagagacctgaaccatgtctctttcttttcaatrattctcttctgcattagctggggagctaatgtggtgttattgccttaggttatctcagtttgtctcttctactgcaataaatgtttgagg

SEQ ID NO: 76633 - DNA, 600 bp, Chicken  19866894364235_2
aagtccaaatgcagagtttcactgtaccttcaaaacctatttgtaaaattacagattgaagaaaagtcaaggcagtacatttctttttggagtgcttaataatattgtgtcaccaattcaagcactacagtttgcgttgtaaccaccagcgtacttgtagctgtggccragattgaccacaaaggccttccagggtttttagttgttttgcttagacagacttaagcctgggaggaagaaagatgactttccagtagcaatttgtatttactggaactaatttttcatcaatgtttgtgktttttttcccctcacttttgcttcctcaccaatgtgcagtgagggcagagacctgaaccatgtctctttcttttcaatrattctcttctgcattagctggggagctaatgtggtgttattgccttaggttatctcagtttgtctcttctactgcaataaatgtttgaggtagaagctaaaggactgaggagcatcctcctttcagatttgggccatttaggatctgattgctgttcttgtgaaygctaaagcattttatacagggtaggtggttctgctagaagaagtcccagcagctca

SEQ ID NO: 76634 - DNA, 600 bp, Chicken  19866894364235_3
tttctttttggagtgcttaataatattgtgtcaccaattcaagcactacagtttgcgttgtaaccaccagcgtacttgtagctgtggccragattgaccacaaaggccttccagggtttttagttgttttgcttagacagacttaagcctgggaggaagaaagatgactttccagtagcaatttgtatttactggaactaatttttcatcaatgtttgtgktttttttcccctcacttttgcttcctcaccaatgtgcagtgagggcagagacctgaaccatgtctctttcttttcaatrattctcttctgcattagctggggagctaatgtggtgttattgccttaggttatctcagtttgtctcttctactgcaataaatgtttgaggtagaagctaaaggactgaggagcatcctcctttcagatttgggccatttaggatctgattgctgttcttgtgaaygctaaagcattttatacagggtaggtggttctgctagaagaagtcccagcagctcacmcttgaaatgccccccttgcccactacatgccatgacaggggccttggtcacattcatgctttctatggaaagcactc

SEQ ID NO: 76635 - DNA, 600 bp, Chicken  19866894364235_4
gactttccagtagcaatttgtatttactggaactaatttttcatcaatgtttgtgktttttttcccctcacttttgcttcctcaccaatgtgcagtgagggcagagacctgaaccatgtctctttcttttcaatrattctcttctgcattagctggggagctaatgtggtgttattgccttaggttatctcagtttgtctcttctactgcaataaatgtttgaggtagaagctaaaggactgaggagcatcctcctttcagatttgggccatttaggatctgattgctgttcttgtgaaygctaaagcattttatacagggtaggtggttctgctagaagaagtcccagcagctcacmcttgaaatgccccccttgcccactacatgccatgacaggggccttggtcacattcatgctttctatggaaagcactcttgccgttggggtcacacgatgaagggaggtgatttggtaggcccaaatgccaaatagttgctacgtgatgttaaacagtgaagtggaaggaaacgtargagagatgctttgtttcggtgagctgttgtacagtttatggcagctattagaaaggaaagcaaata

SEQ ID NO: 76636 - DNA, 600 bp, Chicken  19866894364235_5
tttttcccctcacttttgcttcctcaccaatgtgcagtgagggcagagacctgaaccatgtctctttcttttcaatrattctcttctgcattagctggggagctaatgtggtgttattgccttaggttatctcagtttgtctcttctactgcaataaatgtttgaggtagaagctaaaggactgaggagcatcctcctttcagatttgggccatttaggatctgattgctgttcttgtgaaygctaaagcattttatacagggtaggtggttctgctagaagaagtcccagcagctcacmcttgaaatgccccccttgcccactacatgccatgacaggggccttggtcacattcatgctttctatggaaagcactcttgccgttggggtcacacgatgaagggaggtgatttggtaggcccaaatgccaaatagttgctacgtgatgttaaacagtgaagtggaaggaaacgtargagagatgctttgtttcggtgagctgttgtacagtttatggcagctattagaaaggaaagcaaataaagtcttgagaacttgggactggaaaaattgttctggcacatagatatcagatctgga

SEQ ID NO: 76637 - DNA, 600 bp, Chicken  19866894364235_6
aaggactgaggagcatcctcctttcagatttgggccatttaggatctgattgctgttcttgtgaaygctaaagcattttatacagggtaggtggttctgctagaagaagtcccagcagctcacmcttgaaatgccccccttgcccactacatgccatgacaggggccttggtcacattcatgctttctatggaaagcactcttgccgttggggtcacacgatgaagggaggtgatttggtaggcccaaatgccaaatagttgctacgtgatgttaaacagtgaagtggaaggaaacgtargagagatgctttgtttcggtgagctgttgtacagtttatggcagctattagaaaggaaagcaaataaagtcttgagaacttgggactggaaaaattgttctggcacatagatatcagatctggagctttctgctcgtttctgtcactgtgttaaagggagaaaagtgtgaagattgagatagggagtggaaaagagcagaaatgattaatgggttcaggtagtgtgggttatgaagatgtaattagtcctggcctatttaacttggaggtggggaaaagccataaataaagggtggaaat

SEQ ID NO: 76638 - DNA, 600 bp, Chicken  19866894364236_1
gtatgaattattctattaatccactgtttgtcataatagctttcctttgaggaattgcaagcaattcgttttttttttaatgctacagttttaagccctgaaacaaaataccagggctgtagctctcaccatctacccattaagttcaattttaagattttttcttatgtctggacaatttgaagtgaataatgatctaatttttgttcttcttgtactatgaaatttattcacctaaatagtaggaagcagcaaacctgtaaggaagttgcaaatgtaccttgaagtcatagatcatawgcttgtgcacagatggttccctacacatgatcattatcctgagacttscagagctcaggacaaaccttcactttttcaaggacaccacaaatcatgactagatcctagtgtttgacatggatttttgcctgaacaacggcgtaatgaactcaggagctacagatggaaaagtcatctagctttagctgagaccaaaaacatagggatagaccggtcccttagaaccactcggaagggagaagttttgttgccagacacacgagttaatgaatgcctcatttctgcagccacctccccaca

SEQ ID NO: 76639 - DNA, 600 bp, Chicken  19866894364236_2
gaggaattgcaagcaattcgttttttttttaatgctacagttttaagccctgaaacaaaataccagggctgtagctctcaccatctacccattaagttcaattttaagattttttcttatgtctggacaatttgaagtgaataatgatctaatttttgttcttcttgtactatgaaatttattcacctaaatagtaggaagcagcaaacctgtaaggaagttgcaaatgtaccttgaagtcatagatcatawgcttgtgcacagatggttccctacacatgatcattatcctgagacttscagagctcaggacaaaccttcactttttcaaggacaccacaaatcatgactagatcctagtgtttgacatggatttttgcctgaacaacggcgtaatgaactcaggagctacagatggaaaagtcatctagctttagctgagaccaaaaacatagggatagaccggtcccttagaaccactcggaagggagaagttttgttgccagacacacgagttaatgaatgcctcatttctgcagccacctccccacagtacttcagcttgggttagtgcagaaaaaaacttattagcccgaggat

SEQ ID NO: 76640 - DNA, 600 bp, Chicken  19866894364250_1
gtgagagaattggaataagtaggaatgtaatatattgtttactgtactgagtgccctctgttctccaaaggtcaaaagcattgtaaccttagagttacagtttctgattgttcccagggttaaatacattatcaaaattaatggttcaaacccctcaaccttcagatatatgagtattcatgcctccatctgccgaactgttcaactaaaaatagcattctttggccttcactctactcgtattgtgcccctgaggcaggctatgcaatgcttcagcggtgtgctggatccacacccagyggtataacaaaaggtcatttactttgcaattagaagagagtatgaaagggtaggatgagatgggaggggagaatagaagtagataaatacatgtttagttaaaacttacattttttaaatcaattttaaaaacttcaggcctcaagaacacagctgcaactacagttaagactcgccaaggttcattagggtggtaagcgataaattttaaaggacaaattacacaaatagtttaggaaagaagttatgaactagagcttttttgtttggctttttttttcctagagcttgctttgttta

SEQ ID NO: 76641 - DNA, 600 bp, Chicken  19866894364254_1
acaggatcaggagagctcgtttccaaaggaagtctgagagaggttgctcatctgtctgcagtgagatgagatggtgtgcagcgagctactcaagcctgtaaaaataggcactcaaatatcacagtaatgagcaccatagaaagctgatgaattataattaccagtataagaaacaagaggccagctcctcggctgatgaaaatcgcagcagctctaatgcagaagctgaggtgacgttcattggtgaagctgtgggatttcggggctcaggtatcagtttggatagtaaagagaggtgayctctcgttgtggcattgcccagtttgaaacaccaaaacgwgttgttccgtctcaaarctgaaccataccaaagggstgaagaggagaactctcttcattagagaacctcctggtaatgatcgttgagcttttctacacactgccacgcactgagaaatgtgcttctaaacagcctcctctctgcattatgcatcactaacatccagtcaggggctctggaggcactgctgaaagacaggagacaatgaaatgaatcccttcaaaaagcatccaccctgagtaaactgagactgcagcttg

SEQ ID NO: 76642 - DNA, 600 bp, Chicken  19866894364254_2
aggttgctcatctgtctgcagtgagatgagatggtgtgcagcgagctactcaagcctgtaaaaataggcactcaaatatcacagtaatgagcaccatagaaagctgatgaattataattaccagtataagaaacaagaggccagctcctcggctgatgaaaatcgcagcagctctaatgcagaagctgaggtgacgttcattggtgaagctgtgggatttcggggctcaggtatcagtttggatagtaaagagaggtgayctctcgttgtggcattgcccagtttgaaacaccaaaacgwgttgttccgtctcaaarctgaaccataccaaagggstgaagaggagaactctcttcattagagaacctcctggtaatgatcgttgagcttttctacacactgccacgcactgagaaatgtgcttctaaacagcctcctctctgcattatgcatcactaacatccagtcaggggctctggaggcactgctgaaagacaggagacaatgaaatgaatcccttcaaaaagcatccaccctgagtaaactgagactgcagcttggtgttgaggatgcaggatgaaatctcttcatctgctgctg

SEQ ID NO: 76643 - DNA, 600 bp, Chicken  19866894364254_3
gcagtgagatgagatggtgtgcagcgagctactcaagcctgtaaaaataggcactcaaatatcacagtaatgagcaccatagaaagctgatgaattataattaccagtataagaaacaagaggccagctcctcggctgatgaaaatcgcagcagctctaatgcagaagctgaggtgacgttcattggtgaagctgtgggatttcggggctcaggtatcagtttggatagtaaagagaggtgayctctcgttgtggcattgcccagtttgaaacaccaaaacgwgttgttccgtctcaaarctgaaccataccaaagggstgaagaggagaactctcttcattagagaacctcctggtaatgatcgttgagcttttctacacactgccacgcactgagaaatgtgcttctaaacagcctcctctctgcattatgcatcactaacatccagtcaggggctctggaggcactgctgaaagacaggagacaatgaaatgaatcccttcaaaaagcatccaccctgagtaaactgagactgcagcttggtgttgaggatgcaggatgaaatctcttcatctgctgctgagattgcaaagcagggc

SEQ ID NO: 76644 - DNA, 600 bp, Chicken  19866894364254_4
tgcagcgagctactcaagcctgtaaaaataggcactcaaatatcacagtaatgagcaccatagaaagctgatgaattataattaccagtataagaaacaagaggccagctcctcggctgatgaaaatcgcagcagctctaatgcagaagctgaggtgacgttcattggtgaagctgtgggatttcggggctcaggtatcagtttggatagtaaagagaggtgayctctcgttgtggcattgcccagtttgaaacaccaaaacgwgttgttccgtctcaaarctgaaccataccaaagggstgaagaggagaactctcttcattagagaacctcctggtaatgatcgttgagcttttctacacactgccacgcactgagaaatgtgcttctaaacagcctcctctctgcattatgcatcactaacatccagtcaggggctctggaggcactgctgaaagacaggagacaatgaaatgaatcccttcaaaaagcatccaccctgagtaaactgagactgcagcttggtgttgaggatgcaggatgaaatctcttcatctgctgctgagattgcaaagcagggccttccctggtggcttgtgc

SEQ ID NO: 76645 - DNA, 600 bp, Chicken  19866894364286_1
ccatgggaagttgaacctgctgcctttaaaggagcacatgctacttcaagaaataaagcatgaaaggaagcagtggtgtgcaaatcaaaataaaccctttacctttctcgctgactgtgtgcttagggaaagaacagaccatagaggaagaattcagacctttttttcttcagtttctaaagacaactactttctctctagatgagaaagaaattcagttttaatgatggtggctgtagccttccactgaatgaccttaatttttgtgatcaatataggcaggtggcaacaatgctttcytcaagtaactaattgctcaggattaagaatcgattgctttgttttatttactctcttcactgctgcatgggattcttcacctcctatcagctaacagaacgagttcatggattggtcagctgctttttccttccctcctctcaccctttccacagcagcttttctcaaggttcactgaccaaggaaaaggtccacccacatctttctctttgcccaatgaacttaaattgatttctggttagcaatatgattgagtttaccttggtgttgtttagtggttgtttttgttttgttagtttt

SEQ ID NO: 76646 - DNA, 600 bp, Chicken  19866894364300_1
acaatagaaagattatttggttgtcatctaacatccttagcccttcaaccttcacccttatcacccttctcattcattcatatcaagggtaccttgagttattttacttgcagcttatagtcgcataaactttacatggaacctctttatcatcatcttccttggtgcaatggatacaactggagaaaatgtggtccagtgcaaggtatttctccagtgcaacttctgaatgacaggcttattttatctgcatccttcttttttacctacagtcacagtacgacaatactccagcacacrgtcacagtttaccaactgaaccagattagcctttagcagtaattgcttgccctcattatttttcaaagaatactggggtacattatgctctagggagacagtgctgtgtagtcagtagggtctgtgtctcagcagaaaataaaccagtgtctgttttcaagttatccatctttagcagtaagtaataattactatgctgtgtaccataaagctccaagctttctaatttctcttctatgctgcaaaataaccacccaggcttctccacattttccctctatacttagtacccagtcaggg

SEQ ID NO: 76647 - DNA, 600 bp, Chicken  19866894364301_1
agtagcttcttggtctgggaaaatggcaggcacccaaatgctaacacagggatctaggaaagaaatctacctgaagaacaatatttttcaagtggctttagaagtgaaaaatggccataaagagaagtctcacactcaagggattttattccttctgtctggctgctgttcatcaggtgccattccctgcacacatccccagcacattctaatgcaagaatggagagggcctctctgaaaataatcatacttgctgaaagacctgccctgcataaatatctctaacaacagtacaaacaraaatcagccttcttacccaatacttcagttgaaatttatggcaccgctggccgtgattctgttattactgttctacctggcgaaggctcaaagtcacagaactgggaatttcagaagtattttcagcaatgcagtactcatttggggraaaaaaaaaccaacaaaaaaacaaaaaatacatacctagttctataaatgctgtaccaatgcattagtgaacaaagctatataatacacgtatctgcatacatgtgttcgcgcacaccatagagacaggacagagagaagttagggacaggc

SEQ ID NO: 76648 - DNA, 600 bp, Chicken  19866894364301_2
ttccttctgtctggctgctgttcatcaggtgccattccctgcacacatccccagcacattctaatgcaagaatggagagggcctctctgaaaataatcatacttgctgaaagacctgccctgcataaatatctctaacaacagtacaaacaraaatcagccttcttacccaatacttcagttgaaatttatggcaccgctggccgtgattctgttattactgttctacctggcgaaggctcaaagtcacagaactgggaatttcagaagtattttcagcaatgcagtactcatttggggraaaaaaaaaccaacaaaaaaacaaaaaatacatacctagttctataaatgctgtaccaatgcattagtgaacaaagctatataatacacgtatctgcatacatgtgttcgcgcacaccatagagacaggacagagagaagttagggacaggcatggcctctgaaatgatatttaatgctacagcttgggaataataaagcaagaaaaaaagaaatcaaagggaatactgaaaaacagtctcttgtgctcttgcaaatatcaccagctgctggaagatttatatgcagaaaaactagaagt

SEQ ID NO: 76649 - DNA, 599 bp, Chicken  19866894364302_1
  misc_feature (1)..(108): n is any nucleotide
nnnnnnnnnnnnnnnnnnnnnnnnnnnnnnnnnnnnnnnnnnnnnnnnnnnnnnnnnnnnnnnnnnnnnnnnnnnnnnnnnnnnnnnnnnnnnnnnnnnnnnnnnnnnttgccctgctgctgttccagccctgcaatcacctttgaaatttggggtcaccagcagcaccagcccaagggcagagtgctctgtgctttcagctcatggtgctgcttctgactggctcagcatggcaatggcattggggtttgtggctaaagcacacaccctgtgcttcagaattgaagtacagtcctgttytatgaacacagtttgctcacaggaggtttagctgcttcccatggaaagcagatggagcacatcccctgctcggctggcctggtgtgcagtgctggtgttagcagggaattcatggggctggaaaaggggattgcataagagctctgacaggtgtctttgttcccaatataacttactcttgctgccaaccctatttttgaataacgctctgtctctctgtatacatctaaattcctcctgccctccactccccagatagaattgggacagtgatcgctatcgcaataggatattaattg

SEQ ID NO: 76650 - DNA, 599 bp, Chicken  19866894364305_1
  misc_feature (1)..(65): n is any nucleotide
nnnnnnnnnnnnnnnnnnnnnnnnnnnnnnnnnnnnnnnnnnnnnnnnnnnnnnnnnnnnnnnnntaagttagcttagcaccagaacatatgacctggtgctttttcacactgtcttgttatattatacttgttaaaggatacagatttttatttcatttcttatatatttagattttctgaatgttgtgaaggataaagagcagccatgtgccatgtatactaacctagctactgtactaagaaaaaaatgtttcctaatctctaaaggaaccatagggcacttttcattgatgtgttstactatacgtgtacgcttgctgatgctacctttagagaagagctgtctgagcatatttaatcataactatccccaatttagttaaaaagatcccctgtgttacttatgcataaatgtaatgcattttcattagaaaatgcaaaaaaactaattgactgataaacttattttcaggctgcaaagatttgtaacaacatgcttttggccatcagtatgattggaactgctgagactatgaatcttggaatcaggtttgtttgatttttgtattggattgaaggtgttttctgtgtgttaac

SEQ ID NO: 76651 - DNA, 600 bp, Chicken  19866894364308_1
catttgaaatccttgcttactcctgggtgattagaaaggataataataacaaaaaaataccctcaaatggggattaaatcctcaagagaagaagtgctccatttattggagccttgcttatctcgcacagagtaaggggattatgcgattgcttttgtgctctgaacgattgtggctagacagtttctgacataatagacttgcctactgaaatagaaacattactgttatatggatttgcagctggctgcagaagtgtgtttgtctgaacagaaatgtcccttgtaactgactgaaacrcccgctctgaatgtggacgccgrgccttttggggaaggcatacactgccttttgttacgctcgcgagacgccgcagcctccggagacaccmgcgaagggacctgggttcagaagcccttttgaattgaraacgcaacccaagacggaggccgagtatgtaagaaaagctggctcctgagatgtgttgctaacgtgcaatagcactaaatgaggagctggattcgtagagggtcacagcggggttacgtggtcagctgttgtgggctgtccctaaaagcagggttgggaaatatttcggtg

SEQ ID NO: 76652 - DNA, 600 bp, Chicken  19866894364308_2
tgggtgattagaaaggataataataacaaaaaaataccctcaaatggggattaaatcctcaagagaagaagtgctccatttattggagccttgcttatctcgcacagagtaaggggattatgcgattgcttttgtgctctgaacgattgtggctagacagtttctgacataatagacttgcctactgaaatagaaacattactgttatatggatttgcagctggctgcagaagtgtgtttgtctgaacagaaatgtcccttgtaactgactgaaacrcccgctctgaatgtggacgccgrgccttttggggaaggcatacactgccttttgttacgctcgcgagacgccgcagcctccggagacaccmgcgaagggacctgggttcagaagcccttttgaattgaraacgcaacccaagacggaggccgagtatgtaagaaaagctggctcctgagatgtgttgctaacgtgcaatagcactaaatgaggagctggattcgtagagggtcacagcggggttacgtggtcagctgttgtgggctgtccctaaaagcagggttgggaaatatttcggtgccagagccccatctctctggaca

SEQ ID NO: 76653 - DNA, 600 bp, Chicken  19866894364308_3
aagtgctccatttattggagccttgcttatctcgcacagagtaaggggattatgcgattgcttttgtgctctgaacgattgtggctagacagtttctgacataatagacttgcctactgaaatagaaacattactgttatatggatttgcagctggctgcagaagtgtgtttgtctgaacagaaatgtcccttgtaactgactgaaacrcccgctctgaatgtggacgccgrgccttttggggaaggcatacactgccttttgttacgctcgcgagacgccgcagcctccggagacaccmgcgaagggacctgggttcagaagcccttttgaattgaraacgcaacccaagacggaggccgagtatgtaagaaaagctggctcctgagatgtgttgctaacgtgcaatagcactaaatgaggagctggattcgtagagggtcacagcggggttacgtggtcagctgttgtgggctgtccctaaaagcagggttgggaaatatttcggtgccagagccccatctctctggacatgcagagtacaggctcctttgtgataaccgtcatcagctttgactgcttttggggagaattggggcat

SEQ ID NO: 76654 - DNA, 600 bp, Chicken  19866894364308_4
gagtaaggggattatgcgattgcttttgtgctctgaacgattgtggctagacagtttctgacataatagacttgcctactgaaatagaaacattactgttatatggatttgcagctggctgcagaagtgtgtttgtctgaacagaaatgtcccttgtaactgactgaaacrcccgctctgaatgtggacgccgrgccttttggggaaggcatacactgccttttgttacgctcgcgagacgccgcagcctccggagacaccmgcgaagggacctgggttcagaagcccttttgaattgaraacgcaacccaagacggaggccgagtatgtaagaaaagctggctcctgagatgtgttgctaacgtgcaatagcactaaatgaggagctggattcgtagagggtcacagcggggttacgtggtcagctgttgtgggctgtccctaaaagcagggttgggaaatatttcggtgccagagccccatctctctggacatgcagagtacaggctcctttgtgataaccgtcatcagctttgactgcttttggggagaattggggcatttcgctctgctaattctcactgaaacggggtaatgtcc

SEQ ID NO: 76655 - DNA, 599 bp, Chicken  19866894364309_1
  misc_feature (1)..(126): n is any nucleotide
nnnnnnnnnnnnnnnnnnnnnnnnnnnnnnnnnnnnnnnnnnnnnnnnnnnnnnnnnnnnnnnnnnnnnnnnnnnnnnnnnnnnnnnnnnnnnnnnnnnnnnnnnnnnnnnnnnnnnnnnnnnnnnagaggaaaattaacgtagtcaaaaagaactggacttcttgcctatgaccaccagatcatgagatgcagcaacttcaaaatagctgaaaggtgactgaaactatttaaaacaagtagtgtactgtttttttttgtttgttttgttttgtttgtattgttttctccattaacgatkacagaatttttctaaaattgagaacatttattcctaagtgtgcagacacatgtctgggtgcaacaaaatcaattgatttgaatacctgggtcccatacctgcaatgcaatatatattagggtatacattaattgtagtttggttttttgtttgtttgtttgtttttaactggaaggcaatatgtgcaaataaaatctgcttggtgcattagtgacagttccctgcttgcattttgtattttgacatttcttttcaaaatgaaatatggaaataaaataatttctaaagcatgtgcctca

SEQ ID NO: 76656 - DNA, 599 bp, Chicken  19866894364311_1
  misc_feature (1)..(79): n is any nucleotide
nnnnnnnnnnnnnnnnnnnnnnnnnnnnnnnnnnnnnnnnnnnnnnnnnnnnnnnnnnnnnnnnnnnnnnnnnnnnnnntattgtcccagcttgcatagggctgcagttcctgatccaataaacctacagctgtttttttttccctaggagcaggattggttttagaaatgtgtgctggtgttatcttgtgtagcaagtgcattgtttgccactggggacttgccaatcttggacaaacttgaacagttcacgttgctgacacatctcctgcaagtagtatttgagatgctgttgggaarcagttgggtaagagtagctctcccagcgtgtagtgacccatgttatgtgtaaatgggctcgaactcaggtgctcactctgctgtgaaggagaagctttcaaaagcagagatgctttcataaagagtcactttccttacattaagcagtcctgtttgccttaaaagtgaaattatcatttaaatagcagggactaatcagcaaggggatggtttgctactgtcagagggctcagatgtttgtgcttgatttttattcagcctctcattttgtcattcccacacacycagtacccattata

SEQ ID NO: 76657 - DNA, 600 bp, Chicken  19866894364311_2
gatgctgttgggaarcagttgggtaagagtagctctcccagcgtgtagtgacccatgttatgtgtaaatgggctcgaactcaggtgctcactctgctgtgaaggagaagctttcaaaagcagagatgctttcataaagagtcactttccttacattaagcagtcctgtttgccttaaaagtgaaattatcatttaaatagcagggactaatcagcaaggggatggtttgctactgtcagagggctcagatgtttgtgcttgatttttattcagcctctcattttgtcattcccacacacycagtacccattataatctctagctcatttttaattttaccttttcaattctgttttagcatctttgagtattttaactctaagttttctaagtggatgtgctttgccttatctctgatgtaaatgtgcartatcctacactttatcttcaragttcatatttgcagggaaactttttaacagacatgtaaagatggatactggagatgcttattaagaamagttttcttttaccagagcaaatacttttttaaaaaccatcctcaaaatacacaaaagcaaaatgcttcagtaagtgttc

SEQ ID NO: 76658 - DNA, 600 bp, Chicken  19866894364311_3
tcataaagagtcactttccttacattaagcagtcctgtttgccttaaaagtgaaattatcatttaaatagcagggactaatcagcaaggggatggtttgctactgtcagagggctcagatgtttgtgcttgatttttattcagcctctcattttgtcattcccacacacycagtacccattataatctctagctcatttttaattttaccttttcaattctgttttagcatctttgagtattttaactctaagttttctaagtggatgtgctttgccttatctctgatgtaaatgtgcartatcctacactttatcttcaragttcatatttgcagggaaactttttaacagacatgtaaagatggatactggagatgcttattaagaamagttttcttttaccagagcaaatacttttttaaaaaccatcctcaaaatacacaaaagcaaaatgcttcagtaagtgttcatattattatagtgttactcccctgtattagtgggtatggccttaatataagggcaatgcctttgtggttggatcaaggagtagcaatatggattgttccaggctaatacatcagctttatttgtctagg

SEQ ID NO: 76659 - DNA, 600 bp, Chicken  19866894364311_4
acattaagcagtcctgtttgccttaaaagtgaaattatcatttaaatagcagggactaatcagcaaggggatggtttgctactgtcagagggctcagatgtttgtgcttgatttttattcagcctctcattttgtcattcccacacacycagtacccattataatctctagctcatttttaattttaccttttcaattctgttttagcatctttgagtattttaactctaagttttctaagtggatgtgctttgccttatctctgatgtaaatgtgcartatcctacactttatcttcaragttcatatttgcagggaaactttttaacagacatgtaaagatggatactggagatgcttattaagaamagttttcttttaccagagcaaatacttttttaaaaaccatcctcaaaatacacaaaagcaaaatgcttcagtaagtgttcatattattatagtgttactcccctgtattagtgggtatggccttaatataagggcaatgcctttgtggttggatcaaggagtagcaatatggattgttccaggctaatacatcagctttatttgtctaggaaattgattatcttgtcaagc

SEQ ID NO: 76660 - DNA, 600 bp, Chicken  19866894364311_5
gatggtttgctactgtcagagggctcagatgtttgtgcttgatttttattcagcctctcattttgtcattcccacacacycagtacccattataatctctagctcatttttaattttaccttttcaattctgttttagcatctttgagtattttaactctaagttttctaagtggatgtgctttgccttatctctgatgtaaatgtgcartatcctacactttatcttcaragttcatatttgcagggaaactttttaacagacatgtaaagatggatactggagatgcttattaagaamagttttcttttaccagagcaaatacttttttaaaaaccatcctcaaaatacacaaaagcaaaatgcttcagtaagtgttcatattattatagtgttactcccctgtattagtgggtatggccttaatataagggcaatgcctttgtggttggatcaaggagtagcaatatggattgttccaggctaatacatcagctttatttgtctaggaaattgattatcttgtcaagcaaagtgctgtagatcttacataattgaacttcactgtaacatttgatcaagagagccatttgggaaagt

SEQ ID NO: 76661 - DNA, 600 bp, Chicken  19866894364315_1
ccaagaaaaggaaaattaaagatgaaatattttgtctatacctttcatcatctggtagttcattattgtctttcagccatataactgttggtattaaggtaggatcatgttttattacacactcaaatgaagcctgggcagatctctgaatcactttgtactgtggctgtttaattatcatcgttgggtctgaaatgtgaaatgtctattagatatttagaaagtcttgagttctaaataatttgtgatgaaacagtgattcatagcttacctttaacttccagttgtacttcattttgygtcttccctaatttattccttgcaacacatgtgtatgtgccagtactatccttctgagccactggaatttccaaggttccattatcatggaaaacatattcatttcctcgcaagatgctacctttcactcccctaaacctttaagtgaaagataataccattacccaatgccataattaaattctatcatattttattattaggaaatacaaacttggactgctatgttagcaaatacaaacagcatccataatttaagtttaaactttacacttaaacatgttgctacatcaagtacaa

SEQ ID NO: 76662 - DNA, 600 bp, Chicken  19866894364317_1
aaggagaacagaatctgaggcccctgaagattctataattaatacctcttctcagggaggagaaactgagaagagagaaattgggaaaatttatttggaaatggtatttatgtcatgtcataccttatattaaaagcatttaaagaagcttaaaaaaagatatcccaaatttcagttaagaagctgaagctttcaaaatcattcttaattttgaacactgtagattaaaattcatactgttgtctcatctctcttatcctgacaacattcctcctatctgagtgtaacaaaagctaaaasgtcacgaagagagcagtcattcataaaaaagggaaagctgtcttccctgttgatgctttatattggtgaaacaccgaggcttgtggtgctagctcctgtccaaaatgagaacatagaaacgatctttgagttaaagagctcacagtctaaacayaaaactgagagtgagaagatgaagacagaaaagaagggagtacaaatggcagtgatatccatcaacacagcctcagttcagcactaatcgtgctgccattaacgtcttaaatggttattggaggaaaggagcatttcaaggtagga

SEQ ID NO: 76663 - DNA, 600 bp, Chicken  19866894364317_2
aaaagatatcccaaatttcagttaagaagctgaagctttcaaaatcattcttaattttgaacactgtagattaaaattcatactgttgtctcatctctcttatcctgacaacattcctcctatctgagtgtaacaaaagctaaaasgtcacgaagagagcagtcattcataaaaaagggaaagctgtcttccctgttgatgctttatattggtgaaacaccgaggcttgtggtgctagctcctgtccaaaatgagaacatagaaacgatctttgagttaaagagctcacagtctaaacayaaaactgagagtgagaagatgaagacagaaaagaagggagtacaaatggcagtgatatccatcaacacagcctcagttcagcactaatcgtgctgccattaacgtcttaaatggttattggaggaaaggagcatttcaaggtaggatttgaaaggaagtaatgtggttgtttttactgagctttattaaaagaaattagtgagaatcactgtcagaagagtgtttctgaacccagcttgttttcaagaagtcataatttcaccccaaaaatctcagatacagatgttgaataaaaaggat

SEQ ID NO: 76664 - DNA, 600 bp, Chicken  19866894364317_3
cactaatcgtgctgccattaacgtcttaaatggttattggaggaaaggagcatttcaaggtaggatttgaaaggaagtaatgtggttgtttttactgagctttattaaaagaaattagtgagaatcactgtcagaagagtgtttctgaacccagcttgttttcaagaagtcataatttcaccccaaaaatctcagatacagatgttgaataaaaaggataagcagagctgattaagatcattttttttgatgtacaaaacccatacccatgacagtggaagctgtagcagatgtgcatgrgtgcagctagaaaaagacttcgactctgcaagctctgtacaaatcctggctctggcagttccactgttcagcttcttgggatccactgaataaaagttgcctggatttttgcaggggtatagaggacagggagtctggtgtccacaaaataaagccaacgaatgctgtgatttctaggaaaaacaatatttgcagcatgggctctagacaggagaagctggggtattagtaacgtgtgactggagacagtctcagcaatgyagtgcttgctgtcaaaaggataaaggaatgtcttgagag

SEQ ID NO: 76665 - DNA, 400 bp, Chicken  19866894364317_4
catacccatgacagtggaagctgtagcagatgtgcatgrgtgcagctagaaaaagacttcgactctgcaagctctgtacaaatcctggctctggcagttccactgttcagcttcttgggatccactgaataaaagttgcctggatttttgcaggggtatagaggacagggagtctggtgtccacaaaataaagccaacgaatgctgtgatttctaggaaaaacaatatttgcagcatgggctctagacaggagaagctggggtattagtaacgtgtgactggagacagtctcagcaatgyagtgcttgctgtcaaaaggataaaggaatgtcttgagagaaatgctcccttccaaccctctacttagaggggaaaaaaagtgcaaatatttttctttctg

SEQ ID NO: 76666 - DNA, 600 bp, Chicken  19866894364320_1
cagctgcaaacccttactttattatctccctttccaatcttggaacttctccaggttgaacaatagccattggattgtctgtgttctggtgaaagggagacaatgggagtcaaaatgagcaaagttactccttgtagatcaaggacaattgctgaaagaagaggacgttttcaaggaattcccagggaacagagagttgcaaggccgcttggcaaagtcctttctctggaaatgttacagctgccgcgtgcccagagcacatgctccccacaggcctgtgagcagaggctgctggggcayggagctgtgccccaygctcacactaagaacaagctgggggcttctttgtcccctttggacatttggaaactggtcccttttgagggctgggaaggccccagacccaaatttgcccatcygtgtgctgggtaaacarkgggatgatttaaggaaggaaaaaagtcacaaaacggaggtactcagagcacagtaggtggaaaggttcacacygctccatctgcccaatggatccaggagccattccagtagtcacctgcacccctagggctgtgagggagcgatggagctgagcgggctgtg

SEQ ID NO: 76667 - DNA, 600 bp, Chicken  19866894364320_2
actttattatctccctttccaatcttggaacttctccaggttgaacaatagccattggattgtctgtgttctggtgaaagggagacaatgggagtcaaaatgagcaaagttactccttgtagatcaaggacaattgctgaaagaagaggacgttttcaaggaattcccagggaacagagagttgcaaggccgcttggcaaagtcctttctctggaaatgttacagctgccgcgtgcccagagcacatgctccccacaggcctgtgagcagaggctgctggggcayggagctgtgccccaygctcacactaagaacaagctgggggcttctttgtcccctttggacatttggaaactggtcccttttgagggctgggaaggccccagacccaaatttgcccatcygtgtgctgggtaaacarkgggatgatttaaggaaggaaaaaagtcacaaaacggaggtactcagagcacagtaggtggaaaggttcacacygctccatctgcccaatggatccaggagccattccagtagtcacctgcacccctagggctgtgagggagcgatggagctgagcgggctgtgctaacccagacaaac

SEQ ID NO: 76668 - DNA, 600 bp, Chicken  19866894364320_3
caaagttactccttgtagatcaaggacaattgctgaaagaagaggacgttttcaaggaattcccagggaacagagagttgcaaggccgcttggcaaagtcctttctctggaaatgttacagctgccgcgtgcccagagcacatgctccccacaggcctgtgagcagaggctgctggggcayggagctgtgccccaygctcacactaagaacaagctgggggcttctttgtcccctttggacatttggaaactggtcccttttgagggctgggaaggccccagacccaaatttgcccatcygtgtgctgggtaaacarkgggatgatttaaggaaggaaaaaagtcacaaaacggaggtactcagagcacagtaggtggaaaggttcacacygctccatctgcccaatggatccaggagccattccagtagtcacctgcacccctagggctgtgagggagcgatggagctgagcgggctgtgctaacccagacaaactgtctgtgcactccggcactgaggtgaacaaaatgactttttttccttcttagagtcatggaagcattaggattggaaagaccaataggatcacttagtccaac

SEQ ID NO: 76669 - DNA, 600 bp, Chicken  19866894364320_4
gatcaaggacaattgctgaaagaagaggacgttttcaaggaattcccagggaacagagagttgcaaggccgcttggcaaagtcctttctctggaaatgttacagctgccgcgtgcccagagcacatgctccccacaggcctgtgagcagaggctgctggggcayggagctgtgccccaygctcacactaagaacaagctgggggcttctttgtcccctttggacatttggaaactggtcccttttgagggctgggaaggccccagacccaaatttgcccatcygtgtgctgggtaaacarkgggatgatttaaggaaggaaaaaagtcacaaaacggaggtactcagagcacagtaggtggaaaggttcacacygctccatctgcccaatggatccaggagccattccagtagtcacctgcacccctagggctgtgagggagcgatggagctgagcgggctgtgctaacccagacaaactgtctgtgcactccggcactgaggtgaacaaaatgactttttttccttcttagagtcatggaagcattaggattggaaagaccaataggatcacttagtccaaccaccagcccatggctgt

SEQ ID NO: 76670 - DNA, 600 bp, Chicken  19866894364320_5
atcaaggacaattgctgaaagaagaggacgttttcaaggaattcccagggaacagagagttgcaaggccgcttggcaaagtcctttctctggaaatgttacagctgccgcgtgcccagagcacatgctccccacaggcctgtgagcagaggctgctggggcayggagctgtgccccaygctcacactaagaacaagctgggggcttctttgtcccctttggacatttggaaactggtcccttttgagggctgggaaggccccagacccaaatttgcccatcygtgtgctgggtaaacarkgggatgatttaaggaaggaaaaaagtcacaaaacggaggtactcagagcacagtaggtggaaaggttcacacygctccatctgcccaatggatccaggagccattccagtagtcacctgcacccctagggctgtgagggagcgatggagctgagcgggctgtgctaacccagacaaactgtctgtgcactccggcactgaggtgaacaaaatgactttttttccttcttagagtcatggaagcattaggattggaaagaccaataggatcacttagtccaaccaccagcccatggctgtg

SEQ ID NO: 76671 - DNA, 600 bp, Chicken  19866894364320_6
ggcaaagtcctttctctggaaatgttacagctgccgcgtgcccagagcacatgctccccacaggcctgtgagcagaggctgctggggcayggagctgtgccccaygctcacactaagaacaagctgggggcttctttgtcccctttggacatttggaaactggtcccttttgagggctgggaaggccccagacccaaatttgcccatcygtgtgctgggtaaacarkgggatgatttaaggaaggaaaaaagtcacaaaacggaggtactcagagcacagtaggtggaaaggttcacacygctccatctgcccaatggatccaggagccattccagtagtcacctgcacccctagggctgtgagggagcgatggagctgagcgggctgtgctaacccagacaaactgtctgtgcactccggcactgaggtgaacaaaatgactttttttccttcttagagtcatggaagcattaggattggaaagaccaataggatcacttagtccaaccaccagcccatggctgtgactgcttgagaccacgtccatcctccctgggcagcctgttccagtgcccagccactctttctgagaagaaatt

SEQ ID NO: 76672 - DNA, 600 bp, Chicken  19866894364322_1
tctttaagcatgccaacagttaaatgaaaactaggaaaaatatcagtctcctgctaaatgcggtgggtgccctgataacaggggatgctcggaagggagagagattaaatgccttctttgctacattgtttacttctaaaactgccctttgggaatcccggactcatgaggtaagagagagagactggggaacaaatgacattctttttgttgagcaggatatggtcagagaccatctagccaaaatcaatgcatacaaatccatgtgccccaatgggatgcacctgcacatactgaggsagctggcaaaagtgatagctgaaattctctctctcatcttagaaaggtcctggaaaatgggagaggtggcagaggactggaagatagccaatgtcacgacagtcttcaaaaagggaaagaaggatgatctgggaaaatacagaccagccagcctcagctctgaacccggaaagctgacagaacaacctattctatatgccgtctccaggcaactggaagagaagaaggtaatcaggagtagtcaacacggattcaccaaggggaaattgtgcttgaccaacccggtagccagttaggagg

SEQ ID NO: 76673 - DNA, 600 bp, Chicken  19866894364333_1
tatgctaccttttagatcacagaatcagagaatggtctgggttggaacggactttaagatcacccgtttccaacccccttgctacaggcagggacacctcccactagaccaggttgctcaaagccccatccagcctggccttgaatgcttccagggagggggcatccacaaccttactgggcaacctgttccagtgtctcactggcctcacagtaaatattttcttcctcatatctagtctaaatctaccctcttccagtttaaaaccattttccctcatcctgtcactacatgcccttwtaaaaagttgcttcccagctttcttgtaggcccccttcaggtactggaaggccgctataaggtgcccctggtgccttctctccttctcttttccagacggctgcaaagagctgaggtcaatccctccttgagaacgctgctaccatccctcaacttcttcaaatcttcagtgttttgattgtgtcatgggcttcacttcaaagcccataccttgctttagccagtgatgccattttgtatcagacattatatggttatcacatttatacagacagtccctccatctgcattaaacccact

SEQ ID NO: 76674 - DNA, 600 bp, Chicken  19866894364340_1
aacgcagcaggtggctcagcatcacacagttgtttactcacttccccccactcccccttcccagtgggatgggaaagagaatcgaaaaaaaccaaagtagaattcatgatttgagataaaactatgtactaaaatagagaaaaggaaaatagttatgattatacacatatgtgtatatggcaagtgatgcacaattaattgctcaccagctagccctgactagcagaagagagcaagataaatttcatctccctactaaactccttccacacaatgttatatggtatggaatattgtttytgtcagtttaagtcagctgtcctaacctgattctgtttccttccagctccttgggacctgtaaccatctttatgattggccttggttctgtacaacactgcttagcagcagccataaaacactggtatgttgtcaatgttgttttgctcctagaaccaaaagacagcttcataccagacacactaaagaaatcaattccaacacagctgaaactaaatcactgattcctgatatcttttaactcatgagcaagaaccataccatcccagccaagcttcaatcttttggtagtggatgggt

SEQ ID NO: 76675 - DNA, 600 bp, Chicken  19866894364347_1
ctgcagtccctttgctgaaggatagcatgactgtgactggatctttctgcccttgttgctcatggaggaatgctgccctcagatactgtattgtcactggtgtggagcagtgcctccagcggagatcaggaacctgatcctacctgccaccaagccaaagcatcatttctccttgtgagctcccttaacatgcatgaaaattgtgtgcatgtgtgtgcacatccactccacagcagcgcttgtggagaaggggggacccgtatgcttgcttctgcatccagggccggcacaggaaaaackcggggcagaccagaaagggacccaggagagcaggtgggatcgatcccctgtccttgtccttttccacggcagtgatagcccacactgacctccagtggtgtktgctgacatggcagcacattctggcgctgggttgcaattggtctgccccactagacacccacagcaaggctaccctacccatctttgggaccaacccagagatgcacaggtgtttgtaggagggcacctggcttctgtatgttttaagccttgtggaatgagcccagggatacatttagttgaggaaatggcagtttt

SEQ ID NO: 76676 - DNA, 600 bp, Chicken  19866894364347_2
tggagcagtgcctccagcggagatcaggaacctgatcctacctgccaccaagccaaagcatcatttctccttgtgagctcccttaacatgcatgaaaattgtgtgcatgtgtgtgcacatccactccacagcagcgcttgtggagaaggggggacccgtatgcttgcttctgcatccagggccggcacaggaaaaackcggggcagaccagaaagggacccaggagagcaggtgggatcgatcccctgtccttgtccttttccacggcagtgatagcccacactgacctccagtggtgtktgctgacatggcagcacattctggcgctgggttgcaattggtctgccccactagacacccacagcaaggctaccctacccatctttgggaccaacccagagatgcacaggtgtttgtaggagggcacctggcttctgtatgttttaagccttgtggaatgagcccagggatacatttagttgaggaaatggcagtttttacatgtgccatgttccgcctacaaaagtggagatcctgggcttgcagtaaggcttgtcagagataatcacaatggtcttttctagcattgatccattttct

SEQ ID NO: 76677 - DNA, 600 bp, Chicken  19866894364351_1
gcgtgtatcaaaggggaccttaattatataccgggtttttttcagtcaattttttttttgtatgttttgatccataccttcctaaaactgaagtgaagttgagatagaggttaggagccaaaggagcaactggaagggtcggtatcacagaacagatgcttggtctgggagaagcactgccatcttctaggaaacttctaacgctacacgaggaattagtcaggaaaaaattaagcaaagcactttgccagagcatgaactgaatagcacagcattgcttttcaggcagacacatcagtkatggagtgtgttttcctcccttaggtgacctggtgacttaagtaaagcttagtgtggaattcaggtcttgggttattgttggtttttcactttcttcctctaggctattcagaaaatgggcctgtgcatggggaagtttattttagggcattttataatagacttaaaaataccttacgtggttgagttcagtccagaaacagcacattactccatgtgctgaagatacaggcaggtttcaccatggaaatggttccaagagggctcgctctctggcagagcactggaagatgctatctc

SEQ ID NO: 76678 - DNA, 600 bp, Chicken  19866894364351_2
cgtgtatcaaaggggaccttaattatataccgggtttttttcagtcaattttttttttgtatgttttgatccataccttcctaaaactgaagtgaagttgagatagaggttaggagccaaaggagcaactggaagggtcggtatcacagaacagatgcttggtctgggagaagcactgccatcttctaggaaacttctaacgctacacgaggaattagtcaggaaaaaattaagcaaagcactttgccagagcatgaactgaatagcacagcattgcttttcaggcagacacatcagttktggagtgtgttttcctcccttaggtgacctggtgacttaagtaaagcttagtgtggaattcaggtcttgggttattgttggtttttcactttcttcctctaggctattcagaaaatgggcctgtgcatggggaagtttattttagggcattttataatagacttaaaaataccttacgtggttgagttcagtccagaaacagcacattactccatgtgctgaagatacaggcaggtttcaccatggaaatggttccaagagggctcgctctctggcagagcactggaagatgctatctcc

SEQ ID NO: 76679 - DNA, 599 bp, Chicken  19866894364352_1
  misc_feature (1)..(72): n is any nucleotide
nnnnnnnnnnnnnnnnnnnnnnnnnnnnnnnnnnnnnnnnnnnnnnnnnnnnnnnnnnnnnnnnnnnnnnnnaaaaaatgttacaagtctgtactggaatccctacctggtttagttgacttttcttctgggcatgatttcaaacaggcttcatactcagcagggcagcagcttctggggaaggaaaacaaacataagaaaacagtgtctgtgctggtgttaggaagcataaagctcaatggctcttcccaccacctgtgactgtaacaggggagggatctgggggtggtgagcatcaasaggagcagcgaagggcttttaggggttgcaatgagtgatttgctctgctgggtctaagaggaaaacctgcccggtggcctggcctcacagagaatttcccttttggttttacttctcttttccacatctcgatgcgggcrcgctggggcacacaagcccattgagggggttcagtgctggcagcgagagtctgaacaaatgttcatttgcagccccgctgccatttaaagaagtgaaacttccatgtcaactgctttgaggcagaaggggaagcttgcttggtgctggcagctgctttg

SEQ ID NO: 76680 - DNA, 546 bp, Chicken  19866894364352_10
atgcattacccttctggggtaccaaccaggcaaacaaaagcaggaaggaggaaagccagctttggaaagccttgatcctttgtttcsctcctttgccttcctgcctcactctggctcctgtgtcacgcagcacaaacacttaaayctctggcacwtcagatgagttgcaaaacatctcaaaatccacagacctgttccaggagatacttaaagcaaattggaatgaggatgctctgaattagaagagccgtcactaagcaatccagtacctgacaggatgttggggaagcctccyattcyctcaaaagagctgatgttggagagaggaaccctttagcagctactcttctccacacctgcagtcccagtctcacctctgtgtttgtcctcacagccctagctgaggattttggaagtggaatgcccagctcatctcctgctccatattccatccacccagctgtaggtgatgggcagagctgcaagaacccagttgggcagacaatagcttaggcagggagtatgggggcttaaggatgatgctga

SEQ ID NO: 76681 - DNA, 600 bp, Chicken  19866894364352_2
caaacaggcttcatactcagcagggcagcagcttctggggaaggaaaacaaacataagaaaacagtgtctgtgctggtgttaggaagcataaagctcaatggctcttcccaccacctgtgactgtaacaggggagggatctgggggtggtgagcatcaasaggagcagcgaagggcttttaggggttgcaatgagtgatttgctctgctgggtctaagaggaaaacctgcccggtggcctggcctcacagagaatttcccttttggttttacttctcttttccacatctcgatgcgggcrcgctggggcacacaagcccattgagggggttcagtgctggcagcgagagtctgaacaaatgttcatttgcagccccgctgccatttaaagaagtgaaacttccatgtcaactgctttgaggcagaaggggaagcttgcttggtgctggcagctgctttggtttgccttgtgttgctctgcgcacagctgtgccttctcccttggtccccaggcccctctcagacatttcctctgtggccttaacatctgtgggtgacttgcaatctcctgacctgcagggcccagccaacaagacacttg

SEQ ID NO: 76682 - DNA, 600 bp, Chicken  19866894364352_3
gagtctgaacaaatgttcatttgcagccccgctgccatttaaagaagtgaaacttccatgtcaactgctttgaggcagaaggggaagcttgcttggtgctggcagctgctttggtttgccttgtgttgctctgcgcacagctgtgccttctcccttggtccccaggcccctctcagacatttcctctgtggccttaacatctgtgggtgacttgcaatctcctgacctgcagggcccagccaacaagacacttgcttattttagcagctgtttcagcttttggacattttggaacatcaygggctgctggttgtttttctttatttcttgctcccagggacaaatattagcagaccaaaaagcaagagattaaccatttaagaatgcgagcaggagctcattcagcagttctgcctactctgagctgtggatctctgtgactgcgacaattcatcactttccaaaccaggtcagatctacagccttcctctttattccttggcccgcttctaaaactcactcatagccggagccaaacattgctcactggctccatccctgcttcaaggacagggcacttgctgcttttatgtgtcactt

SEQ ID NO: 76683 - DNA, 600 bp, Chicken  19866894364352_4
tccaaaccaggtcagatctacagccttcctctttattccttggcccgcttctaaaactcactcatagccggagccaaacattgctcactggctccatccctgcttcaaggacagggcacttgctgcttttatgtgtcactttgcccatctgttaaatggaactattaatactctcactggatgtttcacatgtctgtaaggctttgagatccgcagatgacgggcttacagaagtggaaaatactaatgatgatcatgacagcatccaaacaaagacgcaaggatttgacaacatgcttytgttattgtttactccacttatggtggagtgcttgttggaaatgctggacaggaaaagaaacagcgttcccacaactctgggwgtatgcattacccttctggggtaccaaccaggcaaacaaaagcaggaaggaggaaagccagctttggaaagccttgatcctttgtttcsctcctttgccttcctgcctcactctggctcctgtgtcacgcagcacaaacacttaaayctctggcacwtcagatgagttgcaaaacatctcaaaatccacagacctgttccaggagatacttaaagca

SEQ ID NO: 76684 - DNA, 600 bp, Chicken  19866894364352_5
ctcactggctccatccctgcttcaaggacagggcacttgctgcttttatgtgtcactttgcccatctgttaaatggaactattaatactctcactggatgtttcacatgtctgtaaggctttgagatccgcagatgacgggcttacagaagtggaaaatactaatgatgatcatgacagcatccaaacaaagacgcaaggatttgacaacatgcttytgttattgtttactccacttatggtggagtgcttgttggaaatgctggacaggaaaagaaacagcgttcccacaactctgggwgtatgcattacccttctggggtaccaaccaggcaaacaaaagcaggaaggaggaaagccagctttggaaagccttgatcctttgtttcsctcctttgccttcctgcctcactctggctcctgtgtcacgcagcacaaacacttaaayctctggcacwtcagatgagttgcaaaacatctcaaaatccacagacctgttccaggagatacttaaagcaaattggaatgaggatgctctgaattagaagagccgtcactaagcaatccagtacctgacaggatgttggggaagcctccyatt

SEQ ID NO: 76685 - DNA, 600 bp, Chicken  19866894364352_6
ctcactggatgtttcacatgtctgtaaggctttgagatccgcagatgacgggcttacagaagtggaaaatactaatgatgatcatgacagcatccaaacaaagacgcaaggatttgacaacatgcttytgttattgtttactccacttatggtggagtgcttgttggaaatgctggacaggaaaagaaacagcgttcccacaactctgggwgtatgcattacccttctggggtaccaaccaggcaaacaaaagcaggaaggaggaaagccagctttggaaagccttgatcctttgtttcsctcctttgccttcctgcctcactctggctcctgtgtcacgcagcacaaacacttaaayctctggcacwtcagatgagttgcaaaacatctcaaaatccacagacctgttccaggagatacttaaagcaaattggaatgaggatgctctgaattagaagagccgtcactaagcaatccagtacctgacaggatgttggggaagcctccyattcyctcaaaagagctgatgttggagagaggaaccctttagcagctactcttctccacacctgcagtcccagtctcacctctgtgtttgtc

SEQ ID NO: 76686 - DNA, 600 bp, Chicken  19866894364352_7
gaagtggaaaatactaatgatgatcatgacagcatccaaacaaagacgcaaggatttgacaacatgcttytgttattgtttactccacttatggtggagtgcttgttggaaatgctggacaggaaaagaaacagcgttcccacaactctgggwgtatgcattacccttctggggtaccaaccaggcaaacaaaagcaggaaggaggaaagccagctttggaaagccttgatcctttgtttcsctcctttgccttcctgcctcactctggctcctgtgtcacgcagcacaaacacttaaayctctggcacwtcagatgagttgcaaaacatctcaaaatccacagacctgttccaggagatacttaaagcaaattggaatgaggatgctctgaattagaagagccgtcactaagcaatccagtacctgacaggatgttggggaagcctccyattcyctcaaaagagctgatgttggagagaggaaccctttagcagctactcttctccacacctgcagtcccagtctcacctctgtgtttgtcctcacagccctagctgaggattttggaagtggaatgcccagctcatctcctgctccat

SEQ ID NO: 76687 - DNA, 600 bp, Chicken  19866894364352_8
atactaatgatgatcatgacagcatccaaacaaagacgcaaggatttgacaacatgcttytgttattgtttactccacttatggtggagtgcttgttggaaatgctggacaggaaaagaaacagcgttcccacaactctgggwgtatgcattacccttctggggtaccaaccaggcaaacaaaagcaggaaggaggaaagccagctttggaaagccttgatcctttgtttcsctcctttgccttcctgcctcactctggctcctgtgtcacgcagcacaaacacttaaayctctggcacwtcagatgagttgcaaaacatctcaaaatccacagacctgttccaggagatacttaaagcaaattggaatgaggatgctctgaattagaagagccgtcactaagcaatccagtacctgacaggatgttggggaagcctccyattcyctcaaaagagctgatgttggagagaggaaccctttagcagctactcttctccacacctgcagtcccagtctcacctctgtgtttgtcctcacagccctagctgaggattttggaagtggaatgcccagctcatctcctgctccatattccatcca

SEQ ID NO: 76688 - DNA, 551 bp, Chicken  19866894364352_9
ggwgtatgcattacccttctggggtaccaaccaggcaaacaaaagcaggaaggaggaaagccagctttggaaagccttgatcctttgtttcsctcctttgccttcctgcctcactctggctcctgtgtcacgcagcacaaacacttaaayctctggcacwtcagatgagttgcaaaacatctcaaaatccacagacctgttccaggagatacttaaagcaaattggaatgaggatgctctgaattagaagagccgtcactaagcaatccagtacctgacaggatgttggggaagcctccyattcyctcaaaagagctgatgttggagagaggaaccctttagcagctactcttctccacacctgcagtcccagtctcacctctgtgtttgtcctcacagccctagctgaggattttggaagtggaatgcccagctcatctcctgctccatattccatccacccagctgtaggtgatgggcagagctgcaagaacccagttgggcagacaatagcttaggcagggagtatgggggcttaaggatgatgctga

SEQ ID NO: 76689 - DNA, 600 bp, Chicken  19866894364356_1
ggaacttggggaaggggaagagaatccgcaagcaggtcaattacaatgatgcctctcaggaggatcaaggtatggctttgactgcttggctcctgctagggttcacgtctggaagtcaggagaataaaaaaaagatttttattcttttctttttgccctgtaactgttctcctgggaagaactcaggaaaaacctgcctgtgggcaaaatatttaaagttgtgggtttttttctgtgtaggaaactaataataataatggaaaagttgagtctggtttcctgtttattgctgtgtctttstctctggctacatggtactggatgctgggggcagcctctgggctcctgctgtccccttcaggccagcttgcagggtactcctgaccttgtctccttgtgatctgcagagtggcaggacgagctctctgacaaccagtctgagtactccattggctctgaggatgaagatgaagactttgaagaaagaccagaaggtcagagtgagttaatgaacttggtactctacaatgtactctgcaggaacttcagtgatagcctatgatttggggtggcctggcacttgaatgcagcaggaaggtc

SEQ ID NO: 76690 - DNA, 460 bp, Chicken  19866894364358_1
caatatttgaaggtgaaaaatggaagcatagggtattcatgcattgcagacttttcagtgtaattttagctgcaatctgatctctctctattttttcttccttctgtagatctgtgggttaatgatgaaggaagttatgtctgtgaagctgaaaaccagtttggaaggattcagtcacagccagccacaatcacagtaactggactgggtaagtctggttaatgtcagtgataccagggaaagggaagactggcagcgtttccatacatgggatatgctggaataggtaacagtctgggkttttttttttttacaatgaataggatgttaatgtgttacgtacttacacctctgtgtttgtagcaacgtttacacaaatgtagtcagccacacaaactaaatcagaatatatttgcatcaaatattgtaaattaaattcactgaaactttcacattataa

SEQ ID NO: 76691 - DNA, 599 bp, Chicken  19866894364359_1
  misc_feature (1)..(111): n is any nucleotide
nnnnnnnnnnnnnnnnnnnnnnnnnnnnnnnnnnnnnnnnnnnnnnnnnnnnnnnnnnnnnnnnnnnnnnnnnnnnnnnnnnnnnnnnnnnnnnnnnnnnnnnnnnnnnnnaaggaattcacctcacgtacccacataaatcacagcatttgacacacaaacagcacgtgccatttccatatcccaaatgtcctaataaaatttcccagttgatgaaaaatatcgccaagacatttttagtctccactttttttgactttgttttcaataaaaaatatcagaaacatttatgcattcctwaaaaaaaaaaaataataagttgcaaaaatatttttagcttaataaatatgtgttttgagtcaagtrctccagttctcattttaaatacagatggtaaaaagattagtgcaactatcactcagtgaggcaactttcagcacattccttgctatcctccagcaaccccagtgctgaaggcctgcagtcagagttgtgcaggagcctctagatgtgcctgatagcaaaactactccatggaactggatagcaaattattcacttcctgtgccacatttagaacttctcagatggaagagcat

SEQ ID NO: 76692 - DNA, 599 bp, Chicken  19866894364359_2
  misc_feature (1)..(45): n is any nucleotide
nnnnnnnnnnnnnnnnnnnnnnnnnnnnnnnnnnnnnnnnnnnnnaaggaattcacctcacgtacccacataaatcacagcatttgacacacaaacagcacgtgccatttccatatcccaaatgtcctaataaaatttcccagttgatgaaaaatatcgccaagacatttttagtctccactttttttgactttgttttcaataaaaaatatcagaaacatttatgcattcctwaaaaaaaaaaaataataagttgcaaaaatatttttagcttaataaatatgtgttttgagtcaagtrctccagttctcattttaaatacagatggtaaaaagattagtgcaactatcactcagtgaggcaactttcagcacattccttgctatcctccagcaaccccagtgctgaaggcctgcagtcagagttgtgcaggagcctctagatgtgcctgatagcaaaactactccatggaactggatagcaaattattcacttcctgtgccacatttagaacttctcagatggaagagcatggaaatccaagagattcatttttccctttagagatgaaattgcattttaccaacaacgttctctct

SEQ ID NO: 76693 - DNA, 600 bp, Chicken  19866894364384_1
catgcacaaacctgtgcatagcaaggacacaccggtgcaactccactggtttgttcactcgtgcaaacacacgtgtgcaactccatccatgcactccacatgtgctcactcactcctgagcaaccccaccccttgtacacccagggtgcacacacacatgagcaaccccatccatgcatgcatccacacgcacacacacacttgtggaaccccaccactttgtgcagtcctgtgcacactcacgtgtgttttgtagtgatttccctatcagccctcatgtggtctcttagttaggatggragtgaaggggagctgcttgcattccctgctgtctgctgcagggttgtgctggcggcagtgcagttgctttgcttttcctttggagggtgggaaggagctttcagttagaagcacgtcctgtgtccaagcatcccaatggcacacacggggtcagcaagtctgtcaggagtgggtgaggttgcacaccgagctgcaggagaggaaggggaagaggtcccagtgaggctctgcacgatgctctgccacactgggcagcttgttcctggctcagcagtgggatcagacaaggagcaggggaga

SEQ ID NO: 76694 - DNA, 600 bp, Chicken  19866894364392_1
ctgcatccagccaaataattcctaaaacattgaatagtccatccttcaaatccatacctctccaatttagagagaaggatgtggtgagggaccatgtcaaaggttttggagaagtccagatagatgacatccataaatatcatacttacatgtatctgaaacaggagaataagaactggtagtctgatgacaatagaattatatgtaaagaaagattacttgcatatgaataaacaaaagattattttgatgttggttcataataagttcttgttgtaaaaaagatagtagacgctgggrtttgtcctgtagtaaaggtaattctattgcctgttcattgagctgtgtccaatccaacagaaagcaagcagtaggggacagatgggcactgtgggcactacgtcttgaggcattttagatgacactcttttttttttttttttcccccgtagcgtgattatggtggtcccttggtttgtgaacaaaacaggctaaaaatagtagtgggtgtcatcgttcctggccgtggatgtgccattcgaaatcgtcctgggatttttgttcgagtctcatattactcccgatggatacacaagatta

SEQ ID NO: 76695 - DNA, 600 bp, Chicken  19866894364415_1
tgcaaaattaagtatgaagcaggcagttacataatctctgtattttacaaatggaggtgatcatatagttcagggaggttggctgcacaagaccacattgaaccattaataaaagcaaaaataatgagctggggcccgagattcctaaggttgtgcttacctctcagtacgattggtttcagtcacttcagcctacgtgtggctgcaagaggagagaggttataaagtacacactggttaaattattccattaccctgctacctctgcttgatttttcactgtacctctgatctatgctyatgtgttagtacattactggcattttaaatagagttgtatcagcttgaatttcttctaaatcagattatgaaactggaatggagagttaatatgattaggtgatgatatttagcatcgacgtgttgttagaaaatatttgaattctaacttctaaatctgttcagttgatatggagaccttggtctttttctataggcacacgtttatcacagttgtagggcaggtactcaagaatatcgaatcagctcagaataaacttggcaccatgctgggtcatgcttttgacttagctctagcca

SEQ ID NO: 76696 - DNA, 599 bp, Chicken  19866894364416_1
  misc_feature (1)..(198): n is any nucleotide
nnnnnnnnnnnnnnnnnnnnnnnnnnnnnnnnnnnnnnnnnnnnnnnnnnnnnnnnnnnnnnnnnnnnnnnnnnnnnnnnnnnnnnnnnnnnnnnnnnnnnnnnnnnnnnnnnnnnnnnnnnnnnnnnnnnnnnnnnnnnnnnnnnnnnnnnnnnnnnnnnnnnnnnnnnnnnnnnnnnnnnnnnnnnnnnnnnnnnnttacattgaaagacattgcatatttggaagacgctggatctacttttaaactctgtgacaatcagagtagcctttttctttgaactctcttcagaagaactrttttttcctttctctgttattattttttattcttatttttatttttttctttttcactgcagcaacatatacacagtattttgatttgcttatttggcaggacacagaaatatgggataaattgagatcaccctaccaagcagcgcttttggtctcatgcaattttcaagacttctggtcatgaaagcgtaagtgttcgactgaaattcaatattgaaacaatttcttatagttcttcagaaaaattatggcaaaattacctccaccattcctgctccccatggatgacgaaacagttt

SEQ ID NO: 76697 - DNA, 599 bp, Chicken  19866894364419_1
  misc_feature (1)..(110): n is any nucleotide
nnnnnnnnnnnnnnnnnnnnnnnnnnnnnnnnnnnnnnnnnnnnnnnnnnnnnnnnnnnnnnnnnnnnnnnnnnnnnnnnnnnnnnnnnnnnnnnnnnnnnnnnnnnnnntatggtgggaattaataggggaactgccttaatttgctccttgtttttttgccatgaaatccattaaatctttctgttatgtatatggatttgtcaaatagtattcataagaaaggagggcggggaaggggaggtgggggacccaaaccaaacagatccttgctccatttggacagatggtgagggctgraccttcatgaatttgttattgacctaattggaatcacattcatgtattgttctcaaactgtgcaagggatggggctggcagaggcaagggagaagcaaygcactgcagaaatgcagggctgtagaaatcctccagaaggataaggggaattcctgtacctcccagcccactgctgctgcacagcctgctgctgacccagggtcgggcacaggcaacacctcacagtgcatcacttctccttctgctccccgtggaaattactgcagtgawcagattgcttcagtgcagctgaagcttgg

SEQ ID NO: 76698 - DNA, 599 bp, Chicken  19866894364419_2
  misc_feature (1)..(11): n is any nucleotide
nnnnnnnnnnntatggtgggaattaataggggaactgccttaatttgctccttgtttttttgccatgaaatccattaaatctttctgttatgtatatggatttgtcaaatagtattcataagaaaggagggcggggaaggggaggtgggggacccaaaccaaacagatccttgctccatttggacagatggtgagggctgraccttcatgaatttgttattgacctaattggaatcacattcatgtattgttctcaaactgtgcaagggatggggctggcagaggcaagggagaagcaaygcactgcagaaatgcagggctgtagaaatcctccagaaggataaggggaattcctgtacctcccagcccactgctgctgcacagcctgctgctgacccagggtcgggcacaggcaacacctcacagtgcatcacttctccttctgctccccgtggaaattactgcagtgawcagattgcttcagtgcagctgaagcttgggaaacgtgcactgcttctgagtagcttacagttcagcaaattagaggcaggtcttgtagtcacagtaacaattaaataaatcggcagcaagtttgtgca

SEQ ID NO: 76699 - DNA, 600 bp, Chicken  19866894364419_3
tgctccatttggacagatggtgagggctgraccttcatgaatttgttattgacctaattggaatcacattcatgtattgttctcaaactgtgcaagggatggggctggcagaggcaagggagaagcaaygcactgcagaaatgcagggctgtagaaatcctccagaaggataaggggaattcctgtacctcccagcccactgctgctgcacagcctgctgctgacccagggtcgggcacaggcaacacctcacagtgcatcacttctccttctgctccccgtggaaattactgcagtgawcagattgcttcagtgcagctgaagcttgggaaacgtgcactgcttctgagtagcttacagttcagcaaattagaggcaggtcttgtagtcacagtaacaattaaataaatcggcagcaagtttgtgcagtaataagggctatcctgtttcactagttgataatgctggtgagataaagtgcagcactgatttctagggcaggctgtggaggtgatacttggggatgttctcttgattgcccatttgtatacggtatggaaatgggcttaaatccaacatactggcaagaaaagaaaaaag

SEQ ID NO: 76700 - DNA, 600 bp, Chicken  19866894364421_1
acaagatgacctgatcatctaaaactgaatccctgtaaatttctttaaacagtattggaagttagatgtgtcctaatgtgttctcttggttgaaaacgtaacagcacaaataagtatgagaagcaacatgaaactgtactgtcacatctgtaagggacaaaatctgaactgacaataaaagagaactgacattcacagaagatagatcatctggtacttggaagcagtaaacaatattccttaaaaggaaaaagcaccaaattggtagcaaccaaactgaggaatgaaggagacagtctrctaaaaccatactgccaaagccatacaaataaaagcagtcatgtgcagctggagcactccctgactattgcatcctggctctcagatagaaatggctgccaaacgtttgctgaatggcactgtagccttgcttacagcctccatttattttgtgctcctagggctccaggtttatagatcctcaactgtataaytgaacactttgtgcccatgcactttagtttatgttaagatgytcccaagtacttagttcccagttttctgctgctttagactaatattctcgctccctattgcagt

SEQ ID NO: 76701 - DNA, 600 bp, Chicken  19866894364421_2
acagaagatagatcatctggtacttggaagcagtaaacaatattccttaaaaggaaaaagcaccaaattggtagcaaccaaactgaggaatgaaggagacagtctrctaaaaccatactgccaaagccatacaaataaaagcagtcatgtgcagctggagcactccctgactattgcatcctggctctcagatagaaatggctgccaaacgtttgctgaatggcactgtagccttgcttacagcctccatttattttgtgctcctagggctccaggtttatagatcctcaactgtataaytgaacactttgtgcccatgcactttagtttatgttaagatgytcccaagtacttagttcccagttttctgctgctttagactaatattctcgctccctattgcagtcactagtcagtcttgttgctctgcctggcctcagggagatatttgaggttaattcctggaaaaagagagatggagtaaagacatctgcaccacttccccctgtactcatgtttggcttctcccatccttaaaagttcaacctgcaagaaatgagaatattcccttacacacagaaatgtaaccatatcctctca

SEQ ID NO: 76702 - DNA, 585 bp, Chicken  19866894364421_3
ttccttaaaaggaaaaagcaccaaattggtagcaaccaaactgaggaatgaaggagacagtctrctaaaaccatactgccaaagccatacaaataaaagcagtcatgtgcagctggagcactccctgactattgcatcctggctctcagatagaaatggctgccaaacgtttgctgaatggcactgtagccttgcttacagcctccatttattttgtgctcctagggctccaggtttatagatcctcaactgtataaytgaacactttgtgcccatgcactttagtttatgttaagatgytcccaagtacttagttcccagttttctgctgctttagactaatattctcgctccctattgcagtcactagtcagtcttgttgctctgcctggcctcagggagatatttgaggttaattcctggaaaaagagagatggagtaaagacatctgcaccacttccccctgtactcatgtttggcttctcccatccttaaaagttcaacctgcaagaaatgagaatattcccttacacacagaaatgtaaccatatcctctcattatagatagagatcatttaaagacag

SEQ ID NO: 76703 - DNA, 600 bp, Chicken  19866894364422_1
tgttatccaaatgtttgtttccataaccaggagaggaatgtgaaaaacaacccagggttcctgttttatttattttttccctttctcctcctcagtcaccctcatgtgaaaatcaatctgggttttatgatttcaaaggacaatatctggtacaaaagaaaagacgccttccccatttgagttgtaatttaatattatgataatgttttcttttaatgaaagagatgagagtgtttatttgaaagctggctgctggccacctcttttaaagctatatgaggctgtggtttcttcaagtcrtaacaaacatcttcyatgaaattcaagcagtgaagacaacgtgcccaacaggcaggcctttgaacgtacaagagaaaaagcttattcctctgaagaaaattagcaaaggtagaagaacaacatatataagtatgaaatgtaatcagtgactgaaatctagaaagtttctgtccctacatatgaggtaagaatttatatygcaaattcatattttagaaattgtaaacagcttttctacttcatgttctccttacttcttgctcttttccacctcaaagaatttatctgctcttcccaaaa

SEQ ID NO: 76704 - DNA, 600 bp, Chicken  19866894364422_2
tgtttccataaccaggagaggaatgtgaaaaacaacccagggttcctgttttatttattttttccctttctcctcctcagtcaccctcatgtgaaaatcaatctgggttttatgatttcaaaggacaatatctggtacaaaagaaaagacgccttccccatttgagttgtaatttaatattatgataatgttttcttttaatgaaagagatgagagtgtttatttgaaagctggctgctggccacctcttttaaagctatatgaggctgtggtttcttcaagtcrtaacaaacatcttcyatgaaattcaagcagtgaagacaacgtgcccaacaggcaggcctttgaacgtacaagagaaaaagcttattcctctgaagaaaattagcaaaggtagaagaacaacatatataagtatgaaatgtaatcagtgactgaaatctagaaagtttctgtccctacatatgaggtaagaatttatatygcaaattcatattttagaaattgtaaacagcttttctacttcatgttctccttacttcttgctcttttccacctcaaagaatttatctgctcttcccaaaagtatagagactacaa

SEQ ID NO: 76705 - DNA, 600 bp, Chicken  19866894364422_3
ataatgttttcttttaatgaaagagatgagagtgtttatttgaaagctggctgctggccacctcttttaaagctatatgaggctgtggtttcttcaagtcrtaacaaacatcttcyatgaaattcaagcagtgaagacaacgtgcccaacaggcaggcctttgaacgtacaagagaaaaagcttattcctctgaagaaaattagcaaaggtagaagaacaacatatataagtatgaaatgtaatcagtgactgaaatctagaaagtttctgtccctacatatgaggtaagaatttatatygcaaattcatattttagaaattgtaaacagcttttctacttcatgttctccttacttcttgctcttttccacctcaaagaatttatctgctcttcccaaaagtatagagactacaagactttcttacatgaaataatattttctccctaaaaagcatctttagcagaggcttgcccagacagtaactgcaggaaacaaagcaggaatatgaatagcacagtccataggtgctgcgcagcagggaaaagggaagatgagttttgatggtgacacaacctgtgaacaatggcatatatgctc

SEQ ID NO: 76706 - DNA, 600 bp, Chicken  19866894364425_1
gcactccttctgccactgcgttggctgaacacaatgtcccatagcagacagctattctactcgatataaaatggctctgtaaaaaggtcatttataaaagttacatactattttcacattagaatctttactgtttcaaagagatgaaccgtaagtaaatgaaaatcaaatcccgtatgcaaaagctttcatctggaatgtaattttgactaacaagcagttaagaaaatcagagactgtcattaaaacactgaaaaagctacgtgtggccaacttttataacaaaaaaagatataaatyactcagtaccatgaaaagctttaacctcctggactcctaggaatagagcagatgactgcaattgctaagaaaaggaggttagcttttgttttacagatgtcatctgcagcactaggcactaggaaaaacgttacttggattctttaacaaagtttttaccaaatttgtagtaagtggcagtgtaaaattctcaagtcattttaaagctaacaaattaaaggcacacagtattcacaggtgttcgtataagaggaaaggagcaaagaggtaaacttcttaacagtgtagtaagttacatac

SEQ ID NO: 76707 - DNA, 600 bp, Chicken  19866894364438_1
attatttgccataacttgatcttgccataattagtttcattctgaatgcttttatggcttgaaacgtggcacagataagctgattttcaccttgaagacacgtttaactcgtttaaatgagtggtcaaagccaccagtaacacatgttctatcaccaattttccttttgattccataaatgacttgattacattctgataaaatctttttagcattttaccttgacttaaccactttctctcagaaaagtaaatgatgcctccctaatcagcatccacgctttcaaggaactcctggaaytggccacgattcgatcccctgrgmtttattaaatacacagctttgatgatgacttacatwacatyagcaaatagtaaagctttcgcgcatagattttcttgatgtacaamgaagtggtacttcatcaaaygtgagctgctggtggcaattgcgttgtcttctattagttatatagatccttcttttttaccaactgtggccagggcgtcatcagtagctgtaccagatacgctgacaaaagttaaataaaatctcttcactctaatttttactgcttcatacaaataaagagatttagtt

SEQ ID NO: 76708 - DNA, 600 bp, Chicken  19866894364438_2
tgccataattagtttcattctgaatgcttttatggcttgaaacgtggcacagataagctgattttcaccttgaagacacgtttaactcgtttaaatgagtggtcaaagccaccagtaacacatgttctatcaccaattttccttttgattccataaatgacttgattacattctgataaaatctttttagcattttaccttgacttaaccactttctctcagaaaagtaaatgatgcctccctaatcagcatccacgctttcaaggaactcctggaaytggccacgattcgatcccctgrgmtttattaaatacacagctttgatgatgacttacatwacatyagcaaatagtaaagctttcgcgcatagattttcttgatgtacaamgaagtggtacttcatcaaaygtgagctgctggtggcaattgcgttgtcttctattagttatatagatccttcttttttaccaactgtggccagggcgtcatcagtagctgtaccagatacgctgacaaaagttaaataaaatctcttcactctaatttttactgcttcatacaaataaagagatttagttgtgtcttttaatggcaccaaag

SEQ ID NO: 76709 - DNA, 600 bp, Chicken  19866894364438_3
ccataattagtttcattctgaatgcttttatggcttgaaacgtggcacagataagctgattttcaccttgaagacacgtttaactcgtttaaatgagtggtcaaagccaccagtaacacatgttctatcaccaattttccttttgattccataaatgacttgattacattctgataaaatctttttagcattttaccttgacttaaccactttctctcagaaaagtaaatgatgcctccctaatcagcatccacgctttcaaggaactcctggaaytggccacgattcgatcccctgrgmtttattaaatacacagctttgatgatgacttacatwacatyagcaaatagtaaagctttcgcgcatagattttcttgatgtacaamgaagtggtacttcatcaaaygtgagctgctggtggcaattgcgttgtcttctattagttatatagatccttcttttttaccaactgtggccagggcgtcatcagtagctgtaccagatacgctgacaaaagttaaataaaatctcttcactctaatttttactgcttcatacaaataaagagatttagttgtgtcttttaatggcaccaaagaa

SEQ ID NO: 76710 - DNA, 600 bp, Chicken  19866894364438_4
gaaacgtggcacagataagctgattttcaccttgaagacacgtttaactcgtttaaatgagtggtcaaagccaccagtaacacatgttctatcaccaattttccttttgattccataaatgacttgattacattctgataaaatctttttagcattttaccttgacttaaccactttctctcagaaaagtaaatgatgcctccctaatcagcatccacgctttcaaggaactcctggaaytggccacgattcgatcccctgrgmtttattaaatacacagctttgatgatgacttacatwacatyagcaaatagtaaagctttcgcgcatagattttcttgatgtacaamgaagtggtacttcatcaaaygtgagctgctggtggcaattgcgttgtcttctattagttatatagatccttcttttttaccaactgtggccagggcgtcatcagtagctgtaccagatacgctgacaaaagttaaataaaatctcttcactctaatttttactgcttcatacaaataaagagatttagttgtgtcttttaatggcaccaaagaagctacttcttcagtgacatcacatttgctgtcagta

SEQ ID NO: 76711 - DNA, 600 bp, Chicken  19866894364438_5
gtggcacagataagctgattttcaccttgaagacacgtttaactcgtttaaatgagtggtcaaagccaccagtaacacatgttctatcaccaattttccttttgattccataaatgacttgattacattctgataaaatctttttagcattttaccttgacttaaccactttctctcagaaaagtaaatgatgcctccctaatcagcatccacgctttcaaggaactcctggaaytggccacgattcgatcccctgrgmtttattaaatacacagctttgatgatgacttacatwacatyagcaaatagtaaagctttcgcgcatagattttcttgatgtacaamgaagtggtacttcatcaaaygtgagctgctggtggcaattgcgttgtcttctattagttatatagatccttcttttttaccaactgtggccagggcgtcatcagtagctgtaccagatacgctgacaaaagttaaataaaatctcttcactctaatttttactgcttcatacaaataaagagatttagttgtgtcttttaatggcaccaaagaagctacttcttcagtgacatcacatttgctgtcagtacctct

SEQ ID NO: 76712 - DNA, 600 bp, Chicken  19866894364438_6
gtttaaatgagtggtcaaagccaccagtaacacatgttctatcaccaattttccttttgattccataaatgacttgattacattctgataaaatctttttagcattttaccttgacttaaccactttctctcagaaaagtaaatgatgcctccctaatcagcatccacgctttcaaggaactcctggaaytggccacgattcgatcccctgrgmtttattaaatacacagctttgatgatgacttacatwacatyagcaaatagtaaagctttcgcgcatagattttcttgatgtacaamgaagtggtacttcatcaaaygtgagctgctggtggcaattgcgttgtcttctattagttatatagatccttcttttttaccaactgtggccagggcgtcatcagtagctgtaccagatacgctgacaaaagttaaataaaatctcttcactctaatttttactgcttcatacaaataaagagatttagttgtgtcttttaatggcaccaaagaagctacttcttcagtgacatcacatttgctgtcagtacctctaataaaaatggcacgttgagcaacatctgcagcatcagtactttc

SEQ ID NO: 76713 - DNA, 600 bp, Chicken  19866894364438_7
ccaccagtaacacatgttctatcaccaattttccttttgattccataaatgacttgattacattctgataaaatctttttagcattttaccttgacttaaccactttctctcagaaaagtaaatgatgcctccctaatcagcatccacgctttcaaggaactcctggaaytggccacgattcgatcccctgrgmtttattaaatacacagctttgatgatgacttacatwacatyagcaaatagtaaagctttcgcgcatagattttcttgatgtacaamgaagtggtacttcatcaaaygtgagctgctggtggcaattgcgttgtcttctattagttatatagatccttcttttttaccaactgtggccagggcgtcatcagtagctgtaccagatacgctgacaaaagttaaataaaatctcttcactctaatttttactgcttcatacaaataaagagatttagttgtgtcttttaatggcaccaaagaagctacttcttcagtgacatcacatttgctgtcagtacctctaataaaaatggcacgttgagcaacatctgcagcatcagtactttcatctactgctgaagcataaa

SEQ ID NO: 76714 - DNA, 599 bp, Chicken  19866894364442_1
  misc_feature (1)..(5): n is any nucleotide
nnnnnagaagttctctgtctttgcagttccgttcctctcctcaaattaaggcacacatacagtcagacctaaatgtttgttgagatggttcttagattttaatatgtcgagtatatagcgttgcttatggaaaactgaaaagctatcaaggtatatgcacagcgttaataacaggaaaagcattgttctgtcctcatacaccacagtttttataagttggggcttggtttccagcatctccgctgtatttggaaatacaacaatttctggcctctaatgaaggccctcgtatacccatgygtggtttcttttgtttgttttattctccagctgctctcatcatgacaccggcaacattctcaaggttcycttactcccacatgaaagatttgggcatgaagatgtgcccaatccttctaccttaaaccccactgtttccctctacattgcaaaagcagcccagtcagcttctggtttcaccatgcctcaaaactcagttcactacagcaatctctgctggatcctcccagggttttcatcaaattcacattaaataacaatataagaggaataaataacagtaataagaggaaagctgt

SEQ ID NO: 76715 - DNA, 600 bp, Chicken  19866894364442_2
taaatgtttgttgagatggttcttagattttaatatgtcgagtatatagcgttgcttatggaaaactgaaaagctatcaaggtatatgcacagcgttaataacaggaaaagcattgttctgtcctcatacaccacagtttttataagttggggcttggtttccagcatctccgctgtatttggaaatacaacaatttctggcctctaatgaaggccctcgtatacccatgygtggtttcttttgtttgttttattctccagctgctctcatcatgacaccggcaacattctcaaggttcycttactcccacatgaaagatttgggcatgaagatgtgcccaatccttctaccttaaaccccactgtttccctctacattgcaaaagcagcccagtcagcttctggtttcaccatgcctcaaaactcagttcactacagcaatctctgctggatcctcccagggttttcatcaaattcacattaaataacaatataagaggaataaataacagtaataagaggaaagctgtgtatggagctaaaagccaacttgtttttcctactgatacttcagtgctgctttacatacctgtttgatta

SEQ ID NO: 76716 - DNA, 600 bp, Chicken  19866894364444_1
tatcccccaaacgaacaagaagaggtggtggcgcaggccctgaccattgatctggtgcgacagggacagatttagggcccttggagaggtttttggggccacctgcctcacctcctgctgccaccccaaccaggtggcggggggaggaggagagcggattgaattcgggttgtgcaggttcaaacagcagcacataacagcaggtcacagaaaatcagctctggtgtcactcaatcccagggcagccgctgcagtgtgtgctgctgagcagggcgggctgctccccctccaccgagcatkgcactgcacagctgggtgctggcatgggcagcccygggctgtgcagagataattcactgaaaggaacgctcattaggagcaggaagcctggcagttagatttcttaccctaaatacgaggtttgcagcagtataaataatgcacgtcaactgccagcgtcctgaaaattagttaaagtgggttaaggaagaaacaaatctcactccagtgctctccattcaaaaagagttagctgctcacaacaggccggtgcaggaagagggaacagcaattaaaaacctcacatgagaccttsttagc

SEQ ID NO: 76717 - DNA, 600 bp, Chicken  19866894364444_2
ggccctgaccattgatctggtgcgacagggacagatttagggcccttggagaggtttttggggccacctgcctcacctcctgctgccaccccaaccaggtggcggggggaggaggagagcggattgaattcgggttgtgcaggttcaaacagcagcacataacagcaggtcacagaaaatcagctctggtgtcactcaatcccagggcagccgctgcagtgtgtgctgctgagcagggcgggctgctccccctccaccgagcatkgcactgcacagctgggtgctggcatgggcagcccygggctgtgcagagataattcactgaaaggaacgctcattaggagcaggaagcctggcagttagatttcttaccctaaatacgaggtttgcagcagtataaataatgcacgtcaactgccagcgtcctgaaaattagttaaagtgggttaaggaagaaacaaatctcactccagtgctctccattcaaaaagagttagctgctcacaacaggccggtgcaggaagagggaacagcaattaaaaacctcacatgagaccttsttagcaagagacagagccttttcccagcttctgggctcaa

SEQ ID NO: 76718 - DNA, 600 bp, Chicken  19866894364444_3
gcatkgcactgcacagctgggtgctggcatgggcagcccygggctgtgcagagataattcactgaaaggaacgctcattaggagcaggaagcctggcagttagatttcttaccctaaatacgaggtttgcagcagtataaataatgcacgtcaactgccagcgtcctgaaaattagttaaagtgggttaaggaagaaacaaatctcactccagtgctctccattcaaaaagagttagctgctcacaacaggccggtgcaggaagagggaacagcaattaaaaacctcacatgagaccttsttagcaagagacagagccttttcccagcttctgggctcaaccctttggtgtctccccacagcagcatgrcactgccctgtctgtcacatggatggcacaccccactccttggctcagagtacgtcacccaaacacgtgcctggccccttcttcaagaggacagctggtacttcactgcagaaggtggcagagcgactgwttgcacaccaagggctgtaggaagcacacactgccccatgtgctgcaggctgtcaccttgggcactgaggtcatcctcccagagggctcctgatggctgtg

SEQ ID NO: 76719 - DNA, 600 bp, Chicken  19866894364444_4
aacgctcattaggagcaggaagcctggcagttagatttcttaccctaaatacgaggtttgcagcagtataaataatgcacgtcaactgccagcgtcctgaaaattagttaaagtgggttaaggaagaaacaaatctcactccagtgctctccattcaaaaagagttagctgctcacaacaggccggtgcaggaagagggaacagcaattaaaaacctcacatgagaccttsttagcaagagacagagccttttcccagcttctgggctcaaccctttggtgtctccccacagcagcatgrcactgccctgtctgtcacatggatggcacaccccactccttggctcagagtacgtcacccaaacacgtgcctggccccttcttcaagaggacagctggtacttcactgcagaaggtggcagagcgactgwttgcacaccaagggctgtaggaagcacacactgccccatgtgctgcaggctgtcaccttgggcactgaggtcatcctcccagagggctcctgatggctgtgctgtgacagcctcccagatctaatcctcgagggacttgcagtgagcagagctgactgtgcctttcttga

SEQ ID NO: 76720 - DNA, 600 bp, Chicken  19866894364444_5
aaatctcactccagtgctctccattcaaaaagagttagctgctcacaacaggccggtgcaggaagagggaacagcaattaaaaacctcacatgagaccttsttagcaagagacagagccttttcccagcttctgggctcaaccctttggtgtctccccacagcagcatgrcactgccctgtctgtcacatggatggcacaccccactccttggctcagagtacgtcacccaaacacgtgcctggccccttcttcaagaggacagctggtacttcactgcagaaggtggcagagcgactgwttgcacaccaagggctgtaggaagcacacactgccccatgtgctgcaggctgtcaccttgggcactgaggtcatcctcccagagggctcctgatggctgtgctgtgacagcctcccagatctaatcctcgagggacttgcagtgagcagagctgactgtgcctttcttgaagtcaaagagcagaggcctcatcccatccccttcctctccaagaacaacttcccttcctccagccactggtgcaggggtgacaggtggctctgagcagtgccagcacaaggtctacccattacttacatc

SEQ ID NO: 76721 - DNA, 600 bp, Chicken  19866894364447_1
gtatttacccaacagataataccagtaatatacagatgtcaaaggacaaaagcttcaaaatatttggctgtaatttctaaattctaattcctaaaaaaatcactaaattcttcctattctgtctcactttacaacacatcatcacttatcatttttaatttttttgcttttaaatacctacctttcacaggaagagagtttctaagtattgttgaagcaaggtaaaacagacttaaagacaagaataatagtttgtatccttcttggatctcagtacagattgagtcagctaacttcagyaatgtgtgatttctcttctgtcatgtatgaatgagttcagtaatttctacatctgtgaaaagactcagtgttcagaaaatatagccagcttccttaattcctttgagaaaagctttccaaaacagctcagccaaaagccttccaaaagactcaacacagcaggtcagaaaaaagttatgcatttttctgtgttactattacagagtctacagctgctgccgcttctcccatattataacaatacctgtatgcaaactggtagacaaaggaggaaagctccaaaagtatcaccttctattt

SEQ ID NO: 76722 - DNA, 599 bp, Chicken  19866894364453_1
  misc_feature (1)..(88): n is any nucleotide
nnnnnnnnnnnnnnnnnnnnnnnnnnnnnnnnnnnnnnnnnnnnnnnnnnnnnnnnnnnnnnnnnnnnnnnnnnnnnnnnnnnnnnnncactacacacttgtgggcccccccctttttttcttttttaaaatatgttctttaaccatcagcgtattctttgcattactaaatatgccacggaagaaagccaacgtcccaacacaaaaagcagtttccccatttgttacagtaccccttcattgccctgaaacaaacaaaaagagacccagtttagacaggcatttaataatgaaactgtmagtaggttgggtacacagaattccacgaaatcttcaggaaatgcacattacttcttgcatttcttactgaaaacctagctcaagtgtcctcacaggacactgataargaatagtcaggaattcatgtaaccaaggtatgcaacatttcaggaccactaagttaccccacattttggtacatgtttgtgttcagtaagagatacatctgccaatacataaattcttaaacaactgtagattacgcaagaaaatttgaatcctaattcctgcagtttgcaaggacaattatcttgatgctt

SEQ ID NO: 76723 - DNA, 600 bp, Chicken  19866894364453_2
cccccctttttttcttttttaaaatatgttctttaaccatcagcgtattctttgcattactaaatatgccacggaagaaagccaacgtcccaacacaaaaagcagtttccccatttgttacagtaccccttcattgccctgaaacaaacaaaaagagacccagtttagacaggcatttaataatgaaactgtmagtaggttgggtacacagaattccacgaaatcttcaggaaatgcacattacttcttgcatttcttactgaaaacctagctcaagtgtcctcacaggacactgataargaatagtcaggaattcatgtaaccaaggtatgcaacatttcaggaccactaagttaccccacattttggtacatgtttgtgttcagtaagagatacatctgccaatacataaattcttaaacaactgtagattacgcaagaaaatttgaatcctaattcctgcagtttgcaaggacaattatcttgatgctttttcttccctgtaatgtcctcttataatgtctgtgttgggttgcagatgtttctaaaaggtacagctaaatgatactaggatacatcattactttgtacctgatcaga

SEQ ID NO: 76724 - DNA, 600 bp, Chicken  19866894364453_3
tgtgttcagtaagagatacatctgccaatacataaattcttaaacaactgtagattacgcaagaaaatttgaatcctaattcctgcagtttgcaaggacaattatcttgatgctttttcttccctgtaatgtcctcttataatgtctgtgttgggttgcagatgtttctaaaaggtacagctaaatgatactaggatacatcattactttgtacctgatcagagatcggtggtatgaacgtaaattcagtgaattaaatgaatgttgctacaatacaataaatgtttttttccccctaaytggctaatcatctccattgttccagcactctgaaccaaaaattacactgacaattcggaatatatttaccatttaggaaaggtaatttggctgtgactttctgtatgtgaaacacatcattgcctcatttgtggctagaaccgtttgagataacaggtcaatacactacagattttaagactagtagaattcacatgctttctaataaaggagttattatgatgaggcagcgtaagacagacagaagctaaaatacacagaagagaaataaataggtgcagatgacagtgctacatgagg

SEQ ID NO: 76725 - DNA, 600 bp, Chicken  19866894364454_1
acatcacagtgacttcaggtttcgtgcccaaactctatttaaggtgctacttaacccttcccatccctcgtaatccatttcttcttagcctgtcccctgataaatacagtatatattcaccagactttggggaaattaatagtgtatacatatagggcatcttgaaggatatgcagagtgctttactttctaaagctattaaaggcagctgggtacagatgtctatcacaatgttaagtggttaaataagtgaagggagggagtaaaaaacttacagattattgtggtttgaaggcaacwgtggttttgctgctgttggtacagttagggatgggtctgaaaagaggtcrtgagaatagctcagatgagttcaggtgcagtttgcatgcagtctatttataggatgcttctcaaactaagcctgtgaaccttttgaagtttgcccatcactattttcaggccaattaatgacgtacatcccttcccattctgagataggtaaaacaataaagcaaactaagataattagtctctggggcacgccaagaactagagtaaatctgtgcaaatcacttgtttctgctaacttttgtgtttttg

SEQ ID NO: 76726 - DNA, 600 bp, Chicken  19866894364454_2
ttaacccttcccatccctcgtaatccatttcttcttagcctgtcccctgataaatacagtatatattcaccagactttggggaaattaatagtgtatacatatagggcatcttgaaggatatgcagagtgctttactttctaaagctattaaaggcagctgggtacagatgtctatcacaatgttaagtggttaaataagtgaagggagggagtaaaaaacttacagattattgtggtttgaaggcaacwgtggttttgctgctgttggtacagttagggatgggtctgaaaagaggtcrtgagaatagctcagatgagttcaggtgcagtttgcatgcagtctatttataggatgcttctcaaactaagcctgtgaaccttttgaagtttgcccatcactattttcaggccaattaatgacgtacatcccttcccattctgagataggtaaaacaataaagcaaactaagataattagtctctggggcacgccaagaactagagtaaatctgtgcaaatcacttgtttctgctaacttttgtgtttttgctgcaaaactgaaaaagaccactgctattacaaatctacataatgctgga

SEQ ID NO: 76727 - DNA, 600 bp, Chicken  19866894364456_1
tccccatccaatcccccttcctcttaagaatcaagcccccagatgataagctgggccatgatatgagacaaaaacaaagaacagagttgtctcgtgatctttgcctgccctcctggagccccagtgctgtgccagaccccagggagcaggactggggcacccgctcccaccctggatgccaagcaaggccaagcagcagctcccactcccctcaccattccacgtcccacataatctccttatttcatgtccatgtcctagcacacaaatcggattctgctctgtgctctgatatgccayctcttgtcccacatttacrtgctgctgtaagaaaactaaatttgcaatggttaaatgacccagtgacccagataccagctgcaaaggggagtgcacactccgctgagctgactgacacttctgtactggcacggccacacagcccgggctgtgctgggggattcctcctctcctgctggcagtcatggcatcacagaatcgtttgagtgagaagggacccttaaaggccgcctggcccaaccccattgcaatgaacagggacacctacagctccatcagtgctcagagccccatccagcc

SEQ ID NO: 76728 - DNA, 600 bp, Chicken  19866894364456_2
cctcttaagaatcaagcccccagatgataagctgggccatgatatgagacaaaaacaaagaacagagttgtctcgtgatctttgcctgccctcctggagccccagtgctgtgccagaccccagggagcaggactggggcacccgctcccaccctggatgccaagcaaggccaagcagcagctcccactcccctcaccattccacgtcccacataatctccttatttcatgtccatgtcctagcacacaaatcggattctgctctgtgctctgatatgccayctcttgtcccacatttacrtgctgctgtaagaaaactaaatttgcaatggttaaatgacccagtgacccagataccagctgcaaaggggagtgcacactccgctgagctgactgacacttctgtactggcacggccacacagcccgggctgtgctgggggattcctcctctcctgctggcagtcatggcatcacagaatcgtttgagtgagaagggacccttaaaggccgcctggcccaaccccattgcaatgaacagggacacctacagctccatcagtgctcagagccccatccagcctgaccttgggtgtctccag

SEQ ID NO: 76729 - DNA, 600 bp, Chicken  19866894364456_3
actgcacagagctaatgtcacattgggggaggcaaaagcaggctctgttctcccttctctgcttagctccaaatggcactcatgtcacgaggagttacctatgctgcctggaaaaaaacaaccttgatgcactgaacaaaacactctaataacgcaggctgcttgctaatagcgcgtgcactcattgttctgcagcacacgcttgtttctattgtgtcagctgcatgctaatgcaggcagccacgccaggcagacacgtgtgcacatccactgacaggtcaggaacacctcccgtctccrtttctccagcttttcacaaattctgcaatttctctctctcccarctaagctccatttgaaatgcagtgccatgacaagtttgattctgcttgcttttctcatgtcaatctcagagtttccytccctccctcagcaaaggctgaagcatgagagcaacctgggcttttgcaygtggctgtgctctgaagcagaccctaagcaaagatgcccaaatatctcaaaccatatgtcattttcatagtgacacaagccagaccttccttggggcttggctatacaaagccagaccttgcaggctgc

SEQ ID NO: 76730 - DNA, 600 bp, Chicken  19866894364456_4
ctgttctcccttctctgcttagctccaaatggcactcatgtcacgaggagttacctatgctgcctggaaaaaaacaaccttgatgcactgaacaaaacactctaataacgcaggctgcttgctaatagcgcgtgcactcattgttctgcagcacacgcttgtttctattgtgtcagctgcatgctaatgcaggcagccacgccaggcagacacgtgtgcacatccactgacaggtcaggaacacctcccgtctccrtttctccagcttttcacaaattctgcaatttctctctctcccarctaagctccatttgaaatgcagtgccatgacaagtttgattctgcttgcttttctcatgtcaatctcagagtttccytccctccctcagcaaaggctgaagcatgagagcaacctgggcttttgcaygtggctgtgctctgaagcagaccctaagcaaagatgcccaaatatctcaaaccatatgtcattttcatagtgacacaagccagaccttccttggggcttggctatacaaagccagaccttgcaggctgcacttatggagggaaatattactgactcaattacactcactgaac

SEQ ID NO: 76731 - DNA, 600 bp, Chicken  19866894364456_5
ccttgatgcactgaacaaaacactctaataacgcaggctgcttgctaatagcgcgtgcactcattgttctgcagcacacgcttgtttctattgtgtcagctgcatgctaatgcaggcagccacgccaggcagacacgtgtgcacatccactgacaggtcaggaacacctcccgtctccrtttctccagcttttcacaaattctgcaatttctctctctcccarctaagctccatttgaaatgcagtgccatgacaagtttgattctgcttgcttttctcatgtcaatctcagagtttccytccctccctcagcaaaggctgaagcatgagagcaacctgggcttttgcaygtggctgtgctctgaagcagaccctaagcaaagatgcccaaatatctcaaaccatatgtcattttcatagtgacacaagccagaccttccttggggcttggctatacaaagccagaccttgcaggctgcacttatggagggaaatattactgactcaattacactcactgaaccaacaagtgaattatttatatacacaataggatttttgcccctgttcacaaacgttattctaaaggcctctgtaaac

SEQ ID NO: 76732 - DNA, 600 bp, Chicken  19866894364456_6
gcgcgtgcactcattgttctgcagcacacgcttgtttctattgtgtcagctgcatgctaatgcaggcagccacgccaggcagacacgtgtgcacatccactgacaggtcaggaacacctcccgtctccrtttctccagcttttcacaaattctgcaatttctctctctcccarctaagctccatttgaaatgcagtgccatgacaagtttgattctgcttgcttttctcatgtcaatctcagagtttccytccctccctcagcaaaggctgaagcatgagagcaacctgggcttttgcaygtggctgtgctctgaagcagaccctaagcaaagatgcccaaatatctcaaaccatatgtcattttcatagtgacacaagccagaccttccttggggcttggctatacaaagccagaccttgcaggctgcacttatggagggaaatattactgactcaattacactcactgaaccaacaagtgaattatttatatacacaataggatttttgcccctgttcacaaacgttattctaaaggcctctgtaaaccccactgatgtcaccttactcatagaatcatagaatcacaaaggttggaa

SEQ ID NO: 76733 - DNA, 600 bp, Chicken  19866894364456_7
ttcatagtgacacaagccagaccttccttggggcttggctatacaaagccagaccttgcaggctgcacttatggagggaaatattactgactcaattacactcactgaaccaacaagtgaattatttatatacacaataggatttttgcccctgttcacaaacgttattctaaaggcctctgtaaaccccactgatgtcaccttactcatagaatcatagaatcacaaaggttggaaaagacccacaggatcatccagtccaaccattcaaccatcaccaatggttctcactaaaccacrtccctcaacacagcgtccaaaygttccttgaacaatgtttcatataaaggagaaactgagatttgaactttattacagggcaacaaattttaaaaataggtttacatgcaacaaaatgttggtaaaatactgagataaaacatttggaacagtcccataatgcaagtgttgtttctagacaactcaaatgcttgatatcatagaatcacagaatcatagaatagcctgrgttgaaaaggaccacaatgatcatccagtttcaaatcctctgctatgtgcagggtcgccaaccaccagacc

SEQ ID NO: 76734 - DNA, 600 bp, Chicken  19866894364456_8
cttccttggggcttggctatacaaagccagaccttgcaggctgcacttatggagggaaatattactgactcaattacactcactgaaccaacaagtgaattatttatatacacaataggatttttgcccctgttcacaaacgttattctaaaggcctctgtaaaccccactgatgtcaccttactcatagaatcatagaatcacaaaggttggaaaagacccacaggatcatccagtccaaccattcaaccatcaccaatggttctcactaaaccacrtccctcaacacagcgtccaaaygttccttgaacaatgtttcatataaaggagaaactgagatttgaactttattacagggcaacaaattttaaaaataggtttacatgcaacaaaatgttggtaaaatactgagataaaacatttggaacagtcccataatgcaagtgttgtttctagacaactcaaatgcttgatatcatagaatcacagaatcatagaatagcctgrgttgaaaaggaccacaatgatcatccagtttcaaatcctctgctatgtgcagggtcgccaaccaccagaccaggctgcccagagccacatcca

SEQ ID NO: 76735 - DNA, 600 bp, Chicken  19866894364456_9
ggttggaaaagacccacaggatcatccagtccaaccattcaaccatcaccaatggttctcactaaaccacrtccctcaacacagcgtccaaaygttccttgaacaatgtttcatataaaggagaaactgagatttgaactttattacagggcaacaaattttaaaaataggtttacatgcaacaaaatgttggtaaaatactgagataaaacatttggaacagtcccataatgcaagtgttgtttctagacaactcaaatgcttgatatcatagaatcacagaatcatagaatagcctgrgttgaaaaggaccacaatgatcatccagtttcaaatcctctgctatgtgcagggtcgccaaccaccagaccaggctgcccagagccacatccagcctggccctgaatgcctccagggatggggcatccacaacctccttggacaacccgttccagtgcatcaccaccctctgagtgaaaaacttcctcctaatatccaacctaaacctctcctgtctcagtttaaaaccattcccccttgtcctatcactatccacccttgtaaacagctgttcccccttcctgtttatacgctcccttc

SEQ ID NO: 76736 - DNA, 599 bp, Chicken  19866894364458_1
  misc_feature (1)..(148): n is any nucleotide
nnnnnnnnnnnnnnnnnnnnnnnnnnnnnnnnnnnnnnnnnnnnnnnnnnnnnnnnnnnnnnnnnnnnnnnnnnnnnnnnnnnnnnnnnnnnnnnnnnnnnnnnnnnnnnnnnnnnnnnnnnnnnnnnnnnnnnnnnnnnnnnnnnnnctctgttttattttacattatgtacattatatagtacatgtatatataggtgtgtgtatacatatatgtgcttataaatgcaattcaaaaaaattcaagtgaatagcaacaagtgtctctagcagtgagatctgaaatatggtcacctttgsagctaatgtactttgcttcttattttayaataccaaagagacagcacaagcaagtaagagacatagcaaattcccactctgtgtatctctyttttggtaaaagtaggttataagtgacttgagaaaagttgtgtaatatattcaccactgaagatgtgatttgttccttgtaaaacatacagtaacctcccatctaggaaaatagcagtgcatatcatcacctaatctggcaatacagcaataatttagattagaaaratcttatcttaaaaaaactgtagttttgcgygtccttgaac

SEQ ID NO: 76737 - DNA, 599 bp, Chicken  19866894364458_2
  misc_feature (1)..(120): n is any nucleotide
nnnnnnnnnnnnnnnnnnnnnnnnnnnnnnnnnnnnnnnnnnnnnnnnnnnnnnnnnnnnnnnnnnnnnnnnnnnnnnnnnnnnnnnnnnnnnnnnnnnnnnnnnnnnnnnnnnnnnnnnctctgttttattttacattatgtacattatatagtacatgtatatataggtgtgtgtatacatatatgtgcttataaatgcaattcaaaaaaattcaagtgaatagcaacaagtgtctctagcagtgagatctgaaatatggtcacctttgsagctaatgtactttgcttcttattttayaataccaaagagacagcacaagcaagtaagagacatagcaaattcccactctgtgtatctctyttttggtaaaagtaggttataagtgacttgagaaaagttgtgtaatatattcaccactgaagatgtgatttgttccttgtaaaacatacagtaacctcccatctaggaaaatagcagtgcatatcatcacctaatctggcaatacagcaataatttagattagaaaratcttatcttaaaaaaactgtagttttgcgygtccttgaacagcacaacttcagagtgagggtttatat

SEQ ID NO: 76738 - DNA, 599 bp, Chicken  19866894364458_3
  misc_feature (1)..(57): n is any nucleotide
nnnnnnnnnnnnnnnnnnnnnnnnnnnnnnnnnnnnnnnnnnnnnnnnnnnnnnnnnctctgttttattttacattatgtacattatatagtacatgtatatataggtgtgtgtatacatatatgtgcttataaatgcaattcaaaaaaattcaagtgaatagcaacaagtgtctctagcagtgagatctgaaatatggtcacctttgsagctaatgtactttgcttcttattttayaataccaaagagacagcacaagcaagtaagagacatagcaaattcccactctgtgtatctctyttttggtaaaagtaggttataagtgacttgagaaaagttgtgtaatatattcaccactgaagatgtgatttgttccttgtaaaacatacagtaacctcccatctaggaaaatagcagtgcatatcatcacctaatctggcaatacagcaataatttagattagaaaratcttatcttaaaaaaactgtagttttgcgygtccttgaacagcacaacttcagagtgagggtttatatctcttgtggtaaacttgagctgtgctgcaggtgttttagtttatcactgaaaggaaatgactt

SEQ ID NO: 76739 - DNA, 600 bp, Chicken  19866894364458_4
aagtgtctctagcagtgagatctgaaatatggtcacctttgsagctaatgtactttgcttcttattttayaataccaaagagacagcacaagcaagtaagagacatagcaaattcccactctgtgtatctctyttttggtaaaagtaggttataagtgacttgagaaaagttgtgtaatatattcaccactgaagatgtgatttgttccttgtaaaacatacagtaacctcccatctaggaaaatagcagtgcatatcatcacctaatctggcaatacagcaataatttagattagaaaratcttatcttaaaaaaactgtagttttgcgygtccttgaacagcacaacttcagagtgagggtttatatctcttgtggtaaacttgagctgtgctgcaggtgttttagtttatcactgaaaggaaatgactttttttacacctaatttaatctgaagctattcacagtttaaaatgttcggtaacagtgacctctgtaatgactaacacattgcaggtggtctgatagcaggccagtggttaatgtttgctattgagagagacagaattaaatgtctgcccaagttgttttcttccattt

SEQ ID NO: 76740 - DNA, 600 bp, Chicken  19866894364458_5
gtcacctttgsagctaatgtactttgcttcttattttayaataccaaagagacagcacaagcaagtaagagacatagcaaattcccactctgtgtatctctyttttggtaaaagtaggttataagtgacttgagaaaagttgtgtaatatattcaccactgaagatgtgatttgttccttgtaaaacatacagtaacctcccatctaggaaaatagcagtgcatatcatcacctaatctggcaatacagcaataatttagattagaaaratcttatcttaaaaaaactgtagttttgcgygtccttgaacagcacaacttcagagtgagggtttatatctcttgtggtaaacttgagctgtgctgcaggtgttttagtttatcactgaaaggaaatgactttttttacacctaatttaatctgaagctattcacagtttaaaatgttcggtaacagtgacctctgtaatgactaacacattgcaggtggtctgatagcaggccagtggttaatgtttgctattgagagagacagaattaaatgtctgcccaagttgttttcttccatttatagtatgaaaacaacagctggcacaaaagc

SEQ ID NO: 76741 - DNA, 599 bp, Chicken  19866894364460_1
  misc_feature (1)..(65): n is any nucleotide
nnnnnnnnnnnnnnnnnnnnnnnnnnnnnnnnnnnnnnnnnnnnnnnnnnnnnnnnnnnnnnnnncactgtgatatttggcacacctaattttaaaaaatcaccatagaaaaacgccttacaaatcaagagctaaccagtactttaaatacatgtcgaagtattatcacagaaaatactaaaatgcaaatcaaatgcagtgcttataagaatcttccaactatgaaatagcatattttaagtgctacacacatttaaggtggtgtcttcttttcaaatgtgaggcctgtgagaaaagatygagagaaatttgtaatcttgatcacactgacaaattattgcaaagtttcattttatttttctgtatttcccttcccctcagctcccaaggagattaaaaggtaatgttatgtgcaaaaacttcttaaaatctctctcaggctgttttaatagtccaagtcagagctgctttatcttttatattcagaagaaatacctgtgacattttcagtccctcagaacgtcacgtggacaacatcaaagaatattttcctggacttctttcagccctcttaagaagaaccttctcaaccttcattc

SEQ ID NO: 76742 - DNA, 599 bp, Chicken  19866894364461_1
  misc_feature (1)..(72): n is any nucleotide
nnnnnnnnnnnnnnnnnnnnnnnnnnnnnnnnnnnnnnnnnnnnnnnnnnnnnnnnnnnnnnnnnnnnnnnnaaagtggcagcaccaggagcacaccatacagaaactgaagacaccatctggttctgcagaaggtctggtctctactgtaaatatctgaggtaaagagtcccatctcagaatttccacaaaatttggaatattgagttctagctctcaaaccaacagtatgatacagtccagctttcaggatgcttatgatgactcctgacacacagttctggtttgcaagcacccttmccatgattaaaaaaagggccaaagtgctacagtatatggtgtgggtattactggtcacatcctgaacacagtgtcactgaggcaaacaatctgtgtggattttttatggctctgagttccaggatattgattcraaacttctcattcccaaagggctattggctaaactgacacttcttggggtgacagatgtagcaaaagaaaaccatatagacaagaaaaacagaggaacaaccacttgcatattctggctgttttttctcactggcatgggaacatcacctctcacactcaggtgt

SEQ ID NO: 76743 - DNA, 600 bp, Chicken  19866894364461_2
gtctggtctctactgtaaatatctgaggtaaagagtcccatctcagaatttccacaaaatttggaatattgagttctagctctcaaaccaacagtatgatacagtccagctttcaggatgcttatgatgactcctgacacacagttctggtttgcaagcacccttmccatgattaaaaaaagggccaaagtgctacagtatatggtgtgggtattactggtcacatcctgaacacagtgtcactgaggcaaacaatctgtgtggattttttatggctctgagttccaggatattgattcraaacttctcattcccaaagggctattggctaaactgacacttcttggggtgacagatgtagcaaaagaaaaccatatagacaagaaaaacagaggaacaaccacttgcatattctggctgttttttctcactggcatgggaacatcacctctcacactcaggtgtctttttctagcacagttcaaggcaggtttgattcccagcctgacatgggatagacgtatgctgccacgtggctcctgaagctatgaagcatttcactacgaagaaaaatttgatgcaagactgtatagcaatgtg

SEQ ID NO: 76744 - DNA, 599 bp, Chicken  19866894364463_1
  misc_feature (1)..(48): n is any nucleotide
nnnnnnnnnnnnnnnnnnnnnnnnnnnnnnnnnnnnnnnnnnnnnnnnaaactttatgaaatagtaaaatgtgtttatacgaagcttggcaagctgttggatcagatgcttgtaaaagtggttgcttggatctcggtgaatgacttgggtataaaagaagtttttagacgaaataacaactgagcttggccttctcagcctagagtggaatatcacttgggcacgtttctagtgagctgattgatttctgtgaaactgaagtattaaagcattttttaacaggtagtcaggtctgaacartgttggtttgacatttgcrtgtcgtatgagcttattgagtatcttttccagtagtgtttgtatggcctgatgagatctagaagtattgcctttattatacgcttagataagtaaggcacctggtttgtagaatttcagtatctgtgtagcccagaagggctagaaaatagatctctatgtaagctgtctgatggcttayctcagtgtgccctaaagctggaccggtggcttggaggggatggaagtaagaatatggagatgaaccttgtgactgcagttcagctggcagtgttaagtac

SEQ ID NO: 76745 - DNA, 599 bp, Chicken  19866894364463_2
  misc_feature (1)..(29): n is any nucleotide
nnnnnnnnnnnnnnnnnnnnnnnnnnnnnaaactttatgaaatagtaaaatgtgtttatacgaagcttggcaagctgttggatcagatgcttgtaaaagtggttgcttggatctcggtgaatgacttgggtataaaagaagtttttagacgaaataacaactgagcttggccttctcagcctagagtggaatatcacttgggcacgtttctagtgagctgattgatttctgtgaaactgaagtattaaagcattttttaacaggtagtcaggtctgaacartgttggtttgacatttgcrtgtcgtatgagcttattgagtatcttttccagtagtgtttgtatggcctgatgagatctagaagtattgcctttattatacgcttagataagtaaggcacctggtttgtagaatttcagtatctgtgtagcccagaagggctagaaaatagatctctatgtaagctgtctgatggcttayctcagtgtgccctaaagctggaccggtggcttggaggggatggaagtaagaatatggagatgaaccttgtgactgcagttcagctggcagtgttaagtacttagttcttcatgtagctg

SEQ ID NO: 76746 - DNA, 600 bp, Chicken  19866894364463_3
ctagagtggaatatcacttgggcacgtttctagtgagctgattgatttctgtgaaactgaagtattaaagcattttttaacaggtagtcaggtctgaacartgttggtttgacatttgcrtgtcgtatgagcttattgagtatcttttccagtagtgtttgtatggcctgatgagatctagaagtattgcctttattatacgcttagataagtaaggcacctggtttgtagaatttcagtatctgtgtagcccagaagggctagaaaatagatctctatgtaagctgtctgatggcttayctcagtgtgccctaaagctggaccggtggcttggaggggatggaagtaagaatatggagatgaaccttgtgactgcagttcagctggcagtgttaagtacttagttcttcatgtagctggaaaacctgttgtttctgtgcttgtatcacctcaaaaatagcatgctgactttactaatgcttctttggacaccaactcacatttgtccagtaaaacagcaaaaagtccagtaaaaagtccagtacacttaccccagtcatggctggggaactacgacttgtttcgcatctgtccatgctt

SEQ ID NO: 76747 - DNA, 600 bp, Chicken  19866894364464_1
gtttgcttctcttgcctcattctccaggaatttttcaatggcttaaaaatgtgccattccttcccctctgccatcaggcagaagcacagagctgcacaggggaatagagtgtaggggaggggccctgtcccagctccgttagccactcgcatctcctcatgacccagttgtgcagggaaccgatattcagaagtacttgaaagctgagcagggaaggagtcagccgatgcgctggctggatgtctgcctggggaagggatctgtttctgtgctggggcaggtgaggctgtggtgatcctrtcccagctctttgcaggattaaacggaccagagcaaaacctgttgcttttatcgtttgcattgtgtgctggcagctactgctagcagccatgctgcccatgcatcattccaggttacactcctcctgtttggggctggggtgtgcatggcagagctgagcacccttgcttgcaatgccaccaatgtccctttgtgtgtttttcttgcacagagtggggttgttcccaactcagcaggatggggcggtgtttggcgaagccacatctgtcctggttaatgatcaagccagtttgactgcga

SEQ ID NO: 76748 - DNA, 600 bp, Chicken  19866894364464_2
gctctttgcaggattaaacggaccagagcaaaacctgttgcttttatcgtttgcattgtgtgctggcagctactgctagcagccatgctgcccatgcatcattccaggttacactcctcctgtttggggctggggtgtgcatggcagagctgagcacccttgcttgcaatgccaccaatgtccctttgtgtgtttttcttgcacagagtggggttgttcccaactcagcaggatggggcggtgtttggcgaagccacatctgtcctggttaatgatcaagccagtttgactgcgaccgayggctctgcaaacatgttcctggcactcactgctctttcctctccagttttccggcagctcaacacctccatggcagtgtcacagatgtcagcggtgcagtgccgcctggcacccctcatccaggtcatccaggactgcagccacctctaccactacgctgtcaagctcatgttcaagctgcactcctgtgagtccccagtcactgcaattccaccacggtcacatggggatgccctgctcccagcctggtcctggcttgaagctggagggacgtgggtgcatggggataaatctggggct

SEQ ID NO: 76749 - DNA, 600 bp, Chicken  19866894364475_1
tgatttgtaatatgtcctgtcttatgaatcagtgagttattaaccttaacaatgtcaatgagctgctagtgtaattgagtctcagcaaattaaggtttggggtaattattaagagctgctttgtacacaggaatatattaatgtgttattgatgccatgtgattatactcttgcactgaaagaagaattcagattgattgtagcaaaagatataaacccagactcaaatgaatgtagatgtgttggcatattgattacaattcccttataattcccttattgtatttgcataggactgarcaatttaacttccattcttcccagataacaggctgtgaggttgatctgtgaggatagcattcagccccagtccagtccaagagtgggagtgccaggcagagctgaaaaactaaattgggtgaacactaaatacagcttctggtgaactttagtgtaaaggcacaatctgcaacctgatgcattttctctctttaggtgggtcattgggggaaataactgctgcaagctgggtagcaggtgttcgtgtggacacttgtgcagcattcacaattttacttcaattaaaacacatttgagttc

SEQ ID NO: 76750 - DNA, 600 bp, Chicken  19866894364476_1
tctcccacacaaggcccctaccagtgtttcgcttttatgaaccacgctttaaggttgttgtctacttgagggaacatttctgcatgtgagcacgggtgcatttgaaatgcgtttgctctgctctcaacaacacaatactacacgtgctttctctttttccattttagcaaagcagctaaagctcttccccctgtggacaaaattaatgacgaactaaaaaatgctgtgagctcccagggacgctccaaaaataccctcatgaagttaaatgaagggatacaaggaatcagagcacaaatmacacaggtatcttgctgtaaagcttttaatgtattattgagtttatctcaattttttccttaacgtaactgtaaaataaaatcaaaatcagatacaatatcaattccataacacgtaaggggctcctcttgtctgtcagttgccattcatctacttcattaccaagccctgcaggcgggatggacaaggcacgagaaaccacagcctccaactgttctgtttcaggctgggaaccaaatgaacaagacaagcgatgaactcaatgacttttcagcaaaacagtccagactggaagatgaa

SEQ ID NO: 76751 - DNA, 600 bp, Chicken  19866894364476_2
ggttgttgtctacttgagggaacatttctgcatgtgagcacgggtgcatttgaaatgcgtttgctctgctctcaacaacacaatactacacgtgctttctctttttccattttagcaaagcagctaaagctcttccccctgtggacaaaattaatgacgaactaaaaaatgctgtgagctcccagggacgctccaaaaataccctcatgaagttaaatgaagggatacaaggaatcagagcacaaatmacacaggtatcttgctgtaaagcttttaatgtattattgagtttatctcaamtttttccttaacgtaactgtaaaataaaatcaaaatcagatacaatatcaattccataacacgtaaggggctcctcttgtctgtcagttgccattcatctacttcattaccaagccctgcaggcgggatggacaaggcacgagaaaccacagcctccaactgttctgtttcaggctgggaaccaaatgaacaagacaagcgatgaactcaatgacttttcagcaaaacagtccagactggaagatgaaattaccacactgcagacgaaggtgctgatgaacaggaatcaagctacaaatg

SEQ ID NO: 76752 - DNA, 600 bp, Chicken  19866894364479_1
acagcagtgatgaggtgatggtaaactgagacatggtttgtgggagaagtagtattttcattagattgagttatattttggggaaaaacaaaagttcaggtacacactctcattcacatgacagaaaagcttatctcaacttgtctggataaatctttttctttagtgaagattgttccatctgccttcaagtcgatgctttgaaaacttagagagagaaggcataaacaaatgtgaatgagagtgagcaaaacatctggtattaccttagaaagcagcagacacctgttcttttatcakgttcatgctgccaaacactgcattaaatatagccagmatttaatacacagtagatacaaaaaagacataarttaacacycttgcaaattaaggcttattagcgtataaaatcaaagcaagcaagcagactgcatcacagtcttccatctcttatgcactcacatattcctctatgggaatgatgaccaacacatgtggaaagtatcaccttagaaaaagcaatctgagagaacagccactggccattctattttatatctgtatttttactttacacagttgtagtttcagttatgctga

SEQ ID NO: 76753 - DNA, 600 bp, Chicken  19866894364479_2
ttgtgggagaagtagtattttcattagattgagttatattttggggaaaaacaaaagttcaggtacacactctcattcacatgacagaaaagcttatctcaacttgtctggataaatctttttctttagtgaagattgttccatctgccttcaagtcgatgctttgaaaacttagagagagaaggcataaacaaatgtgaatgagagtgagcaaaacatctggtattaccttagaaagcagcagacacctgttcttttatcakgttcatgctgccaaacactgcattaaatatagccagmatttaatacacagtagatacaaaaaagacataarttaacacycttgcaaattaaggcttattagcgtataaaatcaaagcaagcaagcagactgcatcacagtcttccatctcttatgcactcacatattcctctatgggaatgatgaccaacacatgtggaaagtatcaccttagaaaaagcaatctgagagaacagccactggccattctattttatatctgtatttttactttacacagttgtagtttcagttatgctgaggctcttggtcaaacttttacatttgcatcacagcaa

SEQ ID NO: 76754 - DNA, 600 bp, Chicken  19866894364479_3
tatattttggggaaaaacaaaagttcaggtacacactctcattcacatgacagaaaagcttatctcaacttgtctggataaatctttttctttagtgaagattgttccatctgccttcaagtcgatgctttgaaaacttagagagagaaggcataaacaaatgtgaatgagagtgagcaaaacatctggtattaccttagaaagcagcagacacctgttcttttatcakgttcatgctgccaaacactgcattaaatatagccagmatttaatacacagtagatacaaaaaagacataarttaacacycttgcaaattaaggcttattagcgtataaaatcaaagcaagcaagcagactgcatcacagtcttccatctcttatgcactcacatattcctctatgggaatgatgaccaacacatgtggaaagtatcaccttagaaaaagcaatctgagagaacagccactggccattctattttatatctgtatttttactttacacagttgtagtttcagttatgctgaggctcttggtcaaacttttacatttgcatcacagcaacactaagtgaaagagcacataaacaccatccgtc

SEQ ID NO: 76755 - DNA, 600 bp, Chicken  19866894364479_4
ggggaaaaacaaaagttcaggtacacactctcattcacatgacagaaaagcttatctcaacttgtctggataaatctttttctttagtgaagattgttccatctgccttcaagtcgatgctttgaaaacttagagagagaaggcataaacaaatgtgaatgagagtgagcaaaacatctggtattaccttagaaagcagcagacacctgttcttttatcakgttcatgctgccaaacactgcattaaatatagccagmatttaatacacagtagatacaaaaaagacataarttaacacycttgcaaattaaggcttattagcgtataaaatcaaagcaagcaagcagactgcatcacagtcttccatctcttatgcactcacatattcctctatgggaatgatgaccaacacatgtggaaagtatcaccttagaaaaagcaatctgagagaacagccactggccattctattttatatctgtatttttactttacacagttgtagtttcagttatgctgaggctcttggtcaaacttttacatttgcatcacagcaacactaagtgaaagagcacataaacaccatccgtctatcttgt

SEQ ID NO: 76756 - DNA, 600 bp, Chicken  19866894364479_5
ttatgcactcacatattcctctatgggaatgatgaccaacacatgtggaaagtatcaccttagaaaaagcaatctgagagaacagccactggccattctattttatatctgtatttttactttacacagttgtagtttcagttatgctgaggctcttggtcaaacttttacatttgcatcacagcaacactaagtgaaagagcacataaacaccatccgtctatcttgtgcaattcctctaacctgccccactgaggtcctgctgaaagtttcacatcaaccccaggacttaatctacaygcttttcaatttaataagcaatcgtcttcattttctatagaacttaaaacttctttactgtatttgagtaaaaagtgagtcaccacatgtataatctcatccctaattcagttatttatgccagcagcaaatctcctaattcataccccacaggaggtcttactctcctgctcacagcactgtgctgtcatcagacttcatgtcagtaggagatcgttgtgtcttcagttggtcagagagcgatgcttgttggtcaagcagttttatttcttaaagcttgggtaaatgtgaatgaatata

SEQ ID NO: 76757 - DNA, 567 bp, Chicken  19866894364487_1
  misc_feature (1)..(16): n is any nucleotide
nnnnnnnnnnnnnnnntccccccgactgctgtcggatcagtgccctctgctgctcgctgcctgcatgaacgctcccagcgcagccaaaatatgcagcttctcatctaaagggagaaactacacacgtgcagaaccctcagccccacgtagcagcactgccccgtgctgacaaagtacctggccccatacgaacagcccacaccacggcagttggccactcacaggggaagcaaacacagcaggtgagtaaaacacacagctgagcccatggatgcaaaaacacatgagcaaaaacttacrtgcagrtcttcttatgctgaccaaagtactgtataaaatgctggactttgtccttcaaaactgtaatggtacatgtgttacaagctgatatccttgtttagataataaccaaaatagcaacgtgagacagaacctgagtgggttgctgggtgtcattgcatccacagggtgcaggagggagggctgctttgccttacctggatgtgcagccatgcctggggatgatggcacacgtatggtcgtaccctcaaccaaggaatgccaaaa

SEQ ID NO: 76758 - DNA, 561 bp, Chicken  19866894364487_2
  misc_feature (1)..(10): n is any nucleotide
nnnnnnnnnntccccccgactgctgtcggatcagtgccctctgctgctcgctgcctgcatgaacgctcccagcgcagccaaaatatgcagcttctcatctaaagggagaaactacacacgtgcagaaccctcagccccacgtagcagcactgccccgtgctgacaaagtacctggccccatacgaacagcccacaccacggcagttggccactcacaggggaagcaaacacagcaggtgagtaaaacacacagctgagcccatggatgcaaaaacacatgagcaaaaacttacrtgcagrtcttcttatgctgaccaaagtactgtataaaatgctggactttgtccttcaaaactgtaatggtacatgtgttacaagctgatatccttgtttagataataaccaaaatagcaacgtgagacagaacctgagtgggttgctgggtgtcattgcatccacagggtgcaggagggagggctgctttgccttacctggatgtgcagccatgcctggggatgatggcacacgtatggtcgtaccctcaaccaaggaatgccaaaa

SEQ ID NO: 76759 - DNA, 600 bp, Chicken  19866894364495_1
ttattcttccagagcgtaggctatactttgtctccacagctgagggcagattgaagaactcttgttttcctctttgtagcttcccctactcccacaacactgtttggctttcattgttccttccatactgttcctagtgctacacacttgtacctgtctgtaaatgaaatttaaactctctagtgttttgatacttctgttgtataactgcatcagtaggtgtcctcttctgaagagcacttcacaaacatgtacttagttttgcattgcatagtaaactctccttgtacacaattcctrtgatgatttaattcttctgttgacacacagtatctccaactaaaattgtgggattgttttctgctgcccaagggtttggtagttagttcctttgcaatttttgcatttsttttgtctctctctatagttgcttagaagtttctatgactggctcatgcagtaagttcttggcaacagcatttactgaaacagatggaagaaaatttaatgaaaatattgttttcagaaagcaattatcgtcaaactgaatggtgtatgtttcaactgtgagcatactgatttgtgggtcttacagtgagc

SEQ ID NO: 76760 - DNA, 597 bp, Chicken  19866894364495_2
ttcattgttccttccatactgttcctagtgctacacacttgtacctgtctgtaaatgaaatttaaactctctagtgttttgatacttctgttgtataactgcatcagtaggtgtcctcttctgaagagcacttcacaaacatgtacttagttttgcattgcatagtaaactctccttgtacacaattcctrtgatgatttaattcttctgttgacacacagtatctccaactaaaattgtgggattgttttctgctgcccaagggtttggtagttagttcctttgcaatttttgcatttsttttgtctctctctatagttgcttagaagtttctatgactggctcatgcagtaagttcttggcaacagcatttactgaaacagatggaagaaaatttaatgaaaatattgttttcagaaagcaattatcgtcaaactgaatggtgtatgtttcaactgtgagcatactgatttgtgggtcttacagtgagcaaagaggaaacctccatccatgctgggaaaacatcttcatggggcaaaaaccttcactggtatccccaatacatctatcatcaaaaggcagaaacaatataatgac

SEQ ID NO: 76761 - DNA, 600 bp, Chicken  19866894364497_1
tggatttcagattgatttgtatttttatttttgtaattcaacagtagattggtcttggcgctccccgaataaattgtagatgtgttgaaacatcaagaggctttattgatgtttctgcacaaccccttcaatttatagtgagctcccatctaattaaaaaacctcactgattagaatatgtgcagatctcttctggagactgtctcagtgcttccctttgacctatctccttaccacatcagtcagctttgtctgaagcctttgggagtagaactcttctgaggcttaaagttcactggrgactgtctttttgtggtaagactttttttttgttaaatttccacgtgatttccatgctggttgatggataaaattacacccccacaaaatctgacttgacctgtgcctatctgctggaaaagagcgtgatagtatatgctgccaaatgttgctttttcatgagccaaagctaggggagagcatcacatcctgtttgctctatttctctttttatttacaacacgatatcatagaatagcttaggttggaagggaccttaaagatcatctagatccagtcccctactgcaggcagggctgc

SEQ ID NO: 76762 - DNA, 600 bp, Chicken  19866894364508_1
acctgtatatgtacatagctagtagaggtagctttctacctacatacagccacatacatgcaatttcatagtcacaccttgtgaaaaggactctccagaactgcactgcctaaccaggaagcctattccacacagacctcttcatgagaaaaacttaaggtcagacacaaaagaaactactggctactactgacaacttgtgcaggctgatctcagcaacttcctttcctggagaacagatgaatgtacagatgtgccatgtaatgcacacagtcaggctgctgcagctggagaaaagcygctgggatycagggagagagcatcaggatggtgctgcaagracaactaactcatctggaccagttctgaagatccttcaggcrcactgtggacaaactgactttgcactactgaaaattggctacgctgttacaaaggaccctaaaaagagtaycatgaggctcttctgcagaacctggtgcactggaaaaccaaaagtggattcagcgacctaaagaagaaaaagaattttggctgcagctcaatctcagtgggtttgcagtcacctggaaataaaggctggttgctattatctcacag

SEQ ID NO: 76763 - DNA, 600 bp, Chicken  19866894364508_2
tgtacatagctagtagaggtagctttctacctacatacagccacatacatgcaatttcatagtcacaccttgtgaaaaggactctccagaactgcactgcctaaccaggaagcctattccacacagacctcttcatgagaaaaacttaaggtcagacacaaaagaaactactggctactactgacaacttgtgcaggctgatctcagcaacttcctttcctggagaacagatgaatgtacagatgtgccatgtaatgcacacagtcaggctgctgcagctggagaaaagcygctgggatycagggagagagcatcaggatggtgctgcaagracaactaactcatctggaccagttctgaagatccttcaggcrcactgtggacaaactgactttgcactactgaaaattggctacgctgttacaaaggaccctaaaaagagtaycatgaggctcttctgcagaacctggtgcactggaaaaccaaaagtggattcagcgacctaaagaagaaaaagaattttggctgcagctcaatctcagtgggtttgcagtcacctggaaataaaggctggttgctattatctcacaggccatgctg

SEQ ID NO: 76764 - DNA, 600 bp, Chicken  19866894364508_3
acatacagccacatacatgcaatttcatagtcacaccttgtgaaaaggactctccagaactgcactgcctaaccaggaagcctattccacacagacctcttcatgagaaaaacttaaggtcagacacaaaagaaactactggctactactgacaacttgtgcaggctgatctcagcaacttcctttcctggagaacagatgaatgtacagatgtgccatgtaatgcacacagtcaggctgctgcagctggagaaaagcygctgggatycagggagagagcatcaggatggtgctgcaagracaactaactcatctggaccagttctgaagatccttcaggcrcactgtggacaaactgactttgcactactgaaaattggctacgctgttacaaaggaccctaaaaagagtaycatgaggctcttctgcagaacctggtgcactggaaaaccaaaagtggattcagcgacctaaagaagaaaaagaattttggctgcagctcaatctcagtgggtttgcagtcacctggaaataaaggctggttgctattatctcacaggccatgctgcacagaacacaaggtattcaggtgtaacaacg

SEQ ID NO: 76765 - DNA, 600 bp, Chicken  19866894364508_4
aaaaggactctccagaactgcactgcctaaccaggaagcctattccacacagacctcttcatgagaaaaacttaaggtcagacacaaaagaaactactggctactactgacaacttgtgcaggctgatctcagcaacttcctttcctggagaacagatgaatgtacagatgtgccatgtaatgcacacagtcaggctgctgcagctggagaaaagcygctgggatycagggagagagcatcaggatggtgctgcaagracaactaactcatctggaccagttctgaagatccttcaggcrcactgtggacaaactgactttgcactactgaaaattggctacgctgttacaaaggaccctaaaaagagtaycatgaggctcttctgcagaacctggtgcactggaaaaccaaaagtggattcagcgacctaaagaagaaaaagaattttggctgcagctcaatctcagtgggtttgcagtcacctggaaataaaggctggttgctattatctcacaggccatgctgcacagaacacaaggtattcaggtgtaacaacggggagcatggattactgccagacactgactctgatgttccag

SEQ ID NO: 76766 - DNA, 600 bp, Chicken  19866894364508_5
ttaaggtcagacacaaaagaaactactggctactactgacaacttgtgcaggctgatctcagcaacttcctttcctggagaacagatgaatgtacagatgtgccatgtaatgcacacagtcaggctgctgcagctggagaaaagcygctgggatycagggagagagcatcaggatggtgctgcaagracaactaactcatctggaccagttctgaagatccttcaggcrcactgtggacaaactgactttgcactactgaaaattggctacgctgttacaaaggaccctaaaaagagtaycatgaggctcttctgcagaacctggtgcactggaaaaccaaaagtggattcagcgacctaaagaagaaaaagaattttggctgcagctcaatctcagtgggtttgcagtcacctggaaataaaggctggttgctattatctcacaggccatgctgcacagaacacaaggtattcaggtgtaacaacggggagcatggattactgccagacactgactctgatgttccagtatgcactgtttgggacggcccaagtcccatttcaaactgctatcgtagctctcagtttccaaagcacaac

SEQ ID NO: 76767 - DNA, 599 bp, Chicken  19866894364510_1
  misc_feature (1)..(104): n is any nucleotide
nnnnnnnnnnnnnnnnnnnnnnnnnnnnnnnnnnnnnnnnnnnnnnnnnnnnnnnnnnnnnnnnnnnnnnnnnnnnnnnnnnnnnnnnnnnnnnnnnnnnnnnnaatcatttcaacttctttacactttacttgactccattaattgctttagtgttcatctatagagaaatagatggattagtgtgaacacaatactaaaagcctttctagaaacagctatagatgcaatagttttaaggtctaaggataattgatttactcaatgatttttcatacgctgttattgcattcttgatartgccaggtctactagacatgtcaaagagatagagttgtgcagtgtttttggtggctgagtgtttgtcttaatgattgacttagaggggaaaaaaatcagtttttatatacagagcgctttttcgtattctataaggaaaaaaatctgaaatactagattcttttcttgttgctttttgtctcctagtaactccattgtttttcttaggatgtctcttatctgtttcagattgggattaattctcgggacagttcaactccaatattcttagccaagaatattgctggacacctgtcagg

SEQ ID NO: 76768 - DNA, 581 bp, Chicken  19866894364512_1
acacgcaggcaagacaaggcacgttcaccaggagaacaccaccttcagccattgtcctttccgaaggtgtttcatgcagtggaaggcgcacacccagcaggctggtagcatgagaacttgccttaatcaaagctggcctgggagtgctgtgccagccaggggataaataaactcatcttatttcagcagtgaaactcagggttacaaacctggtgttccttctgtgtgctgccagggagacctacatgtgtgtttgtccgatcctacatagttttcccagtcatgtgaaggatgaatgtygagggactgaagtttttctctagaatactcatgatgttctggtgtgagtgcagaattccagtgtttgtcttgctgagctttaagtgactcaagtggttaatgttctgccacttcctttgggaggtgattcccacagctgaacacaaactgtccggaaacttttcctgctgttctttcttccttgatccatgttttcatccctctgctctcagccgtcctcccggtacttcatgtagggtaactgctttcatgcagttctaaaaagagcacatctgctggaa

SEQ ID NO: 76769 - DNA, 600 bp, Chicken  19866894364524_1
cagcattttggataacacttaactgtagttggacacacttggtgtgccttgtcttcccaccaaggcaggtgaagcctagttgtactcatccaaaacccacctgaagtctacggcttttggttaaggactaactgacataagtgttcatgtagtacggaggtgtgggaatggttgaagaggcaatggcaaatgggaaatacctcctgggagctgcctgggaattgttctcagttgcattaggtctgagggatttctaaataaaatcatatattctgcaaaggcaaaacctcccagcttctmtaggagtttgtgtaattgtgtacatgagagtcatctgacctctttcaatgaaaatactaaagttgcaatttaaaccaacttgataagccagatgttttttttttttactctatcagtagttttgaaagtgatgtgaagtgcccaaagtgacagcggtcaccagttgtaaaataccctaccctcaaggctaggcaaaacctttgctcaaccttgatgagaaaattgttgctgaatttatcgtgactgcaaatttaccctgcctgtagccacatgcttaaaagttatttaagccatcagctg

SEQ ID NO: 76770 - DNA, 600 bp, Chicken  19866894364525_1
ggctgactatgatgaccagagttcgagccagtgaacgtttcacagcggaaagcagttctgccagtattagtgctccttgaactaccaaaagcaaagaaggtaggtcataaaaaataatttatattttattgactactgcatatgattgtattataagagcagacactattacttgcagcaagtaggctattaaaatttatattgtctttactacctacgtctggagtaaggtttcagaatacctaagtctcttaaagtgaaaattaagtccaaataaagcggagagtaaagatccataamtttttttcccccccacaatattagcctggatgatcttccaaacaagcctaccaacaaaacctcctataccgtggatgtgaccaattaaaaaagttacaatgaagtagtacttaatttcatttgtatgcttccatcctacaacagtgtcccaaagagtttttttgaaagagattttcttatgatgagttatcaggctattggctgaaagccaaaggttatggcaatggtgtcacaataaacaagcagttgaaagtctctttccaaggctaactgtaagaggtgaattacaggctacactta

SEQ ID NO: 76771 - DNA, 600 bp, Chicken  19866894364530_1
tggggtatctcaccagcctttcttaagatgctacagagtgaagcagcatctagaattgtgctttctgcatgatgctgtgaagagggctaccttgcacccattctcctagcaaaattcctacatagctggtcataatatgaagacttaacaaacacggagcgctggaagtctgtgctcataaaacaaaatttggagctccttttacataaaagtgcaatgcagggacaaagttctggtcttatttacatgagcataacatgagagaatgaggatagagcttaaacattttgctcgtatccrtccatgccaaagtacaggtatggtccctgcacggtctgctagacaagtcaaagaaggtgatggcagacaagaaccaggttgaacatttcaccaaagtgggtgatgtgcagccagatcacttcagctaggttgaacggcaaccacaacccatactggcctcaaagaaaactttccctagaaaccttcacccatctctaattacacttttaaacaagacttcaacttgctaaattcatataatatcagaaattgattgatgcttttaaattatatgagccaaaaggaactaaaccatgctta

SEQ ID NO: 76772 - DNA, 600 bp, Chicken  19866894364535_1
aggccttatcctttgccacactgagtacctgctttagagaagcaggcattgtcagtggaagtcctccctcctggctgaaccctcaaagagaatatagaagcctgagactcatacagaaaccaaccagatttcctgggttaaattttagcaggtaggaattaaatttagctaccctgactgcccattgtttggagcattactccaaagggggtgggaagggttgcttctgttttcacagaagagcacctaaagttttcttatgcaaatgaggcagatgctcgctaatagcttaaaagacarcaagatactcaacgctaactacatttccttatgtattcccttacattactcctgccaaccgaagcatttctattattttataggctacaaaagctttaaacccggatggaaaaagatgaagtggaaatagtagaaaggtcaacataatagcataagggaccattacttttaccacaccatctctcttcccactgagatgcttctgtgcttattcaccttgttgaactttcatgatacatagaagcatgactactaaacaaaactacattgtatttttgacatctcatgttatttagttaa

SEQ ID NO: 76773 - DNA, 600 bp, Chicken  19866894364542_1
aacagagccaagaaagcaacaagtccaaatgtagtaaaccaatgtagaaaccaataaatagtagtaactataatccctgcaactcagtggggttaactgcagtagcattacttgcccatcagcacatatgcacacatttacaaaaactgtttggtatttttgaggttttcttgatagtttggttatttatttatttagagagggtgttttctactgagttctgcaaaatatgtaactacaaggctaatgcaacaacattcaaattataagggctgctcagaaagtagtgcctcctatttwaaaaaaataatgtaccagtgcaaatctagcaaaacctttcaaattgttggtgttattgacatttggccactgaaagcagatgtttgtccttgcattaccatcgactaggatttatattcataccacttttaacccaggctcttctacagccattatttccaatcccttccctgcaaaaatactgaactgaaataaatgctgttttcaattcaacatactgatgcaggtaataccttcagtgtggactgcaagcaaattctctctgcaaaaggtaaaatgcttgcagatgtacgctgtatg

SEQ ID NO: 76774 - DNA, 600 bp, Chicken  19866894364546_1
ttgaaactgcaatgaatttcagccttaggtgtacaataaaattgcagctgggcataattaaaattatctctggcagggatttcagacctaaccttttcttttcattctgtgtagaaattggatcaaggatttactataaactattctgggagcctaatttctcattttattactttgatcagtttaacattgatttaatttgtaatgactgttttctttattgctagattggaagctaagtgttgccaaattatctttatttgagtgttaaattggaattttagagatgcttggcattcytttgcagggaaggtttgtcacatgccactgtaagttgttagcagatagcttattttaagawctgatgggcctgttgccttgccctgcctgattattcctgtgcccccttaactgctatgtattgattccaattaacgtgactgacatccatggctgggggtgaagttaatcaactcgaggagcccctgttgtgaattcatttcctcctccaagcttgtcctgctcagctgagcatttaaagagactaaagcagatactgcacagacaggtccaatctgtacagcaagtctaagcctgatg

SEQ ID NO: 76775 - DNA, 600 bp, Chicken  19866894364546_2
aattatctctggcagggatttcagacctaaccttttcttttcattctgtgtagaaattggatcaaggatttactataaactattctgggagcctaatttctcattttattactttgatcagtttaacattgatttaatttgtaatgactgttttctttattgctagattggaagctaagtgttgccaaattatctttatttgagtgttaaattggaattttagagatgcttggcattcytttgcagggaaggtttgtcacatgccactgtaagttgttagcagatagcttattttaagawctgatgggcctgttgccttgccctgcctgattattcctgtgcccccttaactgctatgtattgattccaattaacgtgactgacatccatggctgggggtgaagttaatcaactcgaggagcccctgttgtgaattcatttcctcctccaagcttgtcctgctcagctgagcatttaaagagactaaagcagatactgcacagacaggtccaatctgtacagcaagtctaagcctgatgcctaggaacaaaaatagcttttttcaaagctgccctggccaagcaaagtgatgcacttttg

SEQ ID NO: 76776 - DNA, 599 bp, Chicken  19866894364548_1
aaatgtcagatggttgtataaatgatagcctacggatggggtgttgccaaatatattagcaagatagatgaagcagtctgacagtgttgttaaagccaacaatggagtggctgtatggtgcaatcaatatcttttcttgctgcagttccctatgccagttgaagaaaatgttttaatagaaattcagtagatgtctctgaaataaagagggtgtttgaacttcttatggtaataaatgtagttttctctttgaaagtgtgtctcaggtgattttttgcttctccttaggaaatggaaagycttatgtaaggactggaacaccagagagttgataggaaggtgacaggtggattggctattaattgcagctgctcagctgaggcagaagagtgttccagaggacatctgcaggctgcagaaacgtgagtktgtgtgaacagcctgacatgrgggtgaatcataggcaataagtagaaacttatgtttataatcctcccctccaactacagagggcagaaccgtaaccaagaatgtttctgaaagctaggaaattttgtctgtaagtgaatagatctactaaaggcttaataactgttttc

SEQ ID NO: 76777 - DNA, 470 bp, Chicken  19866894364548_2
tcttttcttgctgcagttccctatgccagttgaagaaaatgttttaatagaaattcagtagatgtctctgaaataaagagggtgtttgaacttcttatggtaataaatgtagttttctctttgaaagtgtgtctcaggtgattttttgcttctccttaggaaatggaaagycttatgtaaggactggaacaccagagagttgataggaaggtgacaggtggattggctattaattgcagctgctcagctgaggcagaagagtgttccagaggacatctgcaggctgcagaaacgtgagtktgtgtgaacagcctgacatgrgggtgaatcataggcaataagtagaaacttatgtttataatcctcccctccaactacagagggcagaaccgtaaccaagaatgtttctgaaagctaggaaattttgtctgtaagtgaatagatctactaaaggcttaataactgttttc

SEQ ID NO: 76778 - DNA, 449 bp, Chicken  19866894364548_3
tatgccagttgaagaaaatgttttaatagaaattcagtagatgtctctgaaataaagagggtgtttgaacttcttatggtaataaatgtagttttctctttgaaagtgtgtctcaggtgattttttgcttctccttaggaaatggaaagycttatgtaaggactggaacaccagagagttgataggaaggtgacaggtggattggctattaattgcagctgctcagctgaggcagaagagtgttccagaggacatctgcaggctgcagaaacgtgagtktgtgtgaacagcctgacatgrgggtgaatcataggcaataagtagaaacttatgtttataatcctcccctccaactacagagggcagaaccgtaaccaagaatgtttctgaaagctaggaaattttgtctgtaagtgaatagatctactaaaggcttaataactgttttc

SEQ ID NO: 76779 - DNA, 599 bp, Chicken  19866894364549_1
  misc_feature (1)..(136): n is any nucleotide
nnnnnnnnnnnnnnnnnnnnnnnnnnnnnnnnnnnnnnnnnnnnnnnnnnnnnnnnnnnnnnnnnnnnnnnnnnnnnnnnnnnnnnnnnnnnnnnnnnnnnnnnnnnnnnnnnnnnnnnnnnnnnnnnnnnnnnnnacagctgcgatccttcctcaggcatggggaaccaggacccctatatctgcttcgcatcccccaggatctgcagtctgcactgggaccagagcatggtgctcgccttcaccctcagcatcctgggctgctccactctgcttctggctgctgcgagtaagcagcamggtaaggcaccacccgcaactgccttccatacccctcctctgcctcctctccttgcttctctggctttccccagtgcagggcaggcagatccctgggaacagggggatgtgggcgtgccagatcctgagcatcacagaggtgatgtccttcagttgcaccaaggaagggtcaggttggacgttgggagaaatttcttctccagaagagcggtgatgcagtggcacaggctgtcctgggaggtgctggggtcacagaactgtggggacgtggcactgagggacacggtcagtgggcacgg

SEQ ID NO: 76780 - DNA, 600 bp, Chicken  19866894364560_1
cagactttataacgtgctctaagttaagaaaaaaaaagtttgtttcaagcaaaaattcataaacatcacttaccttgatcaacagagatatttgtgtctgaaactgtgtaaagtcagtaacagtttaaagacagaaactatatgggcataactgagtgagtttgccttgaatttactgttgtcttatcagggcataaacatatacaaacttgtgtaaacaaagacaaaagtaaacaaaaacaaaggttctacatgcaccaaatgtttgttttctcaggactcatcattatcatcatcaastgaatatcaaaaagggacagtacttccatgcattgtgggccttctagtggctcttcctttatttaattctttagtatctaatcaaacgttaagcttctactgtaattttctctcattaatactgttgtggaaatgataagtcatggcttgaaccagcgattgagtacctgggggtgaaggcagggccaacccaggggagcttaaatgcatgcagtgcacctgagtgaatgcaatgggtggagtcacgatccacccctttccagacctcatttaaggcctggcagcagaggtgaggctatc

SEQ ID NO: 76781 - DNA, 600 bp, Chicken  19866894364561_1
tccatcacaagttgtgctcatgactcaaaattataccttctccctaagaggagaatgtcaccgtgtgttcctctagatggaggtattgataaacacctcccaaaaaccaaactgcgtgtgttgcaagcaggtcaaggagcagagcatcccaagtggcaaaagagacacctttggaaaagggctattcctacaataagaaagtttgtgtaaatcctgaatgctaaaagatttctatttcctgatgtttcgtttatctatagctatccaataggaaaaaaataaggggggaaatacgccacrgagttcctaatcatcagaaaggtgcctctgaaaggaaaagatgtgggatgaccacagaaagcagtaaacttagagaacgttatgcctgaagagtggaaattccatagcagtgctgatttccctcacctggaatattagctcagtgtcactcaaggaacacttccctactgcagaagagtttaaatctggaggaacctctgaggtcaatagagttgaaccagagcactggggaaggctttgcccatggtaaatgaagccagtggaactcctcgtagagtaagtgctggtgttgggccctcc

SEQ ID NO: 76782 - DNA, 600 bp, Chicken  19866894364566_1
gtgctggaggccagatgatgaagttcaggtcctcatcatcatcccacgcagcaaccttgacctcttccatgaccctcctgcagagagggcagctctcctgctgcttgccccaccgcagaatgcagccgaggcagaactcgtgatggcatggcaccacataggcaatgtccttgctcacatcacggcagatgggacatacccattcctcctctgctgccatgcttctcactctgtggcctgctggggagtgaagatgaagagctgctcctcttttgcagcaccacaggggtaaatgttgcrcactgcaaagatagaggccacggtcagtcagtgtcccagggacaggggacagaaaaayccatgtccctcagcaggacaccctctaggccctattctgaggcccgcccatgctctgtgccttcagaggacccttcaagctgtggccctggccctggcagctccccatctctcagtactcgctccattgccaccctgagggacatgttcctacccagctcacctctgctgctgtgtgtgctgagccaggcagaccagggaaatgcaggtgatggctgtagggacaggcagtgagagtcactg

SEQ ID NO: 76783 - DNA, 600 bp, Chicken  19866894364566_2
gacctcttccatgaccctcctgcagagagggcagctctcctgctgcttgccccaccgcagaatgcagccgaggcagaactcgtgatggcatggcaccacataggcaatgtccttgctcacatcacggcagatgggacatacccattcctcctctgctgccatgcttctcactctgtggcctgctggggagtgaagatgaagagctgctcctcttttgcagcaccacaggggtaaatgttgcrcactgcaaagatagaggccacggtcagtcagtgtcccagggacaggggacagaaaaayccatgtccctcagcaggacaccctctaggccctattctgaggcccgcccatgctctgtgccttcagaggacccttcaagctgtggccctggccctggcagctccccatctctcagtactcgctccattgccaccctgagggacatgttcctacccagctcacctctgctgctgtgtgtgctgagccaggcagaccagggaaatgcaggtgatggctgtagggacaggcagtgagagtcactgccagcagtgcccaaagcacagcccagcacccaagacaaattctcactccacctccaac

SEQ ID NO: 76784 - DNA, 599 bp, Chicken  19866894364573_1
  misc_feature (1)..(13): n is any nucleotide
nnnnnnnnnnnnnagcttctcttcagggaaaaaacatgccgttacctctcatttgaggggttaacttggcaaatgtctgagatattgaatgtagagcctgaacttccaggacacactcacgcaaaatgggtccagaaatgtcaatgccggtgaggaccatggaaatgagaggtggttgagactgaaggagacatggagcaggttttgcagtaccagaagcaagtgaaaaaaagccctcagggaaggatggatataaagacctttgaagcaggaggagctccaggagcgtggtctggggtyggctgcgtggctgtacagcagagctctgtgttgcagagcattatatttgaagctgccaatattaattagaaaggtcggggtttcaaattaggtagcatttagagcagaccgtaaaactcgcttttctcaaatatatctgctcaaatcctctttaaatcagcagrctgagctagcttgtctggcttgaaataacagagcggggagcactcagtaccactaatgccgatatttattaattcctggaatactggggaggctctggaggatgagaaaagagctaatgtgcaaatatttaaaaa

SEQ ID NO: 76785 - DNA, 600 bp, Chicken  19866894364573_2
atgagaggtggttgagactgaaggagacatggagcaggttttgcagtaccagaagcaagtgaaaaaaagccctcagggaaggatggatataaagacctttgaagcaggaggagctccaggagcgtggtctggggtyggctgcgtggctgtacagcagagctctgtgttgcagagcattatatttgaagctgccaatattaattagaaaggtcggggtttcaaattaggtagcatttagagcagaccgtaaaactcgcttttctcaaatatatctgctcaaatcctctttaaatcagcagrctgagctagcttgtctggcttgaaataacagagcggggagcactcagtaccactaatgccgatatttattaattcctggaatactggggaggctctggaggatgagaaaagagctaatgtgcaaatatttaaaaagggaaacagaacagcccaggtaattacagccctgtcaatccgccatcaattctcaacaacatgacggagtggcagatccaggcctcaattaataaagaattaagggaaggtaatataattaatgccaatcaacatgggctgatggaaaacaaatcttgtcaaayg

SEQ ID NO: 76786 - DNA, 600 bp, Chicken  19866894364573_3
rctgagctagcttgtctggcttgaaataacagagcggggagcactcagtaccactaatgccgatatttattaattcctggaatactggggaggctctggaggatgagaaaagagctaatgtgcaaatatttaaaaagggaaacagaacagcccaggtaattacagccctgtcaatccgccatcaattctcaacaacatgacggagtggcagatccaggcctcaattaataaagaattaagggaaggtaatataattaatgccaatcaacatgggctgatggaaaacaaatcttgtcaaaygaacttgatatcttttttgatgagattacaggtttgggtgctaaaggtagcgatgttgacataatatacttaggcatctgcaagacatttgacttrgaagcacgaagtgtgttgagaaagttgaacagtgcraaatcagtgtgatatgagtttgacagatcagtttgtcattctgccttcccagggtttgttgtgtttttaccattgaaagcattacakaattgccagtggagtgtgtagatgatgcaacaggtaggcaagtaatgatggaggtgcagaggtttttgcagattctggtaa

SEQ ID NO: 76787 - DNA, 600 bp, Chicken  19866894364573_4
tggaggatgagaaaagagctaatgtgcaaatatttaaaaagggaaacagaacagcccaggtaattacagccctgtcaatccgccatcaattctcaacaacatgacggagtggcagatccaggcctcaattaataaagaattaagggaaggtaatataattaatgccaatcaacatgggctgatggaaaacaaatcttgtcaaaygaacttgatatcttttttgatgagattacaggtttgggtgctaaaggtagcgatgttgacataatatacttaggcatctgcaagacatttgacttrgaagcacgaagtgtgttgagaaagttgaacagtgcraaatcagtgtgatatgagtttgacagatcagtttgtcattctgccttcccagggtttgttgtgtttttaccattgaaagcattacakaattgccagtggagtgtgtagatgatgcaacaggtaggcaagtaatgatggaggtgcagaggtttttgcagattctggtaaactaaccacraagagttaatatgcactggggagccaacactgtcctacctgagggagtaaagaagcatttggagatgaggacccagatggcttctg

SEQ ID NO: 76788 - DNA, 600 bp, Chicken  19866894364573_5
aaaagggaaacagaacagcccaggtaattacagccctgtcaatccgccatcaattctcaacaacatgacggagtggcagatccaggcctcaattaataaagaattaagggaaggtaatataattaatgccaatcaacatgggctgatggaaaacaaatcttgtcaaaygaacttgatatcttttttgatgagattacaggtttgggtgctaaaggtagcgatgttgacataatatacttaggcatctgcaagacatttgacttrgaagcacgaagtgtgttgagaaagttgaacagtgcraaatcagtgtgatatgagtttgacagatcagtttgtcattctgccttcccagggtttgttgtgtttttaccattgaaagcattacakaattgccagtggagtgtgtagatgatgcaacaggtaggcaagtaatgatggaggtgcagaggtttttgcagattctggtaaactaaccacraagagttaatatgcactggggagccaacactgtcctacctgagggagtaaagaagcatttggagatgaggacccagatggcttctggaaagggatgggagggatgggaacacccatgcttca

SEQ ID NO: 76789 - DNA, 600 bp, Chicken  19866894364573_6
ctcaattaataaagaattaagggaaggtaatataattaatgccaatcaacatgggctgatggaaaacaaatcttgtcaaaygaacttgatatcttttttgatgagattacaggtttgggtgctaaaggtagcgatgttgacataatatacttaggcatctgcaagacatttgacttrgaagcacgaagtgtgttgagaaagttgaacagtgcraaatcagtgtgatatgagtttgacagatcagtttgtcattctgccttcccagggtttgttgtgtttttaccattgaaagcattacakaattgccagtggagtgtgtagatgatgcaacaggtaggcaagtaatgatggaggtgcagaggtttttgcagattctggtaaactaaccacraagagttaatatgcactggggagccaacactgtcctacctgagggagtaaagaagcatttggagatgaggacccagatggcttctggaaagggatgggagggatgggaacacccatgcttcagtgtgagtgatgaagaactgcaattttgatgcggttcccaaaagcttgtacgtgcccaatcccacaagctggcagcagcaggcacct

SEQ ID NO: 76790 - DNA, 600 bp, Chicken  19866894364573_7
tcttttttgatgagattacaggtttgggtgctaaaggtagcgatgttgacataatatacttaggcatctgcaagacatttgacttrgaagcacgaagtgtgttgagaaagttgaacagtgcraaatcagtgtgatatgagtttgacagatcagtttgtcattctgccttcccagggtttgttgtgtttttaccattgaaagcattacakaattgccagtggagtgtgtagatgatgcaacaggtaggcaagtaatgatggaggtgcagaggtttttgcagattctggtaaactaaccacraagagttaatatgcactggggagccaacactgtcctacctgagggagtaaagaagcatttggagatgaggacccagatggcttctggaaagggatgggagggatgggaacacccatgcttcagtgtgagtgatgaagaactgcaattttgatgcggttcccaaaagcttgtacgtgcccaatcccacaagctggcagcagcaggcacctgatccaaggggatgctcagccccagcacccagggcaggctcagccatgggcaggaccccctacatgcacagagccaggtgagaggggcccc

SEQ ID NO: 76791 - DNA, 461 bp, Chicken  19866894364577_1
tctgcactgagagggtggttaagcattgaagctgctcagggaggtggtggagtccccatccgtgcaggtatttgagagaggtgtggacatggcactaaggaacgtggtttagcatcagggcttggtaggtcaggttgatagctggactttgatgattttgttgaaaatcttttccaacttagattttcctgtgattttataaatgaattacttattttggttcctgttcatcctccaagctaacttttctgtctttttacttacaggatgaatacaacaaccacactggagctgacttarttggaagaataatagcaaaaattaagagccccaatgaagatgatacagagatcccacagtttcaggggaagatcagtacaattgagttcccatttgacagaggatcagctgaaattgtaagtgtgaatgaaatgcacagttccacgagctacaaatctatt

SEQ ID NO: 76792 - DNA, 600 bp, Chicken  19866894364580_1
gaaataccgagtctgaaatatgaaagctggagctgcgggagcgaggagccgcttctccatcctcgcgcgctgcagtgtgagtgcatgctgtgcgttgcctggatgcacaccgcgacgtgcagccgctgccagagccctgggggtgaggctgcagccaccgccccatcccgagccaggcgtttccgtgtgctttggtgctggggaggagcggggcgcgcctggcccgcatgcatggctgtgttttaatcccgtgagatgtaaatccgagcggtgcacggaaccggttcccgtcgcggggcyggatccggtggcaccccaatggggagagccgggaggtggcacaacccgagtgctgygtgtcctctggatggtggggaacyctgtgtctgcaggaactgaacgtgcagcccacgatcctacagtgagccctctgcagagcaggggcagctgcagcttccagcgcctcccagtgtgagacgccgggctggcagtgtgagggcagcgggggtcactgagcctgggactgctgtgctttacactgtgggctatacagggtgtatgtgtgtataaatatgtgtgtaacaacgcctgctggaagga

SEQ ID NO: 76793 - DNA, 600 bp, Chicken  19866894364580_2
ccatcctcgcgcgctgcagtgtgagtgcatgctgtgcgttgcctggatgcacaccgcgacgtgcagccgctgccagagccctgggggtgaggctgcagccaccgccccatcccgagccaggcgtttccgtgtgctttggtgctggggaggagcggggcgcgcctggcccgcatgcatggctgtgttttaatcccgtgagatgtaaatccgagcggtgcacggaaccggttcccgtcgcggggcyggatccggtggcaccccaatggggagagccgggaggtggcacaacccgagtgctgygtgtcctctggatggtggggaacyctgtgtctgcaggaactgaacgtgcagcccacgatcctacagtgagccctctgcagagcaggggcagctgcagcttccagcgcctcccagtgtgagacgccgggctggcagtgtgagggcagcgggggtcactgagcctgggactgctgtgctttacactgtgggctatacagggtgtatgtgtgtataaatatgtgtgtaacaacgcctgctggaaggaactgaggaagctgagatttgcataggagccgtgcgcccgcaccgcaggcagcccct

SEQ ID NO: 76794 - DNA, 600 bp, Chicken  19866894364580_3
gtgcatgctgtgcgttgcctggatgcacaccgcgacgtgcagccgctgccagagccctgggggtgaggctgcagccaccgccccatcccgagccaggcgtttccgtgtgctttggtgctggggaggagcggggcgcgcctggcccgcatgcatggctgtgttttaatcccgtgagatgtaaatccgagcggtgcacggaaccggttcccgtcgcggggcyggatccggtggcaccccaatggggagagccgggaggtggcacaacccgagtgctgygtgtcctctggatggtggggaacyctgtgtctgcaggaactgaacgtgcagcccacgatcctacagtgagccctctgcagagcaggggcagctgcagcttccagcgcctcccagtgtgagacgccgggctggcagtgtgagggcagcgggggtcactgagcctgggactgctgtgctttacactgtgggctatacagggtgtatgtgtgtataaatatgtgtgtaacaacgcctgctggaaggaactgaggaagctgagatttgcataggagccgtgcgcccgcaccgcaggcagcccctggggatgctgagcacagacagaac

SEQ ID NO: 76795 - DNA, 600 bp, Chicken  19866894364580_4
agcgcctcccagtgtgagacgccgggctggcagtgtgagggcagcgggggtcactgagcctgggactgctgtgctttacactgtgggctatacagggtgtatgtgtgtataaatatgtgtgtaacaacgcctgctggaaggaactgaggaagctgagatttgcataggagccgtgcgcccgcaccgcaggcagcccctggggatgctgagcacagacagaacccggccctgggtttgggtgccgggcccaggaggaggcagggctgagtaattcagaaaccccaaccccgggtgtgacaygggtacacctggggttggggagcggagggcagaagtggtgggtggctgtgcagaaacgtcccacccgtgtcccttcctgtgtccccatcgcttttactaccagatctcgggcgaagttcaacatccctgtgtgggtgtgcggctgtcacacctcactgcaaggctgtgacatcccacagctgtcccctctgctgtccctgggcatgggctggatcctgggcaragctccctccttcagctgctccaggtcaggggttttcccatcctgaacctgacccatcttccccaggcaggatttcc

SEQ ID NO: 76796 - DNA, 600 bp, Chicken  19866894364580_5
cggccctgggtttgggtgccgggcccaggaggaggcagggctgagtaattcagaaaccccaaccccgggtgtgacaygggtacacctggggttggggagcggagggcagaagtggtgggtggctgtgcagaaacgtcccacccgtgtcccttcctgtgtccccatcgcttttactaccagatctcgggcgaagttcaacatccctgtgtgggtgtgcggctgtcacacctcactgcaaggctgtgacatcccacagctgtcccctctgctgtccctgggcatgggctggatcctgggcaragctccctccttcagctgctccaggtcaggggttttcccatcctgaacctgacccatcttccccaggcaggatttcctcccgagggtggaaatgcgtagcaaaatgcttgaagagcatttggcatcagaccatttcacatcctgcctcctccaaagagctcgcgctgcgccgggctctgctctgctattaataggagacgcatgggcctaaagaggaagaaactcctcgtgctgaaaggcaacaggttgggagcaaatggcgttgtttgttttcagggcgtttgctgggctcggcgtgtg

SEQ ID NO: 76797 - DNA, 600 bp, Chicken  19866894364584_1
gatgcttgtggatatcacatgatggaggcaggctctggtgcagagcacttcctgcttccaggtcaggtccagtgattggccttgtccacacagtggaggaaaactccagcagcctgtgaagtagtaatggcagtactgcagccacatagacttggagaacttgtaggaaaataaattacctcatgccaataaataatggctgggaaaccgatctgtccttctgaaacacaagccttagtgtgctgcttttggttttgctgtgtgagcagagtcctctagtggaggcatgctgtagtcccrcatctacagctggcaaagctgcagaatctccaactggtacattaagtgaacagaagcacttttctgttgscagaactgtgccataactatgtctctcccagagttttaccaacagctytgtcaaataaagtctgcaaccattccgtgctccttgctgagaccactgtggcagccgaccttttagtacaggccagattcttctgtcgttaagtaacttaagtcctgcatttgtaggatgtgagggcctgtgtttgtgctagttgatgaattctttcctccttcacttaatacgtttgagtg

SEQ ID NO: 76798 - DNA, 553 bp, Chicken  19866894364584_2
agtgattggccttgtccacacagtggaggaaaactccagcagcctgtgaagtagtaatggcagtactgcagccacatagacttggagaacttgtaggaaaataaattacctcatgccaataaataatggctgggaaaccgatctgtccttctgaaacacaagccttagtgtgctgcttttggttttgctgtgtgagcagagtcctctagtggaggcatgctgtagtcccrcatctacagctggcaaagctgcagaatctccaactggtacattaagtgaacagaagcacttttctgttgscagaactgtgccataactatgtctctcccagagttttaccaacagctytgtcaaataaagtctgcaaccattccgtgctccttgctgagaccactgtggcagccgaccttttagtacaggccagattcttctgtcgttaagtaacttaagtcctgcatttgtaggatgtgagggcctgtgtttgtgctagttgatgaattctttcctccttcacttaatacgtttgagtgctatcctatgattgccttgcttc

SEQ ID NO: 76799 - DNA, 505 bp, Chicken  19866894364584_3
aagtagtaatggcagtactgcagccacatagacttggagaacttgtaggaaaataaattacctcatgccaataaataatggctgggaaaccgatctgtccttctgaaacacaagccttagtgtgctgcttttggttttgctgtgtgagcagagtcctctagtggaggcatgctgtagtcccrcatctacagctggcaaagctgcagaatctccaactggtacattaagtgaacagaagcacttttctgttgscagaactgtgccataactatgtctctcccagagttttaccaacagctytgtcaaataaagtctgcaaccattccgtgctccttgctgagaccactgtggcagccgaccttttagtacaggccagattcttctgtcgttaagtaacttaagtcctgcatttgtaggatgtgagggcctgtgtttgtgctagttgatgaattctttcctccttcacttaatacgtttgagtgctatcctatgattgccttgcttc

SEQ ID NO: 76800 - DNA, 600 bp, Chicken  19866894364591_1
tacagggatgtcacctcactgagcatgctgacagcagcaccagtggtatggcatctgctgtgttatgtcctggaatcccactgttcttgcttttagcctacgcatgtatgcaacttctctggcaggtttcagtgtccttggctatttcactctgcttttatttgtgctttcagtggttttcattagctagcatatgtatactattaagtatttaactgaaaaatcagtcttcacaaaaccaatgtttatagtagtaacagctaaatctaatacaggcagacagagtacgactcaagccaytgggccaggagctaatataagacatagctgagctgtgttgaatcttttctccaggctatcaragatgactctcacctttgttaatgattccccgaatgtgtgttaatgatctctttccagctcaaatgatcagcctatttcccatgaggttaattgctttctttgtgaataaactgaacgtcaaacaaaatggaaaacaatcagtggtaacaatgaatctgtctttcacaaaagagctccaagtatcaactaatagttacaagaatcacatctctttcattaaaaaaaactgggagcttt

SEQ ID NO: 76801 - DNA, 600 bp, Chicken  19866894364591_2
ttatgtcctggaatcccactgttcttgcttttagcctacgcatgtatgcaacttctctggcaggtttcagtgtccttggctatttcactctgcttttatttgtgctttcagtggttttcattagctagcatatgtatactattaagtatttaactgaaaaatcagtcttcacaaaaccaatgtttatagtagtaacagctaaatctaatacaggcagacagagtacgactcaagccaytgggccaggagctaatataagacatagctgagctgtgttgaatcttttctccaggctatcaragatgactctcacctttgttaatgattccccgaatgtgtgttaatgatctctttccagctcaaatgatcagcctatttcccatgaggttaattgctttctttgtgaataaactgaacgtcaaacaaaatggaaaacaatcagtggtaacaatgaatctgtctttcacaaaagagctccaagtatcaactaatagttacaagaatcacatctctttcattaaaaaaaactgggagctttcactgtrtgctcgacttttacagccttggaggatgcacagctccatccctcccctttgcctc

SEQ ID NO: 76802 - DNA, 600 bp, Chicken  19866894364591_3
ggagctaatataagacatagctgagctgtgttgaatcttttctccaggctatcaragatgactctcacctttgttaatgattccccgaatgtgtgttaatgatctctttccagctcaaatgatcagcctatttcccatgaggttaattgctttctttgtgaataaactgaacgtcaaacaaaatggaaaacaatcagtggtaacaatgaatctgtctttcacaaaagagctccaagtatcaactaatagttacaagaatcacatctctttcattaaaaaaaactgggagctttcactgtrtgctcgacttttacagccttggaggatgcacagctccatccctcccctttgcctctgcatgtctcagcatggatgctcagccacagctgagccacttctggcagccatggcagtgagaatgaggtgaggacaggtgaagggcctctggcactcacatggccgtgctgccagggctgcatgtcctgcagtggatggacaaggttttggaaagcattctgacagtgtgctgcagcctcttggaaaacgttttcctgatgttctgagcagcraggcaaagaaacgctaatactcatttcaggg

SEQ ID NO: 76803 - DNA, 590 bp, Chicken  19866894364591_4
tcattaaaaaaaactgggagctttcactgtrtgctcgacttttacagccttggaggatgcacagctccatccctcccctttgcctctgcatgtctcagcatggatgctcagccacagctgagccacttctggcagccatggcagtgagaatgaggtgaggacaggtgaagggcctctggcactcacatggccgtgctgccagggctgcatgtcctgcagtggatggacaaggttttggaaagcattctgacagtgtgctgcagcctcttggaaaacgttttcctgatgttctgagcagcraggcaaagaaacgctaatactcatttcagggcttgacaagcctcatttcataagagttttctgcatctgccagatttacagtagctgctcaggagctacttatgcaggcggtgtttggtctctgaataccttccaggcagtgtgttatcatgtatttcgtttgtatagcctgctttttatacagtgggtattcagtagatttgctgaatacagtcaagctgtctttcatcaaaaagagggacaaatatcaaagtactatttgtcttttcagagtccttccaggctaaata

SEQ ID NO: 76804 - DNA, 600 bp, Chicken  19866894364604_1
ttatatgtcgcaaacgtattacatcattcattacaattcatctcagcatcatagaatctttagagttggaagggacctttaaagatcctatagttcaactcccctgcaatgaacagggacatctacagctagatgaggttgctcagtgtcctgtccagcctgaccttgagtgtctctgggcgtggggcatccaccacctttctgggcaatctgtcccagtgcctcaccacccttattgtgaaaaaacttcttccttatatccagtctaaatctcctctctcttagtttgaaaccatttcygttgtcctatcacaacagactctgctaaagagtctgtcctcttctttcttatcgcctccccatagacttctgttccccaggctgaacacccccagctctctcagcctatccttgcaggagagatgttccacctcttggagcatattggtggccctcctctgggcatgttctaacaggtccacacttctcctgtactgacaactccacatttggatgcagtactccaggtgaggtctcaccagcacagagtagaggggcaggatcaactgttgttattagcttgcctgtgtttctcactag

SEQ ID NO: 76805 - DNA, 600 bp, Chicken  19866894364613_1
gtgaccttgttttgcttactttatatagatttgtaattaaacaagaatgatataacacaagagctttcatgtcaggaaaatagatggatttcagtcacagctgatatagatatgaatgagtctatgtgttctctaataatgcatttgagctttgtcctgttcattccatgttcactgagggaatccccactgcttgcctgggggctcctgtttgagagaatgttgggtatcttcgatcaaatcaatggggtatcactttcccttctaatgtagtgacagtatagggaattaagagcatgktatgttctgactaacttagaaagattaggggttttgtactggatcatgacatttgcctgcaagaaaagtgtgttgcttcctgctctgaattagaccttattctctgcagggtaacctccatcttgtgttaatgtcatttgagtattttagagaaattactaacacttgttggcttgccacctcttagatgttgtagcagcatgtcctgtaataggctgtttggaagcacatcctggtattttggcaccgctcctgtcaccggtggcataggtgtggrtgttatttacgggtgttaaagga

SEQ ID NO: 76806 - DNA, 600 bp, Chicken  19866894364613_2
agtatagggaattaagagcatgktatgttctgactaacttagaaagattaggggttttgtactggatcatgacatttgcctgcaagaaaagtgtgttgcttcctgctctgaattagaccttattctctgcagggtaacctccatcttgtgttaatgtcatttgagtattttagagaaattactaacacttgttggcttgccacctcttagatgttgtagcagcatgtcctgtaataggctgtttggaagcacatcctggtattttggcaccgctcctgtcaccggtggcataggtgtggrtgttatttacgggtgttaaaggatgcttccttacaattacacgtaatgtacttgcttagtgtctggcaccagcaagtatagtttgtttagacagtaactctttaggctcaagtagcagactgggcatggagatcctcagctgatccctgcttaggattgtgtgggtgtcataacattgcccaactcatggcacctcttagttagcaaatctaatctccactggccccttctggagaaggagatgtgtttagcgaggtgattcaaagagcatgacaggctccatgctgagttgttcctcag

SEQ ID NO: 76807 - DNA, 599 bp, Chicken  19866894364637_1
  misc_feature (1)..(125): n is any nucleotide
nnnnnnnnnnnnnnnnnnnnnnnnnnnnnnnnnnnnnnnnnnnnnnnnnnnnnnnnnnnnnnnnnnnnnnnnnnnnnnnnnnnnnnnnnnnnnnnnnnnnnnnnnnnnnnnnnnnnnnnnnnnnncaggccattctatgattctatgattctgtaagcttcttgggttttatctcccaaagtatttctgggtggttttggttagttgttggttggtaagtttggcaaatgcaatggtttagatgtatcttcatatctactgttcccaactgctgaagaaatttctcaagctcaaattttycatgctaagacaccactcaaccagctcttcttctccagatcaccctcagagcagtgttgggatggatgaatgctgtgagcagccaggctcagggctctgtttctcctgtcctgagtgctgcactgagagggggaatttcaatcccaccaaaatgctctatgttctaccacccaatagaccaatgggatgcagttgtacccctgccactacagtcctgtttccatgccctgttgagcagacggctgtggaayactscctaaggaaccgcctgcaatgtcaaaacacagcacatcctccat

SEQ ID NO: 76808 - DNA, 600 bp, Chicken  19866894364637_2
atatctactgttcccaactgctgaagaaatttctcaagctcaaattttycatgctaagacaccactcaaccagctcttcttctccagatcaccctcagagcagtgttgggatggatgaatgctgtgagcagccaggctcagggctctgtttctcctgtcctgagtgctgcactgagagggggaatttcaatcccaccaaaatgctctatgttctaccacccaatagaccaatgggatgcagttgtacccctgccactacagtcctgtttccatgccctgttgagcagacggctgtggaayactscctaaggaaccgcctgcaatgtcaaaacacagcacatcctccatgttccctgatttcaatgcctgggacacacaacagcgtacttccactcacactggagctttcatccccttggactctctctgcctcttcgrgctccaccaaactggctcagatttgaaatcttgattctcctgctgtggaaagcctatctctgctttccacaccttctagttctgctatcaaaagacggcttcctgcaaaaggccagaagtgaaatgaaaaatttcctccctgaagcacatactgatatgctg

SEQ ID NO: 76809 - DNA, 600 bp, Chicken  19866894364637_3
ctactgttcccaactgctgaagaaatttctcaagctcaaattttycatgctaagacaccactcaaccagctcttcttctccagatcaccctcagagcagtgttgggatggatgaatgctgtgagcagccaggctcagggctctgtttctcctgtcctgagtgctgcactgagagggggaatttcaatcccaccaaaatgctctatgttctaccacccaatagaccaatgggatgcagttgtacccctgccactacagtcctgtttccatgccctgttgagcagacggctgtggaayactscctaaggaaccgcctgcaatgtcaaaacacagcacatcctccatgttccctgatttcaatgcctgggacacacaacagcgtacttccactcacactggagctttcatccccttggactctctctgcctcttcgrgctccaccaaactggctcagatttgaaatcttgattctcctgctgtggaaagcctatctctgctttccacaccttctagttctgctatcaaaagacggcttcctgcaaaaggccagaagtgaaatgaaaaatttcctccctgaagcacatactgatatgctgctgc

SEQ ID NO: 76810 - DNA, 471 bp, Chicken  19866894364637_4
cagggctctgtttctcctgtcctgagtgctgcactgagagggggaatttcaatcccaccaaaatgctctatgttctaccacccaatagaccaatgggatgcagttgtacccctgccactacagtcctgtttccatgccctgttgagcagacggctgtggaayactscctaaggaaccgcctgcaatgtcaaaacacagcacatcctccatgttccctgatttcaatgcctgggacacacaacagcgtacttccactcacactggagctttcatccccttggactctctctgcctcttcgrgctccaccaaactggctcagatttgaaatcttgattctcctgctgtggaaagcctatctctgctttccacaccttctagttctgctatcaaaagacggcttcctgcaaaaggccagaagtgaaatgaaaaatttcctccctgaagcacatactgatatgctgctgctgctg

SEQ ID NO: 76811 - DNA, 599 bp, Chicken  19866894364639_1
  misc_feature (1)..(86): n is any nucleotide
nnnnnnnnnnnnnnnnnnnnnnnnnnnnnnnnnnnnnnnnnnnnnnnnnnnnnnnnnnnnnnnnnnnnnnnnnnnnnnnnnnnnnnctgcactggaggtaaatatatgcacagtgtcgtccccccccttctcctgtgcagactgtaaggctggcttgtagttcataaatgatgacttagcagcaaagcatggtgacatttaactaagatggaatttaacaaggcagctctttgttgttgttgcttctgttctaaagttctagtcattgtattattcatgaacttgataaataattcttcrcagttagaatgcrkmagtctgtcagttatggtttcctttggggtgacaaaattgaaacagcaaatgctgttaccatctttcaaaatccttctaaaatgccctgtaagatttttttcttcctggatcctgacctactactatgatatgatactgttgtgatatcacctgaattacccttcattcttttttgactgctagacaaaattaacrgtgtttactttttgaaacaagctttataacgaggaactgctagtctttcagcattatccatttatgaaaacattcagctcatcatctgc

SEQ ID NO: 76812 - DNA, 599 bp, Chicken  19866894364639_2
  misc_feature (1)..(73): n is any nucleotide
nnnnnnnnnnnnnnnnnnnnnnnnnnnnnnnnnnnnnnnnnnnnnnnnnnnnnnnnnnnnnnnnnnnnnnnnnctgcactggaggtaaatatatgcacagtgtcgtccccccccttctcctgtgcagactgtaaggctggcttgtagttcataaatgatgacttagcagcaaagcatggtgacatttaactaagatggaatttaacaaggcagctctttgttgttgttgcttctgttctaaagttctagtcattgtattattcatgaacttgataaataattcttcrcagttagaatgcrkmagtctgtcagttatggtttcctttggggtgacaaaattgaaacagcaaatgctgttaccatctttcaaaatccttctaaaatgccctgtaagatttttttcttcctggatcctgacctactactatgatatgatactgttgtgatatcacctgaattacccttcattcttttttgactgctagacaaaattaacrgtgtttactttttgaaacaagctttataacgaggaactgctagtctttcagcattatccatttatgaaaacattcagctcatcatctgctactacttgtatt

SEQ ID NO: 76813 - DNA, 599 bp, Chicken  19866894364639_3
  misc_feature (1)..(72): n is any nucleotide
nnnnnnnnnnnnnnnnnnnnnnnnnnnnnnnnnnnnnnnnnnnnnnnnnnnnnnnnnnnnnnnnnnnnnnnnctgcactggaggtaaatatatgcacagtgtcgtccccccccttctcctgtgcagactgtaaggctggcttgtagttcataaatgatgacttagcagcaaagcatggtgacatttaactaagatggaatttaacaaggcagctctttgttgttgttgcttctgttctaaagttctagtcattgtattattcatgaacttgataaataattcttcrcagttagaatgcrkmagtctgtcagttatggtttcctttggggtgacaaaattgaaacagcaaatgctgttaccatctttcaaaatccttctaaaatgccctgtaagatttttttcttcctggatcctgacctactactatgatatgatactgttgtgatatcacctgaattacccttcattcttttttgactgctagacaaaattaacrgtgtttactttttgaaacaagctttataacgaggaactgctagtctttcagcattatccatttatgaaaacattcagctcatcatctgctactacttgtatta

SEQ ID NO: 76814 - DNA, 599 bp, Chicken  19866894364639_4
  misc_feature (1)..(71): n is any nucleotide
nnnnnnnnnnnnnnnnnnnnnnnnnnnnnnnnnnnnnnnnnnnnnnnnnnnnnnnnnnnnnnnnnnnnnnnctgcactggaggtaaatatatgcacagtgtcgtccccccccttctcctgtgcagactgtaaggctggcttgtagttcataaatgatgacttagcagcaaagcatggtgacatttaactaagatggaatttaacaaggcagctctttgttgttgttgcttctgttctaaagttctagtcattgtattattcatgaacttgataaataattcttcrcagttagaatgcrkmagtctgtcagttatggtttcctttggggtgacaaaattgaaacagcaaatgctgttaccatctttcaaaatccttctaaaatgccctgtaagatttttttcttcctggatcctgacctactactatgatatgatactgttgtgatatcacctgaattacccttcattcttttttgactgctagacaaaattaacrgtgtttactttttgaaacaagctttataacgaggaactgctagtctttcagcattatccatttatgaaaacattcagctcatcatctgctactacttgtattas

SEQ ID NO: 76815 - DNA, 600 bp, Chicken  19866894364639_5
gaatttaacaaggcagctctttgttgttgttgcttctgttctaaagttctagtcattgtattattcatgaacttgataaataattcttcrcagttagaatgcrkmagtctgtcagttatggtttcctttggggtgacaaaattgaaacagcaaatgctgttaccatctttcaaaatccttctaaaatgccctgtaagatttttttcttcctggatcctgacctactactatgatatgatactgttgtgatatcacctgaattacccttcattcttttttgactgctagacaaaattaacrgtgtttactttttgaaacaagctttataacgaggaactgctagtctttcagcattatccatttatgaaaacattcagctcatcatctgctactacttgtattastgttggaaattcacatgcagtcaacgcagtacaagaacgatgcacttgatgcttattgaggccagaagttagaggagcygaaggctgaacaggttytgtagattaatgttttgttttgaaaatataggcgggagtcagatatcatagacctctcttcgtttgaagcaaacctatttggaccaggaaacrttcaaaa

SEQ ID NO: 76816 - DNA, 600 bp, Chicken  19866894364639_6
magtctgtcagttatggtttcctttggggtgacaaaattgaaacagcaaatgctgttaccatctttcaaaatccttctaaaatgccctgtaagatttttttcttcctggatcctgacctactactatgatatgatactgttgtgatatcacctgaattacccttcattcttttttgactgctagacaaaattaacrgtgtttactttttgaaacaagctttataacgaggaactgctagtctttcagcattatccatttatgaaaacattcagctcatcatctgctactacttgtattastgttggaaattcacatgcagtcaacgcagtacaagaacgatgcacttgatgcttattgaggccagaagttagaggagcygaaggctgaacaggttytgtagattaatgttttgttttgaaaatataggcgggagtcagatatcatagacctctcttcgtttgaagcaaacctatttggaccaggaaacrttcaaaactacccagctatctcttttgtacatggtagtagtgaagcattctttcaccttgttcctgtttaaaaatgctgtatgcagcagctgcactgtagggaatacagtg

SEQ ID NO: 76817 - DNA, 600 bp, Chicken  19866894364639_7
aaatgccctgtaagatttttttcttcctggatcctgacctactactatgatatgatactgttgtgatatcacctgaattacccttcattcttttttgactgctagacaaaattaacrgtgtttactttttgaaacaagctttataacgaggaactgctagtctttcagcattatccatttatgaaaacattcagctcatcatctgctactacttgtattastgttggaaattcacatgcagtcaacgcagtacaagaacgatgcacttgatgcttattgaggccagaagttagaggagcygaaggctgaacaggttytgtagattaatgttttgttttgaaaatataggcgggagtcagatatcatagacctctcttcgtttgaagcaaacctatttggaccaggaaacrttcaaaactacccagctatctcttttgtacatggtagtagtgaagcattctttcaccttgttcctgtttaaaaatgctgtatgcagcagctgcactgtagggaatacagtggccttaggtaaatcagttaatcttcacctcttctgcccagcctgtatatttactataacagctattggaagatacagcg

SEQ ID NO: 76818 - DNA, 600 bp, Chicken  19866894364639_8
tttttcttcctggatcctgacctactactatgatatgatactgttgtgatatcacctgaattacccttcattcttttttgactgctagacaaaattaacrgtgtttactttttgaaacaagctttataacgaggaactgctagtctttcagcattatccatttatgaaaacattcagctcatcatctgctactacttgtattastgttggaaattcacatgcagtcaacgcagtacaagaacgatgcacttgatgcttattgaggccagaagttagaggagcygaaggctgaacaggttytgtagattaatgttttgttttgaaaatataggcgggagtcagatatcatagacctctcttcgtttgaagcaaacctatttggaccaggaaacrttcaaaactacccagctatctcttttgtacatggtagtagtgaagcattctttcaccttgttcctgtttaaaaatgctgtatgcagcagctgcactgtagggaatacagtggccttaggtaaatcagttaatcttcacctcttctgcccagcctgtatatttactataacagctattggaagatacagcgataagtcagtgtttgaa

SEQ ID NO: 76819 - DNA, 600 bp, Chicken  19866894364639_9
attaacrgtgtttactttttgaaacaagctttataacgaggaactgctagtctttcagcattatccatttatgaaaacattcagctcatcatctgctactacttgtattastgttggaaattcacatgcagtcaacgcagtacaagaacgatgcacttgatgcttattgaggccagaagttagaggagcygaaggctgaacaggttytgtagattaatgttttgttttgaaaatataggcgggagtcagatatcatagacctctcttcgtttgaagcaaacctatttggaccaggaaacrttcaaaactacccagctatctcttttgtacatggtagtagtgaagcattctttcaccttgttcctgtttaaaaatgctgtatgcagcagctgcactgtagggaatacagtggccttaggtaaatcagttaatcttcacctcttctgcccagcctgtatatttactataacagctattggaagatacagcgataagtcagtgtttgaaaaatacagatggcatagtattgcaggctgtccaagcattaagagagcttcctataacagttcagaattatccacatctttttttggatgcaac

SEQ ID NO: 76820 - DNA, 600 bp, Chicken  19866894364640_1
aaacataaaatcttttaagttcatatggaaaatatgtagatgatacaataaggccatgtatagatgtgtgaaaaaggtataaaccatggtgtctttaccacgtgtacaagaggttatccaataattataaatagctttggaatcctgccccaggaacttcagctatataacttcaactatatagcctacattagttatttctattgctattttatctcctgagtataaggagaagcttctgccatgtttcagatagtgggttgagctacataggaataatgattaagttagtggtgagarcataacatggggagtgacaccttggggtcttcagaattttgccccattattcaaaattaaatttcttacatgtccacaaaaattcaaaattttcttatttttggatggacaaggatatgcagttttcttgagacaagactgttttcaagacttgtctaattttgtgccgcacagttgtatgtcctgttctttgtttacaaactcctttttatctctagtactactaggacaattagtccttattctcttcccaaaagattagtgacattatttaaacataaagaaagctactgtgatcag

SEQ ID NO: 76821 - DNA, 600 bp, Chicken  19866894364640_2
ttacatgtccacaaaaattcaaaattttcttatttttggatggacaaggatatgcagttttcttgagacaagactgttttcaagacttgtctaattttgtgccgcacagttgtatgtcctgttctttgtttacaaactcctttttatctctagtactactaggacaattagtccttattctcttcccaaaagattagtgacattatttaaacataaagaaagctactgtgatcagtcttcaaatctgtaaatcagtctttaaatgtgagcagttctttaaatccaagccaggaacagcayatttctggtatagaaacatactattttatattaatgaaacttccatatgcagttcctacatatgctgctttacaaatggcagtaaagtttaatcaagaactaatttattttccctagcagattttcaacaaaatttcatttttaaattacttttcataaaagctacaaagaaaggcattcagatatgtcataatagttgatatatttaagtagggaaaataaaacaagaaatggaagaagcaaaaggtgagtagcatgtgatggcacaacacttacaacatgtagatgaaacttctattt

SEQ ID NO: 76822 - DNA, 600 bp, Chicken  19866894364643_1
atgacctctgagacaacaggctgcagagctttaactggccatgttctactggcttatcaaacaccagtcgccctggaccatggcttgaagatcattttgatttgccatttcctttacttgttctggggcaatttggcagggtcaagagggaaaaatggcagctctgtcccctcatctttcacatcagatggaaaactatagtagggatttgaaaagacatgtaagacttttatgatattggtgactacatgcaagtagacagaccaaaaagaaataaggcttttggtgagcaatgaaggwagtttgttttgtgacttttgttggatttctgtgagtttaagaatgaatgagttcactcaaaagcaggaaaatcagtcacagtgctttccaaggggatttctatctatctaattgaattcctactgcagccttacccaaaacagaagcatttatatggtatctctcaacacagctgtgcatttttacaaaacatataactttatatccttaagtctgtcacccctctatctaatttctttgagattggctgttgarcctcacagtaactgcagagggackgagggacacaaatacacagac

SEQ ID NO: 76823 - DNA, 600 bp, Chicken  19866894364643_2
tagacagaccaaaaagaaataaggcttttggtgagcaatgaaggwagtttgttttgtgacttttgttggatttctgtgagtttaagaatgaatgagttcactcaaaagcaggaaaatcagtcacagtgctttccaaggggatttctatctatctaattgaattcctactgcagccttacccaaaacagaagcatttatatggtatctctcaacacagctgtgcatttttacaaaacatataactttatatccttaagtctgtcacccctctatctaatttctttgagattggctgttgarcctcacagtaactgcagagggackgagggacacaaatacacagacagcaagatcttataagccttgtattcttaggaaatcaggcaaacaagacctctctggcctgggatctggcagaaagctgagtgccttggactatggtcaaactgacaacataacaaatgggaacgtttactggctgcggccatacccaagaattctgacctcactagtctggcatgtgcttctggttcagccctgttctgctaccagctttctagctctggtcactgtcacaggaattttggaacttgaaatgca

SEQ ID NO: 76824 - DNA, 600 bp, Chicken  19866894364643_3
cttttggtgagcaatgaaggwagtttgttttgtgacttttgttggatttctgtgagtttaagaatgaatgagttcactcaaaagcaggaaaatcagtcacagtgctttccaaggggatttctatctatctaattgaattcctactgcagccttacccaaaacagaagcatttatatggtatctctcaacacagctgtgcatttttacaaaacatataactttatatccttaagtctgtcacccctctatctaatttctttgagattggctgttgarcctcacagtaactgcagagggackgagggacacaaatacacagacagcaagatcttataagccttgtattcttaggaaatcaggcaaacaagacctctctggcctgggatctggcagaaagctgagtgccttggactatggtcaaactgacaacataacaaatgggaacgtttactggctgcggccatacccaagaattctgacctcactagtctggcatgtgcttctggttcagccctgttctgctaccagctttctagctctggtcactgtcacaggaattttggaacttgaaatgcaraatgctaaccaagacaaacctgt

SEQ ID NO: 76825 - DNA, 544 bp, Chicken  19866894364643_4
ctcacagtaactgcagagggackgagggacacaaatacacagacagcaagatcttataagccttgtattcttaggaaatcaggcaaacaagacctctctggcctgggatctggcagaaagctgagtgccttggactatggtcaaactgacaacataacaaatgggaacgtttactggctgcggccatacccaagaattctgacctcactagtctggcatgtgcttctggttcagccctgttctgctaccagctttctagctctggtcactgtcacaggaattttggaacttgaaatgcaraatgctaaccaagacaaacctgtcaagagctgactgttacaaaaagcagacagtagcctgtccttttctcctcctgtatattttaaatgctagagtgagctggattgttgtcagtagacaaaaagaacttactggaacagctgtataacagcaaacacgagcaacaatccagagtaaggtctatagcatatactggagctaaaacaaaaagagcgaggaatctggtaaaattttatgtaagaaa

SEQ ID NO: 76826 - DNA, 541 bp, Chicken  19866894364652_1
attctgtagatgtatttatcattttggtggtgttctgtggcattactctttactatggcaatataattagctgttacagaaagttactttagatttggacatttcatagccacttgaacttgcagtaatgtgctgtccttcccagatacacagtcccaaagcatatcatatccatggagatgcgtctgtcattgctctgacagcatgtgtctggggcaacacagtcatacatgtaaaatctacaaaatgttgtgtgtcttacagattgggttactccttagaaatcatgcagcagctctktaggtagcatcttgctactagatttggagctgtggggaaaattctagcaataagggatacatatgtgtactgttccttctgggtgctgatgatacgaactctagaaaagtgataattttaaagtttggtttccttttaggtagcttgtatttcaaggctagctgaactgtctacagatcaggtgccattgtggagggttggggctgtaatgtttcaagtttgaaatttgaatttctattta

SEQ ID NO: 76827 - DNA, 600 bp, Chicken  19866894364656_1
tgctttacaatctgttggtgtgttttgctggtccttttcctagttttctctcagggatcactatgtgtactttaatttcagaagcaaaacttgtatggttggaatgtaagcaatttccatttaccagaattcagtcaatgcttagatgccaggaattctttacttataatttgaaagttttttttgtttgtttgtttgtttgtttttactggtgaaaacattttaagcacttgtagagttcaaattatctgaagatattcttttcggggagctctgtagcagtactgttaaaagaaaaawttgactttagcaaacaattgtaaatttagactgagtctggattttacagtcttccaagtgaaaagtttgcacatgggctgggaacactgaaatgtcacaaacacagcttgtgtctagttaatgctgaaagaaagaacatggaagaacagttctggctgaacgtgccaaagcaattacttcatttgacccagtgacatctgtgcttctacctggagtgcgtagggacatgaagtttattaaagagatttaataagtggtcagggtttgctgccattatgatgcaaaatatatgtatatata

SEQ ID NO: 76828 - DNA, 600 bp, Chicken  19866894364656_2
ctgtactcaatttcttctatttataagcatgtggcataccttgaattcattttcttcactatgaagttgcttgttttaaaaagacagtacatactttcttttttttgtgtaccagcccagtctcttaagtgaaaaagaaggtaaactttgaattctgtgttgtgtcaaataacgttaaatgggtagcctcaatagcttggaatatgttgtgtggaaggagttttgtgccaggagtggggagctctggagatcgaagctggggttaaagtgtatgctgtctctttaaggaaagaaaaaagrgggaaactagaaaagattctgtcctttcacgtgttgtgtgcatgatttttcctgttacttctctcttgccctactgctgcctcatgcaatgcaggagattcaggatggacacaatggctatcattctgaagcagaagctgatcaggtggcaagttttactcacctttcgttcattaactgtgtagccgagtactgtacactagtgcagtacattgagacctcgtatttctcgtttttagaggatttgtagaaagtatttrgtgtgtttggctatgtgctaggtagggtcttcatctgatg

SEQ ID NO: 76829 - DNA, 600 bp, Chicken  19866894364656_3
ggttaaagtgtatgctgtctctttaaggaaagaaaaaagrgggaaactagaaaagattctgtcctttcacgtgttgtgtgcatgatttttcctgttacttctctcttgccctactgctgcctcatgcaatgcaggagattcaggatggacacaatggctatcattctgaagcagaagctgatcaggtggcaagttttactcacctttcgttcattaactgtgtagccgagtactgtacactagtgcagtacattgagacctcgtatttctcgtttttagaggatttgtagaaagtatttrgtgtgtttggctatgtgctaggtagggtcttcatctgatgacttgtggtccaaccattgcagctaaggccccgtccgacagcatgctgtcctttgagtttgtgagtgtcagctcattggctgcatgttatcttccttgtgattggatgctacatataaaaatctggtagttacaaagaaaataaaaacccaacatcaatttaaatgttttttagaagttacttaatacaggcttgcagtagtttttttgctttagtttggaggcaggccaatcctaccaattatttgtatgtagatcaga

SEQ ID NO: 76830 - DNA, 599 bp, Chicken  19866894364659_1
  misc_feature (1)..(177): n is any nucleotide
nnnnnnnnnnnnnnnnnnnnnnnnnnnnnnnnnnnnnnnnnnnnnnnnnnnnnnnnnnnnnnnnnnnnnnnnnnnnnnnnnnnnnnnnnnnnnnnnnnnnnnnnnnnnnnnnnnnnnnnnnnnnnnnnnnnnnnnnnnnnnnnnnnnnnnnnnnnnnnnnnnnnnnnnnnnnnnnnntaagtggctgtattttctatctttatagctgatggctgggaggagggagcctggctgtttgctgtgaaagaaggagaaaaaaaagctgcaatttgaagcaaaggctaggccatggagtacagrgagtgagaatgatgcacttagagagcacccaggcagagcctgaagcactgaacagcctgatgcctcgtggcccctcttgtactcacaggaccatgggctgttagctgtggaagtacaaagcatctagcattagtggtcagggttgctaggttgggataagttacatgagaagttttgtttctgcggaaacaaagctgttgtgtcataaatctaagcatggagaatgggtctgtctgtctttggataaaatcttaaagaaactctaagccytcctgctgctcttttccctctcattctgt

SEQ ID NO: 76831 - DNA, 600 bp, Chicken  19866894364659_2
tgaagcaaaggctaggccatggagtacagrgagtgagaatgatgcacttagagagcacccaggcagagcctgaagcactgaacagcctgatgcctcgtggcccctcttgtactcacaggaccatgggctgttagctgtggaagtacaaagcatctagcattagtggtcagggttgctaggttgggataagttacatgagaagttttgtttctgcggaaacaaagctgttgtgtcataaatctaagcatggagaatgggtctgtctgtctttggataaaatcttaaagaaactctaagccytcctgctgctcttttccctctcattctgtcttacataccattgcaggatctgcaatcttagccaactcactgtgtaatgctacaagtttgtaagcaaaggggatgagcatctatcgcccagcagcattgctcaggaatgggaagtatttcaaagtggctctttctagaagtgaagcagattccttctgtgtggatcaccactcctgctgcgtagggaaactttcctgtttccttgaagcagtgatgggaggccctgctcagggtgaggtgctcttttaagggtcctattgccctattaca

SEQ ID NO: 76832 - DNA, 599 bp, Chicken  19866894364661_1
  misc_feature (1)..(110): n is any nucleotide
nnnnnnnnnnnnnnnnnnnnnnnnnnnnnnnnnnnnnnnnnnnnnnnnnnnnnnnnnnnnnnnnnnnnnnnnnnnnnnnnnnnnnnnnnnnnnnnnnnnnnnnnnnnnnnggatgaagaggcaaaatgctgccagaagaggaatcaccactcatctagcaacttctacaggggcagcaatatgtatagatgtattttacttcgatctgttgaagcacagagacccaaccttcccaccagcagccttcattagtggtatcaactcgatcaacttggcctctcctccctgggatcatataaycactaagggtggaacggatctctaaggtcctgacccaattctccctaatacccaacctgaacccaccctggtgcaacttaagaccaaatctgcatcctggatctgggcacagcgcagagccacactcgccacaacccgctgacattggtcagcactgcccttgatgagatggaggatgacagcagctcctccggagccacactgtggtccaggcaggaacaaacactcttgcagcagtcagcatagctgagtaaatcagacatgacaataaaagtatccgggagattctctgtctggga

SEQ ID NO: 76833 - DNA, 600 bp, Chicken  19866894364661_2
cccaacctgaacccaccctggtgcaacttaagaccaaatctgcatcctggatctgggcacagcgcagagccacactcgccacaacccgctgacattggtcagcactgcccttgatgagatggaggatgacagcagctcctccggagccacactgtggtccaggcaggaacaaacactcttgcagcagtcagcatagctgagtaaatcagacatgacaataaaagtatccgggagattctctgtctgggaggcagcacaccaggcataccaggttcagctttaatttgtgagcagacccgygcgctcaggaggttatcgcataaatgccagtgtaaatgatatcaccatgggcaccaaacaggatgcttgctcacagtcctatcaaccagtacacgctgatctttggtaattccagctattaaaaacaactctgagagaaatcggacctcattttgcagacagcacgaggggtctcaacgactgcttgaagttttcccatattcagctttatcagacgatgctttttatatattcagctgctgcactgcctccaggtttattaagtttacaataaaggagaaaggatggcttttcagtttt

SEQ ID NO: 76834 - DNA, 496 bp, Chicken  19866894364661_3
tgccagtgtaaatgatatcaccatgggcaccaaacaggatgcttgctcacagtcctatcaaccagtacacgctgatctttggtaattccagctattaaaaacaactctgagagaaatcggacctcattttgcagacagcacgaggggtctcaacgactgcttgaagttttcccatattcagctttatcagacgatgctttttatatattcagctgctgcactgcctccaggtttattaagtttacaataaaggagaaaggatggcttttcagttttccccagagaccccctaggagaaarggaagcttctcaagcatcactccaagctgcaatctaggcaattataggggattcagccctagcagttggaacagaagagcttccacagcccttttccaccagcagccagctcatggatattmggaagaagtttttccacccagagggtggtgacacactgaacaggttgcccaaggaggctgtgatggatccatgg

SEQ ID NO: 76835 - DNA, 374 bp, Chicken  19866894364661_4
ctcattttgcagacagcacgaggggtctcaacgactgcttgaagttttcccatattcagctttatcagacgatgctttttatatattcagctgctgcactgcctccaggtttattaagtttacaataaaggagaaaggatggcttttcagttttccccagagaccccctaggagaaarggaagcttctcaagcatcactccaagctgcaatctaggcaattataggggattcagccctagcagttggaacagaagagcttccacagcccttttccaccagcagccagctcatggatattmggaagaagtttttccacccagagggtggtgacacactgaacaggttgcccaaggaggctgtgatggatccatgg

SEQ ID NO: 76836 - DNA, 600 bp, Chicken  19866894364671_1
ccgtccaatacgagggagaatatgggaagccgggtgggagggagatggcagggggagctcccttggagaagggtggtgtggggcacagtgctgctggcactgctcggggtgtcgcagtgctgcggtgcgtgcagagcacgatggagccccgggatgtttctgcagcatttgtgctattggaaataataaccgaatcggtaaaactcggggcggatcatggagtgaataacagggtgaatgtgcaggatgaataatttacgaggctggccccgctccaatcccgggctcagacggagcacygggttgctgtgtcccctctcctgcccctgcaagaagagcctttgggtcgttctttgggcaaggtgtctgcccctggccatccctgcccgtgcctgcggggctttctgcaaagatctacgtccctttgagaggatttcagtgatttatatctaacgcggggctctgcggagggtgcccatgggtggctgcgggctaagtttgtcctctgccctcccccgtccccagccgtgtccctgcccacgtgtggtggctgcaggcgtagggatgggatgtttgggatgggagctgagcgcacgccaa

SEQ ID NO: 76837 - DNA, 600 bp, Chicken  19866894364674_1
caggcaggggctgtgcttcatgcagtgctgcaaaaagtgaggaaaacagctcccaagctgcttcattgctgctgaaaagaaagagaacccccttcttttcggttgcaaagcatggaaacatttctgtttaccttctctatgaatactcgcgtggcaaaatttggagtgtcttctaaaaataaaaaccaaaccccagaacagtgagccctttaacgactgaaaatccagaaatctgaagtaggacatattgcccaaaattaaggcttccaccagaagtggtgtgtgaaaaacaagtcgtgygtttcacaatgtgcctcaagttgcctattggtgtgaatgggatcgttgctggctgtgcttatgggcacggagacacccgagcgggtcggtaccatccgcctgtacggcagctggtcggctttgcagcacgctggagttttagcctgacctacttttgtttgtttgtgtcgtttctcaccccacggtgccttgcaaaaatagtttctgctgctttcgacacaatgcccattctaattggaaagtctgaaccagatgcgtgctgctttcgcagtctcgggaggacttgggcttcccatggca

SEQ ID NO: 76838 - DNA, 599 bp, Chicken  19866894364683_1
  misc_feature (1)..(19): n is any nucleotide
nnnnnnnnnnnnnnnnnnnaagttcttcctatgtctgtatggaacttcctgtgttccagtttgtgcccattgccccttgttctgttgctgggcaccactgaacagagcctggtcccatctgcttgacttccgcccttcagctatttgtaagcattgatcagatcccccctcagccttctcttctccaggctgaacagttccagggctctcagtctttcctcataaggagatgctccaggtccccagtcacagaatcatagaatcgctcaggttgggcaagaccttaaagatcgagtccawccacaacctgaccatagtatcatactactaactaacaaccctccactaaatcatgtccctgagcaccacatccaaacagtttttaaacacatgcagggatggtgactcaaccacctccctgggaagcctcatctctgtggctgtccactcagatctctccaggatggagaggatgcatataaacgtatataaacgtatataaatatatataaatgtgctggataaaaatgcagaagaatttaaatggaaattccaattttctggtatgctgtttattccccacaagggaaggaggagct

SEQ ID NO: 76839 - DNA, 600 bp, Chicken  19866894364685_1
accaaaaacaaaaggtagagtagatgttcatgtttaaaattgaaaattcactcccaagaatgctaataggaaaaaaaagccataaaggacagtcttttttaactaaattcagaaagtaatttttaagagtttacggaacatctgcagatcagattttttgtcatgaaaataggctaaatgccagatgaacgcagttcagaaatattattttaccactaatacaaaattatccattatcaaatttaaattatcccactgtaatgaataaacctcaaagacaattcagagtggttcaggtcrgaaaccagattcatttcatggctagtctgcaccagcaggctttttgccttcctatttgaaaatatttcttctgatagttttttttttgcctacaatgtttcttgatcgtcttattttcttttactataattaagctgagctgggtaattcctcccaacagttgtccctgatatttccaaggtaataacaggtattatcttattccatttcttcatatagctgtatattgattcttatgttatctgaagtgcagtagtggatgaaggacttctaaaaggttgtagactaaatgagaggtcc

SEQ ID NO: 76840 - DNA, 599 bp, Chicken  19866894364694_1
  misc_feature (1)..(186): n is any nucleotide
nnnnnnnnnnnnnnnnnnnnnnnnnnnnnnnnnnnnnnnnnnnnnnnnnnnnnnnnnnnnnnnnnnnnnnnnnnnnnnnnnnnnnnnnnnnnnnnnnnnnnnnnnnnnnnnnnnnnnnnnnnnnnnnnnnnnnnnnnnnnnnnnnnnnnnnnnnnnnnnnnnnnnnnnnnnnnnnnnnnnnnnnnnattgcatagagccacagcagacttggatgccagcactcagactgtactactcattccagctagaacaggtaccctacaaattcacaatggcttgtgggtcaaaaaggaagaagkatcaaaccttatctatgaagcagctgtcagtttctgatgccactgcataaacacatacactgaggtacagtaagcaagctgatctaaagcactactgccatagcagagcaggataagcacaaaacgccaactagctatttgttctgtcgctatactttagagccataagattaatggcaacgtctacccaggttgctgtaggcactagctctgtcaggcacagtgccaacttctatccccacaaaactgctggtaactacccacactaacaaggtttgcccttcagaagctttgttagc

SEQ ID NO: 76841 - DNA, 469 bp, Chicken  19866894364694_2
gctgtcagtttctgatgccactgcataaacacatacactgaggtacagtaagcaagctgatctaaagcactactgccatagcagagcaggataagcacaaaacgccaactagctatttgttctgtcgctatactttagagccataagattaatggcaacgtctacccaggttgctgtaggcactagctctgtcaggcacagtgccaacttctatccccacaaaactgctggtaactacccacactaacaaggtttgcccttcagaagctttgttagcgcacagatccctaccctgtcacrgctatcagaaccaactcaggccctgccagctggcacgaggatggggcttgcagatatggtcctcaacctccatgcttaccraagttttatccagcctgatatggcagtcgcaactcaaatataattcacatttcagatgtgcagcagagatgcttacatcttttaaaac

SEQ ID NO: 76842 - DNA, 388 bp, Chicken  19866894364694_3
cagagcaggataagcacaaaacgccaactagctatttgttctgtcgctatactttagagccataagattaatggcaacgtctacccaggttgctgtaggcactagctctgtcaggcacagtgccaacttctatccccacaaaactgctggtaactacccacactaacaaggtttgcccttcagaagctttgttagcgcacagatccctaccctgtcacrgctatcagaaccaactcaggccctgccagctggcacgaggatggggcttgcagatatggtcctcaacctccatgcttaccraagttttatccagcctgatatggcagtcgcaactcaaatataattcacatttcagatgtgcagcagagatgcttacatcttttaaaac

SEQ ID NO: 76843 - DNA, 600 bp, Chicken  19866894364697_1
ggggatgagtgtgtttgaaaatttggctgccccttcccgtgctccatcctcccagaatctcctctccactggccttggcatctttgcatcttctcatgcaaaagaagtggcacccacgtttccacaacataactgtacgcaccactgggccatgtagtgagggttgacacctctctggctttgccttgggatcacattcctgtggatgccagccctctgcccagctgctgtgacacgttctgctcagaccgctgccgataaatgggcaaattgccggatggctggaaacggcgcgcaccrcgtcccctgtaatttgtactgccacacagctgtttgtggaagtgaaatacaatcaatggatcagaccagaaggctccaatttaatctctgcaaacactgaagagtcaggattttctcttgttgtttttttttttcaatgccaccaaagcccaagcccatcatgctcagacaaaatctttgagcaatttcctacctttgcactttttatttgtttcctgcctttggatggagctctctcctcatccagagggtcagcaaatgtctcctgttatctgcctccgacggaaatgctgttctgct

SEQ ID NO: 76844 - DNA, 600 bp, Chicken  19866894364700_1
tatcttgtaaacagtctgttcttagtacacaaatatgagaactggtgcagatgtgcctgtgagagccaatatatcatttttgttgcatctaaagcctgcaatttcatgcttagaacttggcattgtaaccatggttatctttcagtttgatgtagaatacagaggcttcagcagatttttttttttattttattagacctatggcaatcaaaacacatacatagaaaggtcaggtttccaaatacagtatctgatagatacaatggtattatttattacatgatacatgagatttagggkttttttttgtgggtattttttcctgaaatttattcataaacaaggagtctgataggtcacgcacaagagaaatggacctctcttatcatagagattttctctgtacaaagaatataagctagaagattgctatttcgaaaagcataaagttaaagcgaaaacattgtctggaagcatgcatgctttgaaaggattatttactttatttttaatttcgtttccaaaaaaccttgcttggtatttctaatctttctgaaagcaatggaaattcacagctttgatattagcatagaattttct

SEQ ID NO: 76845 - DNA, 599 bp, Chicken  19866894364706_1
  misc_feature (1)..(5): n is any nucleotide
nnnnnatggactgcagatgcctggtgccctcagtgacccaacctgtcgagtaaagtgttggatttgtagagtcctgactgttgggttttggggggttatggatcaacaaaaaccccagcctggtccagtcccaggctccgttttatcagaccttggctctggagctggttcatttctggaatatatcccagaggctgaataagggccaaggagcattttccagctcctgtgtccaagctggactccgtgctgggagtcgcagtccagctgagatctgacaccattctggaactgggctcrgttgtgcatcatccccgtagtcttttctttccgtactgatgggccagagggaaccagtgccatacatcatattgtgcccctactctactcaggagagtcatgagatcttattccctggctggtgagaagaatggaaaatagatagcagctcataggtgaaggtgataattggctattaccgtattaagaagctttgmcaatgatcttcttttaagcattctgcttttaaggaactcttttagtggttaacatrtcttccaattttccagatatttactgcttcctggaaaaaaatgcac

SEQ ID NO: 76846 - DNA, 600 bp, Chicken  19866894364706_2
aataagggccaaggagcattttccagctcctgtgtccaagctggactccgtgctgggagtcgcagtccagctgagatctgacaccattctggaactgggctcrgttgtgcatcatccccgtagtcttttctttccgtactgatgggccagagggaaccagtgccatacatcatattgtgcccctactctactcaggagagtcatgagatcttattccctggctggtgagaagaatggaaaatagatagcagctcataggtgaaggtgataattggctattaccgtattaagaagctttgmcaatgatcttcttttaagcattctgcttttaaggaactcttttagtggttaacatrtcttccaattttccagatatttactgcttcctggaaaaaaatgcactcttcccaggatcctatcttgttttacggtcttcctctcttaacatcatttcatattatttctcctgctctctaatctgcagccattcccaagacagggtcatcaacacaatgcaatggcccttgataaactttcacccatggtttgcgtgtcagtatgagaggaaatccgtccttgggactaaataaatgtgtattt

SEQ ID NO: 76847 - DNA, 600 bp, Chicken  19866894364706_3
gagtcgcagtccagctgagatctgacaccattctggaactgggctcrgttgtgcatcatccccgtagtcttttctttccgtactgatgggccagagggaaccagtgccatacatcatattgtgcccctactctactcaggagagtcatgagatcttattccctggctggtgagaagaatggaaaatagatagcagctcataggtgaaggtgataattggctattaccgtattaagaagctttgmcaatgatcttcttttaagcattctgcttttaaggaactcttttagtggttaacatrtcttccaattttccagatatttactgcttcctggaaaaaaatgcactcttcccaggatcctatcttgttttacggtcttcctctcttaacatcatttcatattatttctcctgctctctaatctgcagccattcccaagacagggtcatcaacacaatgcaatggcccttgataaactttcacccatggtttgcgtgtcagtatgagaggaaatccgtccttgggactaaataaatgtgtatttctagggattggatgcttcacaaccaacactgagagtgtgctgtgtgttatgatgct

SEQ ID NO: 76848 - DNA, 600 bp, Chicken  19866894364709_1
agaaccttataattccaggttggaagtctgtggccccagaggatcaaccaggactcctgggcttgttgttgagacaacagtctgctgagttctccttttcctcaacacactgccacatgcaaatccttgagcctgcaaagctccttctggtgcaggtcagggatcgcaccacacaggcagcatacataacacacacaacccagggagctaagtcagtgcaaaatgagttcaattcacacatacataagagacacaatcagcagccttttgaaaacaacaggctaattacactgaagaaayagagratattatagaacaggaaaggaactaagaaaaaaaaagactgtacatacaaaatgaaaccacacttccaaataatatttaaccatcagaacctctttctaaaataaatctttccagctcttgcagacactaagattacactgggtgtctttccaagtttttggggaatttccagtgcctaccctttattcttttagattaagttcaactcaggacttgagagcatgtgggctaaaacctgggagatgctgggcacttgcatctcttactgaatagtcttttatcagcctatttagg

SEQ ID NO: 76849 - DNA, 600 bp, Chicken  19866894364709_2
cttataattccaggttggaagtctgtggccccagaggatcaaccaggactcctgggcttgttgttgagacaacagtctgctgagttctccttttcctcaacacactgccacatgcaaatccttgagcctgcaaagctccttctggtgcaggtcagggatcgcaccacacaggcagcatacataacacacacaacccagggagctaagtcagtgcaaaatgagttcaattcacacatacataagagacacaatcagcagccttttgaaaacaacaggctaattacactgaagaaayagagratattatagaacaggaaaggaactaagaaaaaaaaagactgtacatacaaaatgaaaccacacttccaaataatatttaaccatcagaacctctttctaaaataaatctttccagctcttgcagacactaagattacactgggtgtctttccaagtttttggggaatttccagtgcctaccctttattcttttagattaagttcaactcaggacttgagagcatgtgggctaaaacctgggagatgctgggcacttgcatctcttactgaatagtcttttatcagcctatttaggttatc

SEQ ID NO: 76850 - DNA, 600 bp, Chicken  19866894364712_1
cgcgggaaggaggggtgcggggcacggggggaggaggtgggagcagccagccctgtgcctgggaacgacggggacgtctcagagagagcagcccggagctgctggatccccacagcccctgtccgtgctgctgtgcgggtctgggggctggcagcagggtggcagcagggcggcagcgggatgatactggcggctgtcccactgggggaaggaagcggagatgctccctggctcggcttgtggttcccatcactttgaagagctccatctggcctgggaaaacggcgttccggcatccgyggggccgcctgcacgcacagggccggccgtggccatgagagcctgagttgtgcttatagcagccagagcccacggccgctccgcggggctcagcgtgggcccaccaccarccccagccacctctgctcttggcagcagtgccctgcgtggccccagccccgatgatgctgtggctcagcatccattcccaggtggttcctggcaaagggcgcacgttgccggcctccgggggcccagtctgcaggcagggtctgcagagaggaygcccatccccatcacctgtgggctgcaggcagcccc

SEQ ID NO: 76851 - DNA, 600 bp, Chicken  19866894364712_2
cacagcccctgtccgtgctgctgtgcgggtctgggggctggcagcagggtggcagcagggcggcagcgggatgatactggcggctgtcccactgggggaaggaagcggagatgctccctggctcggcttgtggttcccatcactttgaagagctccatctggcctgggaaaacggcgttccggcatccgyggggccgcctgcacgcacagggccggccgtggccatgagagcctgagttgtgcttatagcagccagagcccacggccgctccgcggggctcagcgtgggcccaccaccarccccagccacctctgctcttggcagcagtgccctgcgtggccccagccccgatgatgctgtggctcagcatccattcccaggtggttcctggcaaagggcgcacgttgccggcctccgggggcccagtctgcaggcagggtctgcagagaggaygcccatccccatcacctgtgggctgcaggcagccccagagccaggaccgaggtggctgtgccctggtgccaggctttgcacatcatgtcagcattcggtgtccccctgtcgcctgcaagacagggcttgggcaggtccctgggagg

SEQ ID NO: 76852 - DNA, 600 bp, Chicken  19866894364712_3
ccatctggcctgggaaaacggcgttccggcatccgyggggccgcctgcacgcacagggccggccgtggccatgagagcctgagttgtgcttatagcagccagagcccacggccgctccgcggggctcagcgtgggcccaccaccarccccagccacctctgctcttggcagcagtgccctgcgtggccccagccccgatgatgctgtggctcagcatccattcccaggtggttcctggcaaagggcgcacgttgccggcctccgggggcccagtctgcaggcagggtctgcagagaggaygcccatccccatcacctgtgggctgcaggcagccccagagccaggaccgaggtggctgtgccctggtgccaggctttgcacatcatgtcagcattcggtgtccccctgtcgcctgcaagacagggcttgggcaggtccctgggaggctgagcaggaggagcagggtcagtgtgtgctgggggctggggagcattcagccgtgctgatcccggtgatgctcagcacmtgcccttgtgcagggcaccctgtctggtaccggactcagccccactctgtcagcagtgggtattggtaccggtc

SEQ ID NO: 76853 - DNA, 600 bp, Chicken  19866894364712_4
ggtggttcctggcaaagggcgcacgttgccggcctccgggggcccagtctgcaggcagggtctgcagagaggaygcccatccccatcacctgtgggctgcaggcagccccagagccaggaccgaggtggctgtgccctggtgccaggctttgcacatcatgtcagcattcggtgtccccctgtcgcctgcaagacagggcttgggcaggtccctgggaggctgagcaggaggagcagggtcagtgtgtgctgggggctggggagcattcagccgtgctgatcccggtgatgctcagcacmtgcccttgtgcagggcaccctgtctggtaccggactcagccccactctgtcagcagtgggtattggtaccggtctggccgggccatgctgagcaccgctcacactgggaacacagcaccccgctgctgtcccctgttcagcccctgctgtcggtgggctggctttgagagaagcgtggataaatgctgccattaaacaacgcctataattagaaaccaggtttcctaaatgaagtgaaaaatgtaacgttagcctctgtttgttctctggatgctgctttcttgttccatgacccagcgg

SEQ ID NO: 76854 - DNA, 600 bp, Chicken  19866894364712_5
ccagccagccctgctcaggaccaaaagctgaatttacggcctcctcatctgctcgctgacactgcaggggggctgccaggcttcgcccagcgctgcagtgccggtgacacaggagggacacgggcagcgggtgagcccaggctggagcagctctggaggtgaccttcagcagcagctggagctcagcgcatcccagctgggagcgcgggacaggagcagggcaggaccgcccctgctggcttcccagtggtgacagctcccggggctgcgggtccctgcacgtgcgtggccccatctccrgctctgcggggaggagatgcagagctggggcagacgtcagtgtcactgctcaactttccatttacctcagtcctgcgtcgckccctgggaaaccgggaacttggacgcctgcctgcaaactaaagccaccaaagccctaaaaataagggcatcgctgccctggaaacatggccttgggtgctccccacatcctcgcaggggcagtggggactgcggtgctttgccatctccttccctcagagctgctctgtccactccacggtgacctctgctgcctgacacagcgcccagaaggctttg

SEQ ID NO: 76855 - DNA, 600 bp, Chicken  19866894364712_6
tcgcccagcgctgcagtgccggtgacacaggagggacacgggcagcgggtgagcccaggctggagcagctctggaggtgaccttcagcagcagctggagctcagcgcatcccagctgggagcgcgggacaggagcagggcaggaccgcccctgctggcttcccagtggtgacagctcccggggctgcgggtccctgcacgtgcgtggccccatctccrgctctgcggggaggagatgcagagctggggcagacgtcagtgtcactgctcaactttccatttacctcagtcctgcgtcgckccctgggaaaccgggaacttggacgcctgcctgcaaactaaagccaccaaagccctaaaaataagggcatcgctgccctggaaacatggccttgggtgctccccacatcctcgcaggggcagtggggactgcggtgctttgccatctccttccctcagagctgctctgtccactccacggtgacctctgctgcctgacacagcgcccagaaggctttgctggggtgagagtctgtccctgccgtggccccgctgtcccccccagcccagggcagccgagaggcagcggggagcggaagga

SEQ ID NO: 76856 - DNA, 600 bp, Chicken  19866894364713_1
cagtgcaatttgtgtattcacaagatttcccaagagtcttacagcacttctcccatggcaaggtcagtacacctttcagtgtacctcagctctgcattcctggtgtgcccaactgccatgcatcagcctgcagttgctgtaatcaggcataattccactgtatctttggattatcattaaaacaaacaaacaaacaacactaagttagactcaacatcagtgggagcacagccacattcgtttccgtccctttgatatgcacagagcagatgaaaactgtgtgatatatgaggagctttrgatgtggatctccagcacagaagcctttgccctcaacaggatacagcagggacttcaaccaatcccaatagaaaaagccaacaagctccagtcagagctcactgctgcgtccaaccggtctgtcacagcagaaatggccaagcagagcctggcctccctgtgctgggtagagttaggctgatgtggactgagtgtgggttaagctcatgctcactcagccttgtaaaacaagtgcccctcatcctacattacacatcgagttaagctgttgctcatttacatttgctgattcggagagcc

SEQ ID NO: 76857 - DNA, 600 bp, Chicken  19866894364713_2
atcgagttaagctgttgctcatttacatttgctgattcggagagccctgatttggctcttggctgtttatatttctcagacatcctccatgtaattgcatggcctggccccaggctatcaggctctggaaggaataaccacattattccacagagcagttagcataattaaaatattgactgcagattaaaaaatgtgctgaatacttcacagagtggttggagggttggcaagtcttggcagcttgttggctgtgggagctggctgatatttagatgcgcctgcaccttcagcattcaytgctgtatgtgggaactgctttttgtgctgtcaacttcttatctcacaagaagccaacctacacgcaaaaagaaatgaactgactgggaatgaggaactccaaggacttgtgattcttattgctagtgagaccacttccttgttatttatgacttcaggacatctgtcttactatgtttcatctatttttatttgtgtccatctttccaaatgtacaccgtaggaactgcatatggtgcaaatgtacaaggtgataaaaccatttgcttaagaactgtcttcattgtatgagaaagcatt

SEQ ID NO: 76858 - DNA, 600 bp, Chicken  19866894364718_1
gaaggtgttttctccttcgtttgctccctttttctctctcacatgatagctcttgtgaattcaatgaggctggtgagcagagtctgggtacagaagttgcacttgtgaaacatctccattttaatccatgtgtttgttccagctagactattttcacagctgtttggggggggggcgactgtctgggggaaagggacactaacaaatcttgagacctctctagtgcttcagtttctcatttccaaacatccttgaaaaagaaatctcatccacttactcacacaaatgccccaaatagayttttctataaactgagggaggaaaaagatcagtctctagctgtggaactgaattcaacaaagggctgaatcctcccagcgctggagctgttccacatttgcatccgttgaggatgtgacccccggccctcagccctaactgaacttttgcagcagttttatacagaaatgggacatacacgttaaaaaataaatgttgatttcaatgggaagcattttcagttgtgtattgtttccatagtttcactgcaactataattccaaacctgatgataaaagctatagtattactaggatatag

SEQ ID NO: 76859 - DNA, 599 bp, Chicken  19866894364724_1
  misc_feature (1)..(64): n is any nucleotide
nnnnnnnnnnnnnnnnnnnnnnnnnnnnnnnnnnnnnnnnnnnnnnnnnnnnnnnnnnnnnnnncaagaaaatgtatttggagatgggaggtatgtctggtcattcaacatggtaattagagctgggggaggcctatgctccttggatcaaagagagaaaacttctggagaatgaagacataaggagagtgtggattcagaaataaaccatgcaccccaaataaagctgctgaggaaatcagttgcattgtacctgaaaggggaaactggagggaagctgtcctcagggaggagaaagaraggcctttctcaggtctctagcaaacccatgaggcaacatcaaactcttaaggaggaaagggaataagtcacaatctgagtagagaaagcagtttgtctagagtcattaagggaggcggctcagtgtgggagataggaatgcatctgagagaggaaccatgtgctcaggaaatcaaacagtacctgcacctctgtacctgcgctgtggcacaaccatgcacattttgatacaagctgtttccttggcctaacttggacactgctgagagttgcaggtgattgtgggaacccctcttgag

SEQ ID NO: 76860 - DNA, 599 bp, Chicken  19866894364729_1
  misc_feature (1)..(57): n is any nucleotide
nnnnnnnnnnnnnnnnnnnnnnnnnnnnnnnnnnnnnnnnnnnnnnnnnnnnnnnnnaataaatccccaggagagtttaaagtgaactgagcaaggacacgtgggaatcttatcaggagcctcacacatgtgaaggaaagcaggcgtgaatgctttttacacatcatcagatctacttggatgctcatctcatgttcttcaaaaacctaccttcagggtgcttaatatgtgaatctcttacatcacctgaaaattcagacatcagtaaagagagaattctcatatttatgtacagacctkttagggttgcacttcagtcatttgcccagaaatgagacatggacctcttgagtgaatgacgagctcgttcttcaccatggtggaagaaaaggcaggtagacatatggaatggtatacaaaggttaacatttccaaatgctgtgaacaaatctcttggcaagttaaaaataatttccttcttggcattcaataattgcagtggaagttattttaagatgacatgctaaggtaggaatcctgatgtcatttttttccccacaaaaatagataatttgaaaagtggacgatgaaataataag

SEQ ID NO: 76861 - DNA, 600 bp, Chicken  19866894364730_1
aatttcagaggtaccttaaaaaaaaaagtcttgcctgcatctcacatgtttgtgatgcaagatccagtagagggcaacaaaggctggcttttgtgtgtctacttccttatctacttcatagagtaatgaaataaggtggttcttatcttaagctcttgcaaattgatttactgaagtctcattatgtccagctgaagtcttatgatgagaaaccaggtgcaaatgctcactcattcaaacctgtttcatttatcactagaaatctatcaagattagaacttttgttgggtactgtttgakattaaattgatttaaaatatattttatatatatatatatttgcttcatttttatagcttgaatgaatttcaacacgaagattctgtacaagaacaggctccatcagacagttcacagtactgcacaggtatgtcataagtagttgctttgtttagaagtttaagccaacttctcttcaggtccaaaggaggcaaaggtatccttagaatcactgtttttatagtcagctcttctgtactacagaggctgtagcaacctctagggagccactgtggcttgctcttgtcgatgtgctatgaa

SEQ ID NO: 76862 - DNA, 599 bp, Chicken  19866894364731_1
  misc_feature (1)..(225): n is any nucleotide
nnnnnnnnnnnnnnnnnnnnnnnnnnnnnnnnnnnnnnnnnnnnnnnnnnnnnnnnnnnnnnnnnnnnnnnnnnnnnnnnnnnnnnnnnnnnnnnnnnnnnnnnnnnnnnnnnnnnnnnnnnnnnnnnnnnnnnnnnnnnnnnnnnnnnnnnnnnnnnnnnnnnnnnnnnnnnnnnnnnnnnnnnnnnnnnnnnnnnnnnnnnnnnnnnnnnnnnnnnnnnnnnngaaagaaacaggtttcctctagaaacgcctgtaaaaagcttatgccaaagaaagattttctcttcctattaatcrtgctggttatttgtccagctgagctaccaatcattcaaattcaacaggaagatcaaagaacacaatttcacagatgactctgaaggtagaaggctctggacgaaccctgcagggcactactgcaacaaccaaatttccagaccctcacagcaactcagccagaaactcagcatttctcaggatgcagacgtgtctggcatttcacagctacttgatcactgcattgcttaaaaaccacagtgcttaaacatrgcttacacacrgtactcggtattgccaagaactcaccaytgccaatr

SEQ ID NO: 76863 - DNA, 600 bp, Chicken  19866894364731_2
cctgtaaaaagcttatgccaaagaaagattttctcttcctattaatcrtgctggttatttgtccagctgagctaccaatcattcaaattcaacaggaagatcaaagaacacaatttcacagatgactctgaaggtagaaggctctggacgaaccctgcagggcactactgcaacaaccaaatttccagaccctcacagcaactcagccagaaactcagcatttctcaggatgcagacgtgtctggcatttcacagctacttgatcactgcattgcttaaaaaccacagtgcttaaacatrgcttacacacrgtactcggtattgccaagaactcaccaytgccaatrgtcatggcatgtttttaccttcttgttcrctattcaagcattagggagaagcagaaactttctgttcctcaaccattgctaagaattcaccttaaggcctataactataaacatggtgatgacaatacgtaactttaaaytcacagacttccttgattatgaacctgaacgagctctactgcttatcagaataatatctaacattatattcaaccatagtcaagtaggcagattgatttttagataagtaaaa

SEQ ID NO: 76864 - DNA, 600 bp, Chicken  19866894364731_3
cttatgccaaagaaagattttctcttcctattaatcrtgctggttatttgtccagctgagctaccaatcattcaaattcaacaggaagatcaaagaacacaatttcacagatgactctgaaggtagaaggctctggacgaaccctgcagggcactactgcaacaaccaaatttccagaccctcacagcaactcagccagaaactcagcatttctcaggatgcagacgtgtctggcatttcacagctacttgatcactgcattgcttaaaaaccacagtgcttaaacatrgcttacacacrgtactcggtattgccaagaactcaccaytgccaatrgtcatggcatgtttttaccttcttgttcrctattcaagcattagggagaagcagaaactttctgttcctcaaccattgctaagaattcaccttaaggcctataactataaacatggtgatgacaatacgtaactttaaaytcacagacttccttgattatgaacctgaacgagctctactgcttatcagaataatatctaacattatattcaaccatagtcaagtaggcagattgatttttagataagtaaaaactgatacaaa

SEQ ID NO: 76865 - DNA, 600 bp, Chicken  19866894364731_4
tattaatcrtgctggttatttgtccagctgagctaccaatcattcaaattcaacaggaagatcaaagaacacaatttcacagatgactctgaaggtagaaggctctggacgaaccctgcagggcactactgcaacaaccaaatttccagaccctcacagcaactcagccagaaactcagcatttctcaggatgcagacgtgtctggcatttcacagctacttgatcactgcattgcttaaaaaccacagtgcttaaacatrgcttacacacrgtactcggtattgccaagaactcaccaytgccaatrgtcatggcatgtttttaccttcttgttcrctattcaagcattagggagaagcagaaactttctgttcctcaaccattgctaagaattcaccttaaggcctataactataaacatggtgatgacaatacgtaactttaaaytcacagacttccttgattatgaacctgaacgagctctactgcttatcagaataatatctaacattatattcaaccatagtcaagtaggcagattgatttttagataagtaaaaactgatacaaacagattcttggttaaaaaaaaaaaaaaa

SEQ ID NO: 76866 - DNA, 600 bp, Chicken  19866894364731_5
rtgctggttatttgtccagctgagctaccaatcattcaaattcaacaggaagatcaaagaacacaatttcacagatgactctgaaggtagaaggctctggacgaaccctgcagggcactactgcaacaaccaaatttccagaccctcacagcaactcagccagaaactcagcatttctcaggatgcagacgtgtctggcatttcacagctacttgatcactgcattgcttaaaaaccacagtgcttaaacatrgcttacacacrgtactcggtattgccaagaactcaccaytgccaatrgtcatggcatgtttttaccttcttgttcrctattcaagcattagggagaagcagaaactttctgttcctcaaccattgctaagaattcaccttaaggcctataactataaacatggtgatgacaatacgtaactttaaaytcacagacttccttgattatgaacctgaacgagctctactgcttatcagaataatatctaacattatattcaaccatagtcaagtaggcagattgatttttagataagtaaaaactgatacaaacagattcttggttaaaaaaaaaaaaaaacacagtac

SEQ ID NO: 76867 - DNA, 600 bp, Chicken  19866894364731_6
aatcattcaaattcaacaggaagatcaaagaacacaatttcacagatgactctgaaggtagaaggctctggacgaaccctgcagggcactactgcaacaaccaaatttccagaccctcacagcaactcagccagaaactcagcatttctcaggatgcagacgtgtctggcatttcacagctacttgatcactgcattgcttaaaaaccacagtgcttaaacatrgcttacacacrgtactcggtattgccaagaactcaccaytgccaatrgtcatggcatgtttttaccttcttgttcrctattcaagcattagggagaagcagaaactttctgttcctcaaccattgctaagaattcaccttaaggcctataactataaacatggtgatgacaatacgtaactttaaaytcacagacttccttgattatgaacctgaacgagctctactgcttatcagaataatatctaacattatattcaaccatagtcaagtaggcagattgatttttagataagtaaaaactgatacaaacagattcttggttaaaaaaaaaaaaaaacacagtacaattcctacagaacaattataccattact

SEQ ID NO: 76868 - DNA, 600 bp, Chicken  19866894364731_7
gaccctcacagcaactcagccagaaactcagcatttctcaggatgcagacgtgtctggcatttcacagctacttgatcactgcattgcttaaaaaccacagtgcttaaacatrgcttacacacrgtactcggtattgccaagaactcaccaytgccaatrgtcatggcatgtttttaccttcttgttcrctattcaagcattagggagaagcagaaactttctgttcctcaaccattgctaagaattcaccttaaggcctataactataaacatggtgatgacaatacgtaactttaaaytcacagacttccttgattatgaacctgaacgagctctactgcttatcagaataatatctaacattatattcaaccatagtcaagtaggcagattgatttttagataagtaaaaactgatacaaacagattcttggttaaaaaaaaaaaaaaacacagtacaattcctacagaacaattataccattactgaaagtcaacaggcaactgttccaaaaaatgatacccccctttctgaagtaaagggaaggaaatggtttcgctaccatataaataatacagtaaagcaacagcatgcaata

SEQ ID NO: 76869 - DNA, 600 bp, Chicken  19866894364742_1
caaatcctgccaagagactgtctcagcatttatgcacagaattacgtatcactattaagataatggctgttagagggagtagagaagaaagacaacctaatcgtgtctaagtaaactgaaaatctacttttttataagatccactagagaatttaccaaactgtagagcccactgtgcattcactgcattgtaattacttttccaaaccatcagttggaaaagtatagcagtgaaccaaaatataaaatgagaaatcatcatggaaaataagcacctactaaacttcttacattaaaaararwtaaaaaaaaaaaaaaagtaacgaaaagccacaattcactgacatccccaaaattatttttccttctatctctcccttgatttaattgataaaatgtcaacacattgtaaattctaactcctgtttaattatattgctaaaatagaagtgagagtgtatgtggtatttacctagatcggctctacagctgttccatcattttgcttatgatatctgtggtactgcaaagtgcaaaagcaagctaaaaggataaaaatggtaatggagaattcagattcccataggtgtgttaacatgc

SEQ ID NO: 76870 - DNA, 600 bp, Chicken  19866894364742_2
aatcctgccaagagactgtctcagcatttatgcacagaattacgtatcactattaagataatggctgttagagggagtagagaagaaagacaacctaatcgtgtctaagtaaactgaaaatctacttttttataagatccactagagaatttaccaaactgtagagcccactgtgcattcactgcattgtaattacttttccaaaccatcagttggaaaagtatagcagtgaaccaaaatataaaatgagaaatcatcatggaaaataagcacctactaaacttcttacattaaaaararwtaaaaaaaaaaaaaaagtaacgaaaagccacaattcactgacatccccaaaattatttttccttctatctctcccttgatttaattgataaaatgtcaacacattgtaaattctaactcctgtttaattatattgctaaaatagaagtgagagtgtatgtggtatttacctagatcggctctacagctgttccatcattttgcttatgatatctgtggtactgcaaagtgcaaaagcaagctaaaaggataaaaatggtaatggagaattcagattcccataggtgtgttaacatgcta

SEQ ID NO: 76871 - DNA, 600 bp, Chicken  19866894364742_3
atcctgccaagagactgtctcagcatttatgcacagaattacgtatcactattaagataatggctgttagagggagtagagaagaaagacaacctaatcgtgtctaagtaaactgaaaatctacttttttataagatccactagagaatttaccaaactgtagagcccactgtgcattcactgcattgtaattacttttccaaaccatcagttggaaaagtatagcagtgaaccaaaatataaaatgagaaatcatcatggaaaataagcacctactaaacttcttacattaaaaararwtaaaaaaaaaaaaaaagtaacgaaaagccacaattcactgacatccccaaaattatttttccttctatctctcccttgatttaattgataaaatgtcaacacattgtaaattctaactcctgtttaattatattgctaaaatagaagtgagagtgtatgtggtatttacctagatcggctctacagctgttccatcattttgcttatgatatctgtggtactgcaaagtgcaaaagcaagctaaaaggataaaaatggtaatggagaattcagattcccataggtgtgttaacatgctaa

SEQ ID NO: 76872 - DNA, 600 bp, Chicken  19866894364742_4
tcctgccaagagactgtctcagcatttatgcacagaattacgtatcactattaagataatggctgttagagggagtagagaagaaagacaacctaatcgtgtctaagtaaactgaaaatctacttttttataagatccactagagaatttaccaaactgtagagcccactgtgcattcactgcattgtaattacttttccaaaccatcagttggaaaagtatagcagtgaaccaaaatataaaatgagaaatcatcatggaaaataagcacctactaaacttcttacattaaaaararwwaaaaaaaaaaaaaaagtaacgaaaagccacaattcactgacatccccaaaattatttttccttctatctctcccttgatttaattgataaaatgtcaacacattgtaaattctaactcctgtttaattatattgctaaaatagaagtgagagtgtatgtggtatttacctagatcggctctacagctgttccatcattttgcttatgatatctgtggtactgcaaagtgcaaaagcaagctaaaaggataaaaatggtaatggagaattcagattcccataggtgtgttaacatgctaat

SEQ ID NO: 76873 - DNA, 600 bp, Chicken  19866894364742_5; identical to SEQ ID NO: 76872

SEQ ID NO: 76874 - DNA, 600 bp, Chicken  19866894364751_1
accatgcatggtccaaacctattggaacagtcagtgagaataacgcaccatgttttaaaatgggataggcaatatgtacatgcagcttcaaagcattccaattctggaacagaagttttcgaagaccaagcagacaacaagttagagtgcacaattattattactaatgctttgcatttactctgtagttcttagtaaaaattatattgggcagctgtaattcttgttctgacacttaggttggccaggtcagtttctgcttttcaaacaactgctttcattgttttctggaaggaatayattgtgatagttttctaaataagccatttctccaaatatagaaacctgatctgctgagraatcttggcctagagatcagaaggtctgtacagtaagcgggatgactttagaatatacaatagcattgacacttcctcctggtgctgtttaagctttaaggctgtcccacaaatggctccatgcatttagtgtgcatcatgactggaactagatttgtgaaaaaccaatgtcactggagaaagaaagacacatttacttttcctttttggtgagtacattttacagtctctagatactcca

SEQ ID NO: 76875 - DNA, 600 bp, Chicken  19866894364751_2
atgggataggcaatatgtacatgcagcttcaaagcattccaattctggaacagaagttttcgaagaccaagcagacaacaagttagagtgcacaattattattactaatgctttgcatttactctgtagttcttagtaaaaattatattgggcagctgtaattcttgttctgacacttaggttggccaggtcagtttctgcttttcaaacaactgctttcattgttttctggaaggaatayattgtgatagttttctaaataagccatttctccaaatatagaaacctgatctgctgagraatcttggcctagagatcagaaggtctgtacagtaagcgggatgactttagaatatacaatagcattgacacttcctcctggtgctgtttaagctttaaggctgtcccacaaatggctccatgcatttagtgtgcatcatgactggaactagatttgtgaaaaaccaatgtcactggagaaagaaagacacatttacttttcctttttggtgagtacattttacagtctctagatactccaaccaacatctcttagaaagataaatctattgcggggtaattaaatgcatattttaaatg

SEQ ID NO: 76876 - DNA, 599 bp, Chicken  19866894364756_1
  misc_feature (1)..(182): n is any nucleotide
nnnnnnnnnnnnnnnnnnnnnnnnnnnnnnnnnnnnnnnnnnnnnnnnnnnnnnnnnnnnnnnnnnnnnnnnnnnnnnnnnnnnnnnnnnnnnnnnnnnnnnnnnnnnnnnnnnnnnnnnnnnnnnnnnnnnnnnnnnnnnnnnnnnnnnnnnnnnnnnnnnnnnnnnnnnnnnnnnnnnnnagaaatagttaaattgcaaagaaacaatgaccttaaaaagaaataatcagaggtcaaaccattctagttaaatcctgcttccgacagtgttaaacaggagaggagaaattacaacccrtttgcaagcacagagtgggggtgctcatgctacctgacagggtttgttttaagagttaggaagcacagatgagtaaaactgctactgtgtgttaaacacatcaggtcttcaggaattggtttcctgtaggagtaccgagctaatgatctcttgattgcgtttgactctctccatctcaggagtcacaggggttggagtggctttccctatgttctccttatataacacctatgagacataagaaaggagccaacaataaacaaacaggtctctctgtagacaaacacaaaggcatcttt

SEQ ID NO: 76877 - DNA, 600 bp, Chicken  19866894364756_2
ttgcaagcacagagtgggggtgctcatgctacctgacagggtttgttttaagagttaggaagcacagatgagtaaaactgctactgtgtgttaaacacatcaggtcttcaggaattggtttcctgtaggagtaccgagctaatgatctcttgattgcgtttgactctctccatctcaggagtcacaggggttggagtggctttccctatgttctccttatataacacctatgagacataagaaaggagccaacaataaacaaacaggtctctctgtagacaaacacaaaggcatcttttycttgtattcattatcacagggccaaggtatatagatacgtgtcaaggtacrcagcagtattttagtagagaagtagggcctggcataaagtgatggctcaatagataagtactgtaaatgagactacaaaacactgtgctgaggatgttacggatatttaaattatcataaagtacgtcagcactgcagagamaatagaggaactctgttataagattttaggattagaacaaggcgttaaaataagccttaaaaccaataaaactatcaagttaacacagtcattgtaagccacagtaa

SEQ ID NO: 76878 - DNA, 583 bp, Chicken  19866894364756_3
gagttaggaagcacagatgagtaaaactgctactgtgtgttaaacacatcaggtcttcaggaattggtttcctgtaggagtaccgagctaatgatctcttgattgcgtttgactctctccatctcaggagtcacaggggttggagtggctttccctatgttctccttatataacacctatgagacataagaaaggagccaacaataaacaaacaggtctctctgtagacaaacacaaaggcatcttttycttgtattcattatcacagggccaaggtatatagatacgtgtcaaggtacrcagcagtattttagtagagaagtagggcctggcataaagtgatggctcaatagataagtactgtaaatgagactacaaaacactgtgctgaggatgttacggatatttaaattatcataaagtacgtcagcactgcagagamaatagaggaactctgttataagattttaggattagaacaaggcgttaaaataagccttaaaaccaataaaactatcaagttaacacagtcattgtaagccacagtaagccacgtaagaagtgatcacttttaattaaattg

SEQ ID NO: 76879 - DNA, 441 bp, Chicken  19866894364756_4
gagtggctttccctatgttctccttatataacacctatgagacataagaaaggagccaacaataaacaaacaggtctctctgtagacaaacacaaaggcatcttttycttgtattcattatcacagggccaaggtatatagatacgtgtcaaggtacrcagcagtattttagtagagaagtagggcctggcataaagtgatggctcaatagataagtactgtaaatgagactacaaaacactgtgctgaggatgttacggatatttaaattatcataaagtacgtcagcactgcagagamaatagaggaactctgttataagattttaggattagaacaaggcgttaaaataagccttaaaaccaataaaactatcaagttaacacagtcattgtaagccacagtaagccacgtaagaagtgatcacttttaattaaattg

SEQ ID NO: 76880 - DNA, 600 bp, Chicken  19866894364767_1
ttgacaatgggattgagtgcacccccagcaagtttgctgatgacaccaataagtgaggagctgtcaacacaccagagggatgggatgccatccagagagaccaggacaggcttgagcagtggacctagctgaacgtcaggaggttcaacaaatccaaacgcaagttgtacctggattgagtcaacatctactaccaatacaagctgggggatgaaaggaatgggcacagccctgctgaagaaggcctggggtactggtggatggcatgctggacatgagccagcaatgtgcccttgcagycaagaaagccaactgtaacccgagttgcaccaaaagcagcatggccagcaggtcgaggcaggtggtcctacccctcttctctgtgctggtgaggcctcacatggaatactgtgtcgagatgtggaatttttagtacaggagagaaatagacctgatggagcacatctataggagagtcataaaaatgatccaagggacggtacacctctccaatgaggacaggctgagggagctggagaagagaaggctggagaagagaaggctccaaggagacctgatagcagcctttcagtatttaaa

SEQ ID NO: 76881 - DNA, 545 bp, Chicken  19866894364777_1
tgtactgatttgtattgttacattaagatcagtttcagtggtaaacaaactttcatctctcaattctactatcctaaagacaacagtcacatcagtatttgttcacaaggaatgcagaaattagatgtggtgagctttcaggaagtcttgttaccggtaggcatctaactctaaaatctgtctgctatgcaggttggttaaactgccttttatgtttaagaagttatgtttaagtgatacatttttgaacactaatgttcagaaatgcaatgcattgtcatgtatttagcagtatgtatstgtattgctgtacacataggtagatatatgtatgtcatatatatactcatgtacaaatatgtatgtacaaacataggtagaaccatataggagaaaaaaattcaatgctcctttctaaaagaagagtactcctcagtgctaagaaatgcagcagtgttctattcatagcagtctctgacacagcatttagcatgaccatacagagacatcgagacataacaagtaaataacggaaaaataaagca

SEQ ID NO: 76882 - DNA, 491 bp, Chicken  19866894364778_1
ttatgtagcaattatttttagtcataagaaccacagatgagctatgaacttacgtttgagacttgttgatattaagtagagaatttcacaacatttgggttctcttaaatctttttttctgctgttccttgaaaatatgatagtggtgaccaggccactatatgtatggaatggtgaacaaaatagaaaagcaaaacctggtgaataattgtcctagatgttgtctatagagaaaatgagtatgtgtggcagagtaaatatgtgagtattttttgttttgtttcaagcttactgttctcktagttcccataaaatactccctcaatgacaaaagagcagagcgatacaactgagggtaaaaaatcaccactgtgaagagaagctcttattgttcagaaatgttggaattcttatgtttctttctcagtctaaaacttttagtttgcattaactacatcatcttcagttaggtattttccttctatgttaag

SEQ ID NO: 76883 - DNA, 600 bp, Chicken  19866894364792_1
atcccggtgccatttagttgggtgagtggtccccacgggggacgaatgtccccgcagtgcaagcagctgctgtgagatgacactcctggccgacccctcctccctcttcttccccgtgtccttttcttatctgcagtgcagctcaggatcttgctacgaaaataactggcatcagagtagcaaagtgagcagtcagtggtttttatgggcccttgcaggccggggctgtctggcggaaggcagggaacagaagagttcagatttggggttgcagaaggctttttttgctttctgcagatstattcataaaattgagcaaagccagctttcctacgagtaaaatcagcattttttacttgtcatttgtccttgcaaagcaaaagaggtgtggtgtttgcacagatacccttcctttcttattggagctgtgggtctctgtgagtctgctgacctctttggataaagttcttgttgaggacggcccaacaattccatcctcttgtctgtaactgggggtgtgagggggtgtggatccttggtgtggtgccccaggcatcacccacactgagcatctttgaaccgctcactaaagcagagcag

SEQ ID NO: 76884 - DNA, 600 bp, Chicken  19866894364793_1
tcatcatggagatggacatgatgacttgtacatagcagtccctgactgttccacaacttcattaatattaaccccaataaaacaaaagcatggagttctcagcccagcattatcacagatgagagctgcctatgttaataaatgtagaacagctgcctgtgtaaataaagatgaaataatacaccgattctaaacctttattaagattctcccatatttaatcgtgatgggagggggaaaaatggaagttaatctccatgtgataaatatctatatgagagaagggaaaatagagcctcmtgtaaatgtctcttccagcraatgarcgacataygctattgtgatctaccatactmttgtagtctaacttagtagttacccaagagtactgaggttgaaagtggctttggctgtattacagcttaattcctgattactgctttcttcttcccacaggtaccagttgacaatccggtagaacgtgaaacttgtactgcattaaaaattcagtcagatttgtaaacccaaaagaagatggcttagaaacgcacaattttggttgaatgctgaacaaaattagtgtatcactggattttttgt

SEQ ID NO: 76885 - DNA, 600 bp, Chicken  19866894364793_2
atgacttgtacatagcagtccctgactgttccacaacttcattaatattaaccccaataaaacaaaagcatggagttctcagcccagcattatcacagatgagagctgcctatgttaataaatgtagaacagctgcctgtgtaaataaagatgaaataatacaccgattctaaacctttattaagattctcccatatttaatcgtgatgggagggggaaaaatggaagttaatctccatgtgataaatatctatatgagagaagggaaaatagagcctcmtgtaaatgtctcttccagcraatgarcgacataygctattgtgatctaccatactmttgtagtctaacttagtagttacccaagagtactgaggttgaaagtggctttggctgtattacagcttaattcctgattactgctttcttcttcccacaggtaccagttgacaatccggtagaacgtgaaacttgtactgcattaaaaattcagtcagatttgtaaacccaaaagaagatggcttagaaacgcacaattttggttgaatgctgaacaaaattagtgtatcactggattttttgtgtatgagtagtaaaatgtgt

SEQ ID NO: 76886 - DNA, 600 bp, Chicken  19866894364793_3
tgtacatagcagtccctgactgttccacaacttcattaatattaaccccaataaaacaaaagcatggagttctcagcccagcattatcacagatgagagctgcctatgttaataaatgtagaacagctgcctgtgtaaataaagatgaaataatacaccgattctaaacctttattaagattctcccatatttaatcgtgatgggagggggaaaaatggaagttaatctccatgtgataaatatctatatgagagaagggaaaatagagcctcmtgtaaatgtctcttccagcraatgarcgacataygctattgtgatctaccatactmttgtagtctaacttagtagttacccaagagtactgaggttgaaagtggctttggctgtattacagcttaattcctgattactgctttcttcttcccacaggtaccagttgacaatccggtagaacgtgaaacttgtactgcattaaaaattcagtcagatttgtaaacccaaaagaagatggcttagaaacgcacaattttggttgaatgctgaacaaaattagtgtatcactggattttttgtgtatgagtagtaaaatgtgtttcgtg

SEQ ID NO: 76887 - DNA, 593 bp, Chicken  19866894364793_4
gcagtccctgactgttccacaacttcattaatattaaccccaataaaacaaaagcatggagttctcagcccagcattatcacagatgagagctgcctatgttaataaatgtagaacagctgcctgtgtaaataaagatgaaataatacaccgattctaaacctttattaagattctcccatatttaatcgtgatgggagggggaaaaatggaagttaatctccatgtgataaatatctatatgagagaagggaaaatagagcctcmtgtaaatgtctcttccagcraatgarcgacataygctattgtgatctaccatactmttgtagtctaacttagtagttacccaagagtactgaggttgaaagtggctttggctgtattacagcttaattcctgattactgctttcttcttcccacaggtaccagttgacaatccggtagaacgtgaaacttgtactgcattaaaaattcagtcagatttgtaaacccaaaagaagatggcttagaaacgcacaattttggttgaatgctgaacaaaattagtgtatcactggattttttgtgtatgagtagtaaaatgtgtttcgtga

SEQ ID NO: 76888 - DNA, 571 bp, Chicken  19866894364793_5
cttcattaatattaaccccaataaaacaaaagcatggagttctcagcccagcattatcacagatgagagctgcctatgttaataaatgtagaacagctgcctgtgtaaataaagatgaaataatacaccgattctaaacctttattaagattctcccatatttaatcgtgatgggagggggaaaaatggaagttaatctccatgtgataaatatctatatgagagaagggaaaatagagcctcmtgtaaatgtctcttccagcraatgarcgacataygctattgtgatctaccatactmttgtagtctaacttagtagttacccaagagtactgaggttgaaagtggctttggctgtattacagcttaattcctgattactgctttcttcttcccacaggtaccagttgacaatccggtagaacgtgaaacttgtactgcattaaaaattcagtcagatttgtaaacccaaaagaagatggcttagaaacgcacaattttggttgaatgctgaacaaaattagtgtatcactggattttttgtgtatgagtagtaaaatgtgtttcgtga

SEQ ID NO: 76889 - DNA, 529 bp, Chicken  19866894364796_1
agaaaaagcccactgtgggtcaagggaaatgctgtgctttagttccagttttgctgcaatccaacagcagtatttggcagcaggctgagagtacctctagcactgttaatttcttttatgcagtacttctgatctctaggtggccaacatagtctaagaaataccctccgtatttattcagaagaggttcaggccatttgcacagagctgtgctgataaaagggaaggtgtctggcatcagaatgaatcttgtcacttgcaaagtgctgaaggatttcatctctttgtaattaagcaggsagcctgtgctctggctcgctctgcagacagcaagcagtgttgtgactggcccagcacaatrcgtgcacctttcactaagtatatttgaaatctaatacctggaatcctcttggaaagatttggtggagaacaatgagctggcagctacttagaggacaacacacaggttgcattcctgttttctttgttcgtgccaaagacctttggaccatcttttttttttttttaa

SEQ ID NO: 76890 - DNA, 468 bp, Chicken  19866894364796_2
caacagcagtatttggcagcaggctgagagtacctctagcactgttaatttcttttatgcagtacttctgatctctaggtggccaacatagtctaagaaataccctccgtatttattcagaagaggttcaggccatttgcacagagctgtgctgataaaagggaaggtgtctggcatcagaatgaatcttgtcacttgcaaagtgctgaaggatttcatctctttgtaattaagcaggsagcctgtgctctggctcgctctgcagacagcaagcagtgttgtgactggcccagcacaatrcgtgcacctttcactaagtatatttgaaatctaatacctggaatcctcttggaaagatttggtggagaacaatgagctggcagctacttagaggacaacacacaggttgcattcctgttttctttgttcgtgccaaagacctttggaccatcttttttttttttttaa

SEQ ID NO: 76891 - DNA, 600 bp, Chicken  19866894364800_1
cagagctgtgacctccagagcacacagaagaatgaagtctcactttcaataatgagaattttgcacccaagctgcaataacagacggatgttatttcttttatagcttacaaacgtcaccacagtgcaaactcattacataccccaacagaagcacattgctcttcatagaaactgtcgggagataaaagtttcagcgcagaatttattgtttatgaagcccactcatttactgcgcaatgcagttttatcagtaactattttcagagcctaagaaagaaagaaattcaataaattcaaraggctgttaatagtgtgaggagaaggcagctcttcattgtgtgactgagtctcattgtccaattgtcccaggaaatttaaagcagaatgtgtttttgacagcttcgttaatgtgacttttttttttcccctkccagaaattcaagcataattgagacatagtgttgaacttcaaatgtttccccgagacctgaatggtgaacttgatgaagcatgtaatatggcataacctcccaattattcacacgtttagataactataatcacacaattcctatcgtggcaaaaaggttattgtagg

SEQ ID NO: 76892 - DNA, 600 bp, Chicken  19866894364800_2
cattacataccccaacagaagcacattgctcttcatagaaactgtcgggagataaaagtttcagcgcagaatttattgtttatgaagcccactcatttactgcgcaatgcagttttatcagtaactattttcagagcctaagaaagaaagaaattcaataaattcaaraggctgttaatagtgtgaggagaaggcagctcttcattgtgtgactgagtctcattgtccaattgtcccaggaaatttaaagcagaatgtgtttttgacagcttcgttaatgtgacttttttttttcccctkccagaaattcaagcataattgagacatagtgttgaacttcaaatgtttccccgagacctgaatggtgaacttgatgaagcatgtaatatggcataacctcccaattattcacacgtttagataactataatcacacaattcctatcgtggcaaaaaggttattgtaggcagatattggcaggggctaatggacagcatattgcaagggcaaggagggtttggaaggaagcattaatcagaatttggtagtaaagtcattattcacagcttaacaaagctgtcactctctgctgcagtccc

SEQ ID NO: 76893 - DNA, 599 bp, Chicken  19866894364806_1
  misc_feature (1)..(131): n is any nucleotide
nnnnnnnnnnnnnnnnnnnnnnnnnnnnnnnnnnnnnnnnnnnnnnnnnnnnnnnnnnnnnnnnnnnnnnnnnnnnnnnnnnnnnnnnnnnnnnnnnnnnnnnnnnnnnnnnnnnnnnnnnnnnnnnnnnnatttttctctgcttttaccggttcattaagaaagagaaaaatatggggaaaaaagggaaatttttcatttccatcttccatataagcatttattagtgaatgcattcaaagtacttcaattaaagttgattctagtttctgatgccaaaataacagcgtaagattgttwgcctaattcctgagagagtgcattgtttttagcaagcatttctaatttatgtgtttgtcctgcctctcttcaaatctgcctttggactcagaatgtaaagcagggtgggcagcttgtctgccattctctttgcagatctctctcaaggaattgggagtgagaagtgcccccacaccgggtacagatgtgctgatgggctccccagcacacatagcggtgctacgctgaaagagagmgctcaacatgttgctcgaccagctcacagaagcagggtgtgtgattttaaataactggggtaa

SEQ ID NO: 76894 - DNA, 600 bp, Chicken  19866894364806_2
tcaaagtacttcaattaaagttgattctagtttctgatgccaaaataacagcgtaagattgttwgcctaattcctgagagagtgcattgtttttagcaagcatttctaatttatgtgtttgtcctgcctctcttcaaatctgcctttggactcagaatgtaaagcagggtgggcagcttgtctgccattctctttgcagatctctctcaaggaattgggagtgagaagtgcccccacaccgggtacagatgtgctgatgggctccccagcacacatagcggtgctacgctgaaagagagmgctcaacatgttgctcgaccagctcacagaagcagggtgtgtgattttaaataactggggtaaaaaccctcagtgacatctttagaatatgaatgccaygcctcttcttgtttcctttattccttcccctcctcgcacccccccattttccttttcatctcttctcctttcaattccattaagcttcattgtataataatgtatcacagtggacttttttcaattatgttttgattttttttttcctgcttgttactataaaactccagatgttttgagacttcatggttctctggatat

SEQ ID NO: 76895 - DNA, 600 bp, Chicken  19866894364806_3
gcatttctaatttatgtgtttgtcctgcctctcttcaaatctgcctttggactcagaatgtaaagcagggtgggcagcttgtctgccattctctttgcagatctctctcaaggaattgggagtgagaagtgcccccacaccgggtacagatgtgctgatgggctccccagcacacatagcggtgctacgctgaaagagagmgctcaacatgttgctcgaccagctcacagaagcagggtgtgtgattttaaataactggggtaaaaaccctcagtgacatctttagaatatgaatgccaygcctcttcttgtttcctttattccttcccctcctcgcacccccccattttccttttcatctcttctcctttcaattccattaagcttcattgtataataatgtatcacagtggacttttttcaattatgttttgattttttttttcctgcttgttactataaaactccagatgttttgagacttcatggttctctggatattttttcctttattttaatcttcttttgtaacatgccacacatgtggtattttggccttttaagatgctatgctatgctaatcagctataagtttggcaa

SEQ ID NO: 76896 - DNA, 600 bp, Chicken  19866894364807_1
atagcttggggaaagataaaggactgagttctgcgtgtttatcataattttctctttcaagagtgtattttcatttaagtcatgaaaatatgtaggctgctctgaaagaaatgcctcctgtgttatgatgctggcctgcaatgtcagaggcaaatggtggtggtacagcagtagaggttgactcttcccaccaatattcagctacatttcattgctctgtgacagatggcagcagagaggcgctctgacaagatggcatctgacagagaagcacatatgaagccaaggtgtggtgtttgrttcctttatgcagaaaaaaattgcacccactgayattcatagatgcttgctgaatgtttatagagaccaggcactggatattagcacagtgaggtgcttgatggtgtgtttcagcagtggtgacagcagcatgaaagacaaaccacgctccagacagctgtgaagatttttaggagcactgtacacaggctcttgttcattgctgatgaaaatgcttagttaatggtgattgtgttgaaaaataatgttttgtagctgagaatttatcaractgtgtcgtcgtgctcattgcatctgttg

SEQ ID NO: 76897 - DNA, 600 bp, Chicken  19866894364807_2
gtgtttatcataattttctctttcaagagtgtattttcatttaagtcatgaaaatatgtaggctgctctgaaagaaatgcctcctgtgttatgatgctggcctgcaatgtcagaggcaaatggtggtggtacagcagtagaggttgactcttcccaccaatattcagctacatttcattgctctgtgacagatggcagcagagaggcgctctgacaagatggcatctgacagagaagcacatatgaagccaaggtgtggtgtttgrttcctttatgcagaaaaaaattgcacccactgayattcatagatgcttgctgaatgtttatagagaccaggcactggatattagcacagtgaggtgcttgatggtgtgtttcagcagtggtgacagcagcatgaaagacaaaccacgctccagacagctgtgaagatttttaggagcactgtacacaggctcttgttcattgctgatgaaaatgcttagttaatggtgattgtgttgaaaaataatgttttgtagctgagaatttatcaractgtgtcgtcgtgctcattgcatctgttgtcaattctatggaaataaataggagacgcttctt

SEQ ID NO: 76898 - DNA, 600 bp, Chicken  19866894364807_3
gcacatatgaagccaaggtgtggtgtttgrttcctttatgcagaaaaaaattgcacccactgayattcatagatgcttgctgaatgtttatagagaccaggcactggatattagcacagtgaggtgcttgatggtgtgtttcagcagtggtgacagcagcatgaaagacaaaccacgctccagacagctgtgaagatttttaggagcactgtacacaggctcttgttcattgctgatgaaaatgcttagttaatggtgattgtgttgaaaaataatgttttgtagctgagaatttatcaractgtgtcgtcgtgctcattgcatctgttgtcaattctatggaaataaataggagacgcttctttcagagcaacctatgtattttggatacttaaacacattcacattatccagcaattgatttgatagtcccctactatttcagaggtgctaaatttacatagaagtcattggcaccaaagaagtcttgacttatgtcttgtgttacaggaaatctaaggaagaatacgaaatagagcaagaaaggagaaggacggaagaggtgagtatcttatctttctagatggtttatgttgagga

SEQ ID NO: 76899 - DNA, 600 bp, Chicken  19866894364816_1
aatactgcagagggaatcagaagtcatcaccgaagcaccgcaaggtcaggaaggtaagtctcagaatttgtacatgaactgtattttattatcccttcaaactcatgcggagagagagaaacagcaggacttatagcatgctaagaagctgctaaagcagttactggtgcaggttagtagctttggttttgttttaatagcagtaaggaaacccagaagaaaagcaatgatgcaataccatccaatatacagttgcttaagaaacgtatgaataaattttactgccagttttcacagaawttccagctctgctagtctggaaagggggctttaaaccacaattcttgtgtgattttatacctcaaatatctctggattattagatgacatctggatttctgttgcagggtaggatgtttcttgcattagtgaacttaggtaggagaatgaccacacagccaatccatttctgtagttcttctgtttcattttcttattgtttctcaaactaaatactactcttcccacacgtgtgtaaatttactggaaagttcttactgagaactgttttcttgctcaccatgaaacaaaacccacaaa

SEQ ID NO: 76900 - DNA, 600 bp, Chicken  19866894364816_2
acatctggatttctgttgcagggtaggatgtttcttgcattagtgaacttaggtaggagaatgaccacacagccaatccatttctgtagttcttctgtttcattttcttattgtttctcaaactaaatactactcttcccacacgtgtgtaaatttactggaaagttcttactgagaactgttttcttgctcaccatgaaacaaaacccacaaatctgaaacacacagaccaaatccaggtgtataacctaggaggggaaacagtaactgggatggtttgtaactctcacaagacatatrtttgcatatgaaaggtttcccatcctcctttaaaaagtaaaagccaaaaatacagcatatgggtacctaaaatattttttttaattaaaaaatcaaggaactgaacaatggagcacaaaacttcacaaactcaaacatgtttgtgtctctccccacatcaaagaaacatttaatagaatggcagagctgtgccagctgagattttgttattttctatccagcactgtaagtactacagccaatcactaaagcattacagattagcattatgctaaagcagatcagccccgctgaaccctg

SEQ ID NO: 76901 - DNA, 591 bp, Chicken  19866894364824_1
gcaacttacagcatggacaaaatggatgcagttttcacctagaaatgttgagtataagctctatggcttataataatgtaaatactttagcaatttgttttaattagaactagcctttttatcttaaatggtaactgattattgtattttgacctgcaatgtgaaactattgagttgtaagtgaagtaagaatcacgtagttaactccttgttttaccctttggtttccatcttacggttttgtaatgctgccctgataaatctaacataaattttaacttttttcatagagcattcagkaaatagagaaccytttatgttaayagtaatcaacaaataattttacatgaaaatattttcttcaaagacaatgacactgaaataactcatgcaactgtcaggtcaattattgttaagttcagtaaatcattaataaattaataaattcccattttgcactcacttccagatgttttccgataaacttgaatttaaatttactgtggaattgagcaaaccttaattatcatcatcaattagcatatgatcctgtggtttttagaatatttccagtcaaaagagttacggaag

SEQ ID NO: 76902 - DNA, 578 bp, Chicken  19866894364824_2
tggacaaaatggatgcagttttcacctagaaatgttgagtataagctctatggcttataataatgtaaatactttagcaatttgttttaattagaactagcctttttatcttaaatggtaactgattattgtattttgacctgcaatgtgaaactattgagttgtaagtgaagtaagaatcacgtagttaactccttgttttaccctttggtttccatcttacggttttgtaatgctgccctgataaatctaacataaattttaacttttttcatagagcattcagkaaatagagaaccytttatgttaayagtaatcaacaaataattttacatgaaaatattttcttcaaagacaatgacactgaaataactcatgcaactgtcaggtcaattattgttaagttcagtaaatcattaataaattaataaattcccattttgcactcacttccagatgttttccgataaacttgaatttaaatttactgtggaattgagcaaaccttaattatcatcatcaattagcatatgatcctgtggtttttagaatatttccagtcaaaagagttacggaag

SEQ ID NO: 76903 - DNA, 567 bp, Chicken  19866894364824_3
gatgcagttttcacctagaaatgttgagtataagctctatggcttataataatgtaaatactttagcaatttgttttaattagaactagcctttttatcttaaatggtaactgattattgtattttgacctgcaatgtgaaactattgagttgtaagtgaagtaagaatcacgtagttaactccttgttttaccctttggtttccatcttacggttttgtaatgctgccctgataaatctaacataaattttaacttttttcatagagcattcagkaaatagagaaccytttatgttaayagtaatcaacaaataattttacatgaaaatattttcttcaaagacaatgacactgaaataactcatgcaactgtcaggtcaattattgttaagttcagtaaatcattaataaattaataaattcccattttgcactcacttccagatgttttccgataaacttgaatttaaatttactgtggaattgagcaaaccttaattatcatcatcaattagcatatgatcctgtggtttttagaatatttccagtcaaaagagttacggaag

SEQ ID NO: 76904 - DNA, 600 bp, Chicken  19866894364829_1
tataattccttttatcttaacatcctgatcagtgctggcactacaaaggtacgttaagttataccagacatttctgcataaaaacaaaaaaggacataaaaaaaaaattgatcatatcaaatcagggtgttctctcatatcaaagttcttccccctgcaaccaacacgactgcccggacacttgaatagacacgtgctcaggtgcagggttaccacagggtaacctcagtgacacacatcagtgctcccatcttttggacagctcttattaagatgttgccacaaggacatgtaagctcmaacacacacaaatgccacttgtacccagtgagcttagatgactgaaaaagctactactaccaaaaatgagaaggcgttaagaggccttgacaaatggaggcctggtgagcattctgtgagmctttgacactcaacaaatgcaaggtgaacaattatattccatcagaacagtcttcaagacagcaaaaccctgttaaaatgatcactggtttgaaagcagacattttactttctggaaaactcaatgcgtatcttcatttttagtatcgctgtaaagaattacataaaggagtctcatta

SEQ ID NO: 76905 - DNA, 600 bp, Chicken  19866894364829_2
tcagggtgttctctcatatcaaagttcttccccctgcaaccaacacgactgcccggacacttgaatagacacgtgctcaggtgcagggttaccacagggtaacctcagtgacacacatcagtgctcccatcttttggacagctcttattaagatgttgccacaaggacatgtaagctcmaacacacacaaatgccacttgtacccagtgagcttagatgactgaaaaagctactactaccaaaaatgagaaggcgttaagaggccttgacaaatggaggcctggtgagcattctgtgagmctttgacactcaacaaatgcaaggtgaacaattatattccatcagaacagtcttcaagacagcaaaaccctgttaaaatgatcactggtttgaaagcagacattttactttctggaaaactcaatgcgtatcttcatttttagtatcgctgtaaagaattacataaaggagtctcattagtattcagtttaggatccagcagtagcaacatacacatacaacaaacaraacagctacaggctcaatgcaagtttccagtgtcaaataagtgcagtgcatatggtggctttgggcattgtg

SEQ ID NO: 76906 - DNA, 457 bp, Chicken  19866894364829_3
gctactactaccaaaaatgagaaggcgttaagaggccttgacaaatggaggcctggtgagcattctgtgagmctttgacactcaacaaatgcaaggtgaacaattatattccatcagaacagtcttcaagacagcaaaaccctgttaaaatgatcactggtttgaaagcagacattttactttctggaaaactcaatgcgtatcttcatttttagtatcgctgtaaagaattacataaaggagtctcattagtattcagtttaggatccagcagtagcaacatacacatacaacaaacaraacagctacaggctcaatgcaagtttccagtgtcaaataagtgcagtgcatatggtggctttgggcattgtgctgactctggagatcctcagatgcttttacacagaaagaacagaagcaaccctcattttctctattgctgcaaacacttctgaaa

SEQ ID NO: 76907 - DNA, 599 bp, Chicken  19866894364832_1
  misc_feature (1)..(140): n is any nucleotide
nnnnnnnnnnnnnnnnnnnnnnnnnnnnnnnnnnnnnnnnnnnnnnnnnnnnnnnnnnnnnnnnnnnnnnnnnnnnnnnnnnnnnnnnnnnnnnnnnnnnnnnnnnnnnnnnnnnnnnnnnnnnnnnnnnnnnnnnnnnnttcatgtaattacaatcaaaatgaaaatagtaaaataaatagcagttggttttgttggttggttacagactaaacattgatccagaacattcataatataaatcctttgatttcagtggcattgaacttatgataaacctgaaccctggacattgtgacygtctcttaattccatttttttcttcaaccagtggaaactgaactactgatgttgttagagatggaatcatttttattaggggattatataaatgtccaaaataagtggacaaatatttatgagattttcttcttgtgttcgaaagaggatagacagaagatagaatggaaatgaccttaaattcaccctgcacctcccagtagtgacaaacgtgtttctcctgaaatccaagtgagactactgtggtggtctmcatttatatcaattgcattggatacactactctgtcctttgccygt

SEQ ID NO: 76908 - DNA, 600 bp, Chicken  19866894364832_2
cagtggcattgaacttatgataaacctgaaccctggacattgtgacygtctcttaattccatttttttcttcaaccagtggaaactgaactactgatgttgttagagatggaatcatttttattaggggattatataaatgtccaaaataagtggacaaatatttatgagattttcttcttgtgttcgaaagaggatagacagaagatagaatggaaatgaccttaaattcaccctgcacctcccagtagtgacaaacgtgtttctcctgaaatccaagtgagactactgtggtggtctmcatttatatcaattgcattggatacactactctgtcctttgccygtagtaggcacagaaarcttttgccaaggtgtacttgtcatagatactttcgcaacatataaaggttttatgcatttttaaagttaattttttaatggctcttacatattatagtttcagtagcatgaagtctttctgtcagcctcttaaaatatacattattcattcttcattagctgatattccagcctacataggaagtacagcattcaaagttcttgaagtttagtaaaagcttgtattttttaaccttatt

SEQ ID NO: 76909 - DNA, 585 bp, Chicken  19866894364832_3
acygtctcttaattccatttttttcttcaaccagtggaaactgaactactgatgttgttagagatggaatcatttttattaggggattatataaatgtccaaaataagtggacaaatatttatgagattttcttcttgtgttcgaaagaggatagacagaagatagaatggaaatgaccttaaattcaccctgcacctcccagtagtgacaaacgtgtttctcctgaaatccaagtgagactactgtggtggtctmcatttatatcaattgcattggatacactactctgtcctttgccygtagtaggcacagaaarcttttgccaaggtgtacttgtcatagatactttcgcaacatataaaggttttatgcatttttaaagttaattttttaatggctcttacatattatagtttcagtagcatgaagtctttctgtcagcctcttaaaatatacattattcattcttcattagctgatattccagcctacataggaagtacagcattcaaagttcttgaagtttagtaaaagcttgtattttttaaccttattttttctcagtatccagctatagagcagca

SEQ ID NO: 76910 - DNA, 568 bp, Chicken  19866894364832_4
tttttttcttcaaccagtggaaactgaactactgatgttgttagagatggaatcatttttattaggggattatataaatgtccaaaataagtggacaaatatttatgagattttcttcttgtgttcgaaagaggatagacagaagatagaatggaaatgaccttaaattcaccctgcacctcccagtagtgacaaacgtgtttctcctgaaatccaagtgagactactgtggtggtctmcatttatatcaattgcattggatacactactctgtcctttgccygtagtaggcacagaaarcttttgccaaggtgtacttgtcatagatactttcgcaacatataaaggttttatgcatttttaaagttaattttttaatggctcttacatattatagtttcagtagcatgaagtctttctgtcagcctcttaaaatatacattattcattcttcattagctgatattccagcctacataggaagtacagcattcaaagttcttgaagtttagtaaaagcttgtattttttaaccttattttttctcagtatccagctatagagcagca

SEQ ID NO: 76911 - DNA, 526 bp, Chicken  19866894364833_1
agtgttccagaactgttggaatggaaagtgcaatgagcagttttgttgattgttggatattaagatatacatatgtacaataaccacgcgttttttgtttgttggttgtttggttgattttttttgttttaatacagatttctgtacacatttcttttcatagagatggtcatccagtacatccaaaacccaggagcccagatagctcagattcatggtcaaagaaagctaatggtaagatttccatggccacttagtgcatgtgaaacgcacatctgtaaaaatgaaggaagtggtgtkggtcttacatgctctcttgtgttcagttgctgcgttacaacygtgtgtgctgagatagctccagcaggcatttattcagtttctcttgcagtttagaaattttctctcataacaagcctaagtcattcaaggagtaagtttaaccgatctattattattattacatatgtatatttttttttttacttgtgtcctgtttgttctgaccgcaaataaaaacatcagt

SEQ ID NO: 76912 - DNA, 484 bp, Chicken  19866894364833_2
ttgttgattgttggatattaagatatacatatgtacaataaccacgcgttttttgtttgttggttgtttggttgattttttttgttttaatacagatttctgtacacatttcttttcatagagatggtcatccagtacatccaaaacccaggagcccagatagctcagattcatggtcaaagaaagctaatggtaagatttccatggccacttagtgcatgtgaaacgcacatctgtaaaaatgaaggaagtggtgtkggtcttacatgctctcttgtgttcagttgctgcgttacaacygtgtgtgctgagatagctccagcaggcatttattcagtttctcttgcagtttagaaattttctctcataacaagcctaagtcattcaaggagtaagtttaaccgatctattattattattacatatgtatatttttttttttacttgtgtcctgtttgttctgaccgcaaataaaaacatcagt

SEQ ID NO: 76913 - DNA, 600 bp, Chicken  19866894364838_1
ctctgctggcttccagggctgtgctccttgaggagacagctggcagctcgccctcaccttgcaaagaggctgactggccactggcaccttgcgaaaacaactccttcagccctgtttgtcatgcaggtgacacagctgggaatgcccaaaatggcagggggaccaggaggcagaggaaggggtgatgaatcggctcctgcatctaattcagcttgcttgctccttacccagcctggtttggaagcagagcttaaaatgtgtttgtttaggaggtttgttatagttttggaagctgacacyggagttacacagagcagcagggcagagggtaaaacaatattttattctgaagttaaagcactttcacaagggtaaaataagtaggttgtgctggctggggctcattgaagtacggtgtcctgggctgcaggagctgagaccttccctactccygctctaaatgtgggcacactgcatccaggggtgatggaatccctggggctctcctcagcttatcatttgggatcccttgtgattgcttctggaaagaaagggattaatttaatggccagccaaagctgggcaatatgtctgtattaa

SEQ ID NO: 76914 - DNA, 600 bp, Chicken  19866894364838_2
gcagggggaccaggaggcagaggaaggggtgatgaatcggctcctgcatctaattcagcttgcttgctccttacccagcctggtttggaagcagagcttaaaatgtgtttgtttaggaggtttgttatagttttggaagctgacacyggagttacacagagcagcagggcagagggtaaaacaatattttattctgaagttaaagcactttcacaagggtaaaataagtaggttgtgctggctggggctcattgaagtacggtgtcctgggctgcaggagctgagaccttccctactccygctctaaatgtgggcacactgcatccaggggtgatggaatccctggggctctcctcagcttatcatttgggatcccttgtgattgcttctggaaagaaagggattaatttaatggccagccaaagctgggcaatatgtctgtattaaagcccccagaatacaaaacttactttcttgacctaagaaatttacaactatccatcagcgatccctggaaagatgatgccttctggcaccttcaggtggctgatcagccaattgaatgtggtgaaatactggtatgtgtgggtatgtgatcag

SEQ ID NO: 76915 - DNA, 600 bp, Chicken  19866894364840_1
tcttcccacaggtactataaggtgctatatccatataatgtatgcatttaatatttgctttaaaaagctctccgcttccaaattcactttaaaaacttgattcccagtgtgattttagctatctaaagagaggataataaaattaattcataggaaagataactcaggttcagtttcacgtatctactatacctgcaccagatctgccaggtaactaagctggggcgttgattcctcagaaaatactcttccagctgaatcaccatctttgcttcaggcagaactttgctattcttcaartttcccgtccaactcgtggccaatcctaatgtggtatgggtgccaatccgtcataattatagtgggaatatgaaaacacaattcaaatgaactccactaacactgtggaagttcagctcaaggatggtttagattttcagtccccattcaggtagtttctattttttgccaaacaatttacctcactgctgaacttggcaatcttgcttcatcagcattgctctgaaaaaaaagaaaaaaaaaaagaagaaattaatcagatttcctgccattccattagctattttttttttgtttcat

SEQ ID NO: 76916 - DNA, 600 bp, Chicken  19866894364844_1
tgctgagtgcagcctgcctcatccttggggtaaggagagggcagatgagagctgtggctgtcctggtgaagccctgggacctgagcatctgtcacttgtttttgaaaaggctgggataacaaattctgtgttttccagctactggcagaataccaaacagttaagtccttactttattatcacccctctagcagccaccatgcactgaaacaatggtgaatggaaacagagcttatttgtgctgcaagtgaggacaacggtttggaaacctgactggcacaaccgggctgatgcaggggygggggcaaccggagaggagttcagctttaggcactccaggagctcacatttaattaaaacagggaggaatttgtctcggcaagttgtgagacttccttcccagcgtgactaagccactgtgtgttatctaacccctccaaggggactttgctgccagctaaccacgttcctgcagtcaaagtgggctcattgaatctggtttggtgctttggggcaagcctgcttgccagcctacctgyacctccacaatcccaatcaaccttgctagccacaagacaacccagtgggagttttaattgc

SEQ ID NO: 76917 - DNA, 600 bp, Chicken  19866894364844_2
tgctgcaagtgaggacaacggtttggaaacctgactggcacaaccgggctgatgcaggggygggggcaaccggagaggagttcagctttaggcactccaggagctcacatttaattaaaacagggaggaatttgtctcggcaagttgtgagacttccttcccagcgtgactaagccactgtgtgttatctaacccctccaaggggactttgctgccagctaaccacgttcctgcagtcaaagtgggctcattgaatctggtttggtgctttggggcaagcctgcttgccagcctacctgyacctccacaatcccaatcaaccttgctagccacaagacaacccagtgggagttttaattgcaaagaagtattcaataaatcctgacaaaatccaagggctcgaccagaatgacaggttcttgcagttttcttcatctctctatttccagcaatacaaataaaattcttcccttgttgcaacatgcacctaccacttgccctgcggctccccacagctgagagctgtccttaactatggtaggaaagtcctggtgctgacttttcttgcaatagtgatgcaaacgttgagataaatttctc

SEQ ID NO: 76918 - DNA, 600 bp, Chicken  19866894364846_1
caccactgttttctaaagatttatttttttgtaaagctgtttattaagttgttctacgaagcagttttattttgatttgtatatacgttataggaatgactaaaattctggtagttattttttacactgacacattaatctcagacggaaaatataatgaaacacacacacaaacattttagagtactaaattacttctaccggtctaatacaattacccttaagttttaaattaaaacttcagtcctgcagcttactatagacaagttggtatttgtattgatgtaacaatgcagaaakagtactatatccaaaacttcctacaaaaagggaactattaaatcaagtaaaactgaggaaacagcaatatcagaaatttctgaaacagtttatttcatataaaagtcaaatgtattttttcactaacggattttccttttaatcagaatttgctgtaaaattacatgatcacggtgcatacagtttcacagacctacagcattcaattttagtttctacaacactgcaggaattatatgaaagatgggagagcagtacaaactcagctttttttctgtaatgttcttccagctcctcaaa

SEQ ID NO: 76919 - DNA, 600 bp, Chicken  19866894364846_2
atcagaatttgctgtaaaattacatgatcacggtgcatacagtttcacagacctacagcattcaattttagtttctacaacactgcaggaattatatgaaagatgggagagcagtacaaactcagctttttttctgtaatgttcttccagctcctcaaatctgggttaagaggccacattctattaaacattgatgcaaatatgcataaatcaaagccatgctaaatgttccaattgtaacatggttatatgcaaatgctaaatcctaactccagcagaattattgttttttaatcttamtacaaacagtatgtttattatgctatactactaaaggccagtaaggccctacattcttttgtttgtttttaaggatgtatttacaagttgaaagagaaacaggttgaaatctggcagaattctttgtccaacagcaactgttccataacatttgtttcgaaacgtattatcttctgctactttttcaaatttaatttcagatattttaagcttacatcttttttttttaacattaaaaaacatctgcattaaaataaatatacatttttactttaacacttttacatttttacaatgagg

SEQ ID NO: 76920 - DNA, 600 bp, Chicken  19866894364848_1
gagaagaggagggtcttcttggaagacctttttgtggctttcagtatataaaacgggtcttatgaaaaagatgaagactttttattagagcctgtagtgacaggacaatgggcaatggtttcagattgaaagaggatagaaattgggtataaggaagtcatttttcatgatgacagtggtgacatgctggaataggtttcccagagaatttatggatgttccaccattgcaagtgttcaaaatcatattggacagagctctgagcatcctgatcttgtggaagatgtccttgccaattgmtgtggacttggactaggtgattcctttccgaatcaaaccattttatgattctgtgattatggctaggattaatgaagttggaaaaaggagcagaggaaaattagaattttatccttcttcctcttctgccatttttgggtgttttcaaccctgtgttttgcagagacttgattttttttcagtgaggcatacaaaaaaagaacagtaataggctggacatttcagatattttgtggggaaagagtgtcttgcatgaagttctgcctcatatatgtttaagcacttatatcattaagcatt

SEQ ID NO: 76921 - DNA, 599 bp, Chicken  19866894364851_1
  misc_feature (1)..(106): n is any nucleotide
nnnnnnnnnnnnnnnnnnnnnnnnnnnnnnnnnnnnnnnnnnnnnnnnnnnnnnnnnnnnnnnnnnnnnnnnnnnnnnnnnnnnnnnnnnnnnnnnnnnnnnnnnnaaccgccttgccaagttggagcacttcacagacccactcccagcacagggcagtcagcaccactcactccatcagcccgtgcagcccagagctcatggatgcataaccctaaaatcacatccctattgcactcccactgctgaaagcactccggctcgtttcagagtggaagctgacagctcagccagacttcrgcatcgaggagmataamatacccaggcaccattcagtggaaacagaactcttatccatattgtgcttttatacgctaatgggattgcttagtgagatatagctgctgtctgccctgtagggaggatccctgtcagtggtaaggcaatgcttctgcttgcatagagcactgcgagctttttgcatacaccataagtcatgcctacccagatggaggagtttgcattgcctgagcctgctggttgcttcccagctccrcgggattctgctttgcagagccttcaggcaaggttccagcaga

SEQ ID NO: 76922 - DNA, 599 bp, Chicken  19866894364851_2
  misc_feature (1)..(94): n is any nucleotide
nnnnnnnnnnnnnnnnnnnnnnnnnnnnnnnnnnnnnnnnnnnnnnnnnnnnnnnnnnnnnnnnnnnnnnnnnnnnnnnnnnnnnnnnnnnnnnaaccgccttgccaagttggagcacttcacagacccactcccagcacagggcagtcagcaccactcactccatcagcccgtgcagcccagagctcatggatgcataaccctaaaatcacatccctattgcactcccactgctgaaagcactccggctcgtttcagagtggaagctgacagctcagccagacttcrgcatcgaggagmataamatacccaggcaccattcagtggaaacagaactcttatccatattgtgcttttatacgctaatgggattgcttagtgagatatagctgctgtctgccctgtagggaggatccctgtcagtggtaaggcaatgcttctgcttgcatagagcactgcgagctttttgcatacaccataagtcatgcctacccagatggaggagtttgcattgcctgagcctgctggttgcttcccagctccrcgggattctgctttgcagagccttcaggcaaggttccagcagagcgctgcatccc

SEQ ID NO: 76923 - DNA, 599 bp, Chicken  19866894364851_3
  misc_feature (1)..(89): n is any nucleotide
nnnnnnnnnnnnnnnnnnnnnnnnnnnnnnnnnnnnnnnnnnnnnnnnnnnnnnnnnnnnnnnnnnnnnnnnnnnnnnnnnnnnnnnnnaaccgccttgccaagttggagcacttcacagacccactcccagcacagggcagtcagcaccactcactccatcagcccgtgcagcccagagctcatggatgcataaccctaaaatcacatccctattgcactcccactgctgaaagcactccggctcgtttcagagtggaagctgacagctcagccagacttcrgcatcgaggagmataamatacccaggcaccattcagtggaaacagaactcttatccatattgtgcttttatacgctaatgggattgcttagtgagatatagctgctgtctgccctgtagggaggatccctgtcagtggtaaggcaatgcttctgcttgcatagagcactgcgagctttttgcatacaccataagtcatgcctacccagatggaggagtttgcattgcctgagcctgctggttgcttcccagctccrcgggattctgctttgcagagccttcaggcaaggttccagcagagcgctgcatcccatgcc

SEQ ID NO: 76924 - DNA, 598 bp, Chicken  19866894364851_4
ccggctcgtttcagagtggaagctgacagctcagccagacttcrgcatcgaggagmataamatacccaggcaccattcagtggaaacagaactcttatccatattgtgcttttatacgctaatgggattgcttagtgagatatagctgctgtctgccctgtagggaggatccctgtcagtggtaaggcaatgcttctgcttgcatagagcactgcgagctttttgcatacaccataagtcatgcctacccagatggaggagtttgcattgcctgagcctgctggttgcttcccagctccrcgggattctgctttgcagagccttcaggcaaggttccagcagagcgctgcatcccatgccttcacctaaccagccctcagggagcacataaagactaacggacagctaatgatggaaagaaactagaggtagcttagtgggatttgggaaagataggagaaatgtgtgtttaaaataacaaacaccaccaccaaaaaaaacccccacaaaaatagtgagatagcaggggaggaacagctctccaatggctgagaatcagccactaacacataaaggtctccccagatttctccaacca

SEQ ID NO: 76925 - DNA, 600 bp, Chicken  19866894364852_1
aacaattgtttactttatagtggcagtaaaaaatactgaaagtacttttagcctaaggcaaccagatgccccagattcatcaggccagtcccattttttttaatggaccttcctgttgtctgttgcaaattgtccgggtgctgagccattccagttttcacagcccccttcccttcttcccagatagccaatgctccagccccagttcacttcctttgtgtctgacatctgcaccattagacaccggaaaggtgggcaggtagcccagtggccacaaaacctgcttcatttcttggctgwgccccaacaaccccactgccctccccgcaaaaatcttccaggatgctaagaccgcaaatctggtcagcttattttagccaactgtactatttagaaaaattaaaaccattactgcttgtttcaaaatatttgtctgcctctttagctttcacagagcatttctttgttttatgcttaatattttactgcagagaagaaattatttatttatttatttattatttttaaacaaaatagcattgctctgagatagctgaacctgaagctgttgatttattttttcttttgcattttgggatt

SEQ ID NO: 76926 - DNA, 539 bp, Chicken  19866894364857_1
ctctccctcccggcctcacaggatttgggtttcgtcaccgtgtgaggacgggcctctgcttgcacccggtgggtggacacgtgctggggcctcgccgctgcctgctcccaggtgctttagcttggttcagcaagagctgagccagtctgacggccccgctgtgcaggctgcgcgctgacatcactgctgggaacccgtcggacctgcagcactgtcctgagctgtgatggggtctgctcattgctcatgggctgctcccgctgcaggatggccctctgctcctctgctgcctcctccaartcctgcatatggtggggggggctgagaggaatcagtgctgtgccaaaagtcagctgggtggggggggatcccgcatgatggcacgagtgtgaccatggtggctgctccgtccttgcatcctggtcaggtccatcttcctctttgggactgggctgtggggccactgcccttgggaacagccggtgtgtcccacagggcagccctgcatccatcccagggcattcctgtgccctctgagg

SEQ ID NO: 76927 - DNA, 600 bp, Chicken  19866894364871_1
atggtgagcactaaagcattcaaacatagtcagacaaaaaagaaagacatttttgcactgatgaagtggctgactgccactggcttacactaggcacctgacttttaaatatttaggttttggcgagacttctcttgggcaagctgtaaagtcattctttcgcagatactctaaaatgattctggggagtgaaaaaatgcaagcagggagcttccgccacacacatctcagtatcagtattccctttgaccttaaccaacagattttctgacactttgggctgctgccctcctgcatccyaaatagcctaccaaagagagatatgaaatcatctgatctcatgtagccataagctgtcataagtatatgagtgcatataacactggagttgaaggagaactatctaaatgtcaaatattaggtatttttcataatatccagtctgaacctcccctggcacagctttatgccattccctcatgttttatcattggttccctcctcaggaagttgcagaaagcaatgaggcctttgagcctacttttctctcaactagagaagtcaagtgtcctcagtctatcctcatagcatacgcctttc

SEQ ID NO: 76928 - DNA, 600 bp, Chicken  19866894364871_2
agcctgttgtctcgagcaccacaggtccctttctgctgagctgctctccagccactcatctcccactctgtacctacatccagcattactctgtcccaggtgtagaacctagtatttacattagttgaacttaatgccactgttgacttcctagcactccaaattatctagatccctttgctagacctcttgtcccagactcccatgacctgtggtaaattaatgagatgagtccagcaataatgtctgctaactcccttggtgctctggagtaaatccaatcataccctatggacttakgaacyttgagctgatagaactgatccctcacagttttggtcaccgtggatggaaaatcactgcctagcttgtcagggtcctccagctttaaggaccaagcagcccatgatgtcattactattgcaaactgaggcaaaaagacactaaaagcttccactttttcctcatccttacttgttaggtgactgtgtgcatcaagtatcagtccagtgttttcctttgacctcctcttgcarttactgcacttgaaaatcctattgtgttgtctggcaccccacatagcctctcattcataggtct

SEQ ID NO: 76929 - DNA, 600 bp, Chicken  19866894364871_3
gttgtctcgagcaccacaggtccctttctgctgagctgctctccagccactcatctcccactctgtacctacatccagcattactctgtcccaggtgtagaacctagtatttacattagttgaacttaatgccactgttgacttcctagcactccaaattatctagatccctttgctagacctcttgtcccagactcccatgacctgtggtaaattaatgagatgagtccagcaataatgtctgctaactcccttggtgctctggagtaaatccaatcataccctatggacttakgaacyttgagctgatagaactgatccctcacagttttggtcaccgtggatggaaaatcactgcctagcttgtcagggtcctccagctttaaggaccaagcagcccatgatgtcattactattgcaaactgaggcaaaaagacactaaaagcttccactttttcctcatccttacttgttaggtgactgtgtgcatcaagtatcagtccagtgttttcctttgacctcctcttgcarttactgcacttgaaaatcctattgtgttgtctggcaccccacatagcctctcattcataggtctggtcc

SEQ ID NO: 76930 - DNA, 463 bp, Chicken  19866894364871_4
gcaataatgtctgctaactcccttggtgctctggagtaaatccaatcataccctatggacttakgaacyttgagctgatagaactgatccctcacagttttggtcaccgtggatggaaaatcactgcctagcttgtcagggtcctccagctttaaggaccaagcagcccatgatgtcattactattgcaaactgaggcaaaaagacactaaaagcttccactttttcctcatccttacttgttaggtgactgtgtgcatcaagtatcagtccagtgttttcctttgacctcctcttgcarttactgcacttgaaaatcctattgtgttgtctggcaccccacatagcctctcattcataggtctggtcctcatggaagaattcaaccattccaacatctgctggaagggcaatgcagcaggacataagaaatccagcagtttccttgggaatgttattaataa

SEQ ID NO: 76931 - DNA, 600 bp, Chicken  19866894364878_1
aggaaacacatagtttatctattattggagtcacttaattgtcttctcaatctgcatccatctaaagatatttcttgacttctcagaaaatacagtggcacaaaactactgatgtttttaaggagagggaaagtataatggtcttgtaataaaagacattctgaagagaatatgggagctcttgaatcagttattttcttcgtatcatttttttaaaatgtgtcatctcagaaagtcatttgtatttctaagcttttgatcttcatatatgaaacagtgtggtcatcctactacactggsaaactgcgaggaaacatttaccagttggctggggggctctgtactggagactgtataatataagaggagaaaaaccattaacttatataaatgcttattatggatattgttactaggttctgtgttcaggtgttggttaaaaacttcatttgacactctgcacagaacatttggaattctgaacataactcagctttgaaaacagtgttcttggcatatgaacctggaggtttaaatcagtttgatctttatcttttaagcactgtaactaaaaaaatcctgaaggtggaagaattcaaa

SEQ ID NO: 76932 - DNA, 600 bp, Chicken  19866894364880_1
gtgggaaatgaggggtggtgggagcctgaggggtggtgggctgccagtgctggtgggcttctataggggtggtcacccacagtggaaggctcccggtgctggtggcctcccaggagtcgcagccagcccaggcagtgccatgaaggcccccaggccccagccaggaccccagcccttccccatcccccacaaagctaagttctctctttccaagggccaggacaacacacagggccaggccaagcactgggcagcatccccaggctggcagctgtgctggaagcatgcaggcagggggaygctggaggggggctggcaccagtgagatggggagctcagccagtggcgaaggagttaagctttggggaaaggccacactacagagcccagctggagaagcaagaagtaacttgaggatcccggaaaagcaagggcagagggaagaggcgtaccttggcagggcaagaggtggctgtcatttatttgtggcgcrctgaagtcatccactcacacccgcgctctttccaggcccctgccccatccccgcagccgccacgagtgcttacgcagctgccccaggacaagggctggtttgttccc

SEQ ID NO: 76933 - DNA, 600 bp, Chicken  19866894364880_2
gctaagttctctctttccaagggccaggacaacacacagggccaggccaagcactgggcagcatccccaggctggcagctgtgctggaagcatgcaggcagggggaygctggaggggggctggcaccagtgagatggggagctcagccagtggcgaaggagttaagctttggggaaaggccacactacagagcccagctggagaagcaagaagtaacttgaggatcccggaaaagcaagggcagagggaagaggcgtaccttggcagggcaagaggtggctgtcatttatttgtggcgcrctgaagtcatccactcacacccgcgctctttccaggcccctgccccatccccgcagccgccacgagtgcttacgcagctgccccaggacaagggctggtttgttccccagcccagacctgagtgctgagctgccctggcatgctgtaaggagggcagtgggcccctctctcactgctcagcagtggcagaaggctgaggatggtgcgctggcagcttcatatggcacagcaaagggtcctggcaccccaatacctgcactgtgccaacactgctccagagtgctgccagcacttggctgt

SEQ ID NO: 76934 - DNA, 600 bp, Chicken  19866894364886_1
agagaatttgcaatggtaattaagctattattcaatgacaaaaagtaaaaaagaagcaattgctaaagaaacctcactgacacctggcctaaaaagatatatactttggttagaaagcacttgaaataagcaacgagagaactgctctttacagtgttttatccaaaatgaaatgagccaaattatctctgtcacttcatttgtctcttttctgttcttctctatattcctttcttattggactaaagtacctttcaaagctcccataagtagctgtagacaggcatttacatagtctgraagtactttccrtatttctttatcactccttgcctacttagtgtcatttactgtattgttttgaaatataagtagaaaaaaggataaaattgaatgatgtaggttcmattcgtgtgatcttagaaagcggttgtgatttcattacagacagctgcccagagaggttacagagttttgtaacatgccctgttcacagatggatcgtgtcgtattgtggggaggcagatggaaagctgctgtgtggagccccacacgacaagttgcagaggccactgaaggtaaaggagaatcaagtcagtt

SEQ ID NO: 76935 - DNA, 600 bp, Chicken  19866894364886_2
atggtaattaagctattattcaatgacaaaaagtaaaaaagaagcaattgctaaagaaacctcactgacacctggcctaaaaagatatatactttggttagaaagcacttgaaataagcaacgagagaactgctctttacagtgttttatccaaaatgaaatgagccaaattatctctgtcacttcatttgtctcttttctgttcttctctatattcctttcttattggactaaagtacctttcaaagctcccataagtagctgtagacaggcatttacatagtctgraagtactttccrtatttctttatcactccttgcctacttagtgtcatttactgtattgttttgaaatataagtagaaaaaaggataaaattgaatgatgtaggttcmattcgtgtgatcttagaaagcggttgtgatttcattacagacagctgcccagagaggttacagagttttgtaacatgccctgttcacagatggatcgtgtcgtattgtggggaggcagatggaaagctgctgtgtggagccccacacgacaagttgcagaggccactgaaggtaaaggagaatcaagtcagttcgcagaggtaaa

SEQ ID NO: 76936 - DNA, 600 bp, Chicken  19866894364886_3
ggttagaaagcacttgaaataagcaacgagagaactgctctttacagtgttttatccaaaatgaaatgagccaaattatctctgtcacttcatttgtctcttttctgttcttctctatattcctttcttattggactaaagtacctttcaaagctcccataagtagctgtagacaggcatttacatagtctgraagtactttccrtatttctttatcactccttgcctacttagtgtcatttactgtattgttttgaaatataagtagaaaaaaggataaaattgaatgatgtaggttcmattcgtgtgatcttagaaagcggttgtgatttcattacagacagctgcccagagaggttacagagttttgtaacatgccctgttcacagatggatcgtgtcgtattgtggggaggcagatggaaagctgctgtgtggagccccacacgacaagttgcagaggccactgaaggtaaaggagaatcaagtcagttcgcagaggtaaaggctatccaactggccttagatgttgctgaacgggagagatggccaatgctttttctttatactgactcatggatggtggcaaatgccttatggg

SEQ ID NO: 76937 - DNA, 600 bp, Chicken  19866894364888_1
ttctgaatgaggaaatggaaaatggaaagtccagttcttcattctgaaattcaaagctgctcatatttaggaaaaatctggtaaataacaacttctggtaacatgggtttgccaatctgtggctctctgaagagttttcacagtggcactgctactaagtccaaagaggtcttctgtatgttgcaaaagccaaacttaaaattactaagggaatagtttggaaaggaccatctagtccaatgccccagctcaaaaagggtcagctagaacatgtctttgccagtgagcatcttcagcaayacagaaacttggaaacaaaaactttaaaaatctgacaaaattatgcctacctaatttgttagcaaatggagccagtaacattcaaaccaaacctctcttgctttttataggtaatttttgtataggtattatcatgttgcctaaagaacayctagatagcacaaacatctgtttgacaggtatctgttttacttggtaagatttaggttttagatttagtttcagagaytgttctaatgcagctctatgaggcaaatcagggtaattctgggtcttaccatttgtttttctacttggaca

SEQ ID NO: 76938 - DNA, 600 bp, Chicken  19866894364888_2
ctactaagtccaaagaggtcttctgtatgttgcaaaagccaaacttaaaattactaagggaatagtttggaaaggaccatctagtccaatgccccagctcaaaaagggtcagctagaacatgtctttgccagtgagcatcttcagcaayacagaaacttggaaacaaaaactttaaaaatctgacaaaattatgcctacctaatttgttagcaaatggagccagtaacattcaaaccaaacctctcttgctttttataggtaatttttgtataggtattatcatgttgcctaaagaacayctagatagcacaaacatctgtttgacaggtatctgttttacttggtaagatttaggttttagatttagtttcagagaytgttctaatgcagctctatgaggcaaatcagggtaattctgggtcttaccatttgtttttctacttggacattttcttttttgctggtaggacgtgcattttctttgttcacgtctccttcatatttattgtattttgcctctctacagtgccattcacctattttctaactgattccacagaagagtgtatgaagtgaygcatatgccaaccccaaaagtg

SEQ ID NO: 76939 - DNA, 600 bp, Chicken  19866894364888_3
atctagtccaatgccccagctcaaaaagggtcagctagaacatgtctttgccagtgagcatcttcagcaayacagaaacttggaaacaaaaactttaaaaatctgacaaaattatgcctacctaatttgttagcaaatggagccagtaacattcaaaccaaacctctcttgctttttataggtaatttttgtataggtattatcatgttgcctaaagaacayctagatagcacaaacatctgtttgacaggtatctgttttacttggtaagatttaggttttagatttagtttcagagaytgttctaatgcagctctatgaggcaaatcagggtaattctgggtcttaccatttgtttttctacttggacattttcttttttgctggtaggacgtgcattttctttgttcacgtctccttcatatttattgtattttgcctctctacagtgccattcacctattttctaactgattccacagaagagtgtatgaagtgaygcatatgccaaccccaaaagtgacttttgaaacagacatgacatttcacacatcaaagttgtatgctgaggatgaacacggggctttcctctgactagca

SEQ ID NO: 76940 - DNA, 483 bp, Chicken  19866894364888_4
tatcatgttgcctaaagaacayctagatagcacaaacatctgtttgacaggtatctgttttacttggtaagatttaggttttagatttagtttcagagaytgttctaatgcagctctatgaggcaaatcagggtaattctgggtcttaccatttgtttttctacttggacattttcttttttgctggtaggacgtgcattttctttgttcacgtctccttcatatttattgtattttgcctctctacagtgccattcacctattttctaactgattccacagaagagtgtatgaagtgaygcatatgccaaccccaaaagtgacttttgaaacagacatgacatttcacacatcaaagttgtatgctgaggatgaacacggggctttcctctgactagcaagctaggacttgctgtctgccactcagtctcaccattttgcttttgacgagctcttcaattgcactggactagttctgcagca

SEQ ID NO: 76941 - DNA, 600 bp, Chicken  19866894364890_1
tttagtctctatgcaacaaaaaccttattccattattgaacacaatttctagaacccatatggttcatgcaattatttatactgatcaagacccaaggccactacattgtgcagcttaattctttacttaaaagtatatatttgaacacagttattatacaacaaagtccagatactcagcgagcaagatccagttcctgcctagttcacactggggcagcaaaagagaatcgtggaatcatagaacgattcagggttggagcgagtcctgcacaacatattagcaggcgctactccagraactgcagaaacatcattgagaacaaagactgcaatatgaatgtgtacagycagctatgcaattgactcatctatagaaggttataggtttgcaarcgtagagtatcagaaagggattctccccgaggtcagtcctccagagccctcctctctcttgttgaatatgaccaagtattttctcgtcacctaactcaactccacttttaacaatcaaattatttcctcatgtttaatctcttaaacactaaagtgaacttcagcttcaaattactgaagtctgtcatactctaatcaagaaat

SEQ ID NO: 76942 - DNA, 600 bp, Chicken  19866894364890_2
gaacccatatggttcatgcaattatttatactgatcaagacccaaggccactacattgtgcagcttaattctttacttaaaagtatatatttgaacacagttattatacaacaaagtccagatactcagcgagcaagatccagttcctgcctagttcacactggggcagcaaaagagaatcgtggaatcatagaacgattcagggttggagcgagtcctgcacaacatattagcaggcgctactccagraactgcagaaacatcattgagaacaaagactgcaatatgaatgtgtacagycagctatgcaattgactcatctatagaaggttataggtttgcaarcgtagagtatcagaaagggattctccccgaggtcagtcctccagagccctcctctctcttgttgaatatgaccaagtattttctcgtcacctaactcaactccacttttaacaatcaaattatttcctcatgtttaatctcttaaacactaaagtgaacttcagcttcaaattactgaagtctgtcatactctaatcaagaaatgcatttggtgagatgtaattggccacgacatagaatacatcaggtcagaac

SEQ ID NO: 76943 - DNA, 600 bp, Chicken  19866894364890_3
ggccactacattgtgcagcttaattctttacttaaaagtatatatttgaacacagttattatacaacaaagtccagatactcagcgagcaagatccagttcctgcctagttcacactggggcagcaaaagagaatcgtggaatcatagaacgattcagggttggagcgagtcctgcacaacatattagcaggcgctactccagraactgcagaaacatcattgagaacaaagactgcaatatgaatgtgtacagycagctatgcaattgactcatctatagaaggttataggtttgcaarcgtagagtatcagaaagggattctccccgaggtcagtcctccagagccctcctctctcttgttgaatatgaccaagtattttctcgtcacctaactcaactccacttttaacaatcaaattatttcctcatgtttaatctcttaaacactaaagtgaacttcagcttcaaattactgaagtctgtcatactctaatcaagaaatgcatttggtgagatgtaattggccacgacatagaatacatcaggtcagaacatgtgtggtccttgttgatgtagaggtctgaaatcgttagcagaa

SEQ ID NO: 76944 - DNA, 600 bp, Chicken  19866894364894_1
tgggcaccgtgctctgggtgtccctgctggagcagggttgggccaggtgacctccaagacatccgttctcacctcagccattctgtggttctgtgactacctcacaaaatgtgtaaaactagccctgagctgatccattagtgaggagaacaaaatctccactgtcaacatcatattcctcctagtaaagaatttcagatgaagactttcaagccattctgcacctcttttcttcgtgaggaacactagcaacattgattttaggacccagaaattcacaggaagggtaagcataacacragaaagcagtgtagctaacaggaagcatacatgtatcaattccagctgtacccttattagaaagtagccatatttgaatacttggaattattagctttcagaattattttctttgcatgwgggctctttgcttagactgctaatacctttaactacgctagcaataaattctttcctctgtatacaatgcatgtttctttagtgcacataaatctacaaggtgttttttctggtactctgcccttgagacctggtttgaatttggatgcaacagatggacccctctacatgcagttttca

SEQ ID NO: 76945 - DNA, 589 bp, Chicken  19866894364894_2
agccctgagctgatccattagtgaggagaacaaaatctccactgtcaacatcatattcctcctagtaaagaatttcagatgaagactttcaagccattctgcacctcttttcttcgtgaggaacactagcaacattgattttaggacccagaaattcacaggaagggtaagcataacacragaaagcagtgtagctaacaggaagcatacatgtatcaattccagctgtacccttattagaaagtagccatatttgaatacttggaattattagctttcagaattattttctttgcatgwgggctctttgcttagactgctaatacctttaactacgctagcaataaattctttcctctgtatacaatgcatgtttctttagtgcacataaatctacaaggtgttttttctggtactctgcccttgagacctggtttgaatttggatgcaacagatggacccctctacatgcagttttcatctaccctccatccttgcaagcttttggaaaaygacatctcttgcaaggctagggggaatttgaagacagcttgatttctcacagcatgcaggatgcccaacgtctatg

SEQ ID NO: 76946 - DNA, 376 bp, Chicken  19866894364894_3
tatcaattccagctgtacccttattagaaagtagccatatttgaatacttggaattattagctttcagaattattttctttgcatgwgggctctttgcttagactgctaatacctttaactacgctagcaataaattctttcctctgtatacaatgcatgtttctttagtgcacataaatctacaaggtgttttttctggtactctgcccttgagacctggtttgaatttggatgcaacagatggacccctctacatgcagttttcatctaccctccatccttgcaagcttttggaaaaygacatctcttgcaaggctagggggaatttgaagacagcttgatttctcacagcatgcaggatgcccaacgtctatg

SEQ ID NO: 76947 - DNA, 599 bp, Chicken  19866894364904_1
  misc_feature (1)..(164): n is any nucleotide
nnnnnnnnnnnnnnnnnnnnnnnnnnnnnnnnnnnnnnnnnnnnnnnnnnnnnnnnnnnnnnnnnnnnnnnnnnnnnnnnnnnnnnnnnnnnnnnnnnnnnnnnnnnnnnnnnnnnnnnnnnnnnnnnnnnnnnnnnnnnnnnnnnnnnnnnnnnnnnnnnnnntcatatttttctttcacttcttcccttcttctgccttgctttcattcctttcttcatcctgccactcacttacaaccttcctctggatttctggtgccatttctgcaacttctgccctgttaagacacagcatgcygatcccttctgttttctttccragtgctccctctcttttccwgcatgattgtgcatagacctctcaggtctcatgttcttgtattggttctcttgaatcagctcttcaaaagcaaatccaaactgtgctgaaccttaaatatcgaatatgaataattaaagcaatgaaataattgagggatgactttggttttgaacttaggtgcactggatgagaatccttgacattttatgtgggagtgggatttttctcactgtttctgaattaatagaaggaagaaatgtgatgtttttttctaa

SEQ ID NO: 76948 - DNA, 599 bp, Chicken  19866894364904_2
  misc_feature (1)..(142): n is any nucleotide
nnnnnnnnnnnnnnnnnnnnnnnnnnnnnnnnnnnnnnnnnnnnnnnnnnnnnnnnnnnnnnnnnnnnnnnnnnnnnnnnnnnnnnnnnnnnnnnnnnnnnnnnnnnnnnnnnnnnnnnnnnnnnnnnnnnnnnnnnnnnnntcatatttttctttcacttcttcccttcttctgccttgctttcattcctttcttcatcctgccactcacttacaaccttcctctggatttctggtgccatttctgcaacttctgccctgttaagacacagcatgcygatcccttctgttttctttccragtgctccctctcttttccwgcatgattgtgcatagacctctcaggtctcatgttcttgtattggttctcttgaatcagctcttcaaaagcaaatccaaactgtgctgaaccttaaatatcgaatatgaataattaaagcaatgaaataattgagggatgactttggttttgaacttaggtgcactggatgagaatccttgacattttatgtgggagtgggatttttctcactgtttctgaattaatagaaggaagaaatgtgatgtttttttctaaaacactagataaggtggaacat

SEQ ID NO: 76949 - DNA, 599 bp, Chicken  19866894364904_3
  misc_feature (1)..(122): n is any nucleotide
nnnnnnnnnnnnnnnnnnnnnnnnnnnnnnnnnnnnnnnnnnnnnnnnnnnnnnnnnnnnnnnnnnnnnnnnnnnnnnnnnnnnnnnnnnnnnnnnnnnnnnnnnnnnnnnnnnnnnnnnnntcatatttttctttcacttcttcccttcttctgccttgctttcattcctttcttcatcctgccactcacttacaaccttcctctggatttctggtgccatttctgcaacttctgccctgttaagacacagcatgcygatcccttctgttttctttccragtgctccctctcttttccwgcatgattgtgcatagacctctcaggtctcatgttcttgtattggttctcttgaatcagctcttcaaaagcaaatccaaactgtgctgaaccttaaatatcgaatatgaataattaaagcaatgaaataattgagggatgactttggttttgaacttaggtgcactggatgagaatccttgacattttatgtgggagtgggatttttctcactgtttctgaattaatagaaggaagaaatgtgatgtttttttctaaaacactagataaggtggaacatgggaaacacactcrgtatct

SEQ ID NO: 76950 - DNA, 576 bp, Chicken  19866894364904_4
ttttccwgcatgattgtgcatagacctctcaggtctcatgttcttgtattggttctcttgaatcagctcttcaaaagcaaatccaaactgtgctgaaccttaaatatcgaatatgaataattaaagcaatgaaataattgagggatgactttggttttgaacttaggtgcactggatgagaatccttgacattttatgtgggagtgggatttttctcactgtttctgaattaatagaaggaagaaatgtgatgtttttttctaaaacactagataaggtggaacatgggaaacacactcrgtatctttggaaagggcaatttaatgagctaatagtgcaaggtatgcacatgcagaccttgcatgaacacagaccacacgctccaaagtactgataatggagatggtaaacacagtggtgatgctgtagaggtgagccagggcaaggagtggagaaggaaagaaggccactggtggcagtgctctgtccagcactggtgagggcttggaagtttattctctgtcattatgctaggggaactgtgtgtccatttttgaaaggtagccctaaacatat

SEQ ID NO: 76951 - DNA, 600 bp, Chicken  19866894364906_1
cttccaacatttcaccaggtgtacagtcaatcctaaagccagatttacattttctgctataagttaaaggaaaacaaataatataagtgtcactggtgcatttatgaaagatgccgttatgaattcacgaaagacatctttaattttccatcaataacttccattctacgctctctatccataatatatgaaataaagcagtcaaaatagcataacctccttgataacaggactttaggaactttatgagtgtggcaaaagactagcttgctctagtcttctaaaagttctcaagtactkggcttcagcctgtaaggcatttttcagagttcattctaagtccaccttctctcataataaagccagtgctctgcaacccacagcaatacgttgtggcatgagcacatgatttgctatatgttwgcacaatgctatattatgaccttttcaatactataatgaccaaacactttttaaaatccttggacttgacatacatattagaaacatactaagatagcacccaactcttctttcacataagcctcttctccaaagcaaaatctcagtcatttttgggtgtaacaaaaccagagaatc

SEQ ID NO: 76952 - DNA, 600 bp, Chicken  19866894364906_2
ttcacgaaagacatctttaattttccatcaataacttccattctacgctctctatccataatatatgaaataaagcagtcaaaatagcataacctccttgataacaggactttaggaactttatgagtgtggcaaaagactagcttgctctagtcttctaaaagttctcaagtactkggcttcagcctgtaaggcatttttcagagttcattctaagtccaccttctctcataataaagccagtgctctgcaacccacagcaatacgttgtggcatgagcacatgatttgctatatgttwgcacaatgctatattatgaccttttcaatactataatgaccaaacactttttaaaatccttggacttgacatacatattagaaacatactaagatagcacccaactcttctttcacataagcctcttctccaaagcaaaatctcagtcatttttgggtgtaacaaaaccagagaatcgctgcaataaatacctggtgtctaaaacaaggggtttccaccgttagccctgtaacatctgctggtctgcaaatcacttctcagaatcacagggtactagagtcgcaggggttggaagggact

SEQ ID NO: 76953 - DNA, 599 bp, Chicken  19866894364907_1
  misc_feature (1)..(77): n is any nucleotide
nnnnnnnnnnnnnnnnnnnnnnnnnnnnnnnnnnnnnnnnnnnnnnnnnnnnnnnnnnnnnnnnnnnnnnnnnnnnnagagaaattttagggacgtgtgtttccagggcactacataaggaatacctccctggtcatacttcaaagtgctcaggtcagacttgttggtcacacagcaaagcgagtccaccagtctaggtcatgaacaactcggatgtgatggggcttgcttcaaaagactgggaatcattgctcagctgggtagagaatttttccttgtctctggctttttaagtacatraggagacctcattccttcacagtgagactaatatagtattatctatgaagctttcaacattttggttckagccctccctcagaattatctatttctaagtatatcagcagttactcaaattcgtttgctgctaccagaacagaacgcttaatgtaaactaacacaarataagatgtttcttcttgttctgttcttcaaagcaaatgctgttagcacttagactcagttttcctgacagtcactagatatacagagcgcatttcctttccaagcagtataattcactaaacaacattgga

SEQ ID NO: 76954 - DNA, 599 bp, Chicken  19866894364907_2
  misc_feature (1)..(8): n is any nucleotide
nnnnnnnnagagaaattttagggacgtgtgtttccagggcactacataaggaatacctccctggtcatacttcaaagtgctcaggtcagacttgttggtcacacagcaaagcgagtccaccagtctaggtcatgaacaactcggatgtgatggggcttgcttcaaaagactgggaatcattgctcagctgggtagagaatttttccttgtctctggctttttaagtacatraggagacctcattccttcacagtgagactaatatagtattatctatgaagctttcaacattttggttckagccctccctcagaattatctatttctaagtatatcagcagttactcaaattcgtttgctgctaccagaacagaacgcttaatgtaaactaacacaarataagatgtttcttcttgttctgttcttcaaagcaaatgctgttagcacttagactcagttttcctgacagtcactagatatacagagcgcatttcctttccaagcagtataattcactaaacaacattggaaagayctgtaaaaacacaccatcttggaagagaatagtgagttcttggcattgccagttgtcatgtacc

SEQ ID NO: 76955 - DNA, 600 bp, Chicken  19866894364907_3
tcacacagcaaagcgagtccaccagtctaggtcatgaacaactcggatgtgatggggcttgcttcaaaagactgggaatcattgctcagctgggtagagaatttttccttgtctctggctttttaagtacatraggagacctcattccttcacagtgagactaatatagtattatctatgaagctttcaacattttggttckagccctccctcagaattatctatttctaagtatatcagcagttactcaaattcgtttgctgctaccagaacagaacgcttaatgtaaactaacacaarataagatgtttcttcttgttctgttcttcaaagcaaatgctgttagcacttagactcagttttcctgacagtcactagatatacagagcgcatttcctttccaagcagtataattcactaaacaacattggaaagayctgtaaaaacacaccatcttggaagagaatagtgagttcttggcattgccagttgtcatgtaccttgcagtgaacccatcagtttttctataatcactgtgattttcacgccttgcatttgaaagcaaaagccttctgaattcgcttgccagcatacagttat

SEQ ID NO: 76956 - DNA, 600 bp, Chicken  19866894364907_4
gacctcattccttcacagtgagactaatatagtattatctatgaagctttcaacattttggttckagccctccctcagaattatctatttctaagtatatcagcagttactcaaattcgtttgctgctaccagaacagaacgcttaatgtaaactaacacaarataagatgtttcttcttgttctgttcttcaaagcaaatgctgttagcacttagactcagttttcctgacagtcactagatatacagagcgcatttcctttccaagcagtataattcactaaacaacattggaaagayctgtaaaaacacaccatcttggaagagaatagtgagttcttggcattgccagttgtcatgtaccttgcagtgaacccatcagtttttctataatcactgtgattttcacgccttgcatttgaaagcaaaagccttctgaattcgcttgccagcatacagttatttggaaggatttttcttctctaaaamcaaacaacagccaacaacaacaaaaaacccaccattctgaattttttaaaaattattatttaatctgttactcaggtaagctgttggttgttcttccttacttggagatga

SEQ ID NO: 76957 - DNA, 600 bp, Chicken  19866894364907_5
ttcaaagcaaatgctgttagcacttagactcagttttcctgacagtcactagatatacagagcgcatttcctttccaagcagtataattcactaaacaacattggaaagayctgtaaaaacacaccatcttggaagagaatagtgagttcttggcattgccagttgtcatgtaccttgcagtgaacccatcagtttttctataatcactgtgattttcacgccttgcatttgaaagcaaaagccttctgaattcgcttgccagcatacagttatttggaaggatttttcttctctaaaamcaaacaacagccaacaacaacaaaaaacccaccattctgaattttttaaaaattattatttaatctgttactcaggtaagctgttggttgttcttccttacttggagatgaacattcacaattttaattctcttgtgcttaagtgcctgccacagtttttcttccacgcatgaaagaatgacatttctgctgtttctattctgaaatgaagaccagtgttttttctccactctgttagtaatgttgagtgaatgacttcacagttagattagtcctttggcaactgaaacgatgggaaaa

SEQ ID NO: 76958 - DNA, 600 bp, Chicken  19866894364909_1
ctgtaagcagagtctgcctttagtctgggaggaggggaataactcactattgagggtgttagcatgccctagcatgcagctttttacacagctgaccacagagcatgctgaaggcgtggtagtctgctcctgcactcaggctggtcccacaggttaacctgtacagaagcaggatgtagttttccaaagtttggaaacagtgcttgtaatttgtgccaatagcacggaatgggtattgcagctgaaaagacaggtaaatggattatgtacacagcagaatattcaggcagtctctagggytactcgcytgtgcttaaatgcattttccactgcagccgatagcagtcccatgtgtgtataggggaggacaatatggactcttctaggaaaggggcttcctactttttgtctagaagtagccacgttagacttctatccatttttcatgcctgcacttttttagtctgaagtctaccattacatcgtccttttttggtctcggctttattgtcacagccaaaacctatgaaagttgattgtaaatgtgtttacaaagaaatttcatagaatgttataactgtgcctctgaaataaagctat

SEQ ID NO: 76959 - DNA, 600 bp, Chicken  19866894364909_2
agagtctgcctttagtctgggaggaggggaataactcactattgagggtgttagcatgccctagcatgcagctttttacacagctgaccacagagcatgctgaaggcgtggtagtctgctcctgcactcaggctggtcccacaggttaacctgtacagaagcaggatgtagttttccaaagtttggaaacagtgcttgtaatttgtgccaatagcacggaatgggtattgcagctgaaaagacaggtaaatggattatgtacacagcagaatattcaggcagtctctagggytactcgcytgtgcttaaatgcattttccactgcagccgatagcagtcccatgtgtgtataggggaggacaatatggactcttctaggaaaggggcttcctactttttgtctagaagtagccacgttagacttctatccatttttcatgcctgcacttttttagtctgaagtctaccattacatcgtccttttttggtctcggctttattgtcacagccaaaacctatgaaagttgattgtaaatgtgtttacaaagaaatttcatagaatgttataactgtgcctctgaaataaagctataaaactct

SEQ ID NO: 76960 - DNA, 600 bp, Chicken  19866894364912_1
tatctccaccaattaccttgttattagctcctttaaaggacaaaaacaaatgggcaattgaagtttgattgcattacagaatggtcttttttccccctctgtttatttttgtcagctaggcctaggtaatgcgctgcaggaaatgaggcagcagtgctatctaggggcacgtttagcccacgtgggtctgtacaggcattttgtctctgctctgccaataccctgcagagctccatccccagtccttgtggctttccgactcactcctgcttccatctctgccaacgccatcatgaaacyatactgagaaaatgcaatttctcaaggtgtggcaaaagggctgctcrtaagcaagagtggaaatgagggctggggtcagtcccgagttctctgtgttacattgggcaaataacttcagagtctcagcaatgtggctcctatcctgattgctcctgcgcaaccatggacctcaggaagcccaggaaaggctgtgttatcacctgtgcttctcctggcttgagcttttatgcaggctgagggaggcagggcataccaaggctcctgcaggcaagcaggtatttgaagcgagaccggcaggat

SEQ ID NO: 76961 - DNA, 600 bp, Chicken  19866894364912_2
aaatgggcaattgaagtttgattgcattacagaatggtcttttttccccctctgtttatttttgtcagctaggcctaggtaatgcgctgcaggaaatgaggcagcagtgctatctaggggcacgtttagcccacgtgggtctgtacaggcattttgtctctgctctgccaataccctgcagagctccatccccagtccttgtggctttccgactcactcctgcttccatctctgccaacgccatcatgaaacyatactgagaaaatgcaatttctcaaggtgtggcaaaagggctgctcrtaagcaagagtggaaatgagggctggggtcagtcccgagttctctgtgttacattgggcaaataacttcagagtctcagcaatgtggctcctatcctgattgctcctgcgcaaccatggacctcaggaagcccaggaaaggctgtgttatcacctgtgcttctcctggcttgagcttttatgcaggctgagggaggcagggcataccaaggctcctgcaggcaagcaggtatttgaagcgagaccggcaggatctatcccttgcagatttgtatgctaatccagcacgctgccttccact

SEQ ID NO: 76962 - DNA, 600 bp, Chicken  19866894364914_1
tttgggggaaagatcagaatttttgtctcaaatgacttgggtttgctctcattgctttacctcccgggacgagcgtgtttcttggctccagactttaaagtggggtctgagacaaaaatgccatctcaggaccgagatggaggagaaggcgaaaaagaagaaacattcccactgaaagagtgggaagtgattttaatctgaatgcaactcgcccatagaaagccaactgttacctagcagataaaaataaataaataaatgttggctttaaataatgtacgtttccaagatgttgcccasctgttaatcattaaccctgtagcaggttgaagtgtagagrcagatgttccaaaagcagttttattttcttaaataaagagcrtggagctatgaattagacaaattaagaagaaattcaaatatttacacccagttgaaacaagatgctgggaaaacaggcattataaaattgctgcaattaaatgtaatttaatttgtaattctgaaagcacgcttcctccaaaggcagcctttgagttttccttatgaagtgcattgttgtgatgtatggattttcctgacttattatggcattttaat

SEQ ID NO: 76963 - DNA, 600 bp, Chicken  19866894364914_2
gtttgctctcattgctttacctcccgggacgagcgtgtttcttggctccagactttaaagtggggtctgagacaaaaatgccatctcaggaccgagatggaggagaaggcgaaaaagaagaaacattcccactgaaagagtgggaagtgattttaatctgaatgcaactcgcccatagaaagccaactgttacctagcagataaaaataaataaataaatgttggctttaaataatgtacgtttccaagatgttgcccasctgttaatcattaaccctgtagcaggttgaagtgtagagrcagatgttccaaaagcagttttattttcttaaataaagagcrtggagctatgaattagacaaattaagaagaaattcaaatatttacacccagttgaaacaagatgctgggaaaacaggcattataaaattgctgcaattaaatgtaatttaatttgtaattctgaaagcacgcttcctccaaaggcagcctttgagttttccttatgaagtgcattgttgtgatgtatggattttcctgacttattatggcattttaatcaacatttcagtgatgtgataatattcctaaagcagaaaa

SEQ ID NO: 76964 - DNA, 600 bp, Chicken  19866894364914_3
tggctccagactttaaagtggggtctgagacaaaaatgccatctcaggaccgagatggaggagaaggcgaaaaagaagaaacattcccactgaaagagtgggaagtgattttaatctgaatgcaactcgcccatagaaagccaactgttacctagcagataaaaataaataaataaatgttggctttaaataatgtacgtttccaagatgttgcccasctgttaatcattaaccctgtagcaggttgaagtgtagagrcagatgttccaaaagcagttttattttcttaaataaagagcrtggagctatgaattagacaaattaagaagaaattcaaatatttacacccagttgaaacaagatgctgggaaaacaggcattataaaattgctgcaattaaatgtaatttaatttgtaattctgaaagcacgcttcctccaaaggcagcctttgagttttccttatgaagtgcattgttgtgatgtatggattttcctgacttattatggcattttaatcaacatttcagtgatgtgataatattcctaaagcagaaaaataagtgacgtttgtttagacataattaattaaatatttatg

SEQ ID NO: 76965 - DNA, 600 bp, Chicken  19866894364914_4
atttatttgtctacaatgcctaaatatatatgtatatttatgtatacaccagacagggtttttgacagtgaccaaaatccaattaatgcagtgagccaaatttccaaattgctctgggtgctgctgattaggacttggggcaggtgcaaagtgtctgtatatgttaaagaacagcattttttgcctctttaatggctttgttccctcttcttaggatgtgaacttccacctgtcaggaagcagactgctgagtattttacttcttcctctgatgaagatgaatttgaatccaagccttcrttaacatataaggtaaccttttctttgaagcaacaatgcatttcctccgttggactgcatttaagattcatgtgactttgttctaaagcactccacaatttctttaaacggggattggaacattttatcagccagggttacgtgtcatgcatgtaaaatgcactaaaactgtgacagatgaacatgaaaatttctttctcctccttgaatctgtaattcccccaggttacaccagtgttgacagagaaggtcttaattggacaaacagacatgtttaactgaaaccactttgaagcagta

SEQ ID NO: 76966 - DNA, 600 bp, Chicken  19866894364917_1
ttttttttttctttctttttttttttttttaagttttacctgtattgaaggcttttactcattctgactggtattttgctgtaaaactatcactgatttaattgttctgtccatttgccggctgatgctttgtcctgtatctgaggaaattggttcattgaggaggcacaccgttctcccagacctctcactgccactcctgccatgggcacatggtggagtttcgaaggtgtgaagtcagcaaacccttcaccctgccgtgttcccttcatgccaggcagggttattggttttgtgtgrcatcgcatctcttcctgagatgtctttttcttcccgttcctgctcagtttttgtagtactgcattcagggatgtttgtacatgaatttctgattgatgtttaactacttttcaagatttttaattctaacaaactgtatccagcactcctgcttgttttgtttaatggagaaggactgactgaagtactggtccccctgggagctggggagagaacaggtggacactcttcttaaagtcttctccattctaaggtactccccagtcgtcagcaaaagacatgggaaaactcttgcccatt

SEQ ID NO: 76967 - DNA, 535 bp, Chicken  19866894364924_1
gagtgcctgtctatttagtctttttctagcgattgacatttcttcaacttggttctgagagtacaacttttgaagtagccacttgctgtttagtaaatagcttggttgtactgtcctcagttatttggaaggaagtaaggggttcatgagttgaattttcaatggtaatttaaatttagtctaatattacataatcagtgttagtaccaagttgtcacttagccagagctcgtagaatcccaggcgtatggccagggaagctcagggcgcttgtatagagacaagatcagctgtcccctrtctgctgcattaaatggctggtatgcttgctctagaaagaagcatttacatgctcacttaactagagtcagggtgttagagtgtttctgaggaacctgtgcagttcttgtgcagtattcttttgtatggtgaatgctcacgttttgtcatctgggaaaagaagggagatgtatgaggtcaacatacagaactgggttttaggacataataaagtagaacagctgtcaaggatgtg

SEQ ID NO: 76968 - DNA, 600 bp, Chicken  19866894364931_1
gtgtggaaggtaaatacaaagttcactttgttcaaaaacattcaaagaccaagttagcttcttcatctgtaagactattctaatactagtgtattagtgtcctgttctaataatagagtattagtcatgagagctggataactgactttcagtcccaaaggatttatgaagaattacaggaagatcagtgtaagcatcaaaccaaaagaacaaattatggcctcatctgtacagcagagagaacccaaataactaattaaattgtaaccacacacttccctattgtaacgcttaccttcraaaagccttgatctgctttcgttcttaaaaggcaatgaagaaataaaaaaaactcctgttcactactcaatttattcgtcagtttttgagatgattatcattgtcttagctctttcagtttcatatatacagttacaactttggggatttttaaacacttcgatgtatttgcttcttgtgtggtattttcaccttgttttatattcatggtctttcttcaattaaggtaatttttaatttaaaatctgatttgcaactaactgcagacatattggagaaattctccacctgaagtacctg

SEQ ID NO: 76969 - DNA, 599 bp, Chicken  19866894364937_1
  misc_feature (1)..(6): n is any nucleotide
nnnnnngaaggtcctgctttcagatcagctttcctcagaattaaccctgacatgagccagagccacttctcacatctcccttctcaactggctttctggtgagtactaaacatcccttttcggtaactgcttttatttgggcaatatcctgtccctcctgacctctcctttacgtcaacaccagtgaacctgatgagttcttggcctccttcctcgagcagcatggacactgctcatgtaatctcttgcctgcaaatgctttcacacagtgcaagtgtaatgtgtcccaccaggctgtgytcctrctggayagaatgcagatacaaggttccctgcagggcaggatctggccctgaggctccggccacacacatcacatgctccactcactcccctctctaactgggcacacagggctatgcaaggaatcagttggcatttcagaattacctaagtgccctgcaaaataagattttttaattaaacttaacctgttttaatatttaaacaaatggaaaaatgtctaagaaagcactgccttgttatctctccagcagttcagctgattaaagtttttctttttttttatattaaaataa

SEQ ID NO: 76970 - DNA, 599 bp, Chicken  19866894364937_2
  misc_feature (1)..(1): n is any nucleotide
ngaaggtcctgctttcagatcagctttcctcagaattaaccctgacatgagccagagccacttctcacatctcccttctcaactggctttctggtgagtactaaacatcccttttcggtaactgcttttatttgggcaatatcctgtccctcctgacctctcctttacgtcaacaccagtgaacctgatgagttcttggcctccttcctcgagcagcatggacactgctcatgtaatctcttgcctgcaaatgctttcacacagtgcaagtgtaatgtgtcccaccaggctgtgytcctrctggayagaatgcagatacaaggttccctgcagggcaggatctggccctgaggctccggccacacacatcacatgctccactcactcccctctctaactgggcacacagggctatgcaaggaatcagttggcatttcagaattacctaagtgccctgcaaaataagattttttaattaaacttaacctgttttaatatttaaacaaatggaaaaatgtctaagaaagcactgccttgttatctctccagcagttcagctgattaaagtttttctttttttttatattaaaataaatcct

SEQ ID NO: 76971 - DNA, 600 bp, Chicken  19866894364937_3
tcctgctttcagatcagctttcctcagaattaaccctgacatgagccagagccacttctcacatctcccttctcaactggctttctggtgagtactaaacatcccttttcggtaactgcttttatttgggcaatatcctgtccctcctgacctctcctttacgtcaacaccagtgaacctgatgagttcttggcctccttcctcgagcagcatggacactgctcatgtaatctcttgcctgcaaatgctttcacacagtgcaagtgtaatgtgtcccaccaggctgtgytcctrctggayagaatgcagatacaaggttccctgcagggcaggatctggccctgaggctccggccacacacatcacatgctccactcactcccctctctaactgggcacacagggctatgcaaggaatcagttggcatttcagaattacctaagtgccctgcaaaataagattttttaattaaacttaacctgttttaatatttaaacaaatggaaaaatgtctaagaaagcactgccttgttatctctccagcagttcagctgattaaagtttttctttttttttatattaaaataaatccttctgaaa

SEQ ID NO: 76972 - DNA, 600 bp, Chicken  19866894364941_1
gtctctatggggaatgttaaattcctctgtcgacacgtactgcatacttcttgccttgttgcatttatttagcagtaagtctttggggttttgttatggagagttaaattttaaaaaccttagagaacacaatgaaatttcttcaaactctcccaaaaaggatgaagggatgaaaggattgagcacagccccgctgaaaaagacctgagggtactggtggatggaaagccagcaatgtgcccttccagctcagaaatccaaacatatcctgagctgcatcaaaagctgtgtgaccagcakggcaagggaggtgatcctgcccctctactctgcactggtgaggcctcacctggagtattgcatccagatgtggaatcctcagtacaggaragacatggacctgttggagcacgtccagaggagggctacaaaaatcatcccagggatggaacacctccctrtgagkacagtctgagagagctgcggctgttcagcctggagaaggctgcaaggtgacctgatagcagcttttcagtatctaaaagggagctacgggaaagaaggggacagattctttagcaggatctggggcaatagaac

SEQ ID NO: 76973 - DNA, 600 bp, Chicken  19866894364941_2
ttgttatggagagttaaattttaaaaaccttagagaacacaatgaaatttcttcaaactctcccaaaaaggatgaagggatgaaaggattgagcacagccccgctgaaaaagacctgagggtactggtggatggaaagccagcaatgtgcccttccagctcagaaatccaaacatatcctgagctgcatcaaaagctgtgtgaccagcakggcaagggaggtgatcctgcccctctactctgcactggtgaggcctcacctggagtattgcatccagatgtggaatcctcagtacaggaragacatggacctgttggagcacgtccagaggagggctacaaaaatcatcccagggatggaacacctccctrtgagkacagtctgagagagctgcggctgttcagcctggagaaggctgcaaggtgacctgatagcagcttttcagtatctaaaagggagctacgggaaagaaggggacagattctttagcaggatctggggcaatagaacaaggggaaatgacttcaagctcaaagagggtagatttaggacagatataaagtcttctacagtgagggtggtggggcacaggttgcctag

SEQ ID NO: 76974 - DNA, 600 bp, Chicken  19866894364941_3
atgaagggatgaaaggattgagcacagccccgctgaaaaagacctgagggtactggtggatggaaagccagcaatgtgcccttccagctcagaaatccaaacatatcctgagctgcatcaaaagctgtgtgaccagcakggcaagggaggtgatcctgcccctctactctgcactggtgaggcctcacctggagtattgcatccagatgtggaatcctcagtacaggaragacatggacctgttggagcacgtccagaggagggctacaaaaatcatcccagggatggaacacctccctrtgagkacagtctgagagagctgcggctgttcagcctggagaaggctgcaaggtgacctgatagcagcttttcagtatctaaaagggagctacgggaaagaaggggacagattctttagcaggatctggggcaatagaacaaggggaaatgacttcaagctcaaagagggtagatttaggacagatataaagtcttctacagtgagggtggtggggcacaggttgcctagtggttgtggttgatgtgcttcccctggagacttttaagatgaggctggatcaggccctaggcaacataatt

SEQ ID NO: 76975 - DNA, 600 bp, Chicken  19866894364941_4
gggatgaaaggattgagcacagccccgctgaaaaagacctgagggtactggtggatggaaagccagcaatgtgcccttccagctcagaaatccaaacatatcctgagctgcatcaaaagctgtgtgaccagcakggcaagggaggtgatcctgcccctctactctgcactggtgaggcctcacctggagtattgcatccagatgtggaatcctcagtacaggaragacatggacctgttggagcacgtccagaggagggctacaaaaatcatcccagggatggaacacctccctrtgagkacagtctgagagagctgcggctgttcagcctggagaaggctgcaaggtgacctgatagcagcttttcagtatctaaaagggagctacgggaaagaaggggacagattctttagcaggatctggggcaatagaacaaggggaaatgacttcaagctcaaagagggtagatttaggacagatataaagtcttctacagtgagggtggtggggcacaggttgcctagtggttgtggttgatgtgcttcccctggagacttttaagatgaggctggatcaggccctaggcaacataatttagta

SEQ ID NO: 76976 - DNA, 600 bp, Chicken  19866894364942_1
gaaaaacacatggtaatgctctgtgcagcaagactaaatagtaaggctacccattttattacatactactaacacatccacatcttccaccagatttttatcatgcagccaagtgttccactgtattccataaataccttttaagaaatacagcactgtaagaatagagtgctctgtctgcaataagctacaagttgtctaactatcttatcacagttacaacagtaactacattgctgtgtaacgacaaacactccttttattgaatacataagcaaaaatacctggaatttgacatawttgagagcacttttcatgtgcttcttcatttttctttaattagacattcaccaataattaaaaaatgagagtaaattgtgttatttctcagtaggacaaacatcagtaaagaactgccagtagttacaggacatagttttaaatttggatttccatttgtgatggcaaactgtgcttacattatgatcttctgaattactttcttctgtctgtttttagtccatctatttacataatttccccaatcattgtatggctttttcctactgctgtttcaaatttggattmataaacattttt

SEQ ID NO: 76977 - DNA, 574 bp, Chicken  19866894364942_2
aatttgacatawttgagagcacttttcatgtgcttcttcatttttctttaattagacattcaccaataattaaaaaatgagagtaaattgtgttatttctcagtaggacaaacatcagtaaagaactgccagtagttacaggacatagttttaaatttggatttccatttgtgatggcaaactgtgcttacattatgatcttctgaattactttcttctgtctgtttttagtccatctatttacataatttccccaatcattgtatggctttttcctactgctgtttcaaatttggattmataaacatttttctaagttactattactggaagagctctcggtacagtatagaaactgaagtgttacaacttcatctgataatgaagaagatctgactaacattctgttcatattcaatgcaatttaagcaagttttacaatcaataaggaaaaggctattatttaatttttatttatttatttttttttaagtctcaaaggtgcgttatcctcagcactgcaacatatagtgcatgggaactgtattaataagcagtatgggaattatctaaa

SEQ ID NO: 76978 - DNA, 600 bp, Chicken  19866894364948_1
tgactaagaggggttgctggaaggagtacaattccagctgcttcagcagctgatgtgggagaaggctgctggtggaaagtctcttgctggtgttgcacctcagtgacatgcccaaagcaattgttttttgagaaaaacacgattaactattttcccagaaaatagaaaaatgttcttgtaaatattaacaactcactgaaatggtacaaaatacaagtttctatggttctccctctctctttttttttttttaatgtgaaattgggacatcataacgacagcagttttttaaaggagacwagaaaaatgattygcttggcacacgcacactgaaggaatgttactgtggtctggttgcygcttcttcctcatctatgaatttgttagttctaaataccagtttgaaatgtttcctttgctcatataagattcataaccaaaagattttccttagccaccgagttactctggaatgatggtcactaatgctctgtaaacgcctggcagtgctgagacaaagatgcttagtgggagatgtctgcactattctgttgggtctcatggcttcttttcccatctgaaaaatggtaaatgcagtag

SEQ ID NO: 76979 - DNA, 600 bp, Chicken  19866894364948_2
ttgctggaaggagtacaattccagctgcttcagcagctgatgtgggagaaggctgctggtggaaagtctcttgctggtgttgcacctcagtgacatgcccaaagcaattgttttttgagaaaaacacgattaactattttcccagaaaatagaaaaatgttcttgtaaatattaacaactcactgaaatggtacaaaatacaagtttctatggttctccctctctctttttttttttttaatgtgaaattgggacatcataacgacagcagttttttaaaggagacwagaaaaatgattygcttggcacacgcacactgaaggaatgttactgtggtctggttgcygcttcttcctcatctatgaatttgttagttctaaataccagtttgaaatgtttcctttgctcatataagattcataaccaaaagattttccttagccaccgagttactctggaatgatggtcactaatgctctgtaaacgcctggcagtgctgagacaaagatgcttagtgggagatgtctgcactattctgttgggtctcatggcttcttttcccatctgaaaaatggtaaatgcagtagctaggtgctgcaa

SEQ ID NO: 76980 - DNA, 600 bp, Chicken  19866894364948_3
agaaggctgctggtggaaagtctcttgctggtgttgcacctcagtgacatgcccaaagcaattgttttttgagaaaaacacgattaactattttcccagaaaatagaaaaatgttcttgtaaatattaacaactcactgaaatggtacaaaatacaagtttctatggttctccctctctctttttttttttttaatgtgaaattgggacatcataacgacagcagttttttaaaggagacwagaaaaatgattygcttggcacacgcacactgaaggaatgttactgtggtctggttgcygcttcttcctcatctatgaatttgttagttctaaataccagtttgaaatgtttcctttgctcatataagattcataaccaaaagattttccttagccaccgagttactctggaatgatggtcactaatgctctgtaaacgcctggcagtgctgagacaaagatgcttagtgggagatgtctgcactattctgttgggtctcatggcttcttttcccatctgaaaaatggtaaatgcagtagctaggtgctgcaattagtagcacagacaggaagttctaatgggcaacttgacaggcaat

SEQ ID NO: 76981 - DNA, 600 bp, Chicken  19866894364949_1
tgatttctgcaagctaaagttacttcacatcacagctccaaagcacgttggagaaaagattggaagaatctctcgagtcccaagtctacagaaccctccttacacccttcaggtaaaatagcagcagttgttttcctcaccttacaagccccattcctccggcatccaaaccttcagagccacttggcacactggcaaacccatgaaaaagaagaaaaaaagcagcagcaggagtgtgaagaaaagatgatgtagaattctgcaaatgccagtttgagagtataccaggtttctcaagcrtagtaagctgatgttcacgtgacaaagaggcagggggtcttaataagagccatcacactgaacgctttttgagcagaaaaatccctcagtgcatttttcagcttgataactggagtgctggtgatgtagtttaattggatttacaggaatttagcaaataaagttcattactattgtctattttaccaacttccaaagcaacaaagcacatgctgtcacactgcctgcatgtttctgagcgtctcctactctgcgaggacttctgaaaactggccagctggttcaaccagatttgacact

SEQ ID NO: 76982 - DNA, 599 bp, Chicken  19866894364952_1
  misc_feature (1)..(77): n is any nucleotide
nnnnnnnnnnnnnnnnnnnnnnnnnnnnnnnnnnnnnnnnnnnnnnnnnnnnnnnnnnnnnnnnnnnnnnnnnnnnntcttttcccactgctcttgttaaatattttgcttcagagctgttcattcatatctgtgatgaactccatgcacagtgttgctcacttacgttgctctctaatgaacaacattgccgaatcctgtccctgtcctgagctttgcctccccctcaagctttttgccatttacagaaaggctatgagcaatgcacctcatggtgcagcaaactaatgtcagtgagtkatgcaaggacagcatctgtttgtgccacgggwgtccccaggccaggtgtccctgcactgcgtggaggcccttcctcctcctgagatcacacacaggtgcctycacagcaccccttcgggctgtcagctggccaaggagctgacttcacaacacgtgactgggtgctccgtctctccagctcctccagaagagatttccttgaaagatggagaggagattggaaatgtaatgcttgcctaagtagctttcaggccagttaacgtgctaatcccataacccccatctctagcctgaaggcg

SEQ ID NO: 76983 - DNA, 599 bp, Chicken  19866894364952_2
  misc_feature (1)..(45): n is any nucleotide
nnnnnnnnnnnnnnnnnnnnnnnnnnnnnnnnnnnnnnnnnnnnntcttttcccactgctcttgttaaatattttgcttcagagctgttcattcatatctgtgatgaactccatgcacagtgttgctcacttacgttgctctctaatgaacaacattgccgaatcctgtccctgtcctgagctttgcctccccctcaagctttttgccatttacagaaaggctatgagcaatgcacctcatggtgcagcaaactaatgtcagtgagtkatgcaaggacagcatctgtttgtgccacgggwgtccccaggccaggtgtccctgcactgcgtggaggcccttcctcctcctgagatcacacacaggtgcctycacagcaccccttcgggctgtcagctggccaaggagctgacttcacaacacgtgactgggtgctccgtctctccagctcctccagaagagatttccttgaaagatggagaggagattggaaatgtaatgcttgcctaagtagctttcaggccagttaacgtgctaatcccataacccccatctctagcctgaaggcgctcagtcttcacatgtcgttcctgcatgcctc

SEQ ID NO: 76984 - DNA, 600 bp, Chicken  19866894364952_3
attttgcttcagagctgttcattcatatctgtgatgaactccatgcacagtgttgctcacttacgttgctctctaatgaacaacattgccgaatcctgtccctgtcctgagctttgcctccccctcaagctttttgccatttacagaaaggctatgagcaatgcacctcatggtgcagcaaactaatgtcagtgagtkatgcaaggacagcatctgtttgtgccacgggwgtccccaggccaggtgtccctgcactgcgtggaggcccttcctcctcctgagatcacacacaggtgcctycacagcaccccttcgggctgtcagctggccaaggagctgacttcacaacacgtgactgggtgctccgtctctccagctcctccagaagagatttccttgaaagatggagaggagattggaaatgtaatgcttgcctaagtagctttcaggccagttaacgtgctaatcccataacccccatctctagcctgaaggcgctcagtcttcacatgtcgttcctgcatgcctcgmcggccatagrggagaacggcagggcagggagagggagagggcttggctggatctgggggagcaaaggca

SEQ ID NO: 76985 - DNA, 490 bp, Chicken  19866894364952_4
tccccaggccaggtgtccctgcactgcgtggaggcccttcctcctcctgagatcacacacaggtgcctycacagcaccccttcgggctgtcagctggccaaggagctgacttcacaacacgtgactgggtgctccgtctctccagctcctccagaagagatttccttgaaagatggagaggagattggaaatgtaatgcttgcctaagtagctttcaggccagttaacgtgctaatcccataacccccatctctagcctgaaggcgctcagtcttcacatgtcgttcctgcatgcctcgmcggccatagrggagaacggcagggcagggagagggagagggcttggctggatctgggggagcaaaggcaaacagagcatggaggaaatccagaggccatcctgagacaggctgaggatggtcaccgcagcccagttaaggagagggcagtgaaggtaaaaggggtgaaggggagagaggaaggagagtaa

SEQ ID NO: 76986 - DNA, 480 bp, Chicken  19866894364952_5
aggtgtccctgcactgcgtggaggcccttcctcctcctgagatcacacacaggtgcctycacagcaccccttcgggctgtcagctggccaaggagctgacttcacaacacgtgactgggtgctccgtctctccagctcctccagaagagatttccttgaaagatggagaggagattggaaatgtaatgcttgcctaagtagctttcaggccagttaacgtgctaatcccataacccccatctctagcctgaaggcgctcagtcttcacatgtcgttcctgcatgcctcgmcggccatagrggagaacggcagggcagggagagggagagggcttggctggatctgggggagcaaaggcaaacagagcatggaggaaatccagaggccatcctgagacaggctgaggatggtcaccgcagcccagttaaggagagggcagtgaaggtaaaaggggtgaaggggagagaggaaggagagtaa

SEQ ID NO: 76987 - DNA, 600 bp, Chicken  19866894364955_1
aatatcgagtgaaacgctctgcagagaacatttgtgaacataaggggagaaaaaaagcaatgaatgacaagagaaggagagagatcaaacataatgggcagtaagggaaccatatgaaatgaaagaaaaatactcagtcatcaatctatcatattagctctaaattgctagagaaaaacatgagtaatcacagaaatgataacaatgggacttttctgactcaaaattcaagtggaaatagtctgtctctagtttttagtacactattagtttggcttcgttctcaaccttgtgattttwtatctttgcagccttcaagtcagaatcccaactagaaagtaatgcaacttccaaatttcagcttctttatatcttaaagcctgtgagcctaaactcattgttacagcaaaatacagtgaaatagcaaggaactgtaactgtatgcatggactgcatttttctcagttgtacatttttgtggaactaatttgtcctatttcttattcactggccctaaatgaggcaaaatgcttttttcttcaagctacacacacacacacacacgtatttttttcttttaattttatgtggactgtattt

SEQ ID NO: 76988 - DNA, 600 bp, Chicken  19866894364955_2
cagcaaaatacagtgaaatagcaaggaactgtaactgtatgcatggactgcatttttctcagttgtacatttttgtggaactaatttgtcctatttcttattcactggccctaaatgaggcaaaatgcttttttcttcaagctacacacacacacacacacgtatttttttcttttaattttatgtggactgtatttattctgccactcagaaaggctgatttgaattaggaatagaggaacatgcattatctagagaaatgacctctaatttcacattccttccttattatgtcaaatwgtactcttagtcctcttagaaacagctgaggacattttgatttttgctagctatctaatagtttctaaattaatcaataattactaaacttgtagtaataaacaagcaattaatctgagtttcttttatatgcttttatttagatgtttttatgtgtataaaagaattcccagtcagaaaatctcttcattgctctgatgtttcagtcatcctgggcattgagtctttcctctttgtccacatacgttaaaaaatactgccagaagcagcattgcttctagggttcacctcaaaaacatt

SEQ ID NO: 76989 - DNA, 600 bp, Chicken  19866894364956_1
gtaatcttcacaaaactaatatcctaaaaagtcacatcaagtagtaaataaaactcagggagtgagcatcacaagcacttttggctgttaattttccagtatttcctaaaaacttttccatcgcataatgtaataccaaacgtgtgttccatagttatcaatggaaaatattgcttagcagcaggatgcttctcacccttcgctaaacgtgtgacacctcttaggagtattgtgcctcattttatctcccatttctatttcactataaactgcagctttttttctttatacaattcactmatgtttctaagcactgtgtatcctgtccagcacactatttcagtatgtattaaaagtctttgtatgttttgttactgtgaatggagtgaaaacggtgctagaccagagtctgcagccacttttctgccgatagcagagtcctcccctggcagtgccccatctcccaaactcactgaacacattgatgcaacagctcctgggaggtaaatctttcagatttcattatcttgtggcatggagagctgtctgtcattcacttaaacttgtattttaatctgtcattcattagtgtcattcctg

SEQ ID NO: 76990 - DNA, 455 bp, Chicken  19866894364956_2
catctcccaaactcactgaacacattgatgcaacagctcctgggaggtaaatctttcagatttcattatcttgtggcatggagagctgtctgtcattcacttaaacttgtattttaatctgtcattcattagtgtcattcctggaaatggtaggaaaggaatggagaagagaaatgaaaaaatgctaagcagatttatgaacaattttgtggatattcattaaaatatggaccaacgcttattgcatatggatgcattgtcagtagggctgcttttgttccctgaatcgcttaacagctyaaattggcaatttttctgtcagtggccttgggtatcttcattgacactattcatgatattttgggagatcatctttgggtggtaagtcttgtgacagtgattggaatttttttttaatgctattattgaaggctcctagcattttctgatggatt

SEQ ID NO: 76991 - DNA, 600 bp, Chicken  19866894364959_1
ccattttaaaagtacaaatggccccaaagactgagggccattttacctcaccgatgtaagctgtgtttactatcttgcatccaagttaatcttatttggttctgagaagaaatctcagtgcgggggggaagaaaatgaaggtaacgaagaaaaaagcaaaccacataggtgtcacctctactgcttataacacaaactcttgaaatccacgtgcagagaaacaagagcaaaatgaatgtcagctcccagtgaccttgttttcatctattttgctcagacttctatactatcatttctttscaataaggctaaggtacctttgttttcaactycactcaaaatataatttcctgatctaatcctgtttatttccagtgtgaacagttttgagtgtaaaaggtatcctagcaacattaatgactcaaacattaattcttaaaaaggcggtatatgtcaatttactgaacaagattccttctcgtcctcaagtaacagcaccaaaaatgccatcatgaacagtgaaggtctttctcacagaacctccttctctcctctgagaccaaggaagtgcagacactaggaaatacttcagaatttaac

SEQ ID NO: 76992 - DNA, 600 bp, Chicken  19866894364959_2
gagggccattttacctcaccgatgtaagctgtgtttactatcttgcatccaagttaatcttatttggttctgagaagaaatctcagtgcgggggggaagaaaatgaaggtaacgaagaaaaaagcaaaccacataggtgtcacctctactgcttataacacaaactcttgaaatccacgtgcagagaaacaagagcaaaatgaatgtcagctcccagtgaccttgttttcatctattttgctcagacttctatactatcatttctttscaataaggctaaggtacctttgttttcaactycactcaaaatataatttcctgatctaatcctgtttatttccagtgtgaacagttttgagtgtaaaaggtatcctagcaacattaatgactcaaacattaattcttaaaaaggcggtatatgtcaatttactgaacaagattccttctcgtcctcaagtaacagcaccaaaaatgccatcatgaacagtgaaggtctttctcacagaacctccttctctcctctgagaccaaggaagtgcagacactaggaaatacttcagaatttaacctaaatattttcctttcacrtgagaaaaggag

SEQ ID NO: 76993 - DNA, 600 bp, Chicken  19866894364959_3
tgttttcaactycactcaaaatataatttcctgatctaatcctgtttatttccagtgtgaacagttttgagtgtaaaaggtatcctagcaacattaatgactcaaacattaattcttaaaaaggcggtatatgtcaatttactgaacaagattccttctcgtcctcaagtaacagcaccaaaaatgccatcatgaacagtgaaggtctttctcacagaacctccttctctcctctgagaccaaggaagtgcagacactaggaaatacttcagaatttaacctaaatattttcctttcacrtgagaaaaggagaacaagcctattaaaaaaaaatctgaacgatcctgcatgaaagacattgctaatttgatgatctgttgctttaacatacttgatcatgtgtttaatgaagtattgtattaagtagaaacaacatggatttcaaatcaaaatattttatatcgatattggaaatgcagatgcacgtgcctcgcaaatgactggtgtgttttaagtacaaagttgattgacacatgctttcacttaatgatggtaattacgaagaataacaactctaaaccacatctgttctatgtaacg

SEQ ID NO: 76994 - DNA, 600 bp, Chicken  19866894364959_4
gaagaataacaactctaaaccacatctgttctatgtaacggtcttgttgtgctatgcagattacattgagagctgtcagaaatgtcactttatcacaaatcatccataagctcatttggaagacaagaaacagattaataagcatcaacacttctctgtaaacacttgttgaagagaataaaagctattagcactgaaggaagtgatacaacagtgaatgctttccctatcaagtctgaaataaggaaccacaggaaggacaaaagcgcggccgggtccctgaagaacaagcaccctgcygtacttcatcaccacgtggaggactcaacacccactcttcacacgagcaccacttaatcacattctctcttggtttttgctaagtcctcactcaacatcttcctttaacatgacacctaataatatatgaatacacaccttcaaactgcactgaattcaagtatctaaaatattgtacaaaatgcatctaagcacgcacggaaaaaaatctgcaggtattctttgtccactattttaatcccattttaacattctgaaaagaaaatagtgctttcagtggggttcatatatttttaatgc

SEQ ID NO: 76995 - DNA, 515 bp, Chicken  19866894364959_5
cacgagcaccacttaatcacattctctcttggtttttgctaagtcctcactcaacatcttcctttaacatgacacctaataatatatgaatacacaccttcaaactgcactgaattcaagtatctaaaatattgtacaaaatgcatctaagcacgcacggaaaaaaatctgcaggtattctttgtccactattttaatcccattttaacattctgaaaagaaaatagtgctttcagtggggttcatatatttttaatgccattgtatcaaatgaaaattgaaactaaaaccactgagtgragaaaactgaaacaactcagtcataaacactgtgacttttttccgtaccagaactgtaggcacctctattcaaaagcttcctaagatccagggtcatgtttttgctataacaaaggagcacagaattgtaggcaggccgtcatacaatctcagacaagtcattaacgtaacacgacttcgtttgcttttgtatgacacgagacattacaaaatgt

SEQ ID NO: 76996 - DNA, 477 bp, Chicken  19866894364960_1
ttcttcttctgcataacagagcaagagaaggtgccaaaggaaaagaaaagcataaacatacacaagttccttcctgtggaactaacttgagcaacagtgcacgttgtccaggagaattaaagttgtaatgctgttccagggttaaaagtaagcttaatttttctcctacccttcacccaccttccatcctaccacatgtagagtagaatgactgtgtgcaaatgctgcttcattgcaaggacaacgtcccatgaggagttcctgtgtgttgcaggccaactgcaccgacatttgtaggcrgtgtgaggcggatgagaagyttaatatttaaatgggatatttatgttcagtatactaaaaaagtaaaacagatatcagcaatgatagaagccatactgaacaacatcggatatttggtattttttgtagtagttggtccagccaaatggtttttaagcagcaccaccatctcctttg

SEQ ID NO: 76997 - DNA, 457 bp, Chicken  19866894364960_2
gcaagagaaggtgccaaaggaaaagaaaagcataaacatacacaagttccttcctgtggaactaacttgagcaacagtgcacgttgtccaggagaattaaagttgtaatgctgttccagggttaaaagtaagcttaatttttctcctacccttcacccaccttccatcctaccacatgtagagtagaatgactgtgtgcaaatgctgcttcattgcaaggacaacgtcccatgaggagttcctgtgtgttgcaggccaactgcaccgacatttgtaggcrgtgtgaggcggatgagaagyttaatatttaaatgggatatttatgttcagtatactaaaaaagtaaaacagatatcagcaatgatagaagccatactgaacaacatcggatatttggtattttttgtagtagttggtccagccaaatggtttttaagcagcaccaccatctcctttg

SEQ ID NO: 76998 - DNA, 599 bp, Chicken  19866894364965_1
  misc_feature (1)..(59): n is any nucleotide
nnnnnnnnnnnnnnnnnnnnnnnnnnnnnnnnnnnnnnnnnnnnnnnnnnnnnnnnnnnttaattcctctttggtggcatatggagaaattcttccactgtactccagtgaaagctgctacacctagctggcattagaagtgctgtacactagcttcatttttgtcccttcattactgggatgtaatctcaaatactaatttttatggtactctgaggcaattagtggtatttgagcagaatgtaaactaacctggaggtagaaggtagcaacatgacagcagccattcagttcctgtaytccatcagtgtatttsaagtgagaatatactgtatgccaaggactatgctgggaagcttagaaggtggtgaataacctataacacaagtctcgcagctcagtcatctttgtgctgctcaagcacctaggattccagaatggaggcattactgcagtgtttcttcagtcattgattaccagccatagagctttctgctgtgtcagttcagactctacttgcatgcatggggtttaccaggccaagggtagtgccacatgaatatggttgtactgcttttagggctggcctgcctctgaag

SEQ ID NO: 76999 - DNA, 599 bp, Chicken  19866894364965_2
  misc_feature (1)..(43): n is any nucleotide
nnnnnnnnnnnnnnnnnnnnnnnnnnnnnnnnnnnnnnnnnnnttaattcctctttggtggcatatggagaaattcttccactgtactccagtgaaagctgctacacctagctggcattagaagtgctgtacactagcttcatttttgtcccttcattactgggatgtaatctcaaatactaatttttatggtactctgaggcaattagtggtatttgagcagaatgtaaactaacctggaggtagaaggtagcaacatgacagcagccattcagttcctgtaytccatcagtgtatttsaagtgagaatatactgtatgccaaggactatgctgggaagcttagaaggtggtgaataacctataacacaagtctcgcagctcagtcatctttgtgctgctcaagcacctaggattccagaatggaggcattactgcagtgtttcttcagtcattgattaccagccatagagctttctgctgtgtcagttcagactctacttgcatgcatggggtttaccaggccaagggtagtgccacatgaatatggttgtactgcttttagggctggcctgcctctgaaggcatgaaattgagcca

SEQ ID NO: 77000 - DNA, 548 bp, Chicken  19866894364965_3
gcacctaggattccagaatggaggcattactgcagtgtttcttcagtcattgattaccagccatagagctttctgctgtgtcagttcagactctacttgcatgcatggggtttaccaggccaagggtagtgccacatgaatatggttgtactgcttttagggctggcctgcctctgaaggcatgaaattgagccagaccttaaggcctgccaggtgttgtgtgttgccttggatagctcttgtggtcttggacaaaaggcattttctgtgctgaagatgatttgactgcatgtcaaatcytgcttgtttcagccatgagcgatgcagttgttgctatctgatctttcagaaccaagagccttgagggaaggagtggtgatgttggggattagatcagtggttgtctggcatggttcatgttaaagccagctgttataaagtagactccattttggtggagatagtgaggtgttttggcacttttgttctcaggatgctcgtcaattcctttacacctttttgtaagagatattctaatccctttatac

SEQ ID NO: 77001 - DNA, 600 bp, Chicken  19866894364970_1
ttcagtcatcacttttgcacatacaaaatgtgcacacatgaaaggctgtaggaattaaccttggactgcactatcattaagaaactcaggagctcaaaaggaagaataagcaaaagcagaaggaaagtcaccagtttgttcttcgaaactcaagcctaaaggacccggttcatgaagctggcaatgctgtggcatagaggatttcactgtagacagagcaacccaaaaggcattcctcctggagtctcattgtaatgaacacgtcccaaataagagaagaagaaactccaactgaacacrtttctccttcaggaaggatacaggaagtagacataggtttcaagtcttcaggtcaatatcacctggaaggcagcactgcattggagaaagactgtggcatctccaggcctggtggtcttactttggtgtaaagaagtgctttgaaagaaaagaggattacaaagacatggggaaaagaaataatacaatatataccagataatctggaaggttttcaaaagaagaactttcttgaaaaagactctgaagtgtgatttattcctatggtcttcaggaggcacaagggagatcaagacagat

SEQ ID NO: 77002 - DNA, 600 bp, Chicken  19866894364989_1
tccctgtttgaaactggtcttactggacactggtaattcaattaggaaaccataggctgtgttgtgaaaccacagttatctattgaaacatgaggcttttctcagtgtgtgccagcagtggcttttacaggttctgcctcagtgatcgtaggagagaagtaagcaatactgcatctgcacgttccacatcccactgtccgccttctgtcactgcttcctctgatgctgcacctggtagttcacctgcagttgtcagcactttgaaacgtggttattacctaaaagaggctgtgttgatgyggttggtaaaacactgcaattcaggatttctattgtttttgttgttttcaggaggcaatacccgtgccataggtatgattctgcagtataaagtaccaggctcagaggagctaacgcagatgaaatttacagccagtgaagacttcagctctaacaagaagctgtcagcaagctggctggcagctatgcataaggtaagcaagagaggcaaaacttacagaragctgaagacagttggaaggatagttggaaggtgctccgcagcagtagggagtatgcagtccttggagctttctttct

SEQ ID NO: 77003 - DNA, 381 bp, Chicken  19866894364989_2
atgctgcacctggtagttcacctgcagttgtcagcactttgaaacgtggttattacctaaaagaggctgtgttgatgyggttggtaaaacactgcaattcaggatttctattgtttttgttgttttcaggaggcaatacccgtgccataggtatgattctgcagtataaagtaccaggctcagaggagctaacgcagatgaaatttacagccagtgaagacttcagctctaacaagaagctgtcagcaagctggctggcagctatgcataaggtaagcaagagaggcaaaacttacagaragctgaagacagttggaaggatagttggaaggtgctccgcagcagtagggagtatgcagtccttggagctttctttctttt

SEQ ID NO: 77004 - DNA, 599 bp, Chicken  19866894364993_1
  misc_feature (1)..(138): n is any nucleotide
nnnnnnnnnnnnnnnnnnnnnnnnnnnnnnnnnnnnnnnnnnnnnnnnnnnnnnnnnnnnnnnnnnnnnnnnnnnnnnnnnnnnnnnnnnnnnnnnnnnnnnnnnnnnnnnnnnnnnnnnnnnnnnnnnnnnnnnnnnctgcagtctttttctcaagagataacctatataacccctggttttctctgtgtgctgctttttttttcatgaaggttgcaaggattttatatatttgagaccttttcaccatcaaattgaattgaaacttagtgaacaggctaaaggctgttaggtgaaagrcaaagatgtacgtgttctcatatatcttaccaataagataagatactaagctaaaatctataaatcaagaaagagctgccctaaatatcgcaagttaggctttgtcactaggaggaggaaggaataaatttatttgtttattctgtggaaaatgtttcagacatcattattcttggaaccctgtagtttgccacatcaagygaagcatcagtttctagacaccctgctgaccacacaaggaggaatgccaagtccttcccaaacccaggaccttcacacagcaaacagatgcgctgcct

SEQ ID NO: 77005 - DNA, 600 bp, Chicken  19866894364993_2
ttttcatgaaggttgcaaggattttatatatttgagaccttttcaccatcaaattgaattgaaacttagtgaacaggctaaaggctgttaggtgaaagrcaaagatgtacgtgttctcatatatcttaccaataagataagatactaagctaaaatctataaatcaagaaagagctgccctaaatatcgcaagttaggctttgtcactaggaggaggaaggaataaatttatttgtttattctgtggaaaatgtttcagacatcattattcttggaaccctgtagtttgccacatcaagygaagcatcagtttctagacaccctgctgaccacacaaggaggaatgccaagtccttcccaaacccaggaccttcacacagcaaacagatgcgctgcctgcagtgctgagccaccgagtataaaggttggatcagcttctagaaaattaacattacttagcctttagcagagaaatcccatccctgctactcttttaatttttttttttcagtagcctctgttttgtttgaatttattcccctgtgtcacatataatttttgtatctgtgtagaatccattgcagaggatcaaacagcaga

SEQ ID NO: 77006 - DNA, 600 bp, Chicken  19866894365000_1
atccagggggatgcagtagcactttctagatcttcatgcatgggagagaatgtgagaggtttgtgtgttaaggcttttattctcagttgcaccaaataaatattatgaaggaaaaggaaagagagatgtgggcctaagagtggtgaatttttaaccatggatagttacagttgtcctcagggaaagagaccacagtgattcaggtaatcccagagtaaaaatggtcagctgtatctcagacctaatatctccaaagacagatgactaataaggtcatgcattctgatgttggccttgtgyttatgttgacattactctgcaggtgtaaagacactatcagtctttgcagcttaacttctgcacgtggctagacttacttctaacagtctgttggaagtacttttccaccttactagcactgcrcatgtctatgcatatcataaggctagtagtatattattttcattcactgctttattccaacgttgctgagttcagtgtagatattttaataccagatcattgaggagaaatttctctagagcttgaaattctagtgtccatctctttctctgggggtcagtatccaagacttccaaa

SEQ ID NO: 77007 - DNA, 600 bp, Chicken  19866894365000_2
agatgtgggcctaagagtggtgaatttttaaccatggatagttacagttgtcctcagggaaagagaccacagtgattcaggtaatcccagagtaaaaatggtcagctgtatctcagacctaatatctccaaagacagatgactaataaggtcatgcattctgatgttggccttgtgyttatgttgacattactctgcaggtgtaaagacactatcagtctttgcagcttaacttctgcacgtggctagacttacttctaacagtctgttggaagtacttttccaccttactagcactgcrcatgtctatgcatatcataaggctagtagtatattattttcattcactgctttattccaacgttgctgagttcagtgtagatattttaataccagatcattgaggagaaatttctctagagcttgaaattctagtgtccatctctttctctgggggtcagtatccaagacttccaaatatagtagaccttcatttcattgaaataccctaattttgcatttatgtgaaactaaccaattgcataggctgagacaggagtcctcacgaagctgtggcaactgcagtgtagcgatgctgttt

SEQ ID NO: 77008 - DNA, 444 bp, Chicken  19866894365001_1
aagtgcaactcagaacttttcccacccacacaccaaatccatttaaaattgagactaacaagttcacagtccagagatgtatttgcctgtttcaatacacagtgttatcatcactgttctgtgctatctcaagaaacatggcaatatgtactgaaaagatcaaaaactgctaccactgcacaggttgcaaagcatgaaaaggaaggataagtgcaattttagtaaaactcagtataagcaacactcagattgttattttttaaatctacagtgtatttacttttccttcttttatcatgwgttctaaacaattttagaaagtgaaaaaataagaagtggaaagtctactgcctcctattttcagggtgaagtaaagttcactgtctatgattacagcaagtatttccagttaatgtaatcaatgatatagaggctgagaaatgt

SEQ ID NO: 77009 - DNA, 599 bp, Chicken  19866894365005_1
  misc_feature (1)..(33): n is any nucleotide
nnnnnnnnnnnnnnnnnnnnnnnnnnnnnnnnncatgcactgcacctagggatggagcctgccagcatcccttgaaagtgccctgctagagtgacagcagcaatctgcactgcaggggtcagactgcccattacagcaatattctcctgcaagcacatcatctcctcttcgctggatttgagccctgacctcccagtccccttgcagacctccatttccttactgttcctttgtcacttttcccctctgtcctgacttgcataggtgggcaccagggccagccaggcagacctgtccccmaggagctgggaggtgctgcagaaacctggcaacgttgcatctgaatgccctgcaaacagaatggaaagtaaaagtgccccttggcaggtgcccgttccaagagaagggtgcttcagccagcagatacaggaagctgggcacagcatggccatccatcatctgctgacagcgctgacactgctgacactcctccccacagcccccacaagcagcaacacttgggcagccctgcacaagatccttgggtaccctggaccagtgccgagtgacagctcatccttgtcctcccacccttgcca

SEQ ID NO: 77010 - DNA, 600 bp, Chicken  19866894365005_2
aacgttgcatctgaatgccctgcaaacagaatggaaagtaaaagtgccccttggcaggtgcccgttccaagagaagggtgcttcagccagcagatacaggaagctgggcacagcatggccatccatcatctgctgacagcgctgacactgctgacactcctccccacagcccccacaagcagcaacacttgggcagccctgcacaagatccttgggtaccctggaccagtgccgagtgacagctcatccttgtcctcccacccttgccagcctcctgaccacgcactccctaaatagcaygaaggcagggtgctaggaacaggaggacaaaaaagagattttctctctcctctcacctgcttgggcagcagctgcgggtgacagcctcctccagctgatggaaagaggggagctgtgattttcaagtgaccgtccatgacttatcragtcatggggtgagaagagagaaggcagtcctgcaccttacataggttagatgttgcacagtccctgttgcacagtaccgaaatggagaaagcagagaaatccctgtaatgcttcacagacagctataatagcaaggtgtgaggcagcacgcag

SEQ ID NO: 77011 - DNA, 600 bp, Chicken  19866894365005_3
actgctgacactcctccccacagcccccacaagcagcaacacttgggcagccctgcacaagatccttgggtaccctggaccagtgccgagtgacagctcatccttgtcctcccacccttgccagcctcctgaccacgcactccctaaatagcaygaaggcagggtgctaggaacaggaggacaaaaaagagattttctctctcctctcacctgcttgggcagcagctgcgggtgacagcctcctccagctgatggaaagaggggagctgtgattttcaagtgaccgtccatgacttatcragtcatggggtgagaagagagaaggcagtcctgcaccttacataggttagatgttgcacagtccctgttgcacagtaccgaaatggagaaagcagagaaatccctgtaatgcttcacagacagctataatagcaaggtgtgaggcagcacgcagggaacacgctttgcaccagcagcagtttggctgctcagcccctgcctcgcccagggagcacaccattcagcatggacctgcttccttccatgagaagaactacaaccacacagttttttgttaaccaggcataaagcagcactgcc

SEQ ID NO: 77012 - DNA, 600 bp, Chicken  19866894365006_1
gacttctgatatctcctctaacagaacaagaaagcagcatgctttgcatcatttcaagttcctttatgctgtgtttttttttttccctcaacaattatacagagccaactttgctttcaggtgtagcacttccaaattgctctgggtatacacagatataaacaaaatcttaagatcttaagagctctgagatagttaatgcagctggggtggggaaagatttattcacatcatcagtgattcacctgaaaacagaatacaagaaactgtgcaaattgaaacatggaacttatctcttastgctgtaacagcatgagattattctcttactctagacaagaaacattttaatccccaaagatgaaaagatccctacaagaattaaactattcctcctctcagaagggtttatacgctttcctacagcatttaaatctgtgctgttcctacagatctaggaagttctcacacaagataaaaatcttgcttgttcacggactttagagcagttaatagttcaagaaagtgaagggttctaaaacatctcaaataaacagatctggagacatgacacgaatagcaagacaatagacacttacc

SEQ ID NO: 77013 - DNA, 600 bp, Chicken  19866894365011_1
gtgtgagaccaacctctcaaatgggatcatctcccacttccagatttatggttctgactgaggaaagcaaacagcatgcaagaaagacttctggaatgattaattaatagcgctgccaaacccaaatgggctttgtagcagtgtcattgtgctatactgtaagagatgagtgatgatttcaggataaggctttgcaaaaaagtagttgcaaagtccttccatacagtgtaggagcttctcatatcagcccaccagaccttcctggacgtttgctaagctcaagagactgtaaagtatggrcttcaaaggtctgcgctgctatctgttctgagctgccgggcaaaccttaggaaagggactgtgaagcagaaatgagaaagcaatctcaagctgacctaaccacctgctctacaatagttttccaggaaaatgttctaggcagctgaacctaatcaagaggctggatgcaaaccattcatccaaggaattctcagtaatgaaagattaacrtgccctttactttaggaggtttgaacatgagactctcccccatcttcagatttactttccagaattactttctgtgcaatatttacaata

SEQ ID NO: 77014 - DNA, 600 bp, Chicken  19866894365011_2
aagtccttccatacagtgtaggagcttctcatatcagcccaccagaccttcctggacgtttgctaagctcaagagactgtaaagtatggrcttcaaaggtctgcgctgctatctgttctgagctgccgggcaaaccttaggaaagggactgtgaagcagaaatgagaaagcaatctcaagctgacctaaccacctgctctacaatagttttccaggaaaatgttctaggcagctgaacctaatcaagaggctggatgcaaaccattcatccaaggaattctcagtaatgaaagattaacrtgccctttactttaggaggtttgaacatgagactctcccccatcttcagatttactttccagaattactttctgtgcaatatttacaatacccattttccctcttaaagtagcagctgaaagaatatcttccttgagcaaacagatttgaacagactgcagaaactgccaagtactgatctcatgatcagtagggctctaggtgaccctgcttaaacagtggggttgcaccaggtgatctctaaaggccccttccaacacagaccattttctgactcctagattctaaaacctctcagaa

SEQ ID NO: 77015 - DNA, 599 bp, Chicken  19866894365013_1
  misc_feature (1)..(78): n is any nucleotide
nnnnnnnnnnnnnnnnnnnnnnnnnnnnnnnnnnnnnnnnnnnnnnnnnnnnnnnnnnnnnnnnnnnnnnnnnnnnnntcccctccttactttctccttcagtattttgacccccaaaacactcctccatccacatcacttgggtcagccttcaaagccaagccctgtgcacacttgtttgcacacagtaggatgcggttgttcaggcagattagttgctctgaattaattctacaggcagattgttgctaagggggtttatttctgcagcacccactgctcacagcccctcagagctgygggtgtggatccatagggatgggggctacgctccctgcccagctgtgtgcttcgtgtcacatctcagcactccccagagctgggarcagaggggaggaggttctccttctgcaggatgtgccaataggacagacaggtatggccagatttgcccacacggtatcacttgaccatctgagataaggctcagacagcaatgactgcctttttcaggggacaccacccaaaattgcaccagagcggctgccagaagtgacatcacctgcacatttgtggcttatctgggatacaaaccgctc

SEQ ID NO: 77016 - DNA, 600 bp, Chicken  19866894365013_2
ttactttctccttcagtattttgacccccaaaacactcctccatccacatcacttgggtcagccttcaaagccaagccctgtgcacacttgtttgcacacagtaggatgcggttgttcaggcagattagttgctctgaattaattctacaggcagattgttgctaagggggtttatttctgcagcacccactgctcacagcccctcagagctgygggtgtggatccatagggatgggggctacgctccctgcccagctgtgtgcttcgtgtcacatctcagcactccccagagctgggarcagaggggaggaggttctccttctgcaggatgtgccaataggacagacaggtatggccagatttgcccacacggtatcacttgaccatctgagataaggctcagacagcaatgactgcctttttcaggggacaccacccaaaattgcaccagagcggctgccagaagtgacatcacctgcacatttgtggcttatctgggatacaaaccgctctggcaacacatcccagcaccccaccagcacaaagccattgccaccctcctgttccatcccccccagcccattctctaccatctcctt

SEQ ID NO: 77017 - DNA, 600 bp, Chicken  19866894365013_3
ctgcagccatctccagggcaagcgtccacctcggtgccttcctcaccaaacagagctcaggctctcatctccgggtgcatccctgcttgtggttgaatccagaattttctccttcttgtttacggcagtgccggagttgcggacatttaccagctattttaattgctgcctgtgctaaaaaacagttctctccttatctaaacggtccgtgtagtcctcgagcacgaggcagctcggcagctcagggctggatgaagaattctctttcacatggagccatcccacagctgcacagcaccyggtgcagatggaccccacaccgctgtgccctcatcttcattgcagccacacaactcttccactttgcttcacgcttccttcatcaagggtgttttcctaaataggattcgccttcaatcctggcttaggcacagctcagcactgggtgagtaaaggcttgtataaggcacttaaagccagagggcgttacacaaggggtggatgcggggcgttgcacagagcaccgctgggtttggaaatagtgctggcaattgctccctgttggaggctttggatattctttgggraaaagcaacacaa

SEQ ID NO: 77018 - DNA, 600 bp, Chicken  19866894365013_4
ctgcacagcaccyggtgcagatggaccccacaccgctgtgccctcatcttcattgcagccacacaactcttccactttgcttcacgcttccttcatcaagggtgttttcctaaataggattcgccttcaatcctggcttaggcacagctcagcactgggtgagtaaaggcttgtataaggcacttaaagccagagggcgttacacaaggggtggatgcggggcgttgcacagagcaccgctgggtttggaaatagtgctggcaattgctccctgttggaggctttggatattctttgggraaaagcaacacaaggggacggatctgctttcctctcccctgggctctgctcttttcagggcactgcactccctgcatcccaatgccctgcagtgctgctgcctctgggctgctccgctcctcattacggctcaggaaagacagagcacattctgagtgtcatttcagccttcataacctaacaccgctgcccacacggagaataaataatgccattttaaatggattgattaaatattactaaatactgtgctgcttctgttgtccaaatacacacagcatgcagagtttatcatggatg

SEQ ID NO: 77019 - DNA, 437 bp, Chicken  19866894365015_1
tatgtaggaagtcactattcatttacgtgaacagtcacaaatgattacccttcctacattttaaaaccttttatttgcagatttcttcctcggtgctccaggcagaccctttgctcttctgtggcttttggtagggatgtgtgagtggagcagctcaggatcactgtttggtcaccaattagaagacagcgggccgggctttcctgcaccactgagaagctcctctagaatcactgaaaggtgttttggccctcattaaacacacgattctcacttcttcattatcttaaggtcacgcaraagtgctyttccagcagaactgcgcrcagcggcgcggcgccgctcggagatggaagcactgcagttccgggagcggccgcgcggtggcgctgttcccccgagcgccgccgcggtaccgcgctccgcaggcgcaacgt

SEQ ID NO: 77020 - DNA, 429 bp, Chicken  19866894365015_2
aagtcactattcatttacgtgaacagtcacaaatgattacccttcctacattttaaaaccttttatttgcagatttcttcctcggtgctccaggcagaccctttgctcttctgtggcttttggtagggatgtgtgagtggagcagctcaggatcactgtttggtcaccaattagaagacagcgggccgggctttcctgcaccactgagaagctcctctagaatcactgaaaggtgttttggccctcattaaacacacgattctcacttcttcattatcttaaggtcacgcaraagtgctyttccagcagaactgcgcrcagcggcgcggcgccgctcggagatggaagcactgcagttccgggagcggccgcgcggtggcgctgttcccccgagcgccgccgcggtaccgcgctccgcaggcgcaacgt

SEQ ID NO: 77021 - DNA, 411 bp, Chicken  19866894365015_3
gtgaacagtcacaaatgattacccttcctacattttaaaaccttttatttgcagatttcttcctcggtgctccaggcagaccctttgctcttctgtggcttttggtagggatgtgtgagtggagcagctcaggatcactgtttggtcaccaattagaagacagcgggccgggctttcctgcaccactgagaagctcctctagaatcactgaaaggtgttttggccctcattaaacacacgattctcacttcttcattatcttaaggtcacgcaraagtgctyttccagcagaactgcgcrcagcggcgcggcgccgctcggagatggaagcactgcagttccgggagcggccgcgcggtggcgctgttcccccgagcgccgccgcggtaccgcgctccgcaggcgcaacgt

SEQ ID NO: 77022 - DNA, 599 bp, Chicken  19866894365016_1
  misc_feature (1)..(209): n is any nucleotide
nnnnnnnnnnnnnnnnnnnnnnnnnnnnnnnnnnnnnnnnnnnnnnnnnnnnnnnnnnnnnnnnnnnnnnnnnnnnnnnnnnnnnnnnnnnnnnnnnnnnnnnnnnnnnnnnnnnnnnnnnnnnnnnnnnnnnnnnnnnnnnnnnnnnnnnnnnnnnnnnnnnnnnnnnnnnnnnnnnnnnnnnnnnnnnnnnnnnnnnnnnnnnnnnnccagcccttctgtcagttcctcccattgcaacccccaaacaggctctgaattttgggaagaaagctgggaggaacagcacgacgtggcacrcagcagcccctgaagcaggagacttgaaagaaacacatacaccaagaagagacgcatcctgtcagcatcaaaaaaagctgcctccctaccaaaaagctcttgcctgtcttttcttagtgatctaggcatgtttccagatggcacatcttcccactatggttctctacaacgccattctctggggcaaggagaaggaaggattagaacaaccccaaaccattcactgaagctcagggaaaacctggctcaccaaaaccccaaggctgaccacacaaccaccaggtggctgagggtggagg

SEQ ID NO: 77023 - DNA, 600 bp, Chicken  19866894365016_2
acgcatcctgtcagcatcaaaaaaagctgcctccctaccaaaaagctcttgcctgtcttttcttagtgatctaggcatgtttccagatggcacatcttcccactatggttctctacaacgccattctctggggcaaggagaaggaaggattagaacaaccccaaaccattcactgaagctcagggaaaacctggctcaccaaaaccccaaggctgaccacacaaccaccaggtggctgagggtggaggcacctccaggtccagctggtgccactccatctcagccatagccacccagcayagaagtagccctrttcagctgcagcagyccatctgatgcaccaagcccactggaacactgcctgctccccaagcagggagctgctccccacccaagtggaatgctccagggctgcctggccccgagcagtgccctgggaggaagctaaacacgrgggcttggagaggtgtcagtgggcagggacacgagctttcaagtccagcaaaagccctccttagggagaagctgagctttgtggtggaaagcagagctctctctgagtgaagaatcttgtgctgtatacagtagattttctttaat

SEQ ID NO: 77024 - DNA, 600 bp, Chicken  19866894365016_3
gcatcaaaaaaagctgcctccctaccaaaaagctcttgcctgtcttttcttagtgatctaggcatgtttccagatggcacatcttcccactatggttctctacaacgccattctctggggcaaggagaaggaaggattagaacaaccccaaaccattcactgaagctcagggaaaacctggctcaccaaaaccccaaggctgaccacacaaccaccaggtggctgagggtggaggcacctccaggtccagctggtgccactccatctcagccatagccacccagcayagaagtagccctrttcagctgcagcagyccatctgatgcaccaagcccactggaacactgcctgctccccaagcagggagctgctccccacccaagtggaatgctccagggctgcctggccccgagcagtgccctgggaggaagctaaacacgrgggcttggagaggtgtcagtgggcagggacacgagctttcaagtccagcaaaagccctccttagggagaagctgagctttgtggtggaaagcagagctctctctgagtgaagaatcttgtgctgtatacagtagattttctttaatggacacattactt

SEQ ID NO: 77025 - DNA, 600 bp, Chicken  19866894365016_4
gcctccctaccaaaaagctcttgcctgtcttttcttagtgatctaggcatgtttccagatggcacatcttcccactatggttctctacaacgccattctctggggcaaggagaaggaaggattagaacaaccccaaaccattcactgaagctcagggaaaacctggctcaccaaaaccccaaggctgaccacacaaccaccaggtggctgagggtggaggcacctccaggtccagctggtgccactccatctcagccatagccacccagcayagaagtagccctrttcagctgcagcagyccatctgatgcaccaagcccactggaacactgcctgctccccaagcagggagctgctccccacccaagtggaatgctccagggctgcctggccccgagcagtgccctgggaggaagctaaacacgrgggcttggagaggtgtcagtgggcagggacacgagctttcaagtccagcaaaagccctccttagggagaagctgagctttgtggtggaaagcagagctctctctgagtgaagaatcttgtgctgtatacagtagattttctttaatggacacattactttaaactaagcctcca

SEQ ID NO: 77026 - DNA, 600 bp, Chicken  19866894365016_5
acaaccccaaaccattcactgaagctcagggaaaacctggctcaccaaaaccccaaggctgaccacacaaccaccaggtggctgagggtggaggcacctccaggtccagctggtgccactccatctcagccatagccacccagcayagaagtagccctrttcagctgcagcagyccatctgatgcaccaagcccactggaacactgcctgctccccaagcagggagctgctccccacccaagtggaatgctccagggctgcctggccccgagcagtgccctgggaggaagctaaacacgrgggcttggagaggtgtcagtgggcagggacacgagctttcaagtccagcaaaagccctccttagggagaagctgagctttgtggtggaaagcagagctctctctgagtgaagaatcttgtgctgtatacagtagattttctttaatggacacattactttaaactaagcctccaccatctgttccagtccctaattatcaatacaaaaacaaacatctactcacaattacactcgtaacaagtaaagatgccagcaattagcatgcaggaacatcctcgctgagcggagcgggtccatct

SEQ ID NO: 77027 - DNA, 600 bp, Chicken  19866894365027_1
agattttgaaggaacagtgagatcataggtaatttgtgaaatactgactcccaagtacgagctaccaattttcaattcattgtttaaatgcatggctgtattcatttacactacagtgtgttgctggtgttttagttctctgttcttttttatttgtttacttgtttgttttgaatagtttgtggaacttccctaaattacttgaattttagtaagaatgtatttgtaaaggagtgcatataaggtattagcattagagctgtgtagctgttgttctaattccctattttttttcagatmtgatatttttctaacttctagttgcctgtagcttttgaatttaaaagaaaaaaaagcctctgagaaatcaatcataaagcattcattcactttaaggatgcatggctttcacctttgtatatccttctgaaaacttgcatttacaagtttaaatatgcttttagtctgtgcaagaaaattgcagagctaggtatgttgaaaggcacttagctgtgttcatatttaatatttatgcctatctagaactgaaagagaaaagaagtaggcatgtgtggtataatgatctcagtattgaactct

SEQ ID NO: 77028 - DNA, 562 bp, Chicken  19866894365035_1
ggaccaccagaatagcatgatcgtctccgcatgcagcctgatgtggcttccatctattagtccatggctgtacagagggatatgctatagcctttctttccaggtaagcagactggcatgaatactatgtctataatcaacacattcctagcatagaaaagtcaaccagcaaagtaagttcacatgttcagtatgacagcttttatgttgtacgcgtgctaaaaccaggcctgccattcaagaacagcaatataaataacgcagatctgcaggcagagctgtgtatttacttggtgatcrgcacagctgggttagcagaactgcccttctggatgtgtacgctaaagaacatgcctcgtgctatgcatgaggcagagcaggaaacccaactcgaacatggcaagggttatctctggatcagttcaactccactggttctaattcagatatcagtattttactgtccaacatctgacaaacattactttgaaaacaactagcagcaagtacacaggtacaaagatcataaagaagacgaagaaatacagctactacacatgca

SEQ ID NO: 77029 - DNA, 508 bp, Chicken  19866894365045_1
aaaagccaacttgcagaaaatatgggaaacttgtctcatataacagctgaggatgtggctaggttaaggcaggaaactgctacccacaatgcaatgttacatacactaccacttaataaaatttatttcaaacatgctactgacaaaaccaaagaaaaataatatcctaactacgctagttagtacactaaatatatctagggaaaagtgaaagtaatctctccagagcctttcttgctgttaggatacaatgccaccagtagttaaactggagcggatctcagcagttaaaagcagtgrcctatttttagaaaaataatcacctcacaatggaaattaatgattgtgtactttttaataagagccagagttgttttaggcagggaggtgtgagataagcttcctccctgggattttctcctcgtcagaatctcttggtgcgtagttctacaagtggcagcttttcttgcccctctcgctccatctgtctgcagggtgggctgcaaat

SEQ ID NO: 77030 - DNA, 600 bp, Chicken  19866894365046_1
cccaagctcatcttttctgtggaagtccaaagactcttaaaatgcacaaatcaaggtactaggcatgacaggtgctgatcttgtgcttgtttgattgcaccgtaggaaaaccaagagtggaataaagacatacaaaactaaggagccataaaagtgactttagaagcatctgagaaaatcagtaaaatagttcatattttagtcagcatattcatcaatatcaaagacatctttgaccttcctactctcttcagaaaagcatttacactaagcccttccagtagatattcttcagaaagraaaaggtgctcctctgatctcagtatggatctgagaatasgaatgcaaatccctgaaccaattccaagtgctcttggacatcactgcccataccactccgagcctcattttctctgattagagtaaatcattatactgatattcaccaccctgaaggccaatgaaacctgaaagtaaagctaagtgactctgactcccaaaacacttttgaaagtcccactgtaattttctcttacacttgaagatgggctcatcaggaattgggaaagaccttgcataggtaaaacatacatattttaa

SEQ ID NO: 77031 - DNA, 600 bp, Chicken  19866894365046_2
aatgcacaaatcaaggtactaggcatgacaggtgctgatcttgtgcttgtttgattgcaccgtaggaaaaccaagagtggaataaagacatacaaaactaaggagccataaaagtgactttagaagcatctgagaaaatcagtaaaatagttcatattttagtcagcatattcatcaatatcaaagacatctttgaccttcctactctcttcagaaaagcatttacactaagcccttccagtagatattcttcagaaagraaaaggtgctcctctgatctcagtatggatctgagaatasgaatgcaaatccctgaaccaattccaagtgctcttggacatcactgcccataccactccgagcctcattttctctgattagagtaaatcattatactgatattcaccaccctgaaggccaatgaaacctgaaagtaaagctaagtgactctgactcccaaaacacttttgaaagtcccactgtaattttctcttacacttgaagatgggctcatcaggaattgggaaagaccttgcataggtaaaacatacatattttaagaactacatggaaataaagtaaaatagaccacaacagtta

SEQ ID NO: 77032 - DNA, 600 bp, Chicken  19866894365050_1
gtttgtatgttgacaaattaaaacaagctacccagttggttatatgtaacgtaccaaggccaggtctggaccatgcagctctgtaggtgaacccttccctgggctgttcagttggactgtgtgactttgctttggatctggttacaagcaatctcaggagtttgctccagctcatctgggaacaagccagaggctgtccaatggatcccagctggtttcatggagatgtcaaggagatgggtctgctgtgctggtgatggaggtgttaattagctggtttctctgaagtgcattgcaaamagcattgcatcctggtaccctacagcagagtgacgtttcagaaggatcctcatcacctctcagcaaccagttaggtgctcagttatcttaagtgcatcatttaacatcttcctggataggggctctctcctgtgacaggtattaggtaaacaggattcaggtaaacagtttttgagtttgagaagagccaagactgtgatgtttacttccagatctggatgtcatgctccttaaatgcccgggccattgggagttgctggttcctcaccaggggaataagcaggtttcatttctgggctg

SEQ ID NO: 77033 - DNA, 600 bp, Chicken  19866894365063_1
gaacttgttaataagtggcatttggcactatgttttcctttacaaattacttccaagacctttttctcaagctaatgcttttcattattttgctgtttttctttacaacaagtgttattggaaagtttacaggtagcttttacaaatatagccaaggatatttttaactcccatactctgaaatgtgttaggtaagtgtccatatatgcacggaggtcaagtcaacaatgaatctgtctggattcaaagctatacaaactcagactagaaataacaaacaagttttggtaaaaagggttsttaactgatgcatcagttccctgaaaactgttatgtcttgacttaaagatcatcagatgagagacaaagtttctaaaaactgtactttaatttcaacacaactttatattctactttgatgaatttaatctttaacttaatactgtgaattccattccatgtgaaatggacagctagataattacaataatctcctaacttctaacttttaggtaagcacttgaaatttcagaggatggatactttgttaatttgatgagcaagtgatctaagtatccagcaaacagcactcagctgctt

SEQ ID NO: 77034 - DNA, 600 bp, Chicken  19866894365066_1
taaaaacacaacccaggtaaaaccacagagtggcacatggtatgtacccactatatcctttctctcaggcagaagaatgcttacttctaatagctgagatggtggttcgcacaagtgaagtagaaaacttactctctgtttctttggccactgaacaagtttttccacagctgagacacagatctgtagggagaaagatagattttctttgtaatgttgaggctagccacttcagccacaattgggttttcataatctttccagaccactgcttcccatggtgctctctataaatttccrccacataggctgtgcacacctgaagtcatctggatcttggcatacctgtcacagagcatcatcatccaagtcaatattatgcatcatctccagcacagctacttccctcaggtaccggataccttctccatggtggcctatctgccctggaaacatacttgaagggatatctttccttcatggctaacaagaattgtctccatatgataaagacttgatgtcccctttcctgataatagaatagtagacttcgctgtctattaagtccaggctactggcacctttatcccagcattggag

SEQ ID NO: 77035 - DNA, 599 bp, Chicken  19866894365067_1
  misc_feature (1)..(217): n is any nucleotide
nnnnnnnnnnnnnnnnnnnnnnnnnnnnnnnnnnnnnnnnnnnnnnnnnnnnnnnnnnnnnnnnnnnnnnnnnnnnnnnnnnnnnnnnnnnnnnnnnnnnnnnnnnnnnnnnnnnnnnnnnnnnnnnnnnnnnnnnnnnnnnnnnnnnnnnnnnnnnnnnnnnnnnnnnnnnnnnnnnnnnnnnnnnnnnnnnnnnnnnnnnnnnnnnnnnnnnnnntaagggtacataggatctgtggctcctgataggcaacctggtagacaacaggctggacatgagccagcagtgtgcacttgcarcccagaagactaactatatcctgggctgcatcgacagaggggtggccagcagggagaaggaggtgattgaccctctctactcagctcttgtggggccccatctggagtactgcatccatgcctggagcccccagcacaagaaagatgcagagctcttggaatgggtctagaggagggccactaagatgatcagagggctggagtacctctcctatgaggaaaggttgagggaaccaggcttgtttagcttggaggctccaaggagacctcgttgtgaccttccagtacttgaagggagc

SEQ ID NO: 77036 - DNA, 600 bp, Chicken  19866894365067_2
gagggaaccaggcttgtttagcttggaggctccaaggagacctcgttgtgaccttccagtacttgaagggagcatataaacaggagggagaatgactgtttacatggatggatagtgataggacaagggggaatggttttaaactgagacaggggaggtttaaattagatattaagaggaaatttttcacacagagggtggtgacacactggaacaggttgcccagagatgttgtggatgccccatccctgaagacattcagagccaggctggatgtggctctgggcagcctggtctcayggttgacaactgtgcacatagcatggggtttgaaactagatgatcagtatggtccttttcaacccaggccattctatgatcctatgattctaattctaaagatcttagctgtcaaaaagctgagaaaaaagcagatgtgtaaatgctttagtacatacacatttctttcagttgtattttttaagtatttgaaatattgatcactaaaaagctcttttataaattctaacctgaatcaatactgaccacttaatggctttctgattacttgatgttgaatacagcagttgcatactaact

SEQ ID NO: 77037 - DNA, 600 bp, Chicken  19866894365071_1
acagtattttaaatgtaccagctttttattgtgattatttactgcgtactgattggtttgctgtgcacacagtcagtgcaggaaccagcgtgagtcagctgctctgattggtaatctgggcaacaacagtgcaaaaccataggcatggattagcacttctgccatcagtcgtatgaggtctctctgaaggcatacatacgtctgtgtatacatatacacaagcgtgcagcttgctccgaaagtaatgcctccttgttatttccataggaactacaactgatacgaagagcacagtaagastgtttgataaaggaaactctcagctacaaatcactccttttcaacacagtcacattgttctgcatttgcaccagcaatgaacgagagcctgcatgccatgcttgtataagcctgcaccagcggaggtgacccactgtgaccactgctgaaaagcaccacccaccacctcactgagctcayacccactggttggtctccataaatgttcacaagcatcagtgaatgtcagtrggtgtcatttcttccacacrgaggagtycagtggcacagctttgctccatatacacttccacgccagat

SEQ ID NO: 77038 - DNA, 600 bp, Chicken  19866894365071_2
tctctgaaggcatacatacgtctgtgtatacatatacacaagcgtgcagcttgctccgaaagtaatgcctccttgttatttccataggaactacaactgatacgaagagcacagtaagastgtttgataaaggaaactctcagctacaaatcactccttttcaacacagtcacattgttctgcatttgcaccagcaatgaacgagagcctgcatgccatgcttgtataagcctgcaccagcggaggtgacccactgtgaccactgctgaaaagcaccacccaccacctcactgagctcayacccactggttggtctccataaatgttcacaagcatcagtgaatgtcagtrggtgtcatttcttccacacrgaggagtycagtggcacagctttgctccatatacacttccacgccagatgccatgctgtcagactgcccctctgctgccggctcagaaacatgttcctccaacaagyatccagcagaactatgacctgatttattattacttaaaacggcagcaagattctaaggaagcagtacttggttccaactgggaatccatcgttctgtgtcatcactgtatgtacctctggtg

SEQ ID NO: 77039 - DNA, 600 bp, Chicken  19866894365071_3
tgctccgaaagtaatgcctccttgttatttccataggaactacaactgatacgaagagcacagtaagastgtttgataaaggaaactctcagctacaaatcactccttttcaacacagtcacattgttctgcatttgcaccagcaatgaacgagagcctgcatgccatgcttgtataagcctgcaccagcggaggtgacccactgtgaccactgctgaaaagcaccacccaccacctcactgagctcayacccactggttggtctccataaatgttcacaagcatcagtgaatgtcagtrggtgtcatttcttccacacrgaggagtycagtggcacagctttgctccatatacacttccacgccagatgccatgctgtcagactgcccctctgctgccggctcagaaacatgttcctccaacaagyatccagcagaactatgacctgatttattattacttaaaacggcagcaagattctaaggaagcagtacttggttccaactgggaatccatcgttctgtgtcatcactgtatgtacctctggtgtatgaaacctaattctaattaaacttgatttacattcagcctttccaagat

SEQ ID NO: 77040 - DNA, 600 bp, Chicken  19866894365071_4
cttgttatttccataggaactacaactgatacgaagagcacagtaagastgtttgataaaggaaactctcagctacaaatcactccttttcaacacagtcacattgttctgcatttgcaccagcaatgaacgagagcctgcatgccatgcttgtataagcctgcaccagcggaggtgacccactgtgaccactgctgaaaagcaccacccaccacctcactgagctcayacccactggttggtctccataaatgttcacaagcatcagtgaatgtcagtrggtgtcatttcttccacacrgaggagtycagtggcacagctttgctccatatacacttccacgccagatgccatgctgtcagactgcccctctgctgccggctcagaaacatgttcctccaacaagyatccagcagaactatgacctgatttattattacttaaaacggcagcaagattctaaggaagcagtacttggttccaactgggaatccatcgttctgtgtcatcactgtatgtacctctggtgtatgaaacctaattctaattaaacttgatttacattcagcctttccaagatgctccaagttccacctcgct

SEQ ID NO: 77041 - DNA, 600 bp, Chicken  19866894365071_5
ttccataggaactacaactgatacgaagagcacagtaagastgtttgataaaggaaactctcagctacaaatcactccttttcaacacagtcacattgttctgcatttgcaccagcaatgaacgagagcctgcatgccatgcttgtataagcctgcaccagcggaggtgacccactgtgaccactgctgaaaagcaccacccaccacctcactgagctcayacccactggttggtctccataaatgttcacaagcatcagtgaatgtcagtrggtgtcatttcttccacacrgaggagtycagtggcacagctttgctccatatacacttccacgccagatgccatgctgtcagactgcccctctgctgccggctcagaaacatgttcctccaacaagyatccagcagaactatgacctgatttattattacttaaaacggcagcaagattctaaggaagcagtacttggttccaactgggaatccatcgttctgtgtcatcactgtatgtacctctggtgtatgaaacctaattctaattaaacttgatttacattcagcctttccaagatgctccaagttccacctcgctgaggagtt

SEQ ID NO: 77042 - DNA, 600 bp, Chicken  19866894365071_6
tctgcatttgcaccagcaatgaacgagagcctgcatgccatgcttgtataagcctgcaccagcggaggtgacccactgtgaccactgctgaaaagcaccacccaccacctcactgagctcayacccactggttggtctccataaatgttcacaagcatcagtgaatgtcagtrggtgtcatttcttccacacrgaggagtycagtggcacagctttgctccatatacacttccacgccagatgccatgctgtcagactgcccctctgctgccggctcagaaacatgttcctccaacaagyatccagcagaactatgacctgatttattattacttaaaacggcagcaagattctaaggaagcagtacttggttccaactgggaatccatcgttctgtgtcatcactgtatgtacctctggtgtatgaaacctaattctaattaaacttgatttacattcagcctttccaagatgctccaagttccacctcgctgaggagttaatttagcatgaagtaagcttgtgctgcttagaggttggtggaaatgcacaggaatcaaggaatcccctctgtaggacaaaatgatgaagaaaccacag

SEQ ID NO: 77043 - DNA, 600 bp, Chicken  19866894365072_1
ttgctaatgagaaaaactcattcacatgtaatagctgatttcctaaacattatgacaagaggcattaacatattaaaatggaacagcttctttcttttgtttaacgcaatgagattgatttgctctgggaatgcagatttcttgcaacagcagaatggaaagcagaaaggaaaaaaaaaaagaacagcactaaaaggaaaacatagctgctaattaaacaattttataatatccatcttttagttaacatttcattcatttttattttattgttaagaaaatacattaaaaaagacaggygctttgttcattggaaagaacgcactgcagctgaagagcagcaaaacagttcctggtgagactgaaatgcaaagttccaagttctgaagtcatcatcaaatctcccattggcatttagtgcagaggagttacgtcccttaattctgtcagtagcatatcttctctagttctaggatcagactgtgattcttcacaacttttcattgcaagttacaattcagatattgagaactagcaatgttagaaacgccaagggaaataagcaggtaactcttgaattttatggaatttggccatcca

SEQ ID NO: 77044 - DNA, 600 bp, Chicken  19866894365076_1
tcagatctgtcacaggtttaagtctcagctttcccggagtcaacagtgttttctgaagggaacaaagtgacaggctctttcaagacacatatgctccatctcaatgctattctcatcccagattttggaatgaagctcaaaatacacactccaggcactgctgtgggaagagggtgccagcaggcagaagagtgctcccattaaaacatgttctgcatacaaggaaacactgagcacaagatcatcctgcttgctctttagggttctattgcattgtcgatgtggccaggaaaaacaatrcattctgcatcctgatgctcatttcacatctaaatgacctgcataaagaaggttagctgttgggccatgcaaaccctagagatcacacagctgaggaagtcaggtgaaaaaagggcacacaggtttctgccatccaacacctctcttgcccctcgctctttttttcagatatttcactacaccctataattcattcatcaagaaatctgcaaggtaataaagcagcaaaacacagctctcaccaaacctcaggtctctgttacaagcagagcatccccatttgtcagggcttcacggaca

SEQ ID NO: 77045 - DNA, 600 bp, Chicken  19866894365082_1
ttaccctttagtggtaaggattgcatcaatgacacccaaataaaaaaaacaggttactttttcagatcagctgaggctgtacatatcacacagcaagtaaggtataatattcacctcaaagtatacagctgccagccaggcctacatttcattctacaccactgtgcatcccattttgcccatatatgttagatatgtggctccatctctaacgtctttaaagaataaaaatattttaattactcaaattgttaattaatatatgattcacagaactataacaagatatgtcagcaacgytcctagaatcaatcaagtgaaggttactgttttatttgggagcaaattgaagattctgtgttttaattaaaagtctttgtgttatatctaaaatatctatattgctttatcattctacagttctatttttgatatcccaacttattttatcttgtgaattaattttaatctaaaattatcatggaagttaagcaactataggaaaggaaaatgtacagctactaatagcttcagtttyagaaatgggcagcaatcacgtaagagaatcagctatcgaaatgcatgatcttttcatttaaa

SEQ ID NO: 77046 - DNA, 600 bp, Chicken  19866894365082_2
attactcaaattgttaattaatatatgattcacagaactataacaagatatgtcagcaacgytcctagaatcaatcaagtgaaggttactgttttatttgggagcaaattgaagattctgtgttttaattaaaagtctttgtgttatatctaaaatatctatattgctttatcattctacagttctatttttgatatcccaacttattttatcttgtgaattaattttaatctaaaattatcatggaagttaagcaactataggaaaggaaaatgtacagctactaatagcttcagtttyagaaatgggcagcaatcacgtaagagaatcagctatcgaaatgcatgatcttttcatttaaaattggaatagaaggacttgagttttcagttacttgcatagaaacacgtgtaagttttgtaaagcaggaccgagagtactgaaatgaagcaaaagaggtaaaatgtaatttggcgtaaaacttatgctgaaattgtgatgccaatgaaaatttagggaatgtagcatatgcttttttattttccatcattatttttgcaatacaaaagcagcaacggcaaaattttagacctttatagt

SEQ ID NO: 77047 - DNA, 600 bp, Chicken  19866894365085_1
agttgctgactcaagcaaatagcttagcaaagcggagcggtaattaagagatttcatttacaacacaatttcacatttgtacaggaagaaatgtgcttcttataacatgaaaattcttaatactgaaaagacacatgcagttataatgccacgtaagtctttcatttgctctgcgaagcaagccattccttcttctagtaagtaaatccacattttaacagagaaaattattcaaggcaaaacttgagatgtaatgaatatcactgagatccaaagaaaacttgaatgcatgatcctaaraagttccaagtcaagaagagccgtgacattcctaatgaatggaattagcctcaatggttctgcaacatgctaatacaatttctgaagttrtacttacagaaatgagacgtatgtcaatttatgctttatttcagcttagtggttttggacaggaagccctgaatgtttttacagatgtaaatgtataagcaggtggaaaartaacatatgccaattatttcctaatttaatccaattaaagaaagttcaaaactgttttaaaaccaccattcctcgtaaataattacacaggagctagtg

SEQ ID NO: 77048 - DNA, 600 bp, Chicken  19866894365085_2
atgtgcttcttataacatgaaaattcttaatactgaaaagacacatgcagttataatgccacgtaagtctttcatttgctctgcgaagcaagccattccttcttctagtaagtaaatccacattttaacagagaaaattattcaaggcaaaacttgagatgtaatgaatatcactgagatccaaagaaaacttgaatgcatgatcctaaraagttccaagtcaagaagagccgtgacattcctaatgaatggaattagcctcaatggttctgcaacatgctaatacaatttctgaagttrtacttacagaaatgagacgtatgtcaatttatgctttatttcagcttagtggttttggacaggaagccctgaatgtttttacagatgtaaatgtataagcaggtggaaaartaacatatgccaattatttcctaatttaatccaattaaagaaagttcaaaactgttttaaaaccaccattcctcgtaaataattacacaggagctagtgaccattgtagactcaagatgatatttctgactaactaacattccatgtttatcttcagctcaaagggattttttcctaatagatccagag

SEQ ID NO: 77049 - DNA, 600 bp, Chicken  19866894365085_3
gtaaatccacattttaacagagaaaattattcaaggcaaaacttgagatgtaatgaatatcactgagatccaaagaaaacttgaatgcatgatcctaaraagttccaagtcaagaagagccgtgacattcctaatgaatggaattagcctcaatggttctgcaacatgctaatacaatttctgaagttrtacttacagaaatgagacgtatgtcaatttatgctttatttcagcttagtggttttggacaggaagccctgaatgtttttacagatgtaaatgtataagcaggtggaaaartaacatatgccaattatttcctaatttaatccaattaaagaaagttcaaaactgttttaaaaccaccattcctcgtaaataattacacaggagctagtgaccattgtagactcaagatgatatttctgactaactaacattccatgtttatcttcagctcaaagggattttttcctaatagatccagagcatccacaaattttcgatgtattaaacatgggacagacagtcgaaagatgtcagtgttttaatgaggttcttacgtaacttcttcctcccatttgttatcttacaatggca

SEQ ID NO: 77050 - DNA, 600 bp, Chicken  19866894365086_1
gatgaaatctcagtggcgtaacggaactgactctcacagacgtgagtaagaaagaaatgaacggaggtcaaagctatgcgtctctttttatgcagactggtaatgacagtgtttgaaagtctgccagctgaaaggcaaagtaagctggttttgatgaccttgtaccaccgcagcaaggaggatgaatagaacacgtctgacagacgagacacgccgagtcccaggcacaaaagccttcaagatgacttttatgagagaggatgtttaagcactgcagtctgcgctatcctaatcctgctygcttttctggaaaataggtttctacttttccaaaactgtttttaaatacttttttttaagagacctgctaaagggtatttagtatattaacacatatatggtaacttgttaatgttctgagtgtagtacaaaatggaatgagctgcgtatctcactaataccaacagaagtcattaaggagaggaataaagatctgctaaatattagatatatatttatgtatgctgtttagttgtactcggtaactttcctctgtataagggtctgatttacaaaacatctagctttgatggcacagaa

SEQ ID NO: 77051 - DNA, 600 bp, Chicken  19866894365088_1
aaacactctggctgaggcaagagcaacagttccctcctccaagtaagtggctgctggtcttaacagtctttcacctatcaggaccacgcagcttgatggttactaggagctgcactgtaagattagaaaagtgtagtcttctggggcttgatctgacagctcttactaaagtcagggagagctggaacctacttccatgcatggcataattaaactcaatgcagacatgcatgcagacagtgcctcgatgtatttgagtgccaagatcaaaatgcaggaacatgcttctaaaatcgtaamagttgcctttcggatcagcaaaataattcttccaacaccagaaatctgatgttctacaccacatgtcacagtgttcaaggtagagagagctgggcagctgcaacctccttttgttttgaaacggagaggtggatatttcccactgcagtagcactgaaaagggacaggagctgcccctctgaccctgactgttccacrrctataatctcygatgtaygataaattctcagagctgttttcttctccctgtcaccatctaaactcatctgaggggacgggggcacagacagacagaagcag

SEQ ID NO: 77052 - DNA, 600 bp, Chicken  19866894365088_2
gcatggcataattaaactcaatgcagacatgcatgcagacagtgcctcgatgtatttgagtgccaagatcaaaatgcaggaacatgcttctaaaatcgtaamagttgcctttcggatcagcaaaataattcttccaacaccagaaatctgatgttctacaccacatgtcacagtgttcaaggtagagagagctgggcagctgcaacctccttttgttttgaaacggagaggtggatatttcccactgcagtagcactgaaaagggacaggagctgcccctctgaccctgactgttccacrrctataatctcygatgtaygataaattctcagagctgttttcttctccctgtcaccatctaaactcatctgaggggacgggggcacagacagacagaagcagttctgaaatcctaatccttgacttaagaatacttgccaaataacagtactttcaacacttgtttcatttccagagctcacagttgcatggtgtgatgacagcagctgtgaatatttcacagcaagaagaaaaaagaaaccttctgtactataactaggaatctttgctcaacttcgtggtgaggacactaaaatgaaa

SEQ ID NO: 77053 - DNA, 600 bp, Chicken  19866894365088_3
catggcataattaaactcaatgcagacatgcatgcagacagtgcctcgatgtatttgagtgccaagatcaaaatgcaggaacatgcttctaaaatcgtaamagttgcctttcggatcagcaaaataattcttccaacaccagaaatctgatgttctacaccacatgtcacagtgttcaaggtagagagagctgggcagctgcaacctccttttgttttgaaacggagaggtggatatttcccactgcagtagcactgaaaagggacaggagctgcccctctgaccctgactgttccacrrctataatctcygatgtaygataaattctcagagctgttttcttctccctgtcaccatctaaactcatctgaggggacgggggcacagacagacagaagcagttctgaaatcctaatccttgacttaagaatacttgccaaataacagtactttcaacacttgtttcatttccagagctcacagttgcatggtgtgatgacagcagctgtgaatatttcacagcaagaagaaaaaagaaaccttctgtactataactaggaatctttgctcaacttcgtggtgaggacactaaaatgaaac

SEQ ID NO: 77054 - DNA, 600 bp, Chicken  19866894365088_4
taaactcaatgcagacatgcatgcagacagtgcctcgatgtatttgagtgccaagatcaaaatgcaggaacatgcttctaaaatcgtaamagttgcctttcggatcagcaaaataattcttccaacaccagaaatctgatgttctacaccacatgtcacagtgttcaaggtagagagagctgggcagctgcaacctccttttgttttgaaacggagaggtggatatttcccactgcagtagcactgaaaagggacaggagctgcccctctgaccctgactgttccacrrctataatctcygatgtaygataaattctcagagctgttttcttctccctgtcaccatctaaactcatctgaggggacgggggcacagacagacagaagcagttctgaaatcctaatccttgacttaagaatacttgccaaataacagtactttcaacacttgtttcatttccagagctcacagttgcatggtgtgatgacagcagctgtgaatatttcacagcaagaagaaaaaagaaaccttctgtactataactaggaatctttgctcaacttcgtggtgaggacactaaaatgaaactactggctgag

SEQ ID NO: 77055 - DNA, 600 bp, Chicken  19866894365088_5
aatgcagacatgcatgcagacagtgcctcgatgtatttgagtgccaagatcaaaatgcaggaacatgcttctaaaatcgtaamagttgcctttcggatcagcaaaataattcttccaacaccagaaatctgatgttctacaccacatgtcacagtgttcaaggtagagagagctgggcagctgcaacctccttttgttttgaaacggagaggtggatatttcccactgcagtagcactgaaaagggacaggagctgcccctctgaccctgactgttccacrrctataatctcygatgtaygataaattctcagagctgttttcttctccctgtcaccatctaaactcatctgaggggacgggggcacagacagacagaagcagttctgaaatcctaatccttgacttaagaatacttgccaaataacagtactttcaacacttgtttcatttccagagctcacagttgcatggtgtgatgacagcagctgtgaatatttcacagcaagaagaaaaaagaaaccttctgtactataactaggaatctttgctcaacttcgtggtgaggacactaaaatgaaactactggctgagcagagaa

SEQ ID NO: 77056 - DNA, 600 bp, Chicken  19866894365091_1
ggctgtttggttttgtttctctttccagggagatctttaacattgtttgatgaagctagtttcatttgagattgttattggagataaaggcttctgtgttctatggctgcttgggttcttcgtacataatgtcctagtaatgtcacagtgctgctgtatctagatcaaaccactgttttaattgttttttggctttgtttttttttttcttctttttttttaaataaataatttaaatacttgaaaactatatgtattgctttaatgaggcatataatcatcttccttaattccttgggrtcttgaagatgacctcagtgagagtggaatatgtttcaataataccatcctttttattttctatctcaccgtatcttcatgragagtaagggaactgaaaaccaaacttgagagtccatattactttgcagcagtttagattctgatctaaaagcaagattgtgttttccctgagacctccttcccctgccttacatccttacgccctctgccttcctctgcaatatgaactatcaccaacacagctctatggccttaaagacgggttcaaggaaaggatgacacaatcactagtaggga

SEQ ID NO: 77057 - DNA, 600 bp, Chicken  19866894365091_2
gataaaggcttctgtgttctatggctgcttgggttcttcgtacataatgtcctagtaatgtcacagtgctgctgtatctagatcaaaccactgttttaattgttttttggctttgtttttttttttcttctttttttttaaataaataatttaaatacttgaaaactatatgtattgctttaatgaggcatataatcatcttccttaattccttgggrtcttgaagatgacctcagtgagagtggaatatgtttcaataataccatcctttttattttctatctcaccgtatcttcatgragagtaagggaactgaaaaccaaacttgagagtccatattactttgcagcagtttagattctgatctaaaagcaagattgtgttttccctgagacctccttcccctgccttacatccttacgccctctgccttcctctgcaatatgaactatcaccaacacagctctatggccttaaagacgggttcaaggaaaggatgacacaatcactagtagggatggcggcttcggaagatacaaactattttttgaagccgagcactatctggtttatgagggcatatagaggatgttgtctaag

SEQ ID NO: 77058 - DNA, 599 bp, Chicken  19866894365092_1
  misc_feature (1)..(24): n is any nucleotide
nnnnnnnnnnnnnnnnnnnnnnnnactttttcaagatagtttccaaatgtgaatttattacttatatatcccatcatatagtttattattaaattccaagtagagattaaagcagatttctgtagcactgtctacatgtgaatgagtgagtgcatgtaggatgatttgtgtttcaagaaagccttagtggttttgcctcatttttcatttatggaagcacattcatgtgccatctttagtgtgtcagagtaacatacttctgatctgtactttcaaactattacttcagcagtgttgacrttgataagaaaatattggctccttagaagcgtaatgcccttggagtagttgtgcttctaatatggacatgatggaaagcagctgtggccttttgcctcatctggaaaggagtaagactgaggtaatccttagtctgcccatggatactgaccatgttgccccctagcatccttttcagcttctgttattttttgtaatagtggaagatgacgtcaatgtttgcttatattgatatgagttattcgacggacagctttccaatttcttatwttgatggagatcagaaaytgaaaagaata

SEQ ID NO: 77059 - DNA, 600 bp, Chicken  19866894365092_2
tttcaaactattacttcagcagtgttgacrttgataagaaaatattggctccttagaagcgtaatgcccttggagtagttgtgcttctaatatggacatgatggaaagcagctgtggccttttgcctcatctggaaaggagtaagactgaggtaatccttagtctgcccatggatactgaccatgttgccccctagcatccttttcagcttctgttattttttgtaatagtggaagatgacgtcaatgtttgcttatattgatatgagttattcgacggacagctttccaatttcttatwttgatggagatcagaaaytgaaaagaataaygagaaatctggtccatttctctgaagtctgaatagttgtgctttggcaccttagtctagtttgaagggccatcaagatgactgaaaggcagctatgttttgatggtgagaggatgtcttcactttgttctgctttgctcgttcttttctattgttcttcaataatgagcagaatttcccgtttttgttgtagcccggttgcctcccacctcttactggttttctcccttctgctccttcaagacacttcattgtaatccatactattag

SEQ ID NO: 77060 - DNA, 600 bp, Chicken  19866894365092_3
gcagtgttgacrttgataagaaaatattggctccttagaagcgtaatgcccttggagtagttgtgcttctaatatggacatgatggaaagcagctgtggccttttgcctcatctggaaaggagtaagactgaggtaatccttagtctgcccatggatactgaccatgttgccccctagcatccttttcagcttctgttattttttgtaatagtggaagatgacgtcaatgtttgcttatattgatatgagttattcgacggacagctttccaatttcttatwttgatggagatcagaaaytgaaaagaataaygagaaatctggtccatttctctgaagtctgaatagttgtgctttggcaccttagtctagtttgaagggccatcaagatgactgaaaggcagctatgttttgatggtgagaggatgtcttcactttgttctgctttgctcgttcttttctattgttcttcaataatgagcagaatttcccgtttttgttgtagcccggttgcctcccacctcttactggttttctcccttctgctccttcaagacacttcattgtaatccatactattagcagtaaaattccatacca

SEQ ID NO: 77061 - DNA, 590 bp, Chicken  19866894365092_4
tgataagaaaatattggctccttagaagcgtaatgcccttggagtagttgtgcttctaatatggacatgatggaaagcagctgtggccttttgcctcatctggaaaggagtaagactgaggtaatccttagtctgcccatggatactgaccatgttgccccctagcatccttttcagcttctgttattttttgtaatagtggaagatgacgtcaatgtttgcttatattgatatgagttattcgacggacagctttccaatttcttatwttgatggagatcagaaaytgaaaagaataaygagaaatctggtccatttctctgaagtctgaatagttgtgctttggcaccttagtctagtttgaagggccatcaagatgactgaaaggcagctatgttttgatggtgagaggatgtcttcactttgttctgctttgctcgttcttttctattgttcttcaataatgagcagaatttcccgtttttgttgtagcccggttgcctcccacctcttactggttttctcccttctgctccttcaagacacttcattgtaatccatactattagcagtaaaattccataccatca

SEQ ID NO: 77062 - DNA, 600 bp, Chicken  19866894365100_1
gatacattactgacaagtatcgtaagatgagctcccagactgatgctgtggcacatgggagtaatattatttttaaattaatgaacataaatatttgttttgtatttgtatatcataatattgaatccagttcttatgtctgaactaaaaggcttagggctcaggatgactgaagggcttgaaatgtttaattaatcaaaaagaaaatcaatagattaattgataagtatatgtgaggtttaatagaaaaacaatcctaacacacaaacaaaataagtcatgaatttctgtatctcttakggacttctmatcaatgtttttttcctgaaagaaaacaggtttaggtttagttcctattacctacacaagaggtcagaccaagataagtaatsatcttttctgtctttaatatctatgactctactaatcagctcaaaatttctcttttgyatctgacaaatagtattcctgctgacatatacgattgctgtcttagatactttatagatgctgtataggtacagacaacatctgaaatactttccacttttggaacaactagacagtgaattggccttagaatacaattttgaaatgaca

SEQ ID NO: 77063 - DNA, 600 bp, Chicken  19866894365100_2
ctgacaagtatcgtaagatgagctcccagactgatgctgtggcacatgggagtaatattatttttaaattaatgaacataaatatttgttttgtatttgtatatcataatattgaatccagttcttatgtctgaactaaaaggcttagggctcaggatgactgaagggcttgaaatgtttaattaatcaaaaagaaaatcaatagattaattgataagtatatgtgaggtttaatagaaaaacaatcctaacacacaaacaaaataagtcatgaatttctgtatctcttakggacttctmatcaatgtttttttcctgaaagaaaacaggtttaggtttagttcctattacctacacaagaggtcagaccaagataagtaatsatcttttctgtctttaatatctatgactctactaatcagctcaaaatttctcttttgyatctgacaaatagtattcctgctgacatatacgattgctgtcttagatactttatagatgctgtataggtacagacaacatctgaaatactttccacttttggaacaactagacagtgaattggccttagaatacaattttgaaatgacagtcatcatt

SEQ ID NO: 77064 - DNA, 600 bp, Chicken  19866894365100_3
atttgttttgtatttgtatatcataatattgaatccagttcttatgtctgaactaaaaggcttagggctcaggatgactgaagggcttgaaatgtttaattaatcaaaaagaaaatcaatagattaattgataagtatatgtgaggtttaatagaaaaacaatcctaacacacaaacaaaataagtcatgaatttctgtatctcttakggacttctmatcaatgtttttttcctgaaagaaaacaggtttaggtttagttcctattacctacacaagaggtcagaccaagataagtaatsatcttttctgtctttaatatctatgactctactaatcagctcaaaatttctcttttgyatctgacaaatagtattcctgctgacatatacgattgctgtcttagatactttatagatgctgtataggtacagacaacatctgaaatactttccacttttggaacaactagacagtgaattggccttagaatacaattttgaaatgacagtcatcatttcttatgcatttgtgtcttcacacagttacctcttaaacattttgatatctgtgaagacttaattggcagaggaaaaacagtt

SEQ ID NO: 77065 - DNA, 600 bp, Chicken  19866894365100_4
ggcttagggctcaggatgactgaagggcttgaaatgtttaattaatcaaaaagaaaatcaatagattaattgataagtatatgtgaggtttaatagaaaaacaatcctaacacacaaacaaaataagtcatgaatttctgtatctcttakggacttctmatcaatgtttttttcctgaaagaaaacaggtttaggtttagttcctattacctacacaagaggtcagaccaagataagtaatsatcttttctgtctttaatatctatgactctactaatcagctcaaaatttctcttttgyatctgacaaatagtattcctgctgacatatacgattgctgtcttagatactttatagatgctgtataggtacagacaacatctgaaatactttccacttttggaacaactagacagtgaattggccttagaatacaattttgaaatgacagtcatcatttcttatgcatttgtgtcttcacacagttacctcttaaacattttgatatctgtgaagacttaattggcagaggaaaaacagttttggttaaaaagacacaacagtggctgagtaatctctgcatttaatgtaactgaactc

SEQ ID NO: 77066 - DNA, 600 bp, Chicken  19866894365106_1
catcagagaagcaggagcttccccttacaagatcttaatttatccattttttgttataaaatccaataacttacatttacaacataaagtgaaggattttttacgtaagtttgatgcaaagaattgtgatcagacagagctccaccgtagtcagggttaacacactcacatgcaagtgcttgctgcttacaaagcaatagtagttgcagaagtccatactggaacctctacagacaaatgggatcaaactcttttcagctataggtctagatagcagacaaagttcaccgacagggccasagtggctgtgattcacagtgaggtaccagaaaggcagaattcagtccgtatatttttgtgtgcatcattaagaaaacaaaccctttggctatatatgtgagagaagcaggagtcaacaaaagaagcttgtagcatcactgaaacaaggaactcaaatcttcagaggatgcaaggcaaaagtaggtttacttcaaatggcatagctgtgctggtttattgcagttgaagatttggctgtcaatctgaatagccatctcatcagtgttcttggagaggataacaatggaggtaagatttaca

SEQ ID NO: 77067 - DNA, 600 bp, Chicken  19866894365110_1
taagatttaaatttctgatgttttttgtgaaattggattgtaactctgtctctaaaagcagtgttactaactgaagacaataagcataggaaaatctctgtgataaaagtgattcactatctatggtgtttaaatgaaaattgaaaaacaaacgaagtgcaacagcagagctcagtaaaattctcagtctctacacgaatgcatgagaaagaaagggaagatcaggattaggaggtaacgcagtaaaaggacaaaggacaaagtatgtctctttgtaagaatgtgactatccaaaagaarcttcatttgaaataagatcttgtatactgagttgacagaatagcatataaaatcaaaccttattctgaaagctgcttgaacctcagctccaagggttataggaggtgacttcatgcctttcatacagccaggctctgcatacaattggttgttaagagccacattacctcctaaaccctctcctaatttctggccatttccttgtacctgccatctttctttcctttttcttttttttcttytttcttttttcctagtgtactgaatacaagtttccagcctgcacagacctacaacaga

SEQ ID NO: 77068 - DNA, 600 bp, Chicken  19866894365110_2
gtaaaaggacaaaggacaaagtatgtctctttgtaagaatgtgactatccaaaagaarcttcatttgaaataagatcttgtatactgagttgacagaatagcatataaaatcaaaccttattctgaaagctgcttgaacctcagctccaagggttataggaggtgacttcatgcctttcatacagccaggctctgcatacaattggttgttaagagccacattacctcctaaaccctctcctaatttctggccatttccttgtacctgccatctttctttcctttttcttttttttcttytttcttttttcctagtgtactgaatacaagtttccagcctgcacagacctacaacagatctgcaggactgctttagaagtgaaattagattagctaccagcaagacaacccactaaaaatatttccagaagaaaacaaaattaggtagtcttaaagaaaaacagaggtggatgaagaccaaatacaatttgtgcagctatgcaatagccatcaaattaatgcctttaattaacagaacagagaataatggtctcttctgaagagcctctgtcagatactgcaacagaactaatgcttaca

SEQ ID NO: 77069 - DNA, 600 bp, Chicken  19866894365110_3
caaatacaatttgtgcagctatgcaatagccatcaaattaatgcctttaattaacagaacagagaataatggtctcttctgaagagcctctgtcagatactgcaacagaactaatgcttacattgaagcttaatgtctttgaaaatttgaataaacattcagaatcacccagcatcctcaatttaagggctgccctgtaaataacacttcctattttattatgtttgcccacagcatcagaggtggatgttggtggtacagcagcagaggctgaaccttcccaccaatactccattccaygttgctgccrtgtgacagatggyagcagaggggcagcctgacaaaatggcgtctgacgtggaagtacgtatgaagcaaaggtgtgtggttgaattcccccatgcagaaacaatggcacctactgacattcactggtgcttgctgaacgttcatggaggctaaaaggtgaacatgagcacaatgagaaagtgggtggtgcatttcagcagtggcaacagcggatcacctccactggcacagatttttactagcacagcatgcaggctcttgttcatcgctggcaaaaatgcataactgact

SEQ ID NO: 77070 - DNA, 600 bp, Chicken  19866894365110_4
ttgtgcagctatgcaatagccatcaaattaatgcctttaattaacagaacagagaataatggtctcttctgaagagcctctgtcagatactgcaacagaactaatgcttacattgaagcttaatgtctttgaaaatttgaataaacattcagaatcacccagcatcctcaatttaagggctgccctgtaaataacacttcctattttattatgtttgcccacagcatcagaggtggatgttggtggtacagcagcagaggctgaaccttcccaccaatactccattccaygttgctgccrtgtgacagatggyagcagaggggcagcctgacaaaatggcgtctgacgtggaagtacgtatgaagcaaaggtgtgtggttgaattcccccatgcagaaacaatggcacctactgacattcactggtgcttgctgaacgttcatggaggctaaaaggtgaacatgagcacaatgagaaagtgggtggtgcatttcagcagtggcaacagcggatcacctccactggcacagatttttactagcacagcatgcaggctcttgttcatcgctggcaaaaatgcataactgactgcattgaaat

SEQ ID NO: 77071 - DNA, 600 bp, Chicken  19866894365110_5
caatagccatcaaattaatgcctttaattaacagaacagagaataatggtctcttctgaagagcctctgtcagatactgcaacagaactaatgcttacattgaagcttaatgtctttgaaaatttgaataaacattcagaatcacccagcatcctcaatttaagggctgccctgtaaataacacttcctattttattatgtttgcccacagcatcagaggtggatgttggtggtacagcagcagaggctgaaccttcccaccaatactccattccaygttgctgccrtgtgacagatggyagcagaggggcagcctgacaaaatggcgtctgacgtggaagtacgtatgaagcaaaggtgtgtggttgaattcccccatgcagaaacaatggcacctactgacattcactggtgcttgctgaacgttcatggaggctaaaaggtgaacatgagcacaatgagaaagtgggtggtgcatttcagcagtggcaacagcggatcacctccactggcacagatttttactagcacagcatgcaggctcttgttcatcgctggcaaaaatgcataactgactgcattgaaatatagtgttttgta

SEQ ID NO: 77072 - DNA, 589 bp, Chicken  19866894365111_1
taatctaacttcataaattaaaaaacaaaacaaaaacacaacacaataaatacactaatgcttttgtacacttttaagatgcagactccactgaacctcagtatcagcatcaatatgtgtgttatatatatatgtagatatatatatatgtatgctctcctaatattacagatgataggtttgcattaagcatagctttatttctatttcctccattgcatttgactaattttgtcagcagaacaatcaaatatccttgcaaagttatgtatcttcacactaaattcttgactgaactayggtttataaagcatttttataatctgtcaagtataatcatttctgatatcctgaaaaaggaaacctgttaagcaaaggattttatattaccttagagttttcaaaataagaaagtaaatctgtagattttgcagatatttaaatatgagtgcagattctttcaagatcctcgctgtaaattactcattacccaggaaaattggaaaaaaacatttaagcgccagaaagattcgattctgagatgcagtgggtgtgtccatacagctgtgctaaactactccagataaaa

SEQ ID NO: 77073 - DNA, 600 bp, Chicken  19866894365116_1
gctgtttcagtaattaagtcttatgacattccagaaagcataaatcctgctgagatgtttaagtttggagcaaccttcttgatgtacaaacaaattaaataaataaaagacacttacccaggatcttaacaagctgttttgctcgtacctttgaaacgcaattgaacggtaaagcgatatggtctattcaaactgttctagcctcgttgttcactagaaccttcttttgaaattcattgccttcaattacatttttttaaagaattttaattatgtgcctgaaaagaataaagatgctcsaggctccatttgtttatcgtggaaggcctaaaaaaaatgaggacagagcttcccagctcatgcaggggttgcagagagagagagatgacttttaattcgacaagttcagagagatttcttagtttgacgcgcacagcagggggtctttgagcgcctggcaatacttcagcattctgagctttgaaagtctttccctgcagcagaaattgtatcaaaagccaatgataatattccctgcaaggtaaaggaccctattgaagatttctagagctgtttatttattcatcacagttttttctt

SEQ ID NO: 77074 - DNA, 600 bp, Chicken  19866894365119_1
tttcatagagaatgctgtagctgttgatctctgacaggttcagatggtagaccatttttgtcctaatataccacaaacattttattgccccctaaacccaaaattagtgctatccattaaattctttttgaatggggaagcaaaagtaagctttccatagctcactataaaaatgtacataacggtaaatgtgaaatccaattgagatagttgatttgtacagtgtttgagtctcttttttttcagctccacaaatttagaaagcagcgtagttgtgcttcctagtgtgtgatgcttgcrctgcttgacttttcattttattttattaatgaaatggctgtcaaggtggatggatacaggggttaggaatggaaccgaacgatgagtttcaaggttggtaattacaaaattcataaggcttggaatttagagaggaatgtttttgaaatacagcaagtaaaatagaaactgcgttgtcatcagaccattttaacaaactcatgagtaacatgaaaaataatctggtggtcttagtcttttttttttttttttttttcccctggagcagaaatacaattcttgattgctgagcgttgctga

SEQ ID NO: 77075 - DNA, 551 bp, Chicken  19866894365120_1
tgagtttgcttatggaaaagcattgctaactttctgattttattcctgtttcatggtgttcgcttctttcctgctagaaagccggtctactggcagcaagggatttcatgtgaaattcagctttcaggtttgaggtctgccttcccagcatttctataaaatgatgcttaggagctctaagtgctcagaaattggaaagaaataaaacgttgaagcctcttatttcttaaaggaagctcctatttttaagccaaattcaaaattttatggcatgtgagtcatatttttgagtactcgccrtcggcagtcctgtgatgagtagaacatatggacagtgctcctgtaagcttgcccagcatagcgtctcggcagcgaatccccctggtgtttgttgttcaggtcggctgaaggactgactcctcgccgtaacagtgagactgccagctgggctgatggctttgtggtgtggacacttgtacaggacgtgtagaggtgagatctcatgcaggctgttcaaaagccatccgctcacggcagtttgttcaaaccga

SEQ ID NO: 77076 - DNA, 600 bp, Chicken  19866894365125_1
ggtattttcttcctactgtattccgagactgattcaacagagatatagcgactgcagccagtaaaatcttctggtatctgatcagtaccagcctgtaagaagaatggaaatggcactgtgaagatacctagaattactgtgtctcttgctatacaaccattccagaaattggagatgtctccttgtaccttcaccttttgagtttaattctctgctgataagctaaaatctaccttgtctggaaaatgcagtaatgaaatactgacttagatgaaaactttctgtcaaaattccttctgwcatcagtgggttaggatttattctaagaatttagtgcaagcagcttttatcactttctgcttttctagtttatgttaggagcataagaacttctaccgatgtaaaaaaaaaataacccgttttaatgcatcagaaatgaatttgttctaacttctacttccttggcttttaattcttcaatatttaagcaacaaagcatccttatgaagagccagcttcaccggtcatcttgccctgatagtttatcactatccctgccctgttaagaatgtgtccctgatgttaaggagcaatttcctg

SEQ ID NO: 77077 - DNA, 600 bp, Chicken  19866894365127_1
tagtgaactgttttacctccttagcactgaacttgagagcataagaaatagatctgttttaagaaattgcctgaaccctcttttggaatgacaatgtgtctaatttctgactggatttcacgttacgtaactcaagtttctcattatgaaatgagacagggaaacatttgggtagcttcgatagttctaatgtatctgcaccgtgtggatctgagctgctgtaaccactggtcctgctgttgttctgtttcaaaacgatgtcactgagcgctgcgtggtcatgcactgtgtggccataamgaagtggcatgagatcctggagcagactgcttttgtcatgtatgactaagatgaacttccagctgttgtttcygaaggttcgacttgcttytctttaactcttaacaatcctgtgcaggaatgctgtgtaaatgcttcctgacaagaaaaaaagtcattaatgaaggagctgtaatgggagcatgttgtttttcttcatgtgtacatctaacttctattagtgctgacttctattagttgcatgtgtgcatcaaggaaaacagtaattacaaatctagcgttttctaatcttcacataaa

SEQ ID NO: 77078 - DNA, 600 bp, Chicken  19866894365127_2
aaccctcttttggaatgacaatgtgtctaatttctgactggatttcacgttacgtaactcaagtttctcattatgaaatgagacagggaaacatttgggtagcttcgatagttctaatgtatctgcaccgtgtggatctgagctgctgtaaccactggtcctgctgttgttctgtttcaaaacgatgtcactgagcgctgcgtggtcatgcactgtgtggccataamgaagtggcatgagatcctggagcagactgcttttgtcatgtatgactaagatgaacttccagctgttgtttcygaaggttcgacttgcttytctttaactcttaacaatcctgtgcaggaatgctgtgtaaatgcttcctgacaagaaaaaaagtcattaatgaaggagctgtaatgggagcatgttgtttttcttcatgtgtacatctaacttctattagtgctgacttctattagttgcatgtgtgcatcaaggaaaacagtaattacaaatctagcgttttctaatcttcacataaattaggaatcattttgaggttaccatgctcatttaacatcccatctgtgttcacacaatggttgcagaactgac

SEQ ID NO: 77079 - DNA, 600 bp, Chicken  19866894365127_3
caatgtgtctaatttctgactggatttcacgttacgtaactcaagtttctcattatgaaatgagacagggaaacatttgggtagcttcgatagttctaatgtatctgcaccgtgtggatctgagctgctgtaaccactggtcctgctgttgttctgtttcaaaacgatgtcactgagcgctgcgtggtcatgcactgtgtggccataamgaagtggcatgagatcctggagcagactgcttttgtcatgtatgactaagatgaacttccagctgttgtttcygaaggttcgacttgcttytctttaactcttaacaatcctgtgcaggaatgctgtgtaaatgcttcctgacaagaaaaaaagtcattaatgaaggagctgtaatgggagcatgttgtttttcttcatgtgtacatctaacttctattagtgctgacttctattagttgcatgtgtgcatcaaggaaaacagtaattacaaatctagcgttttctaatcttcacataaattaggaatcattttgaggttaccatgctcatttaacatcccatctgtgttcacacaatggttgcagaactgacagtttagtattctattga

SEQ ID NO: 77080 - DNA, 600 bp, Chicken  19866894365127_4
ggttaccatgctcatttaacatcccatctgtgttcacacaatggttgcagaactgacagtttagtattctattgattacctaatgtttcacagtggggaaaaaaaatgtaatgcgacgtttattttgggtagtcaggcatctaagcacccttccctgccttcagccctgacttctgctgggagcgttggcttcagccaatgtgcaggacaggaggtccgatggcagctggatgtgtttatagcagcacactgatgtttgttgtatctcttggaagaagccagggcatttttccgaaatartgatgaaaagtggtgtgaagcgatttggcagtgctctgacatacagttgtcttatcatttcagtgacagtttcattaatgagagaggtcaatcgtgaagtctgagcatcctgtagaactgaaattcgagaacgtggctgctacgttacagcactgttaaataactattatttattttaggaagtcctcmggtggttagtgcctaaaaaaaaaaaaaaaaacgtatcaaatccctattatgacttttgatcaatttctgcagatgctgaaagggaaccctggaaaaagayataagcagcac

SEQ ID NO: 77081 - DNA, 600 bp, Chicken  19866894365127_5
cttcagccaatgtgcaggacaggaggtccgatggcagctggatgtgtttatagcagcacactgatgtttgttgtatctcttggaagaagccagggcatttttccgaaatartgatgaaaagtggtgtgaagcgatttggcagtgctctgacatacagttgtcttatcatttcagtgacagtttcattaatgagagaggtcaatcgtgaagtctgagcatcctgtagaactgaaattcgagaacgtggctgctacgttacagcactgttaaataactattatttattttaggaagtcctcmggtggttagtgcctaaaaaaaaaaaaaaaaacgtatcaaatccctattatgacttttgatcaatttctgcagatgctgaaagggaaccctggaaaaagayataagcagcacggaagcccaacagcaaccctatgatcctaaaacggaaggtctgtggcctaaggtcaatccagcatccagttccctctcgtctcccaccagggctgtgccagagcccgccagtggcactcgaagtgagaaccaatcttctgtaggcaggcctgcctgaccctgtaggtccctggtcaaataccctggggg

SEQ ID NO: 77082 - DNA, 600 bp, Chicken  19866894365127_6
ttccgaaatartgatgaaaagtggtgtgaagcgatttggcagtgctctgacatacagttgtcttatcatttcagtgacagtttcattaatgagagaggtcaatcgtgaagtctgagcatcctgtagaactgaaattcgagaacgtggctgctacgttacagcactgttaaataactattatttattttaggaagtcctcmggtggttagtgcctaaaaaaaaaaaaaaaaacgtatcaaatccctattatgacttttgatcaatttctgcagatgctgaaagggaaccctggaaaaagayataagcagcacggaagcccaacagcaaccctatgatcctaaaacggaaggtctgtggcctaaggtcaatccagcatccagttccctctcgtctcccaccagggctgtgccagagcccgccagtggcactcgaagtgagaaccaatcttctgtaggcaggcctgcctgaccctgtaggtccctggtcaaataccctgggggtactgctatatatacagggaaaagtattgctgcatattgctctgtgggtgcataaggaaggagcctaaaacaccatcagacacaaagtgcttttctagat

SEQ ID NO: 77083 - DNA, 599 bp, Chicken  19866894365136_1
  misc_feature (1)..(93): n is any nucleotide
nnnnnnnnnnnnnnnnnnnnnnnnnnnnnnnnnnnnnnnnnnnnnnnnnnnnnnnnnnnnnnnnnnnnnnnnnnnnnnnnnnnnnnnnnnnnnaaccctccttggcctctcctaaggccctaaatacagatttctactaatgacatgccagttatcttcccttcattttatttgtgcaagtcttctagatgtctaggaacaagtcaggggaaaacaatacctagaatttcttatattcaaagaaaaggacaaagtttatctcatatttatcatcagcactggcacagatactgaaaaggrcttttgaaacacaacagtctaccaaagtttactgaaaatcttgtcctcagctaaacaatgggtcctggtgattatttagcaaactgctctctcacaggccatgggctgcagctgtgccagcagtggaatggtgctttttctgatctagggggcagcaggtagttcaacgtacacaaggtaattcacttctcattaaaatggcacagaatcagttgagcycytcattggaaactgtccttggcttgtgtaatgccctgaagaaacgtcaggaaatatgtggatgtatactacctggcagt

SEQ ID NO: 77084 - DNA, 600 bp, Chicken  19866894365136_2
cctagaatttcttatattcaaagaaaaggacaaagtttatctcatatttatcatcagcactggcacagatactgaaaaggrcttttgaaacacaacagtctaccaaagtttactgaaaatcttgtcctcagctaaacaatgggtcctggtgattatttagcaaactgctctctcacaggccatgggctgcagctgtgccagcagtggaatggtgctttttctgatctagggggcagcaggtagttcaacgtacacaaggtaattcacttctcattaaaatggcacagaatcagttgagcycytcattggaaactgtccttggcttgtgtaatgccctgaagaaacgtcaggaaatatgtggatgtatactacctggcagtggccctattcagaaatcatgccyggaccagacatgttaaaagagcgggtgctgacacagcaagcactcagagcttctcagtggctttttcagtttgccagtacacaggtaccacactgaccaggttgtgccaactcctcactcctcagataactgtgctcaggaagaagaggaggtatctgtagaagtgaatatattccacactacctctgcaacacata

SEQ ID NO: 77085 - DNA, 600 bp, Chicken  19866894365136_3
tagaatttcttatattcaaagaaaaggacaaagtttatctcatatttatcatcagcactggcacagatactgaaaaggrcttttgaaacacaacagtctaccaaagtttactgaaaatcttgtcctcagctaaacaatgggtcctggtgattatttagcaaactgctctctcacaggccatgggctgcagctgtgccagcagtggaatggtgctttttctgatctagggggcagcaggtagttcaacgtacacaaggtaattcacttctcattaaaatggcacagaatcagttgagcycytcattggaaactgtccttggcttgtgtaatgccctgaagaaacgtcaggaaatatgtggatgtatactacctggcagtggccctattcagaaatcatgccyggaccagacatgttaaaagagcgggtgctgacacagcaagcactcagagcttctcagtggctttttcagtttgccagtacacaggtaccacactgaccaggttgtgccaactcctcactcctcagataactgtgctcaggaagaagaggaggtatctgtagaagtgaatatattccacactacctctgcaacacataca

SEQ ID NO: 77086 - DNA, 600 bp, Chicken  19866894365136_4
caaagtttactgaaaatcttgtcctcagctaaacaatgggtcctggtgattatttagcaaactgctctctcacaggccatgggctgcagctgtgccagcagtggaatggtgctttttctgatctagggggcagcaggtagttcaacgtacacaaggtaattcacttctcattaaaatggcacagaatcagttgagcycytcattggaaactgtccttggcttgtgtaatgccctgaagaaacgtcaggaaatatgtggatgtatactacctggcagtggccctattcagaaatcatgccyggaccagacatgttaaaagagcgggtgctgacacagcaagcactcagagcttctcagtggctttttcagtttgccagtacacaggtaccacactgaccaggttgtgccaactcctcactcctcagataactgtgctcaggaagaagaggaggtatctgtagaagtgaatatattccacactacctctgcaacacatacataacagaaagactcttattttttctctttctttaacactgccttcctactccagctgcattacatagtctactgtacaccaaagttacaaaggtatcagct

SEQ ID NO: 77087 - DNA, 600 bp, Chicken  19866894365138_1
ttattttttttttttcttttgcaaatagatatttactagtaaaaactcagaatgctaaagttctggaagtctgtgtgtaacatgttaatgaaagtgtagatgcctgattcttcagagatgagagccatcaaagatattgacttgctggacaactgccagccatccaaattctggtcttaaacccacctagtagaagacagacttcattctgctaataggaggtaatggagtcctgtatgtttgtacaagcccccaaataagctcgtaagagacaatataatgcaatattttatttcctcrcaggctttttgatgacttaattgctcaaaaagaagactgagcatggcctgcaaaagcaatagtaatcattcctggaggaacttgaaattaaaatccgtacactcagctgaatgtatttttctcttcataaagcacacagacacatttcctatcagatatttgctgttaaaggttaaggttctttgaaagaaattcattttcaagaatagagaaaatgagagaggaatatcaacaaagaccaagtagtgcaaaattttaaattgactctgcagacatactctcaaagaaaagaaacagcag

SEQ ID NO: 77088 - DNA, 600 bp, Chicken  19866894365139_1
ttaactggaggaaccacctggagttactttatgttattttatgttattttatgctattttatgcctacgttctccctggtgcagccccacagctgctgctcagcacagcttcaccccattcacaggtcagggacagcaaaaggtgctggggctgccccagtgcagtgaccctgcatgtagtgctggctggccagcagggaccaattagatctctggatccaattagctgcagctgtgatttgtgtgcagccctctgtacatatggctgggctgaactttccctcagtttcaaatgtcccygtgtaacgcaggcaaaatgggaggaaggaccatttgtctcttttttttgagagtctttatgatgatggacgatgaaccttttacatcattcaccaacttgcaaacaaattaactaccttcatcaccttcccctgatagccgagctggcaagcaccggcccagtgtgctgtaatgggtgcagggaagaagggatgtgggtatttcattggatattatcaaccaagttgtctggaattaaaatataagtgaagtaagatgctgaggcttaagtgtccatgcattaaccaagatggtttcagg

SEQ ID NO: 77089 - DNA, 600 bp, Chicken  19866894365141_1
acaaagaaagctgatcaagctccatcaggagacgggaggactggcacaaatagcagctgagctctagctcagactggatttatgttggcagaactgtgaaataaagcctgcaacatattgtgcctttatcaatcctgcttcctcaataaaagacatccaaggatactaatgtttatgttttacctctcatagactattttacttgggaaggtttgtatacagttaaattcaaaaaggtccaatatgcatcagtttagacatagtgctccttagaatcatgccatcaaacacacaccagtrcagtctcacttatgagtatctcagaatgcttcataaacaccaactgaacagatgtcatgaatgtgaaaaacaatgctgcctgaggattctgtgctgactttgttacaataatacattttattatgaagtagaaaaggctagcaaaggggggaggaaacagctaatttcaaactaaacacttaagtgcatttggtatgtagttaaatttagtgatgtatcttccacagtcaattaagtcctcccttacaaaaaaaaaaaatctatatatatatcaaaaaagctctaaataaataaatgaat

SEQ ID NO: 77090 - DNA, 599 bp, Chicken  19866894365158_1
  misc_feature (1)..(232): n is any nucleotide
nnnnnnnnnnnnnnnnnnnnnnnnnnnnnnnnnnnnnnnnnnnnnnnnnnnnnnnnnnnnnnnnnnnnnnnnnnnnnnnnnnnnnnnnnnnnnnnnnnnnnnnnnnnnnnnnnnnnnnnnnnnnnnnnnnnnnnnnnnnnnnnnnnnnnnnnnnnnnnnnnnnnnnnnnnnnnnnnnnnnnnnnnnnnnnnnnnnnnnnnnnnnnnnnnnnnnnnnnnnnnnnnnnnnnnnnttttgccttttaatctgcaagttccaggggtgatggcaccctccccaacccactgcttgggggagggrgggaggggaaactggggcaggaaaagccacggccagagttcaggtgagagcaggggatggggtcagcatcacagagggaggaaggcagctttctcattccctaaatctaataagcagagctaaaattaaacgatatccaggcgatacagtcatgagcgttaaaaatatgccacccgaaagggatcatgaggtctctgcagattaaataataatagccttgtgttagtaattagaggcattggccagttccaaaccccacagcgggaactgcgatacaaacatagctgaaagtaatgctt

SEQ ID NO: 77091 - DNA, 600 bp, Chicken  19866894365161_1
ctgtgggaagaatgctatgtagacatgctatgggaagcagtcattcagcgtttctgaaaaagaagccctagacgaacttggtttatgtatcaagatactcctcagatagtgatttttaatataaatcagttggtaaagaaattttaaatacagtcacagaaaaaggagtggaaatgtagaaagcttctgtctgtcagatggaggagttggtcttaccacagggagcactgatacctgcacgtaatgtattaagttacagccaaaggctaaaaaaatacaatagagcatcgatatagatcyggtgattggctggaaaatgcagctttgtgaggctgtaagatttgtaatgctgcttgcagttctgactgaygtacctccttttctagagttaacatggaagaaagagccaaggttctgcccaattctgcagtcagcctgttgttaaaacctaaatatcagtagtttatgagtttatgacatcttttaggaatcttggtgtgttttcagaggcacgaatgtttatattttattttttatagaagtctgtaggccctcaccccgtgtcttacctgcctcgtacctgtgggcttcaaagcaaaa

SEQ ID NO: 77092 - DNA, 600 bp, Chicken  19866894365161_2
gacgaacttggtttatgtatcaagatactcctcagatagtgatttttaatataaatcagttggtaaagaaattttaaatacagtcacagaaaaaggagtggaaatgtagaaagcttctgtctgtcagatggaggagttggtcttaccacagggagcactgatacctgcacgtaatgtattaagttacagccaaaggctaaaaaaatacaatagagcatcgatatagatcyggtgattggctggaaaatgcagctttgtgaggctgtaagatttgtaatgctgcttgcagttctgactgaygtacctccttttctagagttaacatggaagaaagagccaaggttctgcccaattctgcagtcagcctgttgttaaaacctaaatatcagtagtttatgagtttatgacatcttttaggaatcttggtgtgttttcagaggcacgaatgtttatattttattttttatagaagtctgtaggccctcaccccgtgtcttacctgcctcgtacctgtgggcttcaaagcaaaaagtgatgtttatgaaggtggagagctaacttcagacatcctgtgggtgtgtcacgcaggctaaactctgc

SEQ ID NO: 77093 - DNA, 600 bp, Chicken  19866894365162_1
tgagtgcctctcttcgaaatattaaactctatttcaagcctccatctcgtcatgttttactcggcacgtacacttttcatcatattaattccttctctgtcaaagtctttagaacgacaacaaacaacatcaatcacagaaacagaggtcctccaagttctcttgggcaaaacaaagttcacaatcttcacacagaaagaaataccaacctgacctgtcagcactaccaaacctcaccgctcacgcaaggcctccacctgcagccaaaccattcccgcatttactgcctagacatcctcraaacaaaacgcctgtgcttgacatcttttcctcaastttcctgccagctatggctgtaacttcactcctttgctttcagagaataggacaggatgtggtaatgcagcagagaaggcagcagctgctgcaggtgcatgcaggcagcagagctcagctcccactagcctcacaaagagcaaatacctcatctgacaaacaggagctcctcagagttacccagcacatattcatgtagcatctgggcatggccaaagctgacatcttcagtgccaagaagccacctccgtgagtaaggagggt

SEQ ID NO: 77094 - DNA, 600 bp, Chicken  19866894365162_2
agcctccatctcgtcatgttttactcggcacgtacacttttcatcatattaattccttctctgtcaaagtctttagaacgacaacaaacaacatcaatcacagaaacagaggtcctccaagttctcttgggcaaaacaaagttcacaatcttcacacagaaagaaataccaacctgacctgtcagcactaccaaacctcaccgctcacgcaaggcctccacctgcagccaaaccattcccgcatttactgcctagacatcctcraaacaaaacgcctgtgcttgacatcttttcctcaastttcctgccagctatggctgtaacttcactcctttgctttcagagaataggacaggatgtggtaatgcagcagagaaggcagcagctgctgcaggtgcatgcaggcagcagagctcagctcccactagcctcacaaagagcaaatacctcatctgacaaacaggagctcctcagagttacccagcacatattcatgtagcatctgggcatggccaaagctgacatcttcagtgccaagaagccacctccgtgagtaaggagggtaccagtgcttctacagcccatctaactcccatccca

SEQ ID NO: 77095 - DNA, 600 bp, Chicken  19866894365163_1
tccagacaatgtcaaaatcatcagataaggtgagtgagactgacaatatgcattaacacatcactgcaaactttacattaaacattgcagccttattaacaacagctggccaccttgctgtactcattgcaacagtttttacagacaagaattaacaaagcaaagccattattttgcataatttccagtgaatggtggcattattttctactctcataagggggtaatgctgctatatctcatttcatatgtcagacacaggcattattaataaaaacactgcatctggggagattctcrtaggtgcttgattgcataagatttatgtatgtgattctccctgtctgtgatatcacactggcccataaagtctctcttcaaacaacatactccatcatagaaatttgactgtcattttaatgaagtggttagaaagattgtctatgccaaaacactgcacatttaatttcaaataaaaaagaaaagacttcatataaagattwcatgttaataagaagcatttgtgagaaatgattatgaaaactctagctggatttttaactggggtcaatggaaagaaataagatgatgtataaaata

SEQ ID NO: 77096 - DNA, 600 bp, Chicken  19866894365163_2
ttttctactctcataagggggtaatgctgctatatctcatttcatatgtcagacacaggcattattaataaaaacactgcatctggggagattctcrtaggtgcttgattgcataagatttatgtatgtgattctccctgtctgtgatatcacactggcccataaagtctctcttcaaacaacatactccatcatagaaatttgactgtcattttaatgaagtggttagaaagattgtctatgccaaaacactgcacatttaatttcaaataaaaaagaaaagacttcatataaagattwcatgttaataagaagcatttgtgagaaatgattatgaaaactctagctggatttttaactggggtcaatggaaagaaataagatgatgtataaaataataaagtatcagctggattttataaccatctcacagaaacaaagacaagttcataaccatgtctttttttttttttaagcaatgaattatatgaatcttctctaacttttgtattctcyttgttcttcaagtctcttcagtyatatcactttgcatctgagtgaagaactgaagagatccttatctccaaaataataattaca

SEQ ID NO: 77097 - DNA, 600 bp, Chicken  19866894365163_3
atgaagtggttagaaagattgtctatgccaaaacactgcacatttaatttcaaataaaaaagaaaagacttcatataaagattwcatgttaataagaagcatttgtgagaaatgattatgaaaactctagctggatttttaactggggtcaatggaaagaaataagatgatgtataaaataataaagtatcagctggattttataaccatctcacagaaacaaagacaagttcataaccatgtctttttttttttttaagcaatgaattatatgaatcttctctaacttttgtattctcyttgttcttcaagtctcttcagtyatatcactttgcatctgagtgaagaactgaagagatccttatctccaaaataataattacaaagaaaaaccaaggccaacattattttgtagtttccattaagtcaaggtccttgctggcttgtatgcagctgtcctgatccccagatactccaatgacacaagtacagaaggttctttgagagagaatggaatcacagaattgtaggggttggaggagacctctagtccagccaccgtagtaaagcaggttccctagaataggtgcccaggaaagc

SEQ ID NO: 77098 - DNA, 580 bp, Chicken  19866894365163_4
tatgccaaaacactgcacatttaatttcaaataaaaaagaaaagacttcatataaagattwcatgttaataagaagcatttgtgagaaatgattatgaaaactctagctggatttttaactggggtcaatggaaagaaataagatgatgtataaaataataaagtatcagctggattttataaccatctcacagaaacaaagacaagttcataaccatgtctttttttttttttaagcaatgaattatatgaatcttctctaacttttgtattctcyttgttcttcaagtctcttcagtyatatcactttgcatctgagtgaagaactgaagagatccttatctccaaaataataattacaaagaaaaaccaaggccaacattattttgtagtttccattaagtcaaggtccttgctggcttgtatgcagctgtcctgatccccagatactccaatgacacaagtacagaaggttctttgagagagaatggaatcacagaattgtaggggttggaggagacctctagtccagccaccgtagtaaagcaggttccctagaataggtgcccaggaaagcatt

SEQ ID NO: 77099 - DNA, 600 bp, Chicken  19866894365169_1
gtcctgataagacttaagagggagccaaggtgaaagcaactgcagtcaggtgagtggtattcttccctatccatcaaagcttttttttgtttgagaactgggggacgattcctcattgttctaagacagaagttaagccacaatcgttttcccaacgaagtaacccacccgtaatcatctctcatgttatttactacacgagggagattcgctttgcgcggggaagcttcactcacactgaagaaataaaaacgcgtaggtaaaacgggacactccctaagcaaccttctcaattgtttyaacgtcagagggagagctkctgttcctccgcatacgctatgctatcgtcagcttgtctcgagactatttgctatttcaacgtgaataacgcggggtgcgcacctacgcgtgggacgggcgggaactgcgctgtgctcccgtgtaccaaacgcatctctcgcacgtccttggttccacggctcaccaccggggactgagggggcggcccctggccactgcggacggcagcaagaactcatccgcgcgtgttcttccatgagtcacgaaagcaaaggagaccggggctagaaaagtcagctt

SEQ ID NO: 77100 - DNA, 600 bp, Chicken  19866894365169_2
gggagccaaggtgaaagcaactgcagtcaggtgagtggtattcttccctatccatcaaagcttttttttgtttgagaactgggggacgattcctcattgttctaagacagaagttaagccacaatcgttttcccaacgaagtaacccacccgtaatcatctctcatgttatttactacacgagggagattcgctttgcgcggggaagcttcactcacactgaagaaataaaaacgcgtaggtaaaacgggacactccctaagcaaccttctcaattgtttyaacgtcagagggagagctkctgttcctccgcatacgctatgctatcgtcagcttgtctcgagactatttgctatttcaacgtgaataacgcggggtgcgcacctacgcgtgggacgggcgggaactgcgctgtgctcccgtgtaccaaacgcatctctcgcacgtccttggttccacggctcaccaccggggactgagggggcggcccctggccactgcggacggcagcaagaactcatccgcgcgtgttcttccatgagtcacgaaagcaaaggagaccggggctagaaaagtcagcttttcgcagggaagaacttcg

SEQ ID NO: 77101 - DNA, 600 bp, Chicken  19866894365169_3
ccgctgcgaagtttgcttccgttggacggcggcagcccgcagtgccaagctgcgcccgtatctgcgcacccgctccttggcaccgatccctgaggagttaacccgcccccgttcccaaatcttgcggagatgttccccctttgggcaacatggcaatgctgatgtgtttgtgtgcattaaatatacatgcatatatttaacagcgatggtcgtaaccattgtaatgatttacctatagcaatgcgtaatgcaaagccaaaatagcattgcattcccgcagctgtgagcaatcaaacacakaaataaataaataaataaataaataataatttttaaaaaagactacaggatcctgcagagtgatatatctccaatttcctctcaattctaaccagacgtagattatttttatagccttaattcagctgaacacagtcttccatgcagaacccttcccacggatccctccttaagccaaagaaccttatcaggctgcagtatttcccctttctcagttaattacgtccaaataatgaagagactgtaaaaatctttaaggccataattacctgttaattttctccagtgatatgcctcagg

SEQ ID NO: 77102 - DNA, 599 bp, Chicken  19866894365170_1
  misc_feature (1)..(146): n is any nucleotide
nnnnnnnnnnnnnnnnnnnnnnnnnnnnnnnnnnnnnnnnnnnnnnnnnnnnnnnnnnnnnnnnnnnnnnnnnnnnnnnnnnnnnnnnnnnnnnnnnnnnnnnnnnnnnnnnnnnnnnnnnnnnnnnnnnnnnnnnnnnnnnnnnntgtggcagtattctccaaagagacgtgattacagggccacttctctttcagatctcccagcagagttagagaaacttgttatgtttgtgcataattaatgttttgtttccccggtgagcaggcacagaaaatgtcatcttcagcatgtgtgagratgctggtgtgtttgtttgcatacacacataagcttgcttttcagtgtgctgaaccagcaataaaygatgctgcctctgaacaaagtcagaggcacagaagaaatcatagaatcacagaatggcctggkttgaaaaggcccacaatgctcattgagttccaacccctgctatgtgcagggtcgccaaccagcagaccaggctgcccagagccacatccagcctggccttgaatgcctgcagggatggggcatccacagcctccttgggcaacctgttcagtgcgtcaccaccctctggg

SEQ ID NO: 77103 - DNA, 599 bp, Chicken  19866894365170_2
  misc_feature (1)..(80): n is any nucleotide
nnnnnnnnnnnnnnnnnnnnnnnnnnnnnnnnnnnnnnnnnnnnnnnnnnnnnnnnnnnnnnnnnnnnnnnnnnnnnnnntgtggcagtattctccaaagagacgtgattacagggccacttctctttcagatctcccagcagagttagagaaacttgttatgtttgtgcataattaatgttttgtttccccggtgagcaggcacagaaaatgtcatcttcagcatgtgtgagratgctggtgtgtttgtttgcatacacacataagcttgcttttcagtgtgctgaaccagcaataaaygatgctgcctctgaacaaagtcagaggcacagaagaaatcatagaatcacagaatggcctggkttgaaaaggcccacaatgctcattgagttccaacccctgctatgtgcagggtcgccaaccagcagaccaggctgcccagagccacatccagcctggccttgaatgcctgcagggatggggcatccacagcctccttgggcaacctgttcagtgcgtcaccaccctctgggggaaaaacttcctgctaaaatccaatctaaacctcccctgtctcagtttaaaacaattctcctttg

SEQ ID NO: 77104 - DNA, 599 bp, Chicken  19866894365170_3
  misc_feature (1)..(17): n is any nucleotide
nnnnnnnnnnnnnnnnntgtggcagtattctccaaagagacgtgattacagggccacttctctttcagatctcccagcagagttagagaaacttgttatgtttgtgcataattaatgttttgtttccccggtgagcaggcacagaaaatgtcatcttcagcatgtgtgagratgctggtgtgtttgtttgcatacacacataagcttgcttttcagtgtgctgaaccagcaataaaygatgctgcctctgaacaaagtcagaggcacagaagaaatcatagaatcacagaatggcctggkttgaaaaggcccacaatgctcattgagttccaacccctgctatgtgcagggtcgccaaccagcagaccaggctgcccagagccacatccagcctggccttgaatgcctgcagggatggggcatccacagcctccttgggcaacctgttcagtgcgtcaccaccctctgggggaaaaacttcctgctaaaatccaatctaaacctcccctgtctcagtttaaaacaattctcctttgtcctatcactatccaccctcataaacagtcatacccactcctgtttatatgcacccttcatat

SEQ ID NO: 77105 - DNA, 600 bp, Chicken  19866894365191_1
agaatgacttcaccttaaatactggaatatcttagatctctttctcttccttttttctttctctctgtctagtcttcagagacttggcagtctcagatacccttgggtgttcaaaggtagatcagtctgcggcagggctgcctttgatgttttcacctacaaaaatgtcacatcacaacctgctctgttatttcacattgaatgtgaaagattcactaaaaggttaatttcaagtcttgttgaattttacactattaaagtcaatgccttttcaaggatgcacctagaatgtttccaggrgggtgagagaaggggctggttataagctcccgctgcggctgcactggcacctcgcagccatatgcatacagtgcttgtggctgcgcagcccctctgtgaggcagtgttccaccctgttttccaaatggcggaggtggtgaatcaccagacgtaccctgaattccactgcatccgtctgtgctgcctttacccactgaggcagtgttctgtcccatagaagagaaatctaaagggggatgaacgcttctaaactgatcttgtgtggggtattttgtgggagtaattccaaatttctgttct

SEQ ID NO: 77106 - DNA, 600 bp, Chicken  19866894365196_1
gtgaataaactgcacctaaaagacatgcaggtatcatgcttcagtgagtgaaaggctttttcttgttgtttatttggaagggaaaagtatccactgggacagttgtccttcagaaattgagttcactgtgttgtaacttgtttgttcttcatactgatgatctttaaggatgttgcactcttgcctccctgagcacgctgcatccccctgactgctgccttgcatcccacagtttggttcctgaggtttgcagttgttcttgtgccaaatatgtaaaggtgatagagcacctttcagatwtgtggggaaaagaacagtctctacctcattcttggtggaacttgtaamcctggggaaggtgtgcttctcattgttgttctcctcttctgggtttggttttgttgcagtggaaactggtcaaagtgttcttgtaaatatcctgagattacctggataacaatgatacgtgccctgttacaccatgaatttcmagcccttcagcactgatgaaagaagagttggaaggctgagggctctggggagaagcataagtttgcctgtgggtttcaaggggtgttgcttcaggctggctagtccagt

SEQ ID NO: 77107 - DNA, 600 bp, Chicken  19866894365196_2
tgaaaggctttttcttgttgtttatttggaagggaaaagtatccactgggacagttgtccttcagaaattgagttcactgtgttgtaacttgtttgttcttcatactgatgatctttaaggatgttgcactcttgcctccctgagcacgctgcatccccctgactgctgccttgcatcccacagtttggttcctgaggtttgcagttgttcttgtgccaaatatgtaaaggtgatagagcacctttcagatwtgtggggaaaagaacagtctctacctcattcttggtggaacttgtaamcctggggaaggtgtgcttctcattgttgttctcctcttctgggtttggttttgttgcagtggaaactggtcaaagtgttcttgtaaatatcctgagattacctggataacaatgatacgtgccctgttacaccatgaatttcmagcccttcagcactgatgaaagaagagttggaaggctgagggctctggggagaagcataagtttgcctgtgggtttcaaggggtgttgcttcaggctggctagtccagtgtgttaaaggtgtgttcacaactggggcacgttaaccactctactgga

SEQ ID NO: 77108 - DNA, 600 bp, Chicken  19866894365196_3
agcacgctgcatccccctgactgctgccttgcatcccacagtttggttcctgaggtttgcagttgttcttgtgccaaatatgtaaaggtgatagagcacctttcagatwtgtggggaaaagaacagtctctacctcattcttggtggaacttgtaamcctggggaaggtgtgcttctcattgttgttctcctcttctgggtttggttttgttgcagtggaaactggtcaaagtgttcttgtaaatatcctgagattacctggataacaatgatacgtgccctgttacaccatgaatttcmagcccttcagcactgatgaaagaagagttggaaggctgagggctctggggagaagcataagtttgcctgtgggtttcaaggggtgttgcttcaggctggctagtccagtgtgttaaaggtgtgttcacaactggggcacgttaaccactctactggagaatgtaaggaaaagttcccattgatttattcttcaacagaaattgctttctttctaatgctttttctttgtagaaagagctacatataaaagtgttcaaatttgcagagaaaattgaatctatttttttgttttcattaaag

SEQ ID NO: 77109 - DNA, 510 bp, Chicken  19866894365197_1
attaaaatgcttgttattttgcacaacaataaatacagcatagctctggcacagagaaaggccaagactggatacaagaagtccgtgtggtttcttagaaaagctcaggtgatttataaaggtttggcatcctgcacttgatgtactttgatacagcttgtgctttaatcttattttgactatgagttttaaacaggcccctaacatagaaatatgagaggaaaaaatatttgactataggatttttcctttaaatattttcaaagtaagagatgtgtaaactcattgaaaccaatcctygaaataataaaaagaagtgttctggtggctattctacaacaatgcatattttcagctgtgggtgctcaagcctgaccagccaattggcgagggatcaacgcctggtcagttcctcaattctttacacaattttcagaaaagaaaataaaaataaaagagtaattacagtgagaaagagtaaagagtgtagtattcacttcccaagtcatg

SEQ ID NO: 77110 - DNA, 600 bp, Chicken  19866894365202_1
tcagcatgcagttttagaaggcaaacccagcattttatgtttttgaattcttggatctcttcaaccacaagtaatgttttaagtttgtgcatgcaattaccaatattaaatacctagttttttcataaggtgcttctgaaagaagaagatcttcaattataacagcctttcttctgctcacatatgcataggtcactccaaaagtactgcctcctgtttatttctatggaaactgcagcagatacagagagcacaacagcactgttttgatagaacaagtactcagctacaaaacactgyttttcaatgtagccactgccagtagctgtgcatttttcaccagcagtgaacaagagcctgtgtgccaygctcataaaaatcttcaccagcagaggttgacccactgtcaccgttgccactgctgaaagtcaccacccacccttcactgtgctcacatccactgttcggtctccataagtattcagcaagtgtcaatgaatgtcactggatgcagttttttccatatggaggaattcagtgacacacctttgcttcatatgcacttccatgtcagacaccatttgtcagactgtccctctg

SEQ ID NO: 77111 - DNA, 600 bp, Chicken  19866894365202_2
aagtaatgttttaagtttgtgcatgcaattaccaatattaaatacctagttttttcataaggtgcttctgaaagaagaagatcttcaattataacagcctttcttctgctcacatatgcataggtcactccaaaagtactgcctcctgtttatttctatggaaactgcagcagatacagagagcacaacagcactgttttgatagaacaagtactcagctacaaaacactgyttttcaatgtagccactgccagtagctgtgcatttttcaccagcagtgaacaagagcctgtgtgccaygctcataaaaatcttcaccagcagaggttgacccactgtcaccgttgccactgctgaaagtcaccacccacccttcactgtgctcacatccactgttcggtctccataagtattcagcaagtgtcaatgaatgtcactggatgcagttttttccatatggaggaattcagtgacacacctttgcttcatatgcacttccatgtcagacaccatttgtcagactgtccctctgctgccatctgtcacatggcaactgcgtgtatctgaatattgtcaggaaggtttgtcctctactgtcat

SEQ ID NO: 77112 - DNA, 600 bp, Chicken  19866894365208_1
ctctagctcaaggcctgctagtaacctcccttcgatggaaagcttccctatttattcttacccttatcttttaaccattttttaaatacagaagaggaccttccctcttatgctttgacagcttagtttttacgagagcatctcatgagacatcctgtcaaaagtgttgaatgaaaaccacttgtatgaaatttttctattaggaattaaaatattcagtatcagcaatctatggaaaagactgtttgatttctggagaaaggaactgtgaatcatttataggatgctttctgacattcwatgtcaaattagatgctgcagttgtcattaaaatatcataatttcaatatcttatgttttagtaatgtatgtgaataattaaactgcttgttttctctaaattgtatataatctcactttcacttctttaattttagctgagaattaaaagaaaaacaaagatgacctgaaatgaaatagaacaagatgaagttgcctttgagcacatttatgcgaggctgaaggaaaatgcctgacctcacaagagacccaattcagagatggaggccattggcaattcttggcaatactgttccagct

SEQ ID NO: 77113 - DNA, 450 bp, Chicken  19866894365209_1
atttgtcatgtttctagaacctctctccaaatgataaaagagaacagattgcccagagaggctgtggatgacccatccctggaggcattgaggaccaggttggatggggccctgggcagcctgatctggtggatgccagacaacaggggagttggaactagatggtcttcgaggttccatttgaacccaacgccattctttgattcagtgattctgtgactcagtgattctattttaatctgtaaggtccgtccaagttggaactttgtaagaggatcataaaaaaaagccatttagaawtcagaatccactacagcacttgataggaaagtgggataaaattgcactcagcatttactcactttacatagaaggaagagctcttttccgtaatgttattgattccttgaaaattttcgaacatctttcgctgtcaggttgatagtagtg

SEQ ID NO: 77114 - DNA, 600 bp, Chicken  19866894365220_1
cctgtaatgtgctctgaaatcttcagtcctccctgtgaaataaactgttacactaacacttttattatttgttctaataggatctaacagaatcatatgggatctgataggctctaatagaatcatagtatcatttgagatagaaggcccctttaaagatcatctagtccaactcccttgcaatgagcagtgacacctacagctccatcaagttgctcagagccccatccagcctgaccttgaatgtcctcagggatgggacaaccaccacccctctgggcaacctgttcctgtacttcrctatcctgatttaaaaacaaacaaacaaacaaaaaaaamcaacccaaatctcccctcttttagtttgaaaccatttccctttgtcctatcacaacagaccgttctttcttatagccccctttttgtctgaagggcagctatcaggtctccccacagccttctccaggctaaacagccccagctctctcagtctgtatgaattgcagcacaagcagamaacttcaaaataaaaaaaaataaatcaaagtcatgagggtcaaattgagaccaaaactttcaataaaattaatctctccatca

SEQ ID NO: 77115 - DNA, 600 bp, Chicken  19866894365220_2
ataaactgttacactaacacttttattatttgttctaataggatctaacagaatcatatgggatctgataggctctaatagaatcatagtatcatttgagatagaaggcccctttaaagatcatctagtccaactcccttgcaatgagcagtgacacctacagctccatcaagttgctcagagccccatccagcctgaccttgaatgtcctcagggatgggacaaccaccacccctctgggcaacctgttcctgtacttcrctatcctgatttaaaaacaaacaaacaaacaaaaaaaamcaacccaaatctcccctcttttagtttgaaaccatttccctttgtcctatcacaacagaccgttctttcttatagccccctttttgtctgaagggcagctatcaggtctccccacagccttctccaggctaaacagccccagctctctcagtctgtatgaattgcagcacaagcagamaacttcaaaataaaaaaaaataaatcaaagtcatgagggtcaaattgagaccaaaactttcaataaaattaatctctccatcatctctcattacaacaaaatgcacgttgtctggaatgctg

SEQ ID NO: 77116 - DNA, 600 bp, Chicken  19866894365220_3
cagagccccatccagcctgaccttgaatgtcctcagggatgggacaaccaccacccctctgggcaacctgttcctgtacttcrctatcctgatttaaaaacaaacaaacaaacaaaaaaaamcaacccaaatctcccctcttttagtttgaaaccatttccctttgtcctatcacaacagaccgttctttcttatagccccctttttgtctgaagggcagctatcaggtctccccacagccttctccaggctaaacagccccagctctctcagtctgtatgaattgcagcacaagcagamaacttcaaaataaaaaaaaataaatcaaagtcatgagggtcaaattgagaccaaaactttcaataaaattaatctctccatcatctctcattacaacaaaatgcacgttgtctggaatgctgatactagacagatgcaagatagtctaatgtctgtagtatagtagttgagctataattttagggacctttatagagcagacaattttgtgctggtagaaggtaatgcctctttttgtagaaagatgataagaaaacaaaactttaaaacaaacttcagaagcctttgaggccgccttga

SEQ ID NO: 77117 - DNA, 600 bp, Chicken  19866894365231_1
tttgggggtcacactgtgtcccagtgaccactgctcatggtttctgctgggccaggcaggttcggtggggctgcagtgctggcagcactcgtgactcatgaggacattgtgaaatgcccacagagttcatcaccatctacaaacaaaagagactacactaaagaaaagagctttcagtgatagctttaaaaggtaaatttcctacagcagaggactacacacaacagagctggcaatgtcagcttcagctagcacaccaccttgcttatcttactcttttcagggttttttaatctctaytgtcaaaacaattgttcagtcccttaatgtatgccctccttcttatgaaacagggcactaatatgcctcttctgcaatgaactactatttctcactacayrgatgtgccttgtgaaccacgagrtcacaggaaacacattaaacaaataaaaaagtcagcaacaccaatgcaatcagaaatccaaaatgttttatcagctaattctagggaacagctttgggtatagaaacacaaaatactttttccttcatgtatatcctcatgttatattttggtcccatccctgtgatcagaagaga

SEQ ID NO: 77118 - DNA, 600 bp, Chicken  19866894365231_2
aggacattgtgaaatgcccacagagttcatcaccatctacaaacaaaagagactacactaaagaaaagagctttcagtgatagctttaaaaggtaaatttcctacagcagaggactacacacaacagagctggcaatgtcagcttcagctagcacaccaccttgcttatcttactcttttcagggttttttaatctctaytgtcaaaacaattgttcagtcccttaatgtatgccctccttcttatgaaacagggcactaatatgcctcttctgcaatgaactactatttctcactacayrgatgtgccttgtgaaccacgagrtcacaggaaacacattaaacaaataaaaaagtcagcaacaccaatgcaatcagaaatccaaaatgttttatcagctaattctagggaacagctttgggtatagaaacacaaaatactttttccttcatgtatatcctcatgttatattttggtcccatccctgtgatcagaagagacactgataccagaatcagcttttatccatttgtattgctttatgtatctgaaagagtggccactgcacaggctcgtacatcgctatgggaagaataaagt

SEQ ID NO: 77119 - DNA, 600 bp, Chicken  19866894365231_3
ggacattgtgaaatgcccacagagttcatcaccatctacaaacaaaagagactacactaaagaaaagagctttcagtgatagctttaaaaggtaaatttcctacagcagaggactacacacaacagagctggcaatgtcagcttcagctagcacaccaccttgcttatcttactcttttcagggttttttaatctctaytgtcaaaacaattgttcagtcccttaatgtatgccctccttcttatgaaacagggcactaatatgcctcttctgcaatgaactactatttctcactacayrgatgtgccttgtgaaccacgagrtcacaggaaacacattaaacaaataaaaaagtcagcaacaccaatgcaatcagaaatccaaaatgttttatcagctaattctagggaacagctttgggtatagaaacacaaaatactttttccttcatgtatatcctcatgttatattttggtcccatccctgtgatcagaagagacactgataccagaatcagcttttatccatttgtattgctttatgtatctgaaagagtggccactgcacaggctcgtacatcgctatgggaagaataaagtt

SEQ ID NO: 77120 - DNA, 600 bp, Chicken  19866894365231_4
gttcatcaccatctacaaacaaaagagactacactaaagaaaagagctttcagtgatagctttaaaaggtaaatttcctacagcagaggactacacacaacagagctggcaatgtcagcttcagctagcacaccaccttgcttatcttactcttttcagggttttttaatctctaytgtcaaaacaattgttcagtcccttaatgtatgccctccttcttatgaaacagggcactaatatgcctcttctgcaatgaactactatttctcactacayrgatgtgccttgtgaaccacgagrtcacaggaaacacattaaacaaataaaaaagtcagcaacaccaatgcaatcagaaatccaaaatgttttatcagctaattctagggaacagctttgggtatagaaacacaaaatactttttccttcatgtatatcctcatgttatattttggtcccatccctgtgatcagaagagacactgataccagaatcagcttttatccatttgtattgctttatgtatctgaaagagtggccactgcacaggctcgtacatcgctatgggaagaataaagttcagcagacgtacacaaaaaggga

SEQ ID NO: 77121 - DNA, 469 bp, Chicken  19866894365232_1
aagttaagtgatatacaatgaaaatccttagaggaaagaacaactacagctttgaattttatacttgctgcataatgggaaacaaaagtgaagaaaaagtttccttctaggaagtgctgggaaatttgtgtctgtgtatgtatggatgactttttcagtgtgacactgatatgtaagaaaagatgctgggtctatctgagagaaagaagaaaaggtccagggaactattcctgtacaaagatcaattattaagattctgaaactgaaggcaagcccaaaaatattgagtgggacatgagraaaaaaaaaaaagaaaagtttattacatggcagccaagtgtatttcagtaatcgggaacattgctgattgtattcatgtaatgacactttttctactagaaacattgatttattgaagcaagacttattgggataaaaggctgctatcagtgaatttatcatccagcag

SEQ ID NO: 77122 - DNA, 600 bp, Chicken  19866894365244_1
aaaatgatcaagtctttcccttcagttccgaaggcagtgaggcaaaagagctctcagagccaccagagacatttgttcactcagtctccaataagtctgtgtggattccattacggagattgatttataaactcaaaaacagttggcagaaaacagatttcatcctgctcccctaggcaatttgtttgctaaaggaaaccatttactgttattttatatggctatatttaaacacgcaacatactgcatgaaacctcaacacatgcgctttccacacaatgacagcttcacatcaccaayatactgctcatggcacragcactgatgcactcaccacatcaaggagctcccactaaccccgagcaaacatctgtatcgcattcacagaacaacatctgctgtactaaactacataaacggaataatgagatagcgtaaatgaagaatgtgtttggaaattcaggcacaagttggtatcatatcctgatcttttaggacttttagtacctcttcgtgcacaacctcatcacgctctcaattctgttttttgttgttgtggtgtttttttgtttgcttcttgtttaaatggaatttcgaaag

SEQ ID NO: 77123 - DNA, 600 bp, Chicken  19866894365244_2
cccttcagttccgaaggcagtgaggcaaaagagctctcagagccaccagagacatttgttcactcagtctccaataagtctgtgtggattccattacggagattgatttataaactcaaaaacagttggcagaaaacagatttcatcctgctcccctaggcaatttgtttgctaaaggaaaccatttactgttattttatatggctatatttaaacacgcaacatactgcatgaaacctcaacacatgcgctttccacacaatgacagcttcacatcaccaayatactgctcatggcacragcactgatgcactcaccacatcaaggagctcccactaaccccgagcaaacatctgtatcgcattcacagaacaacatctgctgtactaaactacataaacggaataatgagatagcgtaaatgaagaatgtgtttggaaattcaggcacaagttggtatcatatcctgatcttttaggacttttagtacctcttcgtgcacaacctcatcacgctctcaattctgttttttgttgttgtggtgtttttttgtttgcttcttgtttaaatggaatttcgaaagctgctcctgctttgtga

SEQ ID NO: 77124 - DNA, 600 bp, Chicken  19866894365253_1
cctcttctgatcagaaaggcaccactgtctgcaccgggcatggggcctggggagtctttcccagccccagatcctcacagtgcgtcttcccatcccagggatgcttttaagggcaggccatgcacagccccagcctcacggtgcccatttcactgcaggacacagaggtggaggtagcggtgccagtacgcagctatgatgccctttggggggatcgctgcccggctgcagagggaccgcctgagagccgagggggtcggcgagcacaacaacgctgtcaagtacctcaaccaggactaygaagccctcaagcaagagtgcatcgagagtggcaccctcttcagggacccccagttcccagctggccccactgccctcggcttcaaggagctggggccatactccagcaagacacggggcgtggagtggaagcgtccatcggtaagtgctgggctcatgtccttcgcctgcagtttctgcattaatgtggtgtgccaagctgcagcctggcttcaatttgcttcttactgtgcttaaagttcctcacgtgcttcattgcccattctccagaggaatactgctcgctgagtactcaaagag

SEQ ID NO: 77125 - DNA, 600 bp, Chicken  19866894365253_2
gtccatcggtaagtgctgggctcatgtccttcgcctgcagtttctgcattaatgtggtgtgccaagctgcagcctggcttcaatttgcttcttactgtgcttaaagttcctcacgtgcttcattgcccattctccagaggaatactgctcgctgagtactcaaagagcattgtgtctagcacacccttcatcctctaggcagtatacattggcctttacaatgggagagttgtgccattgcttctggatgtcccagcataggtgtgacaccctcggtgactcttggggttgtgtatccaytggtgccacgagttcaggggcaatgcccatctagccatttcctgctgaagaagatcttgccttgccttcctatgatggccttaatgttgcactcaagcagttttcccaggcagagggcaggtggggtgcatctcggagatgataatcccattctcccgagtcagtgctacaaagggcacaggtcctgctgagatccaatgcttgatcctctccttatgcaggaattagtggatgaccctcagttcatcgttggtggtgcaacccggacagatatctgccaaggagctctgggtgagtgct

SEQ ID NO: 77126 - DNA, 600 bp, Chicken  19866894365253_3
agggcaggtggggtgcatctcggagatgataatcccattctcccgagtcagtgctacaaagggcacaggtcctgctgagatccaatgcttgatcctctccttatgcaggaattagtggatgaccctcagttcatcgttggtggtgcaacccggacagatatctgccaaggagctctgggtgagtgctggagttctgtccccaaacttcaatctagagagcagcagcagctggggagggtcggtgtgcttggagaagagacatttgtgtagggaaggtgctgagtgggcaggtttcacagyatgtttctgcagaccctcgcagcgtgttttcttgccagcctatgcacacccatccctgcactcaaagctccctccccatgtagtgtggtggaagctgtaaggcagcagggggtgctttgattcctggtggctcttagctaagggcctcacaaaaatggattagcatgggtactgagacaaggagagcagtgttagtgggtggggtaggctggcaaggctgggaactgcgagtcagtgatcaccaaaaccagatctagctgccatcagcagtgtttcctgacctggatcaaggtgagaatg

SEQ ID NO: 77127 - DNA, 600 bp, Chicken  19866894365255_1
agcgtgtcagtgccatgaagaagtgctaggtgttgaaaaggactttctagctggtgtcgaagaaataaaagaagaagaaataggtaaggaagaaatcccaacaaccacctcaccctctaactaattagtcttcttacttttctttaatctcataaaatattaataatgtagaataacttaatgagaagacaataacaatgaacaaattctaagttgttggcctctgacctcttgtgatcaaatgagtacattaagcaaataaatgaagtcagaccatctaaacgtgcatctcttcttttyccagatccatttgatgttgactcaggaaaggaattttgtaatcccaataggccaatcaattcttcaaggtaattaaatttaaatattatttttctcattagaagttgttgtgcttttataatcctgaaaaatatttccagartaacacaaagtaatgaagaatcggaggaggacagtgtgagcactccagatgatagcagtgagagcagtgatgagaacagttcagaagatgatgatcctggaaagtttttgcaagaacagccaataataaatcaactatctgagaagtgaaaacaacaa

SEQ ID NO: 77128 - DNA, 600 bp, Chicken  19866894365255_2
tttaatctcataaaatattaataatgtagaataacttaatgagaagacaataacaatgaacaaattctaagttgttggcctctgacctcttgtgatcaaatgagtacattaagcaaataaatgaagtcagaccatctaaacgtgcatctcttcttttyccagatccatttgatgttgactcaggaaaggaattttgtaatcccaataggccaatcaattcttcaaggtaattaaatttaaatattatttttctcattagaagttgttgtgcttttataatcctgaaaaatatttccagartaacacaaagtaatgaagaatcggaggaggacagtgtgagcactccagatgatagcagtgagagcagtgatgagaacagttcagaagatgatgatcctggaaagtttttgcaagaacagccaataataaatcaactatctgagaagtgaaaacaacaaagaaaaccacaccaaaaacaccccaacagcctaacagttctacactaccttgtacaaataaactttcttgttaacaatgtagctcttccacctgcaactggggggtgctcagcaagtgtcttttgtctgggtgggcctctca

SEQ ID NO: 77129 - DNA, 600 bp, Chicken  19866894365258_1
caatgggtgggaaattcagtagaagggagtctcagctaaatgtggtaaatcaaggaggccactgttcaaaagatgggcatagcattaagaagacggcagcaagcagtcagcaggagagagcaggaacacagtgccatgtgctctaatgcttgacgtgaattctctgcattgtcttgcttccacttcctcttttgtcaaggagctgagggtgaggggcaaaagaaaatcagatctcagggtgaaaatgtagattggtgtagaggtttacattcaaattaattaaaatacaaaatgaaacakagatgctgaagcttttgatgctgaatttttcaagttatctaaaactctatcctgtcaatggagttccagcctcacctgtcttttgtgagcattgagatgaccaagtagtcgagaagataaacaagaaacatcagaatttgtatgaaaatggtttgggggaactagaaacacagttgtttgcatatacttggattttttatttatcaaacaattctgtgctgttcttgctgttccttcttggagacatgcttgcagaagactacctgaatcagatctcttgcaatctacctctaccacgca

SEQ ID NO: 77130 - DNA, 600 bp, Chicken  19866894365259_1
ctcatttacatttcattaggaaataaatttttcctaatattgtattttaaaattatatcctctttcctttcatctttaaatcagtagaagtcccctgtgtcattacaaagctataaacacgcacttcaacaatgattatatgccagcattgtcatttttcctcatgcccattaaaggacaaatttctactcagactgcaagttgattgtaatgtttcaggccagcaaggattagtaaaaacagtacataaatgctacaatacagccagcaactgaatttggggagagaaaggcaggtacsggttttaagtgacagggaactgattactttaatgttcataataatacaacctgccaacagaataaagaatagagtcatcagtttactaccagtggtgacatttcttattgtcattcagcaaactaattgcctcttttgtcaggtatgaatttcttttaacagagatgttaaagacaatggggcctggccaagaagatactctgatttgtaaaggcttctgtttattaaagttccttttcaaatttgtttatcatttatgctgatgtctaaggagctattgggttctttctataccacgct

SEQ ID NO: 77131 - DNA, 600 bp, Chicken  19866894365259_2
ttctataccacgctctgaaaagcaagaagacagaaagcattatgaagcaatttgccagcctgtatataataacctaaaacatgtatctatttcttctttagagaacaggaagcatttaatcatttctgaaagacctacttatcaaactgaattacttgaagcatctccctataaatcacaatgaaaaagtgttttatgttcccagaattgaagctgctattccaatgagtggaaatgttggcaaatatacaggtcccattatgcagaattttgcaaactcccctagcttcacaatgcctrctttgtgaataaactctttgctgagtaatattactcagctcaaaaatgtggcgcacacacacagtcctccttaactctaacagcccatgttcagaaggtgtgtacagttttgcaaagagtgtctcatcttcctgaattttcgtattcaagaaagcactttgtggtatcaatcctgaatgatcgagctgaatataattatacatattcatcaggatttacttattttgcaccatcagactatgcatcacaatatctgccaataaataggaattgtaagcaaagcctcttcagtctgataca

SEQ ID NO: 77132 - DNA, 600 bp, Chicken  19866894365261_1
actcagcagttggaggacaggatttgtcagagcttcagcagatgtgaattgatctactgtggttgaaatttttgccatgtgaggactggacctgcaaatgtgtaaagctcattgtggtttctacgtggtccctgttatgacaccctttagctatctcctgtgatggcaatctccatgaaatcagtccttctctagcaatcagcttgggagctcattttgagacagcaacaaagcatatggccaggagaggactgcatggctgatattctacaaactctcaataacacagcatgtgaggaygagaataagaaagggatttgcggagtgttttcggtttactctttgtctttgtgctgcatgaggcaagttccctttaaggtgactggctccctctatgatcctaaatattgcagaactcctatttgtcagaatattttgcatttgtgagaatttggtgaatatcactgtggcacaagggccccctgaagtgataactcttgggagagcatcatggagagggcaagaaggggaaaggactttgctggagggagatggtgtgttttgcatcttgtactatgagtgctctgtctctccaaatgc

SEQ ID NO: 77133 - DNA, 600 bp, Chicken  19866894365262_1
acagtatgctgatccttttgtcctattaaaagagaagggcggagaaatgacaataaaaattgttaattgaaagaatattcaaaatgtttactgaaagatactcaaacaagttatgtaaaaaaatctctcagaattagcagttgcctattatacaaataattcttgccaaaataacctgttttctttgagcagcattcatcttgatgcttggtaaacctcatacttcacagcttaagttacagaataccgtgaagattttatgcagcgatgtcacaaaaattcgtaacacctcatatccargaacagtgcactcctaaagatgcacagcacttagatgttagtttctgctcttacacaaagtaagaatacctgtattgaagtcgggagaaaatgcacaaaaagctaaccagcctgtatattcagttgctggcttttcacaaagcttctagcacacagaagcacataagcatgttgacacgctgcactgaaacaacaattcccctgaggtaactgctacatcacaaccctcatcaaccagctctaaagaagcayttcatggtaccatttttatttctgtcccaattgcttactagttaagca

SEQ ID NO: 77134 - DNA, 479 bp, Chicken  19866894365262_2
agattttatgcagcgatgtcacaaaaattcgtaacacctcatatccargaacagtgcactcctaaagatgcacagcacttagatgttagtttctgctcttacacaaagtaagaatacctgtattgaagtcgggagaaaatgcacaaaaagctaaccagcctgtatattcagttgctggcttttcacaaagcttctagcacacagaagcacataagcatgttgacacgctgcactgaaacaacaattcccctgaggtaactgctacatcacaaccctcatcaaccagctctaaagaagcayttcatggtaccatttttatttctgtcccaattgcttactagttaagcagccagatgcacgagaaaatcgcctcacaagaccaacgtgattcaccaggtggtcctcaacctccctgtcttccccaaagacatttttcttcttctggccaaccagaaagattaagtcatcctcctttggat

SEQ ID NO: 77135 - DNA, 600 bp, Chicken  19866894365267_1
gggctttgtgcactcctagcagcttgcagctctgtgggacaaaagtaacgtgaatgtggtggcgtgggcccaaagcagtgctagttctgtgaaattagccacttatcttggctctggtggtgttatgtactcgttggcagtacatgtgatgaattaattccttgtgcattgaattaaaatctgccttctctctcaggtgttgctgcctctgcaagagttaaaagcagtaatgccccctcagagccatttcagtgggtgggaactgtttttacaagatttattatgatcagctacattttratcactttttatcagttgtgctgttttctttcttcttttgtttccatctgtagacatcagtcctttgacattttgctctgtagctgtgggattcctcagctcctgctcagtttgagtcttacataaacatgtggtgagagacagtgcctggtcctgcaaaggcagtgtgagcacaagggctgtgctaagccaaaaatgagaagaaatgaaaactgcacagctgtggcagtagagtggcaggcacatcggtctgaggtgtctgttacaagtttttgtccctgggacagctggcatccaaag

SEQ ID NO: 77136 - DNA, 600 bp, Chicken  19866894365271_1
attcaaagcaaaatgacaaaaatacaataatgagaaccttgtaaccaactgacaaaataatttccttctttctccttactacttctttttgactttgtattttactcttcatttctgcatttgatttcaaataacatatttttcctcctttctttcaaaggaaatggagatcaaagagcattgttaattgacagaagaggtgttacagagattgtcagttaccttttgctgctgatacccatcacctctaatagaaatgtaagaacccagaactggaaaggaccatctggaaccatctgkaagctgttcctagcactgtgggctactataaattagatatttaatcacaaacagtgcatagaaaatcttctccrcatgccataggccataaaacagtttgcatgtaacacaattaagaaagatgatgattaataatgaacatctagaactctaatgtgccataaaaagaacacagcatcaagcaccaccagcttctgagaacaggagaatataattttgggatataatgattttaagagataaagtgtggattttgcagtaagaaggcaaaaacaacaacaacaacaaaacagcttctgt

SEQ ID NO: 77137 - DNA, 600 bp, Chicken  19866894365271_2
cttactacttctttttgactttgtattttactcttcatttctgcatttgatttcaaataacatatttttcctcctttctttcaaaggaaatggagatcaaagagcattgttaattgacagaagaggtgttacagagattgtcagttaccttttgctgctgatacccatcacctctaatagaaatgtaagaacccagaactggaaaggaccatctggaaccatctgkaagctgttcctagcactgtgggctactataaattagatatttaatcacaaacagtgcatagaaaatcttctccrcatgccataggccataaaacagtttgcatgtaacacaattaagaaagatgatgattaataatgaacatctagaactctaatgtgccataaaaagaacacagcatcaagcaccaccagcttctgagaacaggagaatataattttgggatataatgattttaagagataaagtgtggattttgcagtaagaaggcaaaaacaacaacaacaacaaaacagcttctgttactgtgacccgtgagatttcttcattacctcaaaccttgcaatccacttagcttggactatgtgatgcagatt

SEQ ID NO: 77138 - DNA, 600 bp, Chicken  19866894365275_1
ggactttttgtctactgatactgcagtttgttaagccatgtcaattcaaaatgcaccttcaacataaagctacctgccaacctcttttcttaccccatctctacgttcctttcttgcccttgaattctctccagtaatccctggatacagcttggaaatgaagctatttcccacagataccaccttggcacagaaagatgcaaagattttgtaacaaagcctgacatgccaagcttggtgtctgcagctgggagccttcctcactgctgctgtgggctagcctggagttcttaattaaawctgatagagtggtcactcacaatactcctgctgtgataggtggttttgcttatctggaagcagaatgggctttgcttttttaaggcagcatcctgagcagcctctgcataagacatttattgcaagaacttataacgctgagtgctgtgaggtgaatgagacaggatgcttctctgagaaagttcacraggaatggaaagtgggagagttgcctgtggatcccttcctttgcattccctttcactgtagcattataaacaatcattaacatttttaggctcttggtagttctgggaggca

SEQ ID NO: 77139 - DNA, 555 bp, Chicken  19866894365275_2
cacagaaagatgcaaagattttgtaacaaagcctgacatgccaagcttggtgtctgcagctgggagccttcctcactgctgctgtgggctagcctggagttcttaattaaawctgatagagtggtcactcacaatactcctgctgtgataggtggttttgcttatctggaagcagaatgggctttgcttttttaaggcagcatcctgagcagcctctgcataagacatttattgcaagaacttataacgctgagtgctgtgaggtgaatgagacaggatgcttctctgagaaagttcacraggaatggaaagtgggagagttgcctgtggatcccttcctttgcattccctttcactgtagcattataaacaatcattaacatttttaggctcttggtagttctgggaggcattatcctcactttgtgcttggatgatctgtctgtccagagaggtgctgttttatgctgggaagcatttgatcaggccaggttaccaaagaagtgcctttggggagttagcaaagctggcagccaataaaaggaaacatttcat

SEQ ID NO: 77140 - DNA, 599 bp, Chicken  19866894365276_1
  misc_feature (1)..(31): n is any nucleotide
nnnnnnnnnnnnnnnnnnnnnnnnnnnnnnntctacaaactgtcatgatgcctaccttgctaaaatgagtcagtacaacagagtccctcctagacaagccattccttgtgagtagtttccttcacgtctcgcagacaggactctgagggctttattggagtcacactatccctgtcctgacagcccctgctctccccctggccgaggatcccacttcactcccaggagtgccatcccctgtcccagcaaggcttcagctccccatagctctgccctgcccagctcagccatggcatctgyccarccaggcctacccataggcttatatcccagcctgacattgtcctatccctgttcccacagagttgctcaatgcctggggctgtcctggttcctctggctgtgcagctcctggctggggtactgggacagggcatgttgacaagcttttccctgaagccctggggagcccccaytgctctcagccctggcctcagggagctgccagccttagctgctgcatacagactcctcagaaggccatgttcccttaacagtgtcaagagatcatcctacacaaatcagacctctgaatttga

SEQ ID NO: 77141 - DNA, 599 bp, Chicken  19866894365276_2
  misc_feature (1)..(27): n is any nucleotide
nnnnnnnnnnnnnnnnnnnnnnnnnnntctacaaactgtcatgatgcctaccttgctaaaatgagtcagtacaacagagtccctcctagacaagccattccttgtgagtagtttccttcacgtctcgcagacaggactctgagggctttattggagtcacactatccctgtcctgacagcccctgctctccccctggccgaggatcccacttcactcccaggagtgccatcccctgtcccagcaaggcttcagctccccatagctctgccctgcccagctcagccatggcatctgyccarccaggcctacccataggcttatatcccagcctgacattgtcctatccctgttcccacagagttgctcaatgcctggggctgtcctggttcctctggctgtgcagctcctggctggggtactgggacagggcatgttgacaagcttttccctgaagccctggggagcccccaytgctctcagccctggcctcagggagctgccagccttagctgctgcatacagactcctcagaaggccatgttcccttaacagtgtcaagagatcatcctacacaaatcagacctctgaatttgaaagg

SEQ ID NO: 77142 - DNA, 600 bp, Chicken  19866894365276_3
ctgacagcccctgctctccccctggccgaggatcccacttcactcccaggagtgccatcccctgtcccagcaaggcttcagctccccatagctctgccctgcccagctcagccatggcatctgyccarccaggcctacccataggcttatatcccagcctgacattgtcctatccctgttcccacagagttgctcaatgcctggggctgtcctggttcctctggctgtgcagctcctggctggggtactgggacagggcatgttgacaagcttttccctgaagccctggggagcccccaytgctctcagccctggcctcagggagctgccagccttagctgctgcatacagactcctcagaaggccatgttcccttaacagtgtcaagagatcatcctacacaaatcagacctctgaatttgaaaggttaaaaattcagcaccatcaatatttttcgtcattttcagttgtagtagaggaaaaggagttgctttttatgttatttctacagagaacttatcttaaatgatgagtgtaaaatttatacgaacccygaataacactactttcctctttcctactggtgtggagatgagcaga

SEQ ID NO: 77143 - DNA, 600 bp, Chicken  19866894365276_4
agggcatgttgacaagcttttccctgaagccctggggagcccccaytgctctcagccctggcctcagggagctgccagccttagctgctgcatacagactcctcagaaggccatgttcccttaacagtgtcaagagatcatcctacacaaatcagacctctgaatttgaaaggttaaaaattcagcaccatcaatatttttcgtcattttcagttgtagtagaggaaaaggagttgctttttatgttatttctacagagaacttatcttaaatgatgagtgtaaaatttatacgaacccygaataacactactttcctctttcctactggtgtggagatgagcagattccctacaggatggattctcctctctctggagtccagagtcactctgtctgcagcttgtcctcactgctctctgccaagacctgccactcaaggcagcagcattcaatacccagtattcaatacatatcaatgccacttctcttccagaagtccagagaagtgaaaatcttagatgaatcatgtaatgttgaatattttttcaaatatcttttaagacctgtaaggtaattggtaatgttattagaaataata

SEQ ID NO: 77144 - DNA, 599 bp, Chicken  19866894365277_1
  misc_feature (1)..(212): n is any nucleotide
nnnnnnnnnnnnnnnnnnnnnnnnnnnnnnnnnnnnnnnnnnnnnnnnnnnnnnnnnnnnnnnnnnnnnnnnnnnnnnnnnnnnnnnnnnnnnnnnnnnnnnnnnnnnnnnnnnnnnnnnnnnnnnnnnnnnnnnnnnnnnnnnnnnnnnnnnnnnnnnnnnnnnnnnnnnnnnnnnnnnnnnnnnnnnnnnnnnnnnnnnnnnnnnnnnnnaaatatacaaaacatttgttatgttttttctccttcaattcctcacttcactctttggtaaagccaaaaccattttgtaaatgggaawgtacaggtagctgaaagccttaatgcttacatgagccagactgctgccatagtctgacatagtcaacacacacagactcagacttctctcctgttggcttacaaatcttacaaatgcagtaggaaaacaaaacaaaacaraacaaaacccttccatggtgccctgaactcatatgcagcagaaatatctgggatctggtgaaaggctatattgaacgctatgacacagacagctggatcactggatgagtccagtragaaggaccctcctgggaaggcagtagaacataaggctagaag

SEQ ID NO: 77145 - DNA, 599 bp, Chicken  19866894365277_2
  misc_feature (1)..(72): n is any nucleotide
nnnnnnnnnnnnnnnnnnnnnnnnnnnnnnnnnnnnnnnnnnnnnnnnnnnnnnnnnnnnnnnnnnnnnnnnaaatatacaaaacatttgttatgttttttctccttcaattcctcacttcactctttggtaaagccaaaaccattttgtaaatgggaawgtacaggtagctgaaagccttaatgcttacatgagccagactgctgccatagtctgacatagtcaacacacacagactcagacttctctcctgttggcttacaaatcttacaaatgcagtaggaaaacaaaacaaaacaraacaaaacccttccatggtgccctgaactcatatgcagcagaaatatctgggatctggtgaaaggctatattgaacgctatgacacagacagctggatcactggatgagtccagtragaaggaccctcctgggaaggcagtagaacataaggctagaagtctccttcttcgcttctgagaagagcttgcagataaaggcatgccatattgraacaggccaatggtcatccaatccgttactctgcttccagcagtgacccatgcaggatagaacatcaccatgtgcctaattaagtaat

SEQ ID NO: 77146 - DNA, 600 bp, Chicken  19866894365277_3
acttcactctttggtaaagccaaaaccattttgtaaatgggaawgtacaggtagctgaaagccttaatgcttacatgagccagactgctgccatagtctgacatagtcaacacacacagactcagacttctctcctgttggcttacaaatcttacaaatgcagtaggaaaacaaaacaaaacaraacaaaacccttccatggtgccctgaactcatatgcagcagaaatatctgggatctggtgaaaggctatattgaacgctatgacacagacagctggatcactggatgagtccagtragaaggaccctcctgggaaggcagtagaacataaggctagaagtctccttcttcgcttctgagaagagcttgcagataaaggcatgccatattgraacaggccaatggtcatccaatccgttactctgcttccagcagtgacccatgcaggatagaacatcaccatgtgcctaattaagtaattcagtaaccatggggggaaattgtgtttctgaccccagctgctgttctgtttgtgccctagagcatgaggattgatagcccttgtaattgttttctcagctatagtggcgtccctgc

SEQ ID NO: 77147 - DNA, 582 bp, Chicken  19866894365277_4
gtctgacatagtcaacacacacagactcagacttctctcctgttggcttacaaatcttacaaatgcagtaggaaaacaaaacaaaacaraacaaaacccttccatggtgccctgaactcatatgcagcagaaatatctgggatctggtgaaaggctatattgaacgctatgacacagacagctggatcactggatgagtccagtragaaggaccctcctgggaaggcagtagaacataaggctagaagtctccttcttcgcttctgagaagagcttgcagataaaggcatgccatattgraacaggccaatggtcatccaatccgttactctgcttccagcagtgacccatgcaggatagaacatcaccatgtgcctaattaagtaattcagtaaccatggggggaaattgtgtttctgaccccagctgctgttctgtttgtgccctagagcatgaggattgatagcccttgtaattgttttctcagctatagtggcgtccctgcagatgctttgcttattcatttgaatcctttgtcgagaatctttctaaaataactgcctcaataatagctggcagccg

SEQ ID NO: 77148 - DNA, 485 bp, Chicken  19866894365278_1
ttgcactttgctgcctgcctgtcatgtgggcttcaccgccggagggcccagaggagattgaaggctgcttcgacacacattgcaccatttgaagcctttatgttggtattaaaagaagcaagcctcacagaagcctttcctgcaaaacaatgtcgtaagattttgattatgaattgtaaatttaataagcatgcactgatataacaacacatcaggtctttgctagcagacagcaagcgctgtgcaataaaaccggtgcttaacgatggctgtgctgaggagctctccgtgcacagggasaaggcagagagcagggagcagcacccgagggtggcacagtgtccccagtgaggattctttgagtcggccaaaacattatcttttgcactaccctgaaaggttgggtcatggcatcgctttgctttcccatcgcttgagcagcatctgcagcagaacaggtagatccttccagcgggggaagaagt

SEQ ID NO: 77149 - DNA, 600 bp, Chicken  19866894365281_1
aaaaaccacaatacaacaacaaaagaccttcaagcagaagatgtatcagatacctgacacaacttaagggaaagatttaacacaaatgttagcttccagtgaaacagacccccaggaaagcgatctcattataggattgcaaagagaacaaggagcctcttctccagctaatcatttcctaacaaagatgtaggcagctaatcttcactactctctaaaagcccccggccttctctcaaattaataggcaccttctttgcagttcattgtgctcaagttatgaacatcacgaacacaaartgtgctcaattgacaactcctttagtgaaggacagagggaatgtgcatctgcaaaactatctcacagaggtaatctgtaaataacagtggaacaggaagtctgcattggtactactgacatgattcctggcattggctagggattctctcagttgctagccaccttactatttaagtaactggcacaatcaaaattgtctcttttgcctctggagatcctcttgctcttaytgggactagtctaaaaagttggtgggtctgtttcagccaggaaaaaaaaaaaaaaaaaaaaaaaaaaaa

SEQ ID NO: 77150 - DNA, 477 bp, Chicken  19866894365281_2
tctctcaaattaataggcaccttctttgcagttcattgtgctcaagttatgaacatcacgaacacaaartgtgctcaattgacaactcctttagtgaaggacagagggaatgtgcatctgcaaaactatctcacagaggtaatctgtaaataacagtggaacaggaagtctgcattggtactactgacatgattcctggcattggctagggattctctcagttgctagccaccttactatttaagtaactggcacaatcaaaattgtctcttttgcctctggagatcctcttgctcttaytgggactagtctaaaaagttggtgggtctgtttcagccaggaaaaaaaaaaaaaaaaaaaaaaaaaaaacagatgaatgcattgtcatagtaagatgagggtagattttggacagatacaaggaaaaaaaaaatcttttacagtgagggtagcaaggcactggaacagtttacctag

SEQ ID NO: 77151 - DNA, 600 bp, Chicken  19866894365288_1
gcaagaggagtggcagtcatttcactcattcaggtagaaggctgacgagaattacttggtggctgggaagtggattactaaaaaaaactcaaacagccgtatgggacataaaaggaacttaagccatttatttctggtatttaaaatatatgtggatgctttttataggcaagaaccttgaacaggtgataggagaaacctgtcatatggttgttggtgacagaaaggagacagactcaacaacaggcagtgaggccgtctcagatgctcctgtgacaaaggtgccaaccaagggtgccmctggctcagcagattcaagggatcgacttacagcagcttaaaatttagacacgtttccaactcataatgaactgaacaattatgctgattagaagcaacatgaaggagccaaatttacaagcttgttcaggaatctaccaaccaaagagggaatttgacttttttttcctcctccaaaatctgaagcaagaaagaggtaaaaacaaacaagaagtggcttactcaactgaaaaagtcaacataatcactcccttgaaagaaaattcaccaagcattactcattttactctgcaaacctct

SEQ ID NO: 77152 - DNA, 464 bp, Chicken  19866894365292_1
taatctcttgaaagatctttctaaagagaggtaggtgttgatcttccagagaactagtacgctaatttaaatattcactttataatttgtgaaaggcatcttggaaaactatctgaaaagatttcagactaaggttcaccaaaataaaactgcaaacgctttcaagaaaaggggtattgaaggagggtggtgagaaaaggagaataataaacaacaaggggcacaagctggcagtgctgtttgaagtggaattagttctaaggtattggtctcctagagttaaaatttgacaagggcagygaggcactggcacaggttgcccagagaggtggtggacaccccatctctggagatacttgaggtcaggctgaatggggctctgagcacctgatggagctgtaggtgttcctgttcattgcaggggagttggactagatggcctttatgggtcccttccaactcaa

SEQ ID NO: 77153 - DNA, 600 bp, Chicken  19866894365297_1
atgtgccactgggagtcaaggtgaggatgggccgggagcagatgggacctgctccgcttgtgaaagagcgtttctgctatttatgctaagcggtgggaatgcttctcaagcattttggatggttctgtaatgaggccggcctaaatatgccagcattgtttgtgccggacaattaaaaactcccacttgccacattagcagtgtctctggtcgggaagggccctggaagcggcgcgggatgaggggtgaccacaaagcccgccctttgtgctgtgctcctttgaacctcctcaaagaccmcatttcaaggggtggcttttgttttcttttcagcgggaccgaacccagagccgcctgttgtttagcgacacagaaatgtgaccttaattgactctgctgccgggtgcactgcataaatcactcctggcaccgagggagctgcccggcgtgccccagccctaaggcagcatcgcctccctggccactgcctgcagggcgggcacggtgacacggtgcggtgacacggtacgatggcacagttgtgtgcatgcccaggtctgcagaggcagcaggagaggctgccacgtccttcacagagcc

SEQ ID NO: 77154 - DNA, 600 bp, Chicken  19866894365297_2
gcgggaccgaacccagagccgcctgttgtttagcgacacagaaatgtgaccttaattgactctgctgccgggtgcactgcataaatcactcctggcaccgagggagctgcccggcgtgccccagccctaaggcagcatcgcctccctggccactgcctgcagggcgggcacggtgacacggtgcggtgacacggtacgatggcacagttgtgtgcatgcccaggtctgcagaggcagcaggagaggctgccacgtccttcacagagccatggggctttgggaaggggctctgcagcctcrggcttaggactacatcacagtgctgtggggtgttttgtccctcacgcacaaaggctcccagccccattccgtagagggttttccatttccacggggatgcaggaaaaaaaatgtttctctgtgctcttcgaaaccgttctgcagccggagcctcctgcccagctgtgccggtatggctctttacctgctgtccctgggactcattgagttaacgctcatcacaagataaattaaatgtgatgaaaatgtaacaaatgcctgccacgcacttagccagatgacttatttgtaggataccag

SEQ ID NO: 77155 - DNA, 600 bp, Chicken  19866894365298_1
ttagagcttttacaaaattagatttataaccatagatctattgattgaaattaaatattccgtagtacttgaagcagaaattgtgtgttcagctggaccactaaaagtcattgacacaaatagagttctggagaccccatttgcctttattttatgtgacccctttctgaatttctgtatcattttcctccatgtcataaatggagtcaacctgcacctcatctttactattttatgtccattttctttcttttctgcttttcctatctcactaccatggttgggcacatggatacaaayrtacatttcattacatttttctttccaaattccaattttatattttgtcactcttgatgcattaaatacttgttaccaattttcattctgctgtaaagacactgctggaactgaataagagaaygtaaaaagaagattatacaaatgggaaacgttggctttctccagcataacattaagctataaagccaaaatstactccccttagcatcgataaatccatagcaaatctaaaatcacactttctgcatccttttcccctggctagagaaagcagattttagcctgctgtttttaaaa

SEQ ID NO: 77156 - DNA, 600 bp, Chicken  19866894365298_2
tagagcttttacaaaattagatttataaccatagatctattgattgaaattaaatattccgtagtacttgaagcagaaattgtgtgttcagctggaccactaaaagtcattgacacaaatagagttctggagaccccatttgcctttattttatgtgacccctttctgaatttctgtatcattttcctccatgtcataaatggagtcaacctgcacctcatctttactattttatgtccattttctttcttttctgcttttcctatctcactaccatggttgggcacatggatacaaayrtacatttcattacatttttctttccaaattccaattttatattttgtcactcttgatgcattaaatacttgttaccaattttcattctgctgtaaagacactgctggaactgaataagagaaygtaaaaagaagattatacaaatgggaaacgttggctttctccagcataacattaagctataaagccaaaatstactccccttagcatcgataaatccatagcaaatctaaaatcacactttctgcatccttttcccctggctagagaaagcagattttagcctgctgtttttaaaat

SEQ ID NO: 77157 - DNA, 600 bp, Chicken  19866894365298_3
gttctggagaccccatttgcctttattttatgtgacccctttctgaatttctgtatcattttcctccatgtcataaatggagtcaacctgcacctcatctttactattttatgtccattttctttcttttctgcttttcctatctcactaccatggttgggcacatggatacaaayrtacatttcattacatttttctttccaaattccaattttatattttgtcactcttgatgcattaaatacttgttaccaattttcattctgctgtaaagacactgctggaactgaataagagaaygtaaaaagaagattatacaaatgggaaacgttggctttctccagcataacattaagctataaagccaaaatstactccccttagcatcgataaatccatagcaaatctaaaatcacactttctgcatccttttcccctggctagagaaagcagattttagcctgctgtttttaaaatacactgggaactttgccattttcttgaataaggccaggatttaaaccattttcagttttatttccatcataatacctagacttcatttctgatatcaaattaaacttaaattaatgaccagat

SEQ ID NO: 77158 - DNA, 600 bp, Chicken  19866894365298_4
ataaatggagtcaacctgcacctcatctttactattttatgtccattttctttcttttctgcttttcctatctcactaccatggttgggcacatggatacaaayrtacatttcattacatttttctttccaaattccaattttatattttgtcactcttgatgcattaaatacttgttaccaattttcattctgctgtaaagacactgctggaactgaataagagaaygtaaaaagaagattatacaaatgggaaacgttggctttctccagcataacattaagctataaagccaaaatstactccccttagcatcgataaatccatagcaaatctaaaatcacactttctgcatccttttcccctggctagagaaagcagattttagcctgctgtttttaaaatacactgggaactttgccattttcttgaataaggccaggatttaaaccattttcagttttatttccatcataatacctagacttcatttctgatatcaaattaaacttaaattaatgaccagattcattaaggaataaatcgatattcattttattctttatcttccctgttgaagagaatacaaacaccattata

SEQ ID NO: 77159 - DNA, 600 bp, Chicken  19866894365302_1
tctcagtgcgtttgcaagtcatgggccaccaacagacagccaagagggaaaagctatttatgtcaggagctcctgttgctgtcctcaagaagttggcgtgctttcagtacggctcttccagtataaaaattccacctgaattcctttagcacatggcccgtttttagcttactgccaggcccagtctgtcttctgcactcaaccccttcctatgcgacgtgggctcaaacaacaccaagctggaactaccaacttctctcgctgctccttgcctccggtggtgccactaagctacctccrtcaggcattagcaggcagtgtgagcaggctgcatgggcaccacagatcctctaaaccatccacctgcatgaagaagccaaagacttctaatcagaatcgagtttctgtacacacagcaaagacaagcatcctcagagagatttccaaaaaatgccacctatcatcatcagatcaccaccatcagatccttcctccttcaccaatgttcccccaacccgcaatgggaactcggatagaaactccaggcaggattttgctgctctcgaggagctatgtagtctgtttggagctgatatctag

SEQ ID NO: 77160 - DNA, 599 bp, Chicken  19866894365307_1
  misc_feature (1)..(199): n is any nucleotide
nnnnnnnnnnnnnnnnnnnnnnnnnnnnnnnnnnnnnnnnnnnnnnnnnnnnnnnnnnnnnnnnnnnnnnnnnnnnnnnnnnnnnnnnnnnnnnnnnnnnnnnnnnnnnnnnnnnnnnnnnnnnnnnnnnnnnnnnnnnnnnnnnnnnnnnnnnnnnnnnnnnnnnnnnnnnnnnnnnnnnnnnnnnnnnnnnnnnnnnatcactgtagccccagcacatccagccagaagcttgatcccattcagaccagagccaacccaacactctgggcagataactggttcttgagtggttacacrgatctgtaamaccctttgagggtagcgagcactttcacagtgggaacatagcaaggatgttagcaggatgctcagtaaattaagcttcagtaaatygtagcaaagtgtgcgcaagctttacttctttctcctaaaatgtgcaaaattacagctttccagcagctgtaattccagttactgagagggcttctgaaaatgctcaagcttcctattaatttttgttttccttttaattgtcgcttcactcccaggcaccccctcactgcagagcagagcacctgcaaaggggtgaacccgag

SEQ ID NO: 77161 - DNA, 599 bp, Chicken  19866894365307_2
  misc_feature (1)..(189): n is any nucleotide
nnnnnnnnnnnnnnnnnnnnnnnnnnnnnnnnnnnnnnnnnnnnnnnnnnnnnnnnnnnnnnnnnnnnnnnnnnnnnnnnnnnnnnnnnnnnnnnnnnnnnnnnnnnnnnnnnnnnnnnnnnnnnnnnnnnnnnnnnnnnnnnnnnnnnnnnnnnnnnnnnnnnnnnnnnnnnnnnnnnnnnnnnnnnnatcactgtagccccagcacatccagccagaagcttgatcccattcagaccagagccaacccaacactctgggcagataactggttcttgagtggttacacrgatctgtaamaccctttgagggtagcgagcactttcacagtgggaacatagcaaggatgttagcaggatgctcagtaaattaagcttcagtaaatygtagcaaagtgtgcgcaagctttacttctttctcctaaaatgtgcaaaattacagctttccagcagctgtaattccagttactgagagggcttctgaaaatgctcaagcttcctattaatttttgttttccttttaattgtcgcttcactcccaggcaccccctcactgcagagcagagcacctgcaaaggggtgaacccgagggaggccgtg

SEQ ID NO: 77162 - DNA, 599 bp, Chicken  19866894365307_3
  misc_feature (1)..(103): n is any nucleotide
nnnnnnnnnnnnnnnnnnnnnnnnnnnnnnnnnnnnnnnnnnnnnnnnnnnnnnnnnnnnnnnnnnnnnnnnnnnnnnnnnnnnnnnnnnnnnnnnnnnnnnnatcactgtagccccagcacatccagccagaagcttgatcccattcagaccagagccaacccaacactctgggcagataactggttcttgagtggttacacrgatctgtaamaccctttgagggtagcgagcactttcacagtgggaacatagcaaggatgttagcaggatgctcagtaaattaagcttcagtaaatygtagcaaagtgtgcgcaagctttacttctttctcctaaaatgtgcaaaattacagctttccagcagctgtaattccagttactgagagggcttctgaaaatgctcaagcttcctattaatttttgttttccttttaattgtcgcttcactcccaggcaccccctcactgcagagcagagcacctgcaaaggggtgaacccgagggaggccgtgctggtggttgtcagcctgcagcacatgagtggcagatgctcctgycatgggagggtgccaggcaggagggctgctcctggggctgc

SEQ ID NO: 77163 - DNA, 600 bp, Chicken  19866894365307_4
ggatgttagcaggatgctcagtaaattaagcttcagtaaatygtagcaaagtgtgcgcaagctttacttctttctcctaaaatgtgcaaaattacagctttccagcagctgtaattccagttactgagagggcttctgaaaatgctcaagcttcctattaatttttgttttccttttaattgtcgcttcactcccaggcaccccctcactgcagagcagagcacctgcaaaggggtgaacccgagggaggccgtgctggtggttgtcagcctgcagcacatgagtggcagatgctcctgycatgggagggtgccaggcaggagggctgctcctggggctgcccctctgagtcctgtttgggarccttctgaatgctgcccagctccagctggcacagaattacccgggacctaattacaacaacctggtgacacgcccagcgagaggactccctcattaaatgtgatggtctggatgctgtggctggctcagggaactcttaaacagttattgctggaaacggcaagtgcataccaggggaaagatcactccataaatgcactatttcttacattttttctccgagcatctgttattgct

SEQ ID NO: 77164 - DNA, 573 bp, Chicken  19866894365307_5
ttacttctttctcctaaaatgtgcaaaattacagctttccagcagctgtaattccagttactgagagggcttctgaaaatgctcaagcttcctattaatttttgttttccttttaattgtcgcttcactcccaggcaccccctcactgcagagcagagcacctgcaaaggggtgaacccgagggaggccgtgctggtggttgtcagcctgcagcacatgagtggcagatgctcctgycatgggagggtgccaggcaggagggctgctcctggggctgcccctctgagtcctgtttgggarccttctgaatgctgcccagctccagctggcacagaattacccgggacctaattacaacaacctggtgacacgcccagcgagaggactccctcattaaatgtgatggtctggatgctgtggctggctcagggaactcttaaacagttattgctggaaacggcaagtgcataccaggggaaagatcactccataaatgcactatttcttacattttttctccgagcatctgttattgctttctgccaaagacaggatattggatcctgagcttgg

SEQ ID NO: 77165 - DNA, 600 bp, Chicken  19866894365316_1
ccaattagcttttccctaggcaatgcccagctatagtttggcaagttttgatatgtcagtatttgttcccaatgggcagtactgataagtccagcaagatcagagaggaaaagagggtttggccattgccatggtgattatgtctcaatttatttaatttacaagtacagacagtattgtcacagccagtgttcggcagacaatagcggcacagcaataaggcctaaaaaaatcctgcaaacactttgcttaaacaaaaccatactatctgtacagtcttgcaggctcagatgtagcctrgagcttgctagagtctccagtctgaacacattctttttaattttgctttaaataataggtattacattatttgcacaagtgtaggagacctctccagctgcagatactgtctttgcagctattaccctctactttcaactactattactttgtttggggtggggtgacattttcaatttgactttttcattaattcattttacagatgttttctaagctcagactcttccctccgccttccttcagatgtcttctgcttcctagcacttccagggctgcatgaacctgacttatgctgtc

SEQ ID NO: 77166 - DNA, 516 bp, Chicken  19866894365327_1
tttattcctctcttccttcactctttctgttaatcaaaatgacttgacaagttttgcctcacattagatcgaaagctcttccgaagcgaggctctgtgcatccttgcacacgtctgtaccctgactgcagcctctgggcatggctgcagctccaatacacaatggaagaattctaaatctatattgcagctccctgctgtatcatattacatccatctattcatatatctctaagtatagaagagtaagaccactaatcctagtgcctgaaataaactgcagattattttaggataaaaytgagcagagttatgtaggaatactgacaagacttatgaaatggaattaataatttaaagaacccacacttgaatatgaaggcaaaagtccttaattaagcctgtgtgaattttaaagggaaacagctaattagcagtccctgaaacacatcatcatgtttcaaaacagaaactagttctagaaaagtagggaagttgggctttaaagcccttacta

SEQ ID NO: 77167 - DNA, 599 bp, Chicken  19866894365328_1
  misc_feature (1)..(109): n is any nucleotide
nnnnnnnnnnnnnnnnnnnnnnnnnnnnnnnnnnnnnnnnnnnnnnnnnnnnnnnnnnnnnnnnnnnnnnnnnnnnnnnnnnnnnnnnnnnnnnnnnnnnnnnnnnnnncatttccattatccatctcagactactgctacttaaatgatcagctttttcacaggtagcccataacctttgtgctacaagaaagaagttacttaaaatagcgtaagaccaaaaaatttgatcaacgtacttatatcttttttcaaggctacacagtccatggctccacatcttacagcccattgctaaayatacactttcagtgttcaatgccacaaaaaaaaaaaaaaaaacaccacaacgtgattatttactcaagagtttttattaaatttgaattaaaccatagccagaaaagaatggctaatagcatttacttgcctccaacagaaartaagccctgttaatttgctgttaatttaaaggacagccttgttgctttgctgtgagaatcctaaataaggaagtgtttcttctcacctatgttctcttccccataagttgtatcgtacctgtaccgggattttggatcaagagcctgtgtttmtat

SEQ ID NO: 77168 - DNA, 600 bp, Chicken  19866894365328_2
aaatgatcagctttttcacaggtagcccataacctttgtgctacaagaaagaagttacttaaaatagcgtaagaccaaaaaatttgatcaacgtacttatatcttttttcaaggctacacagtccatggctccacatcttacagcccattgctaaayatacactttcagtgttcaatgccacaaaaaaaaaaaaaaaaacaccacaacgtgattatttactcaagagtttttattaaatttgaattaaaccatagccagaaaagaatggctaatagcatttacttgcctccaacagaaartaagccctgttaatttgctgttaatttaaaggacagccttgttgctttgctgtgagaatcctaaataaggaagtgtttcttctcacctatgttctcttccccataagttgtatcgtacctgtaccgggattttggatcaagagcctgtgtttmtatctagtgcctaaactgttttcttacagttaatgaaacagaggagttctacatcacaaggtcatctaagttctccttctcacctgccrcttcagttggagtctgggcagaacccaatttataagaacatacttaacacaaatgaaa

SEQ ID NO: 77169 - DNA, 600 bp, Chicken  19866894365328_3
aaayatacactttcagtgttcaatgccacaaaaaaaaaaaaaaaaacaccacaacgtgattatttactcaagagtttttattaaatttgaattaaaccatagccagaaaagaatggctaatagcatttacttgcctccaacagaaartaagccctgttaatttgctgttaatttaaaggacagccttgttgctttgctgtgagaatcctaaataaggaagtgtttcttctcacctatgttctcttccccataagttgtatcgtacctgtaccgggattttggatcaagagcctgtgtttmtatctagtgcctaaactgttttcttacagttaatgaaacagaggagttctacatcacaaggtcatctaagttctccttctcacctgccrcttcagttggagtctgggcagaacccaatttataagaacatacttaacacaaatgaaagcacttttggcatcagaaattacaccatagttacatttattcagtattttcatcatagataaaaggctattcattacctacttccaaagtacaattatttccaaatgctattaaatatcattttacagcataagctttatgctttatcagcct

SEQ ID NO: 77170 - DNA, 600 bp, Chicken  19866894365328_4
aattaaaccatagccagaaaagaatggctaatagcatttacttgcctccaacagaaartaagccctgttaatttgctgttaatttaaaggacagccttgttgctttgctgtgagaatcctaaataaggaagtgtttcttctcacctatgttctcttccccataagttgtatcgtacctgtaccgggattttggatcaagagcctgtgtttmtatctagtgcctaaactgttttcttacagttaatgaaacagaggagttctacatcacaaggtcatctaagttctccttctcacctgccrcttcagttggagtctgggcagaacccaatttataagaacatacttaacacaaatgaaagcacttttggcatcagaaattacaccatagttacatttattcagtattttcatcatagataaaaggctattcattacctacttccaaagtacaattatttccaaatgctattaaatatcattttacagcataagctttatgctttatcagcctctgaaatagtgcctctcattatcacctacagaaaagaagtacttaaagtactgatctaaaaacaaacaaaatgggaatccaataatgtg

SEQ ID NO: 77171 - DNA, 600 bp, Chicken  19866894365329_1
cacaattaattatttcagagaactcttgatactaactacaggtctagaaatctttattactgagatagagcacatttttcaatctgacagtgggatacatacaagcacagaagtagccttctgctgagacagatgttgtgcctgcccctgcttatcagtgctcaaaaaacaacctaaaaccaatataaaacttcaccaatagaagtgcagcatttttacccagttagcatctatcaataaatcagtgcagattttggtctccttaacgttcacttatgatgacttctgctacatttgcargctcaatggtctgtggcggtttcactctccaagtttcttagcaccatccatccatagataaaactccatatacttaaagaacattaatctacaagcttgaagaccaagatatatctgtttactcccacaagcattctcccatttccttctcctttaaacatactattttctgcttaggagaagaaaaacattcctgtcttcccttggtcacagcactgcctctaaatcgacagagagcatctgtaacctctactaggacaagcttcgtttatccagttaaataactcataaatattagtc

SEQ ID NO: 77172 - DNA, 600 bp, Chicken  19866894365342_1
tcatacacttttcttctctgaaccttggaagagtgagagaggcagcctgggagagtgaaaatgccggggcagattgagattgcatgggaagtgtgaaaggacagggacaacactctaaaagaatcacagctaccagacaattaacttccaggcttcctggaggtggtctttgcatagacattttttaattccctctccagctgtactcaatcttaacagctttgcagtcacactttttcctcaggtcaaagtcactctatgcagtatttttccgtcatggtgtgcaaggacctgcctgtycttctgatggactcattacatgagagaagtctcaccactgatgttgtgggtaagcccctcacctcacctccccttaccaggctggcttcttcccacttccccatgcagaaggaagagaaagctgctcctctgtagccagcatccctgggggctgctcctctctccctggatgagtgtatctacatagaaggaacaaacctgaacactgccttgagtcagggcctatcttgtcattaatgcaatgctgaatgtgacttgcattttttcctcttaaaagagacaagaaatgcattcagaaac

SEQ ID NO: 77173 - DNA, 600 bp, Chicken  19866894365347_1
tagtacttcttgaacaaatgtccttaagatccaggtggcatacctgggtaattgctttggttccaggagctgtggctccacagagggtaattcccaacaaagttgtcacagaggaaaacgctctctgacgtttaacaacagtactgcgaataaaaattggatgtcattaatacatgattcctagctgtgattttgtctgagaaaagtaatttctctatgaactacactgaagtgaatacttacacagttctgttcccacctcctgatcactctgcttcccgggcaccaggaggagttcaygcacacgtgctcatccaagcagcagatctgtcccaggagcagggggcaagctgagacaggtgcaaaagggatgggagcattttgctcctgctgctggaggagggcgctgccactggtatrccttccataaggccttatggataaagatgcaacaggccccatcgatcacagctaaaggaaatactgaaagagcatcaagtgagaactatgcagctttatccagggatatgctcttacaattgtccatcctacactgygttgctgatcgctgagtgctatacaagcagcttaactgcrgca

SEQ ID NO: 77174 - DNA, 600 bp, Chicken  19866894365347_2
ctctctgacgtttaacaacagtactgcgaataaaaattggatgtcattaatacatgattcctagctgtgattttgtctgagaaaagtaatttctctatgaactacactgaagtgaatacttacacagttctgttcccacctcctgatcactctgcttcccgggcaccaggaggagttcaygcacacgtgctcatccaagcagcagatctgtcccaggagcagggggcaagctgagacaggtgcaaaagggatgggagcattttgctcctgctgctggaggagggcgctgccactggtatrccttccataaggccttatggataaagatgcaacaggccccatcgatcacagctaaaggaaatactgaaagagcatcaagtgagaactatgcagctttatccagggatatgctcttacaattgtccatcctacactgygttgctgatcgctgagtgctatacaagcagcttaactgcrgcaatacagatatagaacgaaatcatagataatcatcagaaaaaaacctgagcttttgccaaaaagcaaaatatacaaggtgagatgttgaggtgtctcacacgaggacaaaaggtgtgcagt

SEQ ID NO: 77175 - DNA, 600 bp, Chicken  19866894365347_3
acctcctgatcactctgcttcccgggcaccaggaggagttcaygcacacgtgctcatccaagcagcagatctgtcccaggagcagggggcaagctgagacaggtgcaaaagggatgggagcattttgctcctgctgctggaggagggcgctgccactggtatrccttccataaggccttatggataaagatgcaacaggccccatcgatcacagctaaaggaaatactgaaagagcatcaagtgagaactatgcagctttatccagggatatgctcttacaattgtccatcctacactgygttgctgatcgctgagtgctatacaagcagcttaactgcrgcaatacagatatagaacgaaatcatagataatcatcagaaaaaaacctgagcttttgccaaaaagcaaaatatacaaggtgagatgttgaggtgtctcacacgaggacaaaaggtgtgcagtttccaagatgtcagaacattcctcgagttctattaagtcccagcattaatagcatatacttcaagtattacggccagttatggatgaactttcctgaaaacaaatcctgctatgtgttaccatccggattacttcta

SEQ ID NO: 77176 - DNA, 600 bp, Chicken  19866894365347_4
caygcacacgtgctcatccaagcagcagatctgtcccaggagcagggggcaagctgagacaggtgcaaaagggatgggagcattttgctcctgctgctggaggagggcgctgccactggtatrccttccataaggccttatggataaagatgcaacaggccccatcgatcacagctaaaggaaatactgaaagagcatcaagtgagaactatgcagctttatccagggatatgctcttacaattgtccatcctacactgygttgctgatcgctgagtgctatacaagcagcttaactgcrgcaatacagatatagaacgaaatcatagataatcatcagaaaaaaacctgagcttttgccaaaaagcaaaatatacaaggtgagatgttgaggtgtctcacacgaggacaaaaggtgtgcagtttccaagatgtcagaacattcctcgagttctattaagtcccagcattaatagcatatacttcaagtattacggccagttatggatgaactttcctgaaaacaaatcctgctatgtgttaccatccggattacttctacgtgcacgcaacgttcttaaccaagcagagacctacagcg

SEQ ID NO: 77177 - DNA, 600 bp, Chicken  19866894365360_1
atcagagcaatgcaactagcttactaacgaaaacaccattctctggtttgaaacaaaaataggtgttacaggttgcttggagggagtcctgcaatatgtaagaataaatcaacaccaacagaaaagcgtgtgcccgaagacagcagttttttgagcccaaccctaggagatacggcagaacttgtgcttctgcttatcatctgatgaccaggagtttcttcaaaagcacttctaacaaaataagaggagttctgctatttgagtttctgctgctagaacttttcaaaaccaacacgtggrcacacaggcaagtgggaattcattcagttttgcttagacagacagtttctactaaaatccctcaaagtacagagagcagagtgagagggtgctatccaatccatggtgagagcaggatcagaagtaaagatctgctgtaactgaagtttgttattacacagtggttttactaaaaatattgcccacagactggaggaaccgttctttatgacaaactgaacagcagtagttgccatctgcttgaaagagctctatgctttctttcacccgcttatcactgtgcaaagccaggcacccacc

SEQ ID NO: 77178 - DNA, 600 bp, Chicken  19866894365365_1
acatccatccacgcggcacattcaaacacccccagttggtatcaactgtctgaccgtggtatttgtaggacccttcagtggggttggtgggtgtttcacagagcaagaggagcatctgtctctatcagcctttgaagaaagcgcctagccctgccattaattagctgcagctcaccttgcttgctcacaggtaccagcaggaagcagcgagctgtcagcagattaataaagccagatagtctgagtacagccttggatgtctggacagttccctaccactgggtatttctacacagagcrgtctgcagagttgttgccagacaccacgctcctctgtctgatggctcgctgacagtgctgctcttgaccaatgcaaagggaaaaggcactgaagtaatacagtgttttccctgagtcaacttcaaagaacatacaaaagtaggaaaagccttcagacatcacgttttagttgcaaaacctctccctgttttcacatatgcttatataggtgttttgatgctctatttgttctctcaataatcctttttttttttttctgaacaaaacccagcttttctgagtagctttcccatcatgaac

SEQ ID NO: 77179 - DNA, 600 bp, Chicken  19866894365368_1
ggggcacagcctgcccacgtccggaagtggcacaactgctgtcccctgggaaaggacacgcgtcccaaagacaacaagatggggatattactggttgcttttgggtttgcctggaagggacgggggaagagtcccagcagctgcccaccaccacacacatcagagctgctgggaaccaccaacgctgagcatcctgtttgcagaagcacagagctggctgggaaggcgacctcaaggacaggctgaaccctcgccagatttcttctgggcacaagctgggagataacagctttttctaakcttctcacactacataattcccctttgtgtgggtcactgagctgggctggttctggcctattcatgatgcatgctgtgtggaatacgcttgagcatcgatgagcaagatgcagcctccttgtgctcagatcatagcaggagagaaggtgccaaaacttagagtttggtcatttgtgatggaagggccagcagaaagccatcgctgctctcttatcttgggaattccaaggggacaagcatgcaaagcactgtcagtggggccacagcacatcccatgcaacgacaccctggtcgggtgat

SEQ ID NO: 77180 - DNA, 600 bp, Chicken  19866894365370_1
accagcccagcatcaagtctgctggagtcgtggtgtggtggaacaagcttctgggcttatttcagccagtttcagttaccatttgtgatgagagccagtgactgggttaggggagtgacaaaccttcaaaaatgcaataaattgtcattacttgccaacgtccaaatcttcccccctggttttattcagtttttattcctgctgtagagtggactttgtgtttccaattcaaggctgcctgtgcgagtgtttcaaaccagcctggcatctgcagaacgataattggcacagcctcacttyagtgctgtaaaatgggttgtgctgttttttgttgtgcttttttttttttttttttctccacaggataattatattgatcgtggcttagaagttcagaaattggtttgtgcttgcataaagcttactgcatctaactctcagagaagctctattgtacagtaaaaaccttccctgtgagactgtaagaccaccactgtcttatctggcactcccaatttgatacaaattcagatattttcagcccactgtctgcttaggaagatggaagctgccactgcatcttggcccctttccctcttt

SEQ ID NO: 77181 - DNA, 600 bp, Chicken  19866894365382_1
tcacagaagtgcaaggtgaacgtggcttgtgcagaccctgcatccaattggtgtttgacctcagctgtctgttcatttacagcaatctctacttaaaagtcagtgcttactgtgaaatgattcaaagcaccatagcgtgaggaaaacaatgacagctgggcaaagtttgctctgcacagtaaatgtcacatatcggctgcttctttctttcttttttttataatgcctccgttacatttcttgcatacattgctttccatgctcaatttgttgatatttagcttagacccctttcccccrcttctagtgcaagacacatagaaacwmacagggtcagtccaggtttttaaggatgctaaaagctagccagataccaagttctgctgcgtagttatgaatttctatctttgcttactctgctccaagggaaataattgaaattgctatgtgtaaaccttcatctgagataaatcaaagctcctctactgagtggggtatagcagagtcttaatttcactgagagcttgagcctttggattcattgatgtatatttttgtaggctcttggaacaataataaatccctggaagctaagatgtc

SEQ ID NO: 77182 - DNA, 600 bp, Chicken  19866894365382_2
ttgtgcagaccctgcatccaattggtgtttgacctcagctgtctgttcatttacagcaatctctacttaaaagtcagtgcttactgtgaaatgattcaaagcaccatagcgtgaggaaaacaatgacagctgggcaaagtttgctctgcacagtaaatgtcacatatcggctgcttctttctttcttttttttataatgcctccgttacatttcttgcatacattgctttccatgctcaatttgttgatatttagcttagacccctttcccccrcttctagtgcaagacacatagaaacwmacagggtcagtccaggtttttaaggatgctaaaagctagccagataccaagttctgctgcgtagttatgaatttctatctttgcttactctgctccaagggaaataattgaaattgctatgtgtaaaccttcatctgagataaatcaaagctcctctactgagtggggtatagcagagtcttaatttcactgagagcttgagcctttggattcattgatgtatatttttgtaggctcttggaacaataataaatccctggaagctaagatgtcacgtacaaatgcatcagctgcagttc

SEQ ID NO: 77183 - DNA, 600 bp, Chicken  19866894365382_3
tgtgcagaccctgcatccaattggtgtttgacctcagctgtctgttcatttacagcaatctctacttaaaagtcagtgcttactgtgaaatgattcaaagcaccatagcgtgaggaaaacaatgacagctgggcaaagtttgctctgcacagtaaatgtcacatatcggctgcttctttctttcttttttttataatgcctccgttacatttcttgcatacattgctttccatgctcaatttgttgatatttagcttagacccctttcccccrcttctagtgcaagacacatagaaacwmacagggtcagtccaggtttttaaggatgctaaaagctagccagataccaagttctgctgcgtagttatgaatttctatctttgcttactctgctccaagggaaataattgaaattgctatgtgtaaaccttcatctgagataaatcaaagctcctctactgagtggggtatagcagagtcttaatttcactgagagcttgagcctttggattcattgatgtatatttttgtaggctcttggaacaataataaatccctggaagctaagatgtcacgtacaaatgcatcagctgcagttcc

SEQ ID NO: 77184 - DNA, 600 bp, Chicken  19866894365399_1
ctgttctgctgcacgtaagcttacgtggagggcatcacttctcccagagagctcccaaaatcaggttatcctggccagggtcactcaattgtctaggagtcctgtgggtctggagagcatgcaacccttggggacacccttgggctacactggcactgtgcactaagcaccctcaaggatggaggtgcattgggagcaccgcggtgcacaagggttaatggagctgggttgctctctaaatgtgaaaataggcttttcctgctggcagtgtggggtctgtggagtgacacgcatcgtgcyggggatgctcagagctgacgagataacctcaggagtaaagatggatttttaatgcatttattattgtcagatatcttcagtaaccttcccagcacggtcatgggttttaagataaaattccaaagtaaaggagagcatctttgctgagcaggctggttaaacagcagtgctgcctgcagccccctaccccttctcctgatggggctttgatcacctctcacacagccatggctgtttccactgtgccaggatgaaaggatayggccccacagggggatgtggccctttgggtgatccctg

SEQ ID NO: 77185 - DNA, 600 bp, Chicken  19866894365399_2
tggcagtgtggggtctgtggagtgacacgcatcgtgcyggggatgctcagagctgacgagataacctcaggagtaaagatggatttttaatgcatttattattgtcagatatcttcagtaaccttcccagcacggtcatgggttttaagataaaattccaaagtaaaggagagcatctttgctgagcaggctggttaaacagcagtgctgcctgcagccccctaccccttctcctgatggggctttgatcacctctcacacagccatggctgtttccactgtgccaggatgaaaggatayggccccacagggggatgtggccctttgggtgatccctgtgcagccccagcccatacttcagtacagccccgtgcctgggggcttctgtgcaaccagagagcagctgggtaccaatcccatccagccatccacatgtagaataggacagaacacaatagcagggtaccactgccatccatccacatgcacgtagggtaggacagagcgtgacaactgagtgccaatctcatccatccctccaaatccacacatacagcataggatggaataggatagctgagtacccatccataggaatat

SEQ ID NO: 77186 - DNA, 599 bp, Chicken  19866894365402_1
  misc_feature (1)..(140): n is any nucleotide
nnnnnnnnnnnnnnnnnnnnnnnnnnnnnnnnnnnnnnnnnnnnnnnnnnnnnnnnnnnnnnnnnnnnnnnnnnnnnnnnnnnnnnnnnnnnnnnnnnnnnnnnnnnnnnnnnnnnnnnnnnnnnnnnnnnnnnnnnnnnccctctgtagtaacataatacataatctgtggtcaagggaaattacagaatgaccagtagaaaaagtcactgtttttaatgcattcagggtaataaaatgcaaacgttaaacagaaagaaaaggtggaacaaaacccgtattaaatgtttcttcaagatyagttaaacagaaaagataaatgtacaaattttaaactgagacagcataaaagactgcagtacctgtactcaaagtagcagtcgctctctagaaatgctggaagtctttccttcttaatccactgtactgcttgttctcgatcaagacactattaaaaaagaaataccaaaaagttgcagtagttgtgacttttttggtttgctttccktgtaaacaattctctccaatcttctctccaatccttctaaggcattaaggagaactattatacaatgaacatcacctttgctatccagctt

SEQ ID NO: 77187 - DNA, 600 bp, Chicken  19866894365402_2
actgtttttaatgcattcagggtaataaaatgcaaacgttaaacagaaagaaaaggtggaacaaaacccgtattaaatgtttcttcaagatyagttaaacagaaaagataaatgtacaaattttaaactgagacagcataaaagactgcagtacctgtactcaaagtagcagtcgctctctagaaatgctggaagtctttccttcttaatccactgtactgcttgttctcgatcaagacactattaaaaaagaaataccaaaaagttgcagtagttgtgacttttttggtttgctttccktgtaaacaattctctccaatcttctctccaatccttctaaggcattaaggagaactattatacaatgaacatcacctttgctatccagcttaaccttagtgctaggacagctgagtttcttcagtttgttgctaacaggtaatgatgtctaaatctatttcttctataagagtgcaactttttaaacaaaccatggcttcttcaaaaattatatatgtatgaatcatgcttttattatacaattccaatgcaaattagatgctcataaatggtccrcaaataggaaaatgcttatttctc

SEQ ID NO: 77188 - DNA, 600 bp, Chicken  19866894365402_3
gtgacttttttggtttgctttccktgtaaacaattctctccaatcttctctccaatccttctaaggcattaaggagaactattatacaatgaacatcacctttgctatccagcttaaccttagtgctaggacagctgagtttcttcagtttgttgctaacaggtaatgatgtctaaatctatttcttctataagagtgcaactttttaaacaaaccatggcttcttcaaaaattatatatgtatgaatcatgcttttattatacaattccaatgcaaattagatgctcataaatggtccrcaaataggaaaatgcttatttctctgacttgaacaccatctataagcagtgactattacattttccctcaatgatttgaggaataaggaagccctatcttaaattataatcccaagatgggagaactctggatatcaaaaacaaaatcaaacatttttaatgcctatcagttgtgatctttcacatttctatgttttatgttggagtattgcataattcagctggagatggcaacggttctaagtgcaaatagaatcaggcccataatagatcttagctcaggtggtccaagtgtcaatg

SEQ ID NO: 77189 - DNA, 600 bp, Chicken  19866894365405_1
ggtctgttcagcacggggaaaagaagactgaggagggtctgataaatgtttataaatatctaaatagaggtgagaggcaaatggctgaggccaggttctttttggtggtgtgtagtgacaggaaaaggagtaaaggcttataagttgaacataggaagttccatacaaatattcggaagaacttatttatggtaagggtgggggagcactagaacaggttgtccagagagggtgtggagtctccttctctggagatactcaagatctggcaggatgcctacctgtgtgacctattgtagsgtacctgctttagcaggcgggttgaactcaatgttctcttgaggtcccttccaacccccacaattctgtgattctatgtgtaatatacagtgatcaaaaacattaagatactgtaaagccagtaattaccaacgctagaatacagcacggatcaatgctaggtattttatgtttttggaatcaagccttctctctcagcatgtggtaagtaacaactacagtaaaacatatcttgaaaagctaggctgaaaaaaagtaatattgaggcacaaaaaaagccctgtgatatctagaaaaaca

SEQ ID NO: 77190 - DNA, 600 bp, Chicken  19866894365405_2
tggagatactcaagatctggcaggatgcctacctgtgtgacctattgtagsgtacctgctttagcaggcgggttgaactcaatgttctcttgaggtcccttccaacccccacaattctgtgattctatgtgtaatatacagtgatcaaaaacattaagatactgtaaagccagtaattaccaacgctagaatacagcacggatcaatgctaggtattttatgtttttggaatcaagccttctctctcagcatgtggtaagtaacaactacagtaaaacatatcttgaaaagctaggctgsaaaaaagtaatattgaggcacaaaaaaagccctgtgatatctagaaaaacaaccatttttaataatgattagccctttaaattagaaatggactgagaggctgggactccatgtggggtttgtgaaaccaggtgcagtttcacttcatgttctactttattcaagccactgaagctcagggacacagacttgcatttgtgtcctccctcttaaaacattaaaacaaaggccattgggcacaataaaggaaacctattctatttaaacattaatacagtaattatgagattttttgtcttg

SEQ ID NO: 77191 - DNA, 599 bp, Chicken  19866894365414_1
  misc_feature (1)..(117): n is any nucleotide
nnnnnnnnnnnnnnnnnnnnnnnnnnnnnnnnnnnnnnnnnnnnnnnnnnnnnnnnnnnnnnnnnnnnnnnnnnnnnnnnnnnnnnnnnnnnnnnnnnnnnnnnnnnnnnnnnnnnngagtcctggtggatgataggttggccatgagccagcagtgtgccctggtggccaagaaggccattgggattgtggggttcattaaaaggagtatggccagcaagtcaatggaggtgatcctccccctctactctcccccactcaggcctcacttggagtactgtatccagttctgagctcccygatacaaaaaagacagggatctcctggagagaattcagcagagggccacaaaggtgaaaaagggactggagcatctcccctatgaggagaggctgggtgacctgggtctgttcagccttgagaaaagaagattcaaaggtgatcttattaatatttataaatatcttaaatgtgsgagtcaaagggacatggtcagcctcttttcagcratctctggggacagaacaaggggaaacggccataaactgcaacacaggaagttctgcaccgatatgcaaaggcacttcttcacagtgagg

SEQ ID NO: 77192 - DNA, 600 bp, Chicken  19866894365414_2
ggccattgggattgtggggttcattaaaaggagtatggccagcaagtcaatggaggtgatcctccccctctactctcccccactcaggcctcacttggagtactgtatccagttctgagctcccygatacaaaaaagacagggatctcctggagagaattcagcagagggccacaaaggtgaaaaagggactggagcatctcccctatgaggagaggctgggtgacctgggtctgttcagccttgagaaaagaagattcaaaggtgatcttattaatatttataaatatcttaaatgtgsgagtcaaagggacatggtcagcctcttttcagcratctctggggacagaacaaggggaaacggccataaactgcaacacaggaagttctgcaccgatatgcaaaggcacttcttcacagtgagggtgatggagcactggaacaggctgcccaggggggttgtggattctccttctctggagatattcaaaactcacctggatgcctacctgtgcagcctgctgtagggagcgtgctatggcagggggttggacatggtgatctctagagctcccttccagcccctacaattctgggattc

SEQ ID NO: 77193 - DNA, 589 bp, Chicken  19866894365414_3
atggccagcaagtcaatggaggtgatcctccccctctactctcccccactcaggcctcacttggagtactgtatccagttctgagctcccygatacaaaaaagacagggatctcctggagagaattcagcagagggccacaaaggtgaaaaagggactggagcatctcccctatgaggagaggctgggtgacctgggtctgttcagccttgagaaaagaagattcaaaggtgatcttattaatatttataaatatcttaaatgtgsgagtcaaagggacatggtcagcctcttttcagcratctctggggacagaacaaggggaaacggccataaactgcaacacaggaagttctgcaccgatatgcaaaggcacttcttcacagtgagggtgatggagcactggaacaggctgcccaggggggttgtggattctccttctctggagatattcaaaactcacctggatgcctacctgtgcagcctgctgtagggagcgtgctatggcagggggttggacatggtgatctctagagctcccttccagcccctacaattctgggattctgggattctatgtcttcctgggt

SEQ ID NO: 77194 - DNA, 600 bp, Chicken  19866894365415_1
gcaaagttttcctccctgaactgttatcgtagcctccaaaattcctgtattgctgtagagcctccaaagttcctgtattgctgtagagcctccaaagttcctgtgtgctcaagtcagtacagatttggatctgacctcgggcagaggaagaatttaaattctgtggctgcttcccaggtgagcgatccaatcactcatacgcactggtgctatcattgccacagagcaaccatttcggacagtctttacagacagctccagaatttagggaatggtaatccccgaggattagccccagaycgggccaggtaattgctagaacgcgcctgataaaaatggctgtcgtttcatcccgacctggcacttgtctgacccggcattttctgaaccaagccgggatatttgtggagagcagccacgagctgccgcctctccacaggcgtccgggcccggcactgcgcccctcagcgacaccaccagatggcggcagccgccggccaggccgtgccgggcatggctgagagcgaggcaggagccgcccgtcgtgctgtcgctcgaggcctggaggtgcgttctggggctgcctgtggagcgcccgcc

SEQ ID NO: 77195 - DNA, 599 bp, Chicken  19866894365418_1
  misc_feature (1)..(9): n is any nucleotide
nnnnnnnnnttgtatgctttgtccaggaagttttgcttttgcagaatatgtcacaagttgcctcttatcatgggaaaatagaggacatgtctggcttagaccctgattgtgctttaagaatttaatgtggtgtagataaaagctgctgcattcatctgctgtcacatgctattgcattaacacacctacacagggattatgataaacatcaacaacgctgtcatcgctatgcctttcttacccataattcctcaccaactaatggtaaagatattcttaaagtgacctagaaaatgctgyctctctcccacagcaaataaaaccatgctaaayattctcaaatatcattatgataaaaagggaagggagaatttaatgcatgagcttgtaaaatatgcagcagtttcgcaaggctgtttgaaaagtgaagatgatcagcgtgtgaggccacattagatgtgcatctgtaatcgttggtttgtatctactatgctgctgtgtgtccaccacccttcagtaatcgaacaggacaagcrtgctgtgaaactcgtggattaaaccttactgattgcactcctcctttttaggaagaaaatgga

SEQ ID NO: 77196 - DNA, 600 bp, Chicken  19866894365418_2
tgcttttgcagaatatgtcacaagttgcctcttatcatgggaaaatagaggacatgtctggcttagaccctgattgtgctttaagaatttaatgtggtgtagataaaagctgctgcattcatctgctgtcacatgctattgcattaacacacctacacagggattatgataaacatcaacaacgctgtcatcgctatgcctttcttacccataattcctcaccaactaatggtaaagatattcttaaagtgacctagaaaatgctgyctctctcccacagcaaataaaaccatgctaaayattctcaaatatcattatgataaaaagggaagggagaatttaatgcatgagcttgtaaaatatgcagcagtttcgcaaggctgtttgaaaagtgaagatgatcagcgtgtgaggccacattagatgtgcatctgtaatcgttggtttgtatctactatgctgctgtgtgtccaccacccttcagtaatcgaacaggacaagcrtgctgtgaaactcgtggattaaaccttactgattgcactcctcctttttaggaagaaaatggatcctctttacctgttctcttgttcctgtgaacaa

SEQ ID NO: 77197 - DNA, 600 bp, Chicken  19866894365418_3
cttacccataattcctcaccaactaatggtaaagatattcttaaagtgacctagaaaatgctgyctctctcccacagcaaataaaaccatgctaaayattctcaaatatcattatgataaaaagggaagggagaatttaatgcatgagcttgtaaaatatgcagcagtttcgcaaggctgtttgaaaagtgaagatgatcagcgtgtgaggccacattagatgtgcatctgtaatcgttggtttgtatctactatgctgctgtgtgtccaccacccttcagtaatcgaacaggacaagcrtgctgtgaaactcgtggattaaaccttactgattgcactcctcctttttaggaagaaaatggatcctctttacctgttctcttgttcctgtgaacaaatatgtttaacagtctattcaccagtgatgaactgtattgaaatatcaatatgattgatagatacatacatacattctgtgaataaaatgcaaataaatgtaaatgattttgttctttgaagagaacgaggggctaaattcaatatcacatctttgcttggatttcagtrttgtgtacaatacctttgctgggaagtttgctg

SEQ ID NO: 77198 - DNA, 600 bp, Chicken  19866894365418_4
ccaccacccttcagtaatcgaacaggacaagcrtgctgtgaaactcgtggattaaaccttactgattgcactcctcctttttaggaagaaaatggatcctctttacctgttctcttgttcctgtgaacaaatatgtttaacagtctattcaccagtgatgaactgtattgaaatatcaatatgattgatagatacatacatacattctgtgaataaaatgcaaataaatgtaaatgattttgttctttgaagagaacgaggggctaaattcaatatcacatctttgcttggatttcagtrttgtgtacaatacctttgctgggaagtttgctggaacaagagctttatttgtcccagtgagcatacagcatccagagtcaataaggcaccagttctgaccaaaacctttttgcaytaacataattaattcatctggaaaatactgcatattttcagtctgttactccatgtctttgctcagctgttattttgcatattgatttttgcctacctgtctctgcctttgtcccargatgctttgcagcggcgccgtttcttgaacttagaagagttggcatgtttcatgctgttgtccatatt

SEQ ID NO: 77199 - DNA, 600 bp, Chicken  19866894365418_5
tgttcctgtgaacaaatatgtttaacagtctattcaccagtgatgaactgtattgaaatatcaatatgattgatagatacatacatacattctgtgaataaaatgcaaataaatgtaaatgattttgttctttgaagagaacgaggggctaaattcaatatcacatctttgcttggatttcagtrttgtgtacaatacctttgctgggaagtttgctggaacaagagctttatttgtcccagtgagcatacagcatccagagtcaataaggcaccagttctgaccaaaacctttttgcaytaacataattaattcatctggaaaatactgcatattttcagtctgttactccatgtctttgctcagctgttattttgcatattgatttttgcctacctgtctctgcctttgtcccargatgctttgcagcggcgccgtttcttgaacttagaagagttggcatgtttcatgctgttgtccatatttcagcagaggcagaagtcactaccgtatgtggttcatggagtgctttgggatccttcaggatgagaggtgtgatataaacataagataccattcattccattttttccccagtgc

SEQ ID NO: 77200 - DNA, 568 bp, Chicken  19866894365418_6
aatgattttgttctttgaagagaacgaggggctaaattcaatatcacatctttgcttggatttcagtrttgtgtacaatacctttgctgggaagtttgctggaacaagagctttatttgtcccagtgagcatacagcatccagagtcaataaggcaccagttctgaccaaaacctttttgcaytaacataattaattcatctggaaaatactgcatattttcagtctgttactccatgtctttgctcagctgttattttgcatattgatttttgcctacctgtctctgcctttgtcccargatgctttgcagcggcgccgtttcttgaacttagaagagttggcatgtttcatgctgttgtccatatttcagcagaggcagaagtcactaccgtatgtggttcatggagtgctttgggatccttcaggatgagaggtgtgatataaacataagataccattcattccattttttccccagtgcacacagtgctaataggttttgctttcatctggagctcccctggctaaattgtgaaacatctcagtgatgccatgaacgtttgctg

SEQ ID NO: 77201 - DNA, 599 bp, Chicken  19866894365428_1
  misc_feature (1)..(103): n is any nucleotide
nnnnnnnnnnnnnnnnnnnnnnnnnnnnnnnnnnnnnnnnnnnnnnnnnnnnnnnnnnnnnnnnnnnnnnnnnnnnnnnnnnnnnnnnnnnnnnnnnnnnnnntatattgctttgtttcattgtcctcgtcttaacagctcttcagctcaggtttagctgtgaccctaaaactgaaagtgccgacgtggagggctgaaaatcccctttgaggctctgtgcagcaaggagccggtccctgttcatgtccttttggtggtgcagcagttgctgtagccctgtggggatgaggaggaaagcaraggggtttgtgtggccccaggtgagcattgctgagccctgcagctcgctgccagtggtactgtgctgtctgtgggactgccctggcagtggtctgctacttccaggagagccttatcttatatggagcaaagccactgaggtgggaatgggttgaaatcactcactggctcttccaaacgaacatgtcttgtttggttctcttccctttctctgctaacctgctgcggtaggacaagaagctaagggccagagtctgcatctggagggctgtcttacaggagaagtagattttaaattg

SEQ ID NO: 77202 - DNA, 600 bp, Chicken  19866894365428_2
aggggtttgtgtggccccaggtgagcattgctgagccctgcagctcgctgccagtggtactgtgctgtctgtgggactgccctggcagtggtctgctacttccaggagagccttatcttatatggagcaaagccactgaggtgggaatgggttgaaatcactcactggctcttccaaacgaacatgtcttgtttggttctcttccctttctctgctaacctgctgcggtaggacaagaagctaagggccagagtctgcatctggagggctgtcttacaggagaagtagattttaaattgyrtgtacatcatgattgcctttgtcattctgtactatacggtcccaagtcttgggggtagaaatagatctgtagcaactcattgagaagctgatggtgacagtctcctctgtggcacctgttgttacaaggtactggtctgtcaatgccctgtccagctgtactgacatattaccctgaaaaagtaatgaatgataggtggaaaggcttccttagcagctctggttttgtgtgaaatcgagcaacgtgtttaaaacttgaaaatagcactgtcgtggtgtgagctgtaattagcaaatgga

SEQ ID NO: 77203 - DNA, 600 bp, Chicken  19866894365428_3
ggggtttgtgtggccccaggtgagcattgctgagccctgcagctcgctgccagtggtactgtgctgtctgtgggactgccctggcagtggtctgctacttccaggagagccttatcttatatggagcaaagccactgaggtgggaatgggttgaaatcactcactggctcttccaaacgaacatgtcttgtttggttctcttccctttctctgctaacctgctgcggtaggacaagaagctaagggccagagtctgcatctggagggctgtcttacaggagaagtagattttaaattgyrtgtacatcatgattgcctttgtcattctgtactatacggtcccaagtcttgggggtagaaatagatctgtagcaactcattgagaagctgatggtgacagtctcctctgtggcacctgttgttacaaggtactggtctgtcaatgccctgtccagctgtactgacatattaccctgaaaaagtaatgaatgataggtggaaaggcttccttagcagctctggttttgtgtgaaatcgagcaacgtgtttaaaacttgaaaatagcactgtcgtggtgtgagctgtaattagcaaatggaa

SEQ ID NO: 77204 - DNA, 600 bp, Chicken  19866894365429_1
cagctctgagtgaacatccagcgtaagggaaggaatgcccttgggtgatgtccatcccctccctgttgactacatgagatgacaagcttgaatttgacgacttactaaaagagacgaaccccacttgatgtgggaggaggcctggggtttctgttgctgacctcacagatgatagtggtttgggcaaacatctgggagggaatctttctatttttagcatccacgaggcctgagtatttggggacccacctcactgtcctcacgcaggagaaatgttgcaggtcccttgtcccaaggagrtgcactgagtagctacggtgagatacggggatttgctcttacctctctctgctggtggagaaagctcaataaagctacggcatttctcctctgaaacataaaaacaaggatattagcttgttaaacagtgtagggtaaggtaaaagaatacttctccctccctctctcttcactgcacagccacagtcatttgaaactacctmccagatcttctcacttctgatctcttcctgaccatccttccataccctcattggggcatggtaggagaaggcaatctgtggggaaaactaggggtgg

SEQ ID NO: 77205 - DNA, 600 bp, Chicken  19866894365429_2
ctttctatttttagcatccacgaggcctgagtatttggggacccacctcactgtcctcacgcaggagaaatgttgcaggtcccttgtcccaaggagrtgcactgagtagctacggtgagatacggggatttgctcttacctctctctgctggtggagaaagctcaataaagctacggcatttctcctctgaaacataaaaacaaggatattagcttgttaaacagtgtagggtaaggtaaaagaatacttctccctccctctctcttcactgcacagccacagtcatttgaaactacctmccagatcttctcacttctgatctcttcctgaccatccttccataccctcattggggcatggtaggagaaggcaatctgtggggaaaactaggggtggcccttctagaaaaagatcagcaattagtaaatgttgtcagcctttggtgaatatataaatctgcygctacttcaccactttattaccagtctctgagggctgttggtcagggcaattgaagtgtagctcacaacagaccacagacccacctcttctgaggacacacactcccactcacctcaggcaaatcagtttacagtatt

SEQ ID NO: 77206 - DNA, 600 bp, Chicken  19866894365429_3
tcaataaagctacggcatttctcctctgaaacataaaaacaaggatattagcttgttaaacagtgtagggtaaggtaaaagaatacttctccctccctctctcttcactgcacagccacagtcatttgaaactacctmccagatcttctcacttctgatctcttcctgaccatccttccataccctcattggggcatggtaggagaaggcaatctgtggggaaaactaggggtggcccttctagaaaaagatcagcaattagtaaatgttgtcagcctttggtgaatatataaatctgcygctacttcaccactttattaccagtctctgagggctgttggtcagggcaattgaagtgtagctcacaacagaccacagacccacctcttctgaggacacacactcccactcacctcaggcaaatcagtttacagtattgatttcccaagaagaaagcaaaaaaaatctcttcccgtatatttcatgttagagatatgagatcctcttctgagacaaagaatcacacagaaagtaagccttctgtcctcccagtttatgcatactatttggacaattggtttggttttgctttggctttta

SEQ ID NO: 77207 - DNA, 600 bp, Chicken  19866894365433_1
gctttgcaaaattccacagaacacaaaaattgttttaaaatggagtcattttcgccttcattattgctgtgcagttataattttctgctgtttccatttgtattttatctgtgaaaatggatgtcatgttttccactacactgaagtggtctttgagtggttaccttgcaggtttatcattgctttgtctgttggtgaatccctggtgttgccttttaagtcagacttagcttctaattactgtgtcttgtatccattgtgctaagtgtaatagccataattactgcgtactaaagaacwtaacataattttagtttcaaacagtcgtgttagtagcaawactactgttagttttgcatgagaaagtttaaagtggagatgtttgcatgatgattactgttttaaaaaaaaaagtaaaaaatctgtttaaacagttcgcagtacaataatatttaaaattgttttaagctacagcatattcttcatgatagtggtacagtgtgtaatgtccctgctgagaaaggcatacagtgtatgtttcagaagaagcaaggaatttctaaaaggagcagctgcaagagacacattgtgtgcataatc

SEQ ID NO: 77208 - DNA, 600 bp, Chicken  19866894365433_2
tggagtcattttcgccttcattattgctgtgcagttataattttctgctgtttccatttgtattttatctgtgaaaatggatgtcatgttttccactacactgaagtggtctttgagtggttaccttgcaggtttatcattgctttgtctgttggtgaatccctggtgttgccttttaagtcagacttagcttctaattactgtgtcttgtatccattgtgctaagtgtaatagccataattactgcgtactaaagaacwtaacataattttagtttcaaacagtcgtgttagtagcaawactactgttagttttgcatgagaaagtttaaagtggagatgtttgcatgatgattactgttttaaaaaaaaaagtaaaaaatctgtttaaacagttcgcagtacaataatatttaaaattgttttaagctacagcatattcttcatgatagtggtacagtgtgtaatgtccctgctgagaaaggcatacagtgtatgtttcagaagaagcaaggaatttctaaaaggagcagctgcaagagacacattgtgtgcataatctctgcctgtttgttaaaataaaacggctgaataaaagaaa

SEQ ID NO: 77209 - DNA, 600 bp, Chicken  19866894365434_1
ggaagagcatctcccaggtgacggacagtactgaacgtctccagcaaacctctgatcagaaactggaggactctggctgcatttgtttaccacaagggttgccaatggagaaagttccctgggtttgtgcttgctttgtaggatcgaggctcttgtctgaagacaagtcttcagttaccctggttgccttttcaaaaccctcgtgcttttctgctgctgggatgcagagccagccttgcattttgcaaggcacgtggctgtgttgagagctcaggggaggcaggggccaatggcatattyatttcctggtgtgaaaagccctcatacagaacggtcaccagcaaggtggaaggtaaagagctgcaccaagatgaagactgaaatacgtgtgtagcaagcagcccgaggtttgtgatttagttgtgcttcacactggcagtatacaggtgatgaaacacttggccatcggggtgctgaaggaagcctcctcactctgtgggggtgaactcgggacatgttgacgaggccaagtgcaaggtcctgcacctgggtcatggccatccccagaatcgctgcagactgagtgctgaatgggtcaag

SEQ ID NO: 77210 - DNA, 600 bp, Chicken  19866894365436_1
agtgtcacctggtgactgcagaggggagaaagcctccaaagcgaagtgaccatgcaacatttggctggtgggagagggaatccagcctggtagcctatcacactgcctcattaccttgaaaggggagcgatggagccttccatgggctctactttcaccgaggtgctgcatccctctgagaagagtgagctttctctgaaagcaaaggcgaaagcctccttctctctgttgatcatatagatggtctggtgttctttgtgccctggaaaaggaacagattagtccctgaagacccctaartcccctggcagcagggccaccatggcacagtgtgctcctgcccatgtgctgagcccggcagaagtctgcagcatggcatgctcaggatgagagcatggaaaccagcttctgaacccctggtcttcctggcatcactcccaaaccctctcctcggagcctcagccacacactgcgcccctaacacccatgtcttccaccctccccctcccttttcctcctacaaacaggtccaggagctggctgacctgcttacaagtgcctgctcccatttccagcttccttttgggagcttggcttgaa

SEQ ID NO: 77211 - DNA, 600 bp, Chicken  19866894365444_1
attaaaggtttgaaaaacttgggtggttgaggagaaaatgctttaaaagggctggccattaaagcatgagaattctcagacacaatacctaggggaaaaaaaacagcaaaaaatattctactttgcttcttcatatcttaactgcaagagcaaaaattcaaagtaatagaaggttaaaccatgcatttggcaaattgatggctacagaaagaatggcaatacttcagtatttaactactgactcaagcatgagatagtgcagaactctatgaaggcagattgttttcctctgagcagtcwagaaagagaaggaaagcagagaacagcagtatctgccctttccactctgaggctctgttttttctcctcttcatctcagtcataaaaagtgggaaacatccctgaaactcagactgacagctttttgcttcctgtgcctcttctttcctctccgcacaacactgcaattctgcactggaaccaagccagcaatccagcataactagggtgatgaaaaagaaagttctgggcaaggaagcactggctctaccaactttctgtgcaagaagagcaggttacaatttgacctaaagaaaataa

SEQ ID NO: 77212 - DNA, 600 bp, Chicken  19866894365447_1
cagtttgacagctacgtactgaaagaaatttcacttagcttgccacaggtagattaaaagattgatttgttagagtaaaacaagtcagatccaacatcaagattatagtgtaggtatatcctgatgtttactttattagatgtctgtctttcaaacatattgttgagggggcccaaagcttctgttttacttctttaattttttcctcatctgattctacagtttagtagaactactacaattcttgccccctccatggtttgtgccagtatttagcatatattttgccaagctgtgttyaagcactattgatttttgctgcaaacaggtaatctccaaggaaagatcaggtggtgcaagacagtaaagatgagatggaagtaggtagtgtagctacagtcagcacttaggtctgcctagactgtcactgaatacctgctctaactcacctatagtttatgatgccattcttacatattgttgactaacctcactgaaatgtctgagtacagctttgagtcagaaaagcaggtaaggttagtatgcaatgcatttattaattttggaactctgtgactagcctgtgataccaggcagcaa

SEQ ID NO: 77213 - DNA, 600 bp, Chicken  19866894365453_1
gaagttttgtttgtattttgttttaccatggtttttctatgtcctttttatgctttctgttgtcttgaagaaactgcgtgtaagtttttggtgagcttcaggaagaggaaatagttggatttgtgcatagaaggaaggctcttgattcgtgttaccactggacaggtgctgccacaagacactcatgttcatgaatttctctgtgacattttgaagaagcttagttcagaggggtttgaaagaaaagagggtaattgagcttgaagaagatcatgtataggcactgaatttgatgaaacrgagaacaaagatgcctcctgaatacctcaggctgactgttgttgtttcagtgcataaatactgttacttagtgcacgagaccagatttgttgaacatgaggtatgtaaacgagcatttcctctatcaaagcaccagtatgaagacttcttggcctcgtaagaagtgctgttgtgacatcttggtcatggtattgctgtcagtatcttctggaagcagttaatgcaggttttcaggctccctggtcttatcagagctgctaacgacacgtcagttctcagtcagcaggtgagagaggtagg

SEQ ID NO: 77214 - DNA, 600 bp, Chicken  19866894365463_1
ccggaaatatttaaaataatcgttaacgtatttcttttctgcaaaagggagatcggtgccagtgctctccagagcaagaggcattcaccagttctgccttatggagggccacaggtgtccctgctgccaggggagctgacgaaggagagatgtggtcagatgttagggggagatcctgcactcagaggcggtgaggcgctggcactgctgcccagagctgagggtgccccattgctggaggtgcccaaggctggagatggggctctgggcgatgtgctcaacccctgcatggcagcaggytggaactgrgtgtgcttcggggttcccttccaccccagcctttctgcgatcccatgatgttggtcagcagcagaaccccatggcaggatgtggacgcagtgcgggctgccaygtcccggggctgagcccaactttcccggtgctgggggtaaaaccccaactacgtgacactgcacccaagtgcctaaccagcgtggggctggggcggaccacagcctgccttgcgctcagttctaagggaatgtccagggcacctcggttctctgtggatcaagcagccttcccaaggggatcacttcc

SEQ ID NO: 77215 - DNA, 600 bp, Chicken  19866894365463_2
tttaaaataatcgttaacgtatttcttttctgcaaaagggagatcggtgccagtgctctccagagcaagaggcattcaccagttctgccttatggagggccacaggtgtccctgctgccaggggagctgacgaaggagagatgtggtcagatgttagggggagatcctgcactcagaggcggtgaggcgctggcactgctgcccagagctgagggtgccccattgctggaggtgcccaaggctggagatggggctctgggcgatgtgctcaacccctgcatggcagcaggytggaactgrgtgtgcttcggggttcccttccaccccagcctttctgcgatcccatgatgttggtcagcagcagaaccccatggcaggatgtggacgcagtgcgggctgccaygtcccggggctgagcccaactttcccggtgctgggggtaaaaccccaactacgtgacactgcacccaagtgcctaaccagcgtggggctggggcggaccacagcctgccttgcgctcagttctaagggaatgtccagggcacctcggttctctgtggatcaagcagccttcccaaggggatcacttccccaggaaca

SEQ ID NO: 77216 - DNA, 600 bp, Chicken  19866894365463_3
aggtgtccctgctgccaggggagctgacgaaggagagatgtggtcagatgttagggggagatcctgcactcagaggcggtgaggcgctggcactgctgcccagagctgagggtgccccattgctggaggtgcccaaggctggagatggggctctgggcgatgtgctcaacccctgcatggcagcaggytggaactgrgtgtgcttcggggttcccttccaccccagcctttctgcgatcccatgatgttggtcagcagcagaaccccatggcaggatgtggacgcagtgcgggctgccaygtcccggggctgagcccaactttcccggtgctgggggtaaaaccccaactacgtgacactgcacccaagtgcctaaccagcgtggggctggggcggaccacagcctgccttgcgctcagttctaagggaatgtccagggcacctcggttctctgtggatcaagcagccttcccaaggggatcacttccccaggaacacatggaatgacccctcagggctttgaggatgcttgccaatgggctgtcagtgggttttamccagcacctggcgcgcgatgcagcgatgcctgccgtggagcac

SEQ ID NO: 77217 - DNA, 487 bp, Chicken  19866894365463_4
gcagaaccccatggcaggatgtggacgcagtgcgggctgccaygtcccggggctgagcccaactttcccggtgctgggggtaaaaccccaactacgtgacactgcacccaagtgcctaaccagcgtggggctggggcggaccacagcctgccttgcgctcagttctaagggaatgtccagggcacctcggttctctgtggatcaagcagccttcccaaggggatcacttccccaggaacacatggaatgacccctcagggctttgaggatgcttgccaatgggctgtcagtgggttttamccagcacctggcgcgcgatgcagcgatgcctgccgtggagcactgtctgtcagtaatcatacgggtgtataacagcttctgtgtgtgaccacctctcgcaaggcaggagagatgcactttggagtggcagcacagcagctcgttaaggacgtgatggggctgctcagcctcgtgacagcacacctcc

SEQ ID NO: 77218 - DNA, 600 bp, Chicken  19866894365466_1
tggaaactgtgcaaaacgcatcactccagcctttgcttctggtggtatatccagaagcaactcaacaaccaccctttgacatgagcaggagattagaaatgggatgttgagaccggggtaaaagctgtctagcagttatcacagccacaggaaagatttcagaggacaaccatgctggctgatgcagggcagtcacgcaacctgcctgaccaccagtgcatcccattttgccaccctggaggcatcttgagctcccaacacgaaggcgcagctctcctccacgcctcgcacccactgacraatgcatgatgttcaaacagaaacgtgccagtgaygctctgaatgcatttcacaaaatcacatgccaccaacgtgccaccagcaggggacagagcctgtgagaccgctgcccaggcgtgctttgagaacacctcccctgctccctccctgggctgtgcaatggggattgctagctctctgcagggcacttgcactgcccacgtagcacttccaggagtctctartacagctttttaatttctttttcttttttaggcatttttaatacagaaatacattcggaaagcaaacctttttgtg

SEQ ID NO: 77219 - DNA, 600 bp, Chicken  19866894365466_2
cttctggtggtatatccagaagcaactcaacaaccaccctttgacatgagcaggagattagaaatgggatgttgagaccggggtaaaagctgtctagcagttatcacagccacaggaaagatttcagaggacaaccatgctggctgatgcagggcagtcacgcaacctgcctgaccaccagtgcatcccattttgccaccctggaggcatcttgagctcccaacacgaaggcgcagctctcctccacgcctcgcacccactgacraatgcatgatgttcaaacagaaacgtgccagtgaygctctgaatgcatttcacaaaatcacatgccaccaacgtgccaccagcaggggacagagcctgtgagaccgctgcccaggcgtgctttgagaacacctcccctgctccctccctgggctgtgcaatggggattgctagctctctgcagggcacttgcactgcccacgtagcacttccaggagtctctartacagctttttaatttctttttcttttttaggcatttttaatacagaaatacattcggaaagcaaacctttttgtgaaaaggccactttcattattaattgctttaccttc

SEQ ID NO: 77220 - DNA, 600 bp, Chicken  19866894365466_3
attttgccaccctggaggcatcttgagctcccaacacgaaggcgcagctctcctccacgcctcgcacccactgacraatgcatgatgttcaaacagaaacgtgccagtgaygctctgaatgcatttcacaaaatcacatgccaccaacgtgccaccagcaggggacagagcctgtgagaccgctgcccaggcgtgctttgagaacacctcccctgctccctccctgggctgtgcaatggggattgctagctctctgcagggcacttgcactgcccacgtagcacttccaggagtctctartacagctttttaatttctttttcttttttaggcatttttaatacagaaatacattcggaaagcaaacctttttgtgaaaaggccactttcattattaattgctttaccttcataaaagctggtraactgtatttttagcagctgcttcccactaacattgttacagaaaaccactcaactaactgcacctaaaaatggcccattttggagtgtaacaatagcaccagagaaaccaataaacacatttttcggcggatgagaaatcaagcaactcaatttgcctcaatctctctcttcgta

SEQ ID NO: 77221 - DNA, 588 bp, Chicken  19866894365466_4
ttcacaaaatcacatgccaccaacgtgccaccagcaggggacagagcctgtgagaccgctgcccaggcgtgctttgagaacacctcccctgctccctccctgggctgtgcaatggggattgctagctctctgcagggcacttgcactgcccacgtagcacttccaggagtctctartacagctttttaatttctttttcttttttaggcatttttaatacagaaatacattcggaaagcaaacctttttgtgaaaaggccactttcattattaattgctttaccttcataaaagctggtraactgtatttttagcagctgcttcccactaacattgttacagaaaaccactcaactaactgcacctaaaaatggcccattttggagtgtaacaatagcaccagagaaaccaataaacacatttttcggcggatgagaaatcaagcaactcaatttgcctcaatctctctcttcgtagagacaaagattatacttgaaagtaaggtaaaagcaatctcaggtcaggtttgcttacgaagacttcagctcacgccattctctcccctcaatatagggccatcccgtgatg

SEQ ID NO: 77222 - DNA, 600 bp, Chicken  19866894365472_1
gactcttttcttcttgaacaggtgaaaatgagatgaagtctaacctatttttacattagtgtatccagggatttcatttccttattactgctctgtaacatttgtttctcattttcatccaatgatcttctgcttctcttccctttcctattctagggataaacctgtgttctcaagaatggcgttagtccttacatgtacaacatatatacaacgttgtattggaacaggctgctcagagagatggtggagtcaccatccctgcaggttttcaagaaaatgagaagatgtggctctggkggaaattttttagtgggtgtgagttgatggttkggctagataaycttaatggtctttccaaccttaatgattctatggttctataactttgcacttcatgttgtttaattttgcttctttttgactcctttaatccccagaggatccatttttgtccctgaaagaccataagcaaatgcaatagacacgtcttacttcccaatgagagtagtgtttgtgacattttttttttttttaacctctgatatatacagccttagctgcctaagaactttagctttaaattggcaaacgccggac

SEQ ID NO: 77223 - DNA, 600 bp, Chicken  19866894365472_2
tgaagtctaacctatttttacattagtgtatccagggatttcatttccttattactgctctgtaacatttgtttctcattttcatccaatgatcttctgcttctcttccctttcctattctagggataaacctgtgttctcaagaatggcgttagtccttacatgtacaacatatatacaacgttgtattggaacaggctgctcagagagatggtggagtcaccatccctgcaggttttcaagaaaatgagaagatgtggctctggkggaaattttttagtgggtgtgagttgatggttkggctagataaycttaatggtctttccaaccttaatgattctatggttctataactttgcacttcatgttgtttaattttgcttctttttgactcctttaatccccagaggatccatttttgtccctgaaagaccataagcaaatgcaatagacacgtcttacttcccaatgagagtagtgtttgtgacattttttttttttttaacctctgatatatacagccttagctgcctaagaactttagctttaaattggcaaacgccggacactgactaatgacaattttgataaaatatgtct

SEQ ID NO: 77224 - DNA, 600 bp, Chicken  19866894365472_3
ctatttttacattagtgtatccagggatttcatttccttattactgctctgtaacatttgtttctcattttcatccaatgatcttctgcttctcttccctttcctattctagggataaacctgtgttctcaagaatggcgttagtccttacatgtacaacatatatacaacgttgtattggaacaggctgctcagagagatggtggagtcaccatccctgcaggttttcaagaaaatgagaagatgtggctctggkggaaattttttagtgggtgtgagttgatggttkggctagataaycttaatggtctttccaaccttaatgattctatggttctataactttgcacttcatgttgtttaattttgcttctttttgactcctttaatccccagaggatccatttttgtccctgaaagaccataagcaaatgcaatagacacgtcttacttcccaatgagagtagtgtttgtgacattttttttttttttaacctctgatatatacagccttagctgcctaagaactttagctttaaattggcaaacgccggacactgactaatgacaattttgataaaatatgtctctgagcctgag

SEQ ID NO: 77225 - DNA, 599 bp, Chicken  19866894365475_1
  misc_feature (1)..(127): n is any nucleotide
nnnnnnnnnnnnnnnnnnnnnnnnnnnnnnnnnnnnnnnnnnnnnnnnnnnnnnnnnnnnnnnnnnnnnnnnnnnnnnnnnnnnnnnnnnnnnnnnnnnnnnnnnnnnnnnnnnnnnnnnnnnnnnntagtgatactggaagggaccctaaatcctacactaaagagtcaggctctcatttgtttctcacctggcttctatttttcttgctactttgcctcataaagggtatggtgtgtcttgatcccacttaaaccactacttgcagatataacatcctcttgagaagaagcaagtgcrtttctgagtcaggatctgagcgaacccaaaaatgatatcgttccttgtagctgagcattgcagttgcygaacttgatggtaaatggtgagcatcacatcttctaaattgaatcaatggcccacggttcttgggctttgagatgaatcctatgtgtcatccttttcatatatacagagggttaacgaccactctgaggacttccacagaattaaagtatgcatctagagagtatggtagatctcagatggatgactctatccagctgaggagcttctgtatgtgcacagaagcctaaata

SEQ ID NO: 77226 - DNA, 599 bp, Chicken  19866894365475_2
  misc_feature (1)..(59): n is any nucleotide
nnnnnnnnnnnnnnnnnnnnnnnnnnnnnnnnnnnnnnnnnnnnnnnnnnnnnnnnnnntagtgatactggaagggaccctaaatcctacactaaagagtcaggctctcatttgtttctcacctggcttctatttttcttgctactttgcctcataaagggtatggtgtgtcttgatcccacttaaaccactacttgcagatataacatcctcttgagaagaagcaagtgcrtttctgagtcaggatctgagcgaacccaaaaatgatatcgttccttgtagctgagcattgcagttgcygaacttgatggtaaatggtgagcatcacatcttctaaattgaatcaatggcccacggttcttgggctttgagatgaatcctatgtgtcatccttttcatatatacagagggttaacgaccactctgaggacttccacagaattaaagtatgcatctagagagtatggtagatctcagatggatgactctatccagctgaggagcttctgtatgtgcacagaagcctaaatatttaaaactcaagcacctggttaataggtgagtgatttgtgacctttaaaatgtctctagggtgtttg

SEQ ID NO: 77227 - DNA, 600 bp, Chicken  19866894365477_1
gtacttttctgatgattcggtgtaaaaatgtgtgaatttgggtggctttttacatcttgcctgccattgcatgaaaagttgggttttcttcacaatgtgtgtatgtcatgcttttctgttctttcctttctcaagctcttacaggaattaaatttgtaatttagaacattttaatttttgttaatcctatctggacactcgtgtaacatcagaagcacagctgctttacagtgttcagaaaactaaaataaacttttcagacaaaaatgttctgattgtgaaaatagatgagtttacagycgaaaatgtttgaaaaggcagcgaatgcctgtttctgtatatgacctcagtatgtttttcaagtgtcaaaactccacacattgaatgcagaatttccttacaactgtgttgtacgatacagctccgtagtggctgggcagcagcatggaattcttcttggctgaactgtctgtggggggaatctgttctgtgctggagctgctatactgagaaaaaatggggtaagcacgggctaaaatgaatgggcaaataaaggttgagtctttctaagatgactgttaattatgcactgtatttagc

SEQ ID NO: 77228 - DNA, 465 bp, Chicken  19866894365477_2
ctgaactgtctgtggggggaatctgttctgtgctggagctgctatactgagaaaaaatggggtaagcacgggctaaaatgaatgggcaaataaaggttgagtctttctaagatgactgttaattatgcactgtatttagctagaaagatcccgagtgtgtttgtgacagatttaagacatgtttagtaatgatgccttttgggttttgtttttctggggggccaggagggcatctgctacacagggatgtttttattggtgtgactgtctgaagtagagcatctaccatggagaacgtgrcttctttaatttaaagaatgagcaaagtrtktgtattgatcaatactttattgtctctatataaaaagtacagataatgcggtagccacaatgaggaacaatcctgtttctgcaggggtgggttgggggaactgaacttaaaggtagtaatacgaagcaacacat

SEQ ID NO: 77229 - DNA, 436 bp, Chicken  19866894365477_3
gtgctggagctgctatactgagaaaaaatggggtaagcacgggctaaaatgaatgggcaaataaaggttgagtctttctaagatgactgttaattatgcactgtatttagctagaaagatcccgagtgtgtttgtgacagatttaagacatgtttagtaatgatgccttttgggttttgtttttctggggggccaggagggcatctgctacacagggatgtttttattggtgtgactgtctgaagtagagcatctaccatggagaacgtgrcttctttaatttaaagaatgagcaaagtrtktgtattgatcaatactttattgtctctatataaaaagtacagataatgcggtagccacaatgaggaacaatcctgtttctgcaggggtgggttgggggaactgaacttaaaggtagtaatacgaagcaacacat

SEQ ID NO: 77230 - DNA, 434 bp, Chicken  19866894365477_4
gctggagctgctatactgagaaaaaatggggtaagcacgggctaaaatgaatgggcaaataaaggttgagtctttctaagatgactgttaattatgcactgtatttagctagaaagatcccgagtgtgtttgtgacagatttaagacatgtttagtaatgatgccttttgggttttgtttttctggggggccaggagggcatctgctacacagggatgtttttattggtgtgactgtctgaagtagagcatctaccatggagaacgtgrcttctttaatttaaagaatgagcaaagtrtktgtattgatcaatactttattgtctctatataaaaagtacagataatgcggtagccacaatgaggaacaatcctgtttctgcaggggtgggttgggggaactgaacttaaaggtagtaatacgaagcaacacat

SEQ ID NO: 77231 - DNA, 600 bp, Chicken  19866894365482_1
agcaagtttgctcttacattcatgttgggaaaatgtgttggagttctcatgcaagtgaaaagaaatgattctcagggttgttttctttcttttctttctttttctctttttttctgagtaagtagcatctctattagccttgaaagggaaatttatctggaggaaaaattattttttgccaaaatgattaagtatctggggagatcaaaacagaggaactacaaactttcttggttaaaatctgtattgattaagtttctgagaaaatattaataggacaaagccacaaacacattttcrattccacaatgcaataaagaaaaaaaaaaacaaatatawcaaaataacattatgggtaactgtacatttcagtcagagctgatgacacaataactttcttgcagaagagaaaaatgaggatattatatttaagaagcacatacttcctaatgttgcattttgtgctcattctaaagaattcattttctgaaaggattcagaagtattttgtggaaatgtaaattaggtataaaatggtgaaatgtttttttttttagggcctttctcaacagctgtgtatgtgccacaaggcataagacg

SEQ ID NO: 77232 - DNA, 600 bp, Chicken  19866894365482_2
ggagttctcatgcaagtgaaaagaaatgattctcagggttgttttctttcttttctttctttttctctttttttctgagtaagtagcatctctattagccttgaaagggaaatttatctggaggaaaaattattttttgccaaaatgattaagtatctggggagatcaaaacagaggaactacaaactttcttggttaaaatctgtattgattaagtttctgagaaaatattaataggacaaagccacaaacacattttcrattccacaatgcaataaagaaaaaaaaaaacaaatatawcaaaataacattatgggtaactgtacatttcagtcagagctgatgacacaataactttcttgcagaagagaaaaatgaggatattatatttaagaagcacatacttcctaatgttgcattttgtgctcattctaaagaattcattttctgaaaggattcagaagtattttgtggaaatgtaaattaggtataaaatggtgaaatgtttttttttttagggcctttctcaacagctgtgtatgtgccacaaggcataagacgttgctctccattaagagtgaaagcagaataaagcagagg

SEQ ID NO: 77233 - DNA, 599 bp, Chicken  19866894365487_1
  misc_feature (1)..(68): n is any nucleotide
nnnnnnnnnnnnnnnnnnnnnnnnnnnnnnnnnnnnnnnnnnnnnnnnnnnnnnnnnnnnnnnnnnnncgcctttgggaggacggcgctacttatcggaggcggtgcggatggaaggaagggtaggaaaggagttgggtcactgcgatgcggaatatttcatattgggagatctggcaatagttctgcgtggctccaaacaggatgaggtgcgtttcccgaggctgtgctgtgctcagtgctgagcagtccgttctggaaccttctggccgcattctgcccatggtgcacagcctgagcygctgytggctgcagcagaaactcctccatgtccccacagggcaggaggacggataacgggcaacaaaataaggcaacctttgctttattccaagcagaaccgtctcctctccatggggtaactcttcacctcagcaaccaggacccgttcctaagaaaccataaaacatacctggagaggagagagaactgttaatgcttaaggcaggagttgtacttcatatatcagaccgatggttttagcaatgtttcttaaattggaagtgagagaagagcacaaagtgcagctcttgggaacag

SEQ ID NO: 77234 - DNA, 599 bp, Chicken  19866894365487_2
  misc_feature (1)..(63): n is any nucleotide
nnnnnnnnnnnnnnnnnnnnnnnnnnnnnnnnnnnnnnnnnnnnnnnnnnnnnnnnnnnnnnncgcctttgggaggacggcgctacttatcggaggcggtgcggatggaaggaagggtaggaaaggagttgggtcactgcgatgcggaatatttcatattgggagatctggcaatagttctgcgtggctccaaacaggatgaggtgcgtttcccgaggctgtgctgtgctcagtgctgagcagtccgttctggaaccttctggccgcattctgcccatggtgcacagcctgagcygctgytggctgcagcagaaactcctccatgtccccacagggcaggaggacggataacgggcaacaaaataaggcaacctttgctttattccaagcagaaccgtctcctctccatggggtaactcttcacctcagcaaccaggacccgttcctaagaaaccataaaacatacctggagaggagagagaactgttaatgcttaaggcaggagttgtacttcatatatcagaccgatggttttagcaatgtttcttaaattggaagtgagagaagagcacaaagtgcagctcttgggaacaggacca

SEQ ID NO: 77235 - DNA, 600 bp, Chicken  19866894365500_1
tcattagcatgcatgtcaaacagtatttagataaagaaattaaaaaatatctttgcaagtacattaactatttttattataaacaatacatgaagaaatccttatgtactattttgtattccaaatagctttgctcaatagagcaaatcagttgaatttacagtttctggtcacttcatattttgaagattccaaagctgcagacctcctcagccttgcttaattgatgaggaattaagaactgataaaaattaataggcaggaaaaagaatttagtttcctaaattagattaagaaaawtttataatttgtttttctggtagcttcttttttcagggattaaaagcaaaacatgtcaatgctttagacagctatccattactctaatcagtaactacccaagttcaccttgaaacaaatcagccctgatgcaggtggttctcatggatgaagaaagagcctgctcgcatcacgtttgtaattttcattcaaaatccaaagcaacaaatagaagaagacactccactgtctgatgcacacagtgtaagaagagttggacaggtcttccttcaaggtaagcaaagccttcaggaagaaaag

SEQ ID NO: 77236 - DNA, 600 bp, Chicken  19866894365503_1
gactaatgcctgctttgttatcctctgtgccatgccattcatatattttacttggctttctagtgctcccctttgttcatatttgcattttgtaagaaaggagacaaaaaagggttgtaactgtctgctaatgcctctgatgattaggttgtttctactttattggctgagagtggctagatagcagaagtttgccgtgaaggctctttgatttgtcagggtctgtggaaaccctggtttaaattggggttgtgaaatacatgctgttgaaatttctaggattccatccatctgcttcaycctgttgagttgctaaagtgcatgctaagtgacttctaccagcaaataccctttaaaatatgccagagctcaactttttgatgggaataggagggatcaatttaactacactgacttcgggagaattagctgtgaatttgcatttatctgcagacaattgttcatttattccttcagtagttgctaactaatataatcattcagtaagacactgaaatatgctctctttaaattgcacaagttgctcaatttgcatttatgggataatatatctcatttacagtataaaaacgatcttga

SEQ ID NO: 77237 - DNA, 600 bp, Chicken  19866894365503_2
ttgctaactaatataatcattcagtaagacactgaaatatgctctctttaaattgcacaagttgctcaatttgcatttatgggataatatatctcatttacagtataaaaacgatcttgacaagtggaaagcaaatctaccatgcatctagaactccatgacttgtgaataaacctgctcattttctaaggcttatttttggatattaatcactaatcttgctaaaagttgatagaatttcagaaagtatatactttttgtttgtttgttcatgcggaactgagctgttactgaaatgarcgtataaawggagaaatgaattttaagctatggctgacaagtatcatctcctgtgacaatttatcttcccttaagcaggtttacagagtgtctgccgatatccaccagaagtttatcactgctaaagtcatgcagaaaatacaaacagcagagtcaaatggatgaacactctctacttaaaagtgatcgcatcagggacagcttaattactcttgtatttcataataacgatggggatgaatctaatggaagaaatgtctgcaacttccagctgagttgcatgatgactatctttccata

SEQ ID NO: 77238 - DNA, 600 bp, Chicken  19866894365503_3
aatataatcattcagtaagacactgaaatatgctctctttaaattgcacaagttgctcaatttgcatttatgggataatatatctcatttacagtataaaaacgatcttgacaagtggaaagcaaatctaccatgcatctagaactccatgacttgtgaataaacctgctcattttctaaggcttatttttggatattaatcactaatcttgctaaaagttgatagaatttcagaaagtatatactttttgtttgtttgttcatgcggaactgagctgttactgaaatgarcgtataaawggagaaatgaattttaagctatggctgacaagtatcatctcctgtgacaatttatcttcccttaagcaggtttacagagtgtctgccgatatccaccagaagtttatcactgctaaagtcatgcagaaaatacaaacagcagagtcaaatggatgaacactctctacttaaaagtgatcgcatcagggacagcttaattactcttgtatttcataataacgatggggatgaatctaatggaagaaatgtctgcaacttccagctgagttgcatgatgactatctttccatagcatatcaa

SEQ ID NO: 77239 - DNA, 599 bp, Chicken  19866894365516_1
  misc_feature (1)..(132): n is any nucleotide
nnnnnnnnnnnnnnnnnnnnnnnnnnnnnnnnnnnnnnnnnnnnnnnnnnnnnnnnnnnnnnnnnnnnnnnnnnnnnnnnnnnnnnnnnnnnnnnnnnnnnnnnnnnnnnnnnnnnnnnnnnnnnnnnnnnntgtggagctctgagttggtacctcaggaagaggtggcagtagtctgcatgcagcactcccctcgtggtcctgcaggaagcacaggcagacatcagcagcacaggcggggaccgcattccccttggactgcagccctctgtatgggagctgcattgcccccaaaccacmtcaatgcatccaggcagctccctcctgctgcaaagatagggctagaatggcagatttggaatatcacatacacacacaaaagacagaaactatcagtcttggaaccgcagcgtcatttgggttgcaaaaaaccttcaaggtcatcaaacccaaccatgaacctgacccctcgagccccaccactaccccccatcccttagtgcacggccccaaagcctcgtgccagcactacatccattggccccagcagcaaaagttgaaggcaaagygaaccgcagaccaaaccagacaacgatagg

SEQ ID NO: 77240 - DNA, 600 bp, Chicken  19866894365516_2
tgtatgggagctgcattgcccccaaaccacmtcaatgcatccaggcagctccctcctgctgcaaagatagggctagaatggcagatttggaatatcacatacacacacaaaagacagaaactatcagtcttggaaccgcagcgtcatttgggttgcaaaaaaccttcaaggtcatcaaacccaaccatgaacctgacccctcgagccccaccactaccccccatcccttagtgcacggccccaaagcctcgtgccagcactacatccattggccccagcagcaaaagttgaaggcaaagygaaccgcagaccaaaccagacaacgataggcaaagcaagaagtcatgatgttttccacttcttttttttcctccttgcttattttctgctacagatgcctaattatttcccaggattgctcagcccccgggggccctttttgcaatcacatggaagcaagcttgaaaatcagcgctgcctccaaaagcagcratgccaagaaaagccacagcaaggacagcactgcagcccatgggctcacgggggggacgcgatgatggaaagagccatgggcgggtggatgggctttgggctaatttg

SEQ ID NO: 77241 - DNA, 600 bp, Chicken  19866894365516_3
ctgacccctcgagccccaccactaccccccatcccttagtgcacggccccaaagcctcgtgccagcactacatccattggccccagcagcaaaagttgaaggcaaagygaaccgcagaccaaaccagacaacgataggcaaagcaagaagtcatgatgttttccacttcttttttttcctccttgcttattttctgctacagatgcctaattatttcccaggattgctcagcccccgggggccctttttgcaatcacatggaagcaagcttgaaaatcagcgctgcctccaaaagcagcratgccaagaaaagccacagcaaggacagcactgcagcccatgggctcacgggggggacgcgatgatggaaagagccatgggcgggtggatgggctttgggctaatttgggctgctcgatgctatcctggagcgtggctccagcatttcttggcttccccttggttgatgcgggttgggacacccagagcgggctctgaggcgctgcctgccctcgtgtgtccctgccacagcaacgtgtcaccacccggtcattgctgagcagcacctcagtgttctgtccaagaattggaggggatcac

SEQ ID NO: 77242 - DNA, 600 bp, Chicken  19866894365521_1
ggtcaggggtttggagaaagaaaaacagttcagcatttggctattcacagaatggctgaactacaaaaaaaaaaagcaccgcatatggtaacaatatgggagtacaaagagttctatgtaagaaaaattatagtcacttttcaaaagcacatttcacagctgaaaagtaattgctgagattctgttcgtttctcatagtttatgcaggaaatctgacaagcagtttcttgtggtacagatgcacttctgagtatctgagcgatgactgctcttcctgctgaaatctatatgtaaaaaatscatgagaaaactgagcagacctaaactggaatggacttttctgaaagactgtaggcagacattattccatttattatggcaccctgtaagtgcatactgttaaaaagcgtacagtattaaaaaatgtgttcttatccctccacatgcttcatgtatccataaaaacaatttgtaaaaggttgcagaactacacatatccataaaaaaaacttcattatgctactgaattccagccttgcttagcaggtaattgaacactaggaatatgcatacagaacggaagtgtcctaccatttaccc

SEQ ID NO: 77243 - DNA, 600 bp, Chicken  19866894365530_1
tgatacttgctggcttcctactgttttcagtttgcaatctgtaggatttattcatggaattgttttgaggaacatgccactcccttcactgctgagcgtgtctggtctgctggatgcatctcgttacaacacaaaccaacatgcagagggctatttataacgtctcgaagcaccgtgccagcaaacgtaaaatgaacagcgagcaaccagtcaacaattacacatcttgaaagaagtgccagttagaaaagtttttaaggaacgagttttcaattggaatagaaaataagacagagactygatgcctgaaatagtatgttggactgatgagcagagatgcaaaaagtagtagattggaagaggatcastatgtcacttgaatgtattttcaatgtattgggagttggtactatcattaatcagtacattttgagataatgatttggtgtgtagatctcaacattaactggggagattttatacaaaatctcaaattcatacgcgttttactttgaagacacctatgctcataacgtgctaacagagaaagcctctggaagatctctatcagtatctatactgtggggctgtggactgtgc

SEQ ID NO: 77244 - DNA, 600 bp, Chicken  19866894365530_2
ggaacatgccactcccttcactgctgagcgtgtctggtctgctggatgcatctcgttacaacacaaaccaacatgcagagggctatttataacgtctcgaagcaccgtgccagcaaacgtaaaatgaacagcgagcaaccagtcaacaattacacatcttgaaagaagtgccagttagaaaagtttttaaggaacgagttttcaattggaatagaaaataagacagagactygatgcctgaaatagtatgttggactgatgagcagagatgcaaaaagtagtagattggaagaggatcastatgtcacttgaatgtattttcaatgtattgggagttggtactatcattaatcagtacattttgagataatgatttggtgtgtagatctcaacattaactggggagattttatacaaaatctcaaattcatacgcgttttactttgaagacacctatgctcataacgtgctaacagagaaagcctctggaagatctctatcagtatctatactgtggggctgtggactgtgctaaaaaccttctatgtctttaaggattaatctgcagtgcagtgcattttcagaacagtgtaaatatta

SEQ ID NO: 77245 - DNA, 599 bp, Chicken  19866894365537_1
  misc_feature (1)..(58): n is any nucleotide
nnnnnnnnnnnnnnnnnnnnnnnnnnnnnnnnnnnnnnnnnnnnnnnnnnnnnnnnnncaggagactgctgagaagcagctgaagagggcagcacactgtgtcttcatggtgtggatataaaccttgaaccacgttgccagagaccaggtcttgcccccttacctcctccacactcggagctgcactcactccaggaactgtagctccagctgtaacctgtggtctgtctgtgcataggcaggtagtattcgtactgtactcctgggtttggctcctgactgatgagctatgaaagcacrggataaagtcatgaaaataacagcaccacttcttcccttcacagcatttccccactgtgcctgagggtttgagctgacttggtccctccagttcaaaaagatctttttctctaggtagtattttctccttgcttcctctgattatctagggagtatcattttttcagaaaagggtgcattcatctctttcrtaggyagatggatctacctggtctgtcacagtcataccctgacacggcctacagtacactataacatgaagtaccctagagtctgtccctgcaccgaacccrttctgt

SEQ ID NO: 77246 - DNA, 600 bp, Chicken  19866894365537_2
ccaggaactgtagctccagctgtaacctgtggtctgtctgtgcataggcaggtagtattcgtactgtactcctgggtttggctcctgactgatgagctatgaaagcacrggataaagtcatgaaaataacagcaccacttcttcccttcacagcatttccccactgtgcctgagggtttgagctgacttggtccctccagttcaaaaagatctttttctctaggtagtattttctccttgcttcctctgattatctagggagtatcattttttcagaaaagggtgcattcatctctttcrtaggyagatggatctacctggtctgtcacagtcataccctgacacggcctacagtacactataacatgaagtaccctagagtctgtccctgcaccgaacccrttctgtgcagactcatctcaaagttagagctcaaaggaatacatcaagccttgctctgctccattctgggcctcagaaccagagcataacactgttttttctgcaagaaaaacaccatggtctagattaagggcctacagctttgtaagattcctcttacaaagattcctcaaatgcactcccactgcacaaagcgag

SEQ ID NO: 77247 - DNA, 600 bp, Chicken  19866894365537_3
aactgtagctccagctgtaacctgtggtctgtctgtgcataggcaggtagtattcgtactgtactcctgggtttggctcctgactgatgagctatgaaagcacrggataaagtcatgaaaataacagcaccacttcttcccttcacagcatttccccactgtgcctgagggtttgagctgacttggtccctccagttcaaaaagatctttttctctaggtagtattttctccttgcttcctctgattatctagggagtatcattttttcagaaaagggtgcattcatctctttcrtaggyagatggatctacctggtctgtcacagtcataccctgacacggcctacagtacactataacatgaagtaccctagagtctgtccctgcaccgaacccrttctgtgcagactcatctcaaagttagagctcaaaggaatacatcaagccttgctctgctccattctgggcctcagaaccagagcataacactgttttttctgcaagaaaaacaccatggtctagattaagggcctacagctttgtaagattcctcttacaaagattcctcaaatgcactcccactgcacaaagcgaggactg

SEQ ID NO: 77248 - DNA, 600 bp, Chicken  19866894365537_4
aagcacrggataaagtcatgaaaataacagcaccacttcttcccttcacagcatttccccactgtgcctgagggtttgagctgacttggtccctccagttcaaaaagatctttttctctaggtagtattttctccttgcttcctctgattatctagggagtatcattttttcagaaaagggtgcattcatctctttcrtaggyagatggatctacctggtctgtcacagtcataccctgacacggcctacagtacactataacatgaagtaccctagagtctgtccctgcaccgaacccrttctgtgcagactcatctcaaagttagagctcaaaggaatacatcaagccttgctctgctccattctgggcctcagaaccagagcataacactgttttttctgcaagaaaaacaccatggtctagattaagggcctacagctttgtaagattcctcttacaaagattcctcaaatgcactcccactgcacaaagcgaggactgctatgcaaaacaaggcagtatcagtgagggcaagctcagccacttacctcaatgactaagggctctgtggtgggacccctggcatggaggagctctg

SEQ ID NO: 77249 - DNA, 599 bp, Chicken  19866894365542_1
  misc_feature (1)..(10): n is any nucleotide
nnnnnnnnnntgacattctaccatcactacaaatactcgcgcccagggattttcaggattaaactccttgaacacaaatttattgtagctttgtcctatataaagactattgcatctccctttttgccattggactcttgtactttgcattttcacatctatgtttttgagcacccggttcatatatgtaagccagcaactacaggtattgactgagataatgcatccagtaacaggtatgcatgttgtactcagcttacaatatatatatacaaggcaggaattactatgatagcatawgtgttttatttacatccttaagcaagttttacagttaccctgaacattatatcagtaaaaattttacacagctgagatataccatgatggagaaaaacgcttaaaaagtagatttatgaactacacgtatggtacgttgcaattacaggtagctattgtcaggaaaacccaagctcccctatcaaaattaagcacctccgtctttaagagacaccacatggagttagcagattggttcctccttccatttcagatgaacctccagtacctaccatctgcattttcccatccacttgagc

SEQ ID NO: 77250 - DNA, 600 bp, Chicken  19866894365542_2
aaaattttacacagctgagatataccatgatggagaaaaacgcttaaaaagtagatttatgaactacacgtatggtacgttgcaattacaggtagctattgtcaggaaaacccaagctcccctatcaaaattaagcacctccgtctttaagagacaccacatggagttagcagattggttcctccttccatttcagatgaacctccagtacctaccatctgcattttcccatccacttgagcactaggttcaagttctgaggaacccctgggtgggtgctactcatcatcccctgtgccygggacaccgtaccatgttcaaagctggaggtctataggggaaatgggaagtcaccagctttcagatttccacatctttttagtcaccctcccctayctgcttgacagcgttccccatttgaccttcccacctagcactgtgtggctatcatatctgcaaatttcagcgaaagcccccttcatctaagctaaggggtggaaaagtcatgagagggaaagctgttccccgttgtttactactgagcaattaccttgtgtcaacaaaaaattcttgatattattaagaatgacaaattgcctc

SEQ ID NO: 77251 - DNA, 570 bp, Chicken  19866894365542_3
tattgtcaggaaaacccaagctcccctatcaaaattaagcacctccgtctttaagagacaccacatggagttagcagattggttcctccttccatttcagatgaacctccagtacctaccatctgcattttcccatccacttgagcactaggttcaagttctgaggaacccctgggtgggtgctactcatcatcccctgtgccygggacaccgtaccatgttcaaagctggaggtctataggggaaatgggaagtcaccagctttcagatttccacatctttttagtcaccctcccctayctgcttgacagcgttccccatttgaccttcccacctagcactgtgtggctatcatatctgcaaatttcagcgaaagcccccttcatctaagctaaggggtggaaaagtcatgagagggaaagctgttccccgttgtttactactgagcaattaccttgtgtcaacaaaaaattcttgatattattaagaatgacaaattgcctctgcttgtgtaagatactcagaactgctcaagtcaggagtacagacgcacaggccattaggaaacag

SEQ ID NO: 77252 - DNA, 600 bp, Chicken  19866894365543_1
aagctagcactgtattcacctggatgggaagactatatgaactgtggctgacctgggattgcatctccccttcccacagtattctctggctaggttcaagaacccttattttcacctaggggaggctctggtcctgctttttatgttttttactaattattgtccctttatttaggcctctccttctcccatagggtatcaagggattccatagacagatgataatctactagcacagtgcaggaatgggcctacagactgagctgtacaagcccttatctgtatgagctcatgtgaagytggtggagaggtactctgttctccagccaatgagaagtcatggaaaggcaaggttgagctccacagtaacattcccaactcctgaatactgctatgctgaggagaaaatgagcttaaatgcaaagagaagtctcttttctgaaatagcaggtaccttggaggaatatgccttctggccaggggcactacctaaaagagttgcccaccagaactggaaactggagcatcttcagccatgcctagcttgtgtctgtttttcaagttagccttgagagcagctgaaatgatttaaattcttgt

SEQ ID NO: 77253 - DNA, 588 bp, Chicken  19866894365548_1
ttgacctgtttctttctttctttcttttttttatttgttggtttgttttatcaatctcttttgatctttatggaataagcatggaacaaggcaatcacataaagtatctaatgtgaactatttcacaatgtcaaaaattactgacattaaattagccacaggagggttcccttttgtccttgcatgctcagtaggaacatattggatattaaaagatagaaaataagattttgagcgtacctacagaatcaaaataaaacacatctactaatgtgtgctgagatatatatacaggatgcmttgcaggattttatacaaatagaatttagtttgctctctgattcttcaattaaaataaagcaaaataaagtaaaagttttcctgtattatatccattatcttttgcataaatttgaaacctattaaatttttttgttgtttgattttgaacatgatattagagagcgataaatattctaagctctcacttctttctcagataaaactatttgaagttactaaaatgctaggactttgatctttctttcaaattgacagttaagatcctgagaccacaaagaatatcag

SEQ ID NO: 77254 - DNA, 600 bp, Chicken  19866894365549_1
gcttcacaattctaaatgctcggatacatttgagatgggaaaaaaatggcaaaacttggtattttccctgggacaggaagacctgttccatgcagctgtgtatcttgctgctcctcgtgttaatctgacaggacgtgagcgctgatgttacaggtaaaggaactattttgcaccttcctctcatttccttttccttctttgatgttcaccacccactacaacattctctctgatatcattctcaggctgaatgcgacctgattcacatctcacgccaattaccctgacattgtcggaacrgagctggtttgcactaaccgaggaatatgattattttgcagtgatatcagccctctgcctcccccttgagatttctggcatgggtgaagacttggaatgaaaactaactccttcccactctataaaagtcacactccttccctgctctataaaagggaggggattaactcctgtgtttgtttaaaaaaaaaaagatgagatcakagctggaaaaagtggatttcctttatgttcttcatgatgctgaagaattgaatctgtatccctcccaggctacattctcttttatattagaaatgc

SEQ ID NO: 77255 - DNA, 600 bp, Chicken  19866894365549_2
ttcaccacccactacaacattctctctgatatcattctcaggctgaatgcgacctgattcacatctcacgccaattaccctgacattgtcggaacrgagctggtttgcactaaccgaggaatatgattattttgcagtgatatcagccctctgcctcccccttgagatttctggcatgggtgaagacttggaatgaaaactaactccttcccactctataaaagtcacactccttccctgctctataaaagggaggggattaactcctgtgtttgtttaaaaaaaaaaagatgagatcakagctggaaaaagtggatttcctttatgttcttcatgatgctgaagaattgaatctgtatccctcccaggctacattctcttttatattagaaatgcagaacagaaaggatgatgtacagcctggcaaaccccattcttcataggccaggtcccartagtcacggtggcaaacagaattaattgactgcaytggtggcaacttctcaaacctgcttatgaccagcaatgagtggggctgagcaagatgaaagggaggtgggggagccccggtgggtgtcccatggctgtgggttatcaggg

SEQ ID NO: 77256 - DNA, 600 bp, Chicken  19866894365549_3
tcccccttgagatttctggcatgggtgaagacttggaatgaaaactaactccttcccactctataaaagtcacactccttccctgctctataaaagggaggggattaactcctgtgtttgtttaaaaaaaaaaagatgagatcakagctggaaaaagtggatttcctttatgttcttcatgatgctgaagaattgaatctgtatccctcccaggctacattctcttttatattagaaatgcagaacagaaaggatgatgtacagcctggcaaaccccattcttcataggccaggtcccartagtcacggtggcaaacagaattaattgactgcaytggtggcaacttctcaaacctgcttatgaccagcaatgagtggggctgagcaagatgaaagggaggtgggggagccccggtgggtgtcccatggctgtgggttatcagggagtgcattggcaggacgagggaaatggctttaaactaaacaagggtaggctgagattagattcaggcctacatgtaggaaggacacacgcacagaacccagccctgtgctcaccttgctgtattggctccccttggtgcctcccaaagcctcttc

SEQ ID NO: 77257 - DNA, 600 bp, Chicken  19866894365549_4
gaatgaaaactaactccttcccactctataaaagtcacactccttccctgctctataaaagggaggggattaactcctgtgtttgtttaaaaaaaaaaagatgagatcakagctggaaaaagtggatttcctttatgttcttcatgatgctgaagaattgaatctgtatccctcccaggctacattctcttttatattagaaatgcagaacagaaaggatgatgtacagcctggcaaaccccattcttcataggccaggtcccartagtcacggtggcaaacagaattaattgactgcaytggtggcaacttctcaaacctgcttatgaccagcaatgagtggggctgagcaagatgaaagggaggtgggggagccccggtgggtgtcccatggctgtgggttatcagggagtgcattggcaggacgagggaaatggctttaaactaaacaagggtaggctgagattagattcaggcctacatgtaggaaggacacacgcacagaacccagccctgtgctcaccttgctgtattggctccccttggtgcctcccaaagcctcttcttccctcccccaaacacagtcctgacggtctccta

SEQ ID NO: 77258 - DNA, 599 bp, Chicken  19866894365550_1
  misc_feature (1)..(20): n is any nucleotide
nnnnnnnnnnnnnnnnnnnntctgaagacacagtgagattctgatgagaatgttttgattcttatcccagtgttttggaaaaggcctaaaaagatactctgagttaagttccattttgagaataaccttaagccagcagagtactttgtttctgaggtaaaggcttgtgctttgcacttgattatgtgctataactattggatttaaaatcaagagagaagcaggaaaggactgcttgctatgaatagctgtgtcactttccatgtactgagatgtattgataaaatgcagcccaagctmttttttatttattcatttttcatttttttttcttttttctgttggttctgtgagtggtattcattttgttttcttttttcttgtgtctacattcagtttgcagttttatctaaaatggtaatgctgcctactgaacttcataccacagtatttctcactggtgatttgtctgagacctatttttcaagctataggttatgtaggatgtaagaaaatgatgcgtatgtttgtgtttaaataaaacctacaagcatacattatatgttcaactgcaaagaaacaaaacattatctggaaat

SEQ ID NO: 77259 - DNA, 600 bp, Chicken  19866894365557_1
tatctcctttctttttctttaagctggcagagaatcattacacaaactaggcaaatgagggtttccatatttgtaatcaaagaaatacccgggaatttgtaagatttaagagaacatctactagtaagaattgcatttttaagttgtccatagtgtatgttttattccatttattatatacttagcttgtggacagatgttcattttgcagacagctgtgttagtttaagatgttactatccccagctgtttgctaccaagacattacttaaggttcttgtccttctagctctgcaaggmttgacttgggtttcttagtctagctgggccaaagcctagttttgagccagttcaaaccatcaatgctggcttttgctggtaaaatgtgctggaggacatgaaatgttgatcctgaggcatcttctgatggaggatcaggagtggcagctttacacttgtgagtcccaagccatctgggagcatctttggctggcagagctatgtcaccccagaaagacatctgtccttagactactatgcactacaagctataaatagattgtagacaattgtctctgtcatggatcctcagtagaaatc

SEQ ID NO: 77260 - DNA, 600 bp, Chicken  19866894365559_1
ggtatgagccagcaaccagttcagctgtgggcagttctgtttctggccatgctcctgcatctctctttcagtgctaagcaagctggtacgtgactcagcctactaagatatacaaaatagacaaactctttactatgtcctaaggcactgttctttgctttctagcaaaggcaaaagcttcactttctcttagtggcttagtgttcagctaaacaaatagacatgctctgctcacaagaagaaattaaagctcacaacattgcttcctaggagaagacactcatagctgaactgtaggcrtcagtagtatagctgcatggcagacaactctctgttcttcagtttcatgctccactgtctctgagtccactaaatataacagaataaattactttgtatggtgaagaaatttacttagctcttattccaaaaataataaataaatagttattggagcaaaatgtacaaatcaggctgcctccactttctcaggaacccaggctgttgatcatgcacttgaagaaactgacttcaatgaaagtgagaaagtcactttttcccccaaactgtatttcacctcctatatttcatggtcaggtg

SEQ ID NO: 77261 - DNA, 600 bp, Chicken  19866894365564_1
tgcatgggggaataaggcttttcaggatttagaatgaattagggaaaatgtagaggagtgttgcatcaagttgagaccattaaaagcaagttggagtatgtggtttatgagctgctgtaacttcacaaacttcaccaaagcggaacttatcattgcttattagcgtatatattcagctgagatgcagtaaaaagatctggaggcactcacctcctgggtctattgcactttgaattgtggattttaagttgaaagaatggtatttgtggatctgtggaaactactgacaatagagctttrttccttgcttttgcttttatatttcatttgaaagagtgcttcttaaggcatgtctcctttggtttgggaatgattagtttcatggagaaacgagaagcaaacaaatccccacctggactaggcttcttgcatttcctaggcttataagagtttataaaacagctcttwaaaaaaaaatcgccacagctactcttgtatatgtagagctgttaggttattttggctgaaattcctgtgtgttgcttgggatgtaacatagcttagatatcttctagggtaactaaagcagtaactaaaaat

SEQ ID NO: 77262 - DNA, 588 bp, Chicken  19866894365564_2
atattcagctgagatgcagtaaaaagatctggaggcactcacctcctgggtctattgcactttgaattgtggattttaagttgaaagaatggtatttgtggatctgtggaaactactgacaatagagctttrttccttgcttttgcttttatatttcatttgaaagagtgcttcttaaggcatgtctcctttggtttgggaatgattagtttcatggagaaacgagaagcaaacaaatccccacctggactaggcttcttgcatttcctaggcttataagagtttataaaacagctcttwaaaaaaaaatcgccacagctactcttgtatatgtagagctgttaggttattttggctgaaattcctgtgtgttgcttgggatgtaacatagcttagatatcttctagggtaactaaagcagtaactaaaaatatatgattcctgagattgtatgtttttaaggaaaattggcaacaaataaaagcatatacataacaatacataccttgatgcaatcacataaggtttacaactaaaatccagtgacttaaactgaaattcttgcagygctggtgtctgtactttgtg

SEQ ID NO: 77263 - DNA, 320 bp, Chicken  19866894365564_3
taggcttataagagtttataaaacagctcttwaaaaaaaaatcgccacagctactcttgtatatgtagagctgttaggttattttggctgaaattcctgtgtgttgcttgggatgtaacatagcttagatatcttctagggtaactaaagcagtaactaaaaatatatgattcctgagattgtatgtttttaaggaaaattggcaacaaataaaagcatatacataacaatacataccttgatgcaatcacataaggtttacaactaaaatccagtgacttaaactgaaattcttgcagygctggtgtctgtactttgtg

SEQ ID NO: 77264 - DNA, 600 bp, Chicken  19866894365569_1
tatcctcatccacgtacagcatagcacaatgaataatactaatgagatggaatacactgcttcataaaaataaaacgttcaccaacactatacacacaatgagaccacacagtacacatacacacttacacaaggtaagctgctcatgtgaacactggccttcctgtgccacagaatatcaactactgcagaattcaggacaccacaagtgtgaccctcacctttactgctctcatataaatagaaagttgctttttaaatcccatatataattgctaactatcaaaggtacaaacatarctcatgtatcctgcaacaaaggaggatcttgttatcaactgagtacacgcacggaagcatcagggttgatgtgtsaggtcccatttgatgtgttaagttcaaaaggcaaaatgaagctacataattgtcctgcttttctgtaacrtttatgccaaaggccttatttttttctgcatctcgactgaccttcaaacagaggattacttggtgaccagtattcagcaatactccataaactaaacctttgccctccaccagcttctcagggactattctccacgtaactatttctctccagaa

SEQ ID NO: 77265 - DNA, 600 bp, Chicken  19866894365569_2
cgttcaccaacactatacacacaatgagaccacacagtacacatacacacttacacaaggtaagctgctcatgtgaacactggccttcctgtgccacagaatatcaactactgcagaattcaggacaccacaagtgtgaccctcacctttactgctctcatataaatagaaagttgctttttaaatcccatatataattgctaactatcaaaggtacaaacatarctcatgtatcctgcaacaaaggaggatcttgttatcaactgagtacacgcacggaagcatcagggttgatgtgtsaggtcccatttgatgtgttaagttcaaaaggcaaaatgaagctacataattgtcctgcttttctgtaacrtttatgccaaaggccttatttttttctgcatctcgactgaccttcaaacagaggattacttggtgaccagtattcagcaatactccataaactaaacctttgccctccaccagcttctcagggactattctccacgtaactatttctctccagaaaggattaaaagctacagctttaggacttgaagagggagctgcactccagtacagtggaggctgtgcacagagctg

SEQ ID NO: 77266 - DNA, 600 bp, Chicken  19866894365569_3
atgtgaacactggccttcctgtgccacagaatatcaactactgcagaattcaggacaccacaagtgtgaccctcacctttactgctctcatataaatagaaagttgctttttaaatcccatatataattgctaactatcaaaggtacaaacatarctcatgtatcctgcaacaaaggaggatcttgttatcaactgagtacacgcacggaagcatcagggttgatgtgtsaggtcccatttgatgtgttaagttcaaaaggcaaaatgaagctacataattgtcctgcttttctgtaacrtttatgccaaaggccttatttttttctgcatctcgactgaccttcaaacagaggattacttggtgaccagtattcagcaatactccataaactaaacctttgccctccaccagcttctcagggactattctccacgtaactatttctctccagaaaggattaaaagctacagctttaggacttgaagagggagctgcactccagtacagtggaggctgtgcacagagctgtactaaaaggacaggtcgggaagttgttgcaacttcggtaatcctagatactgagcacagaagaatcaag

SEQ ID NO: 77267 - DNA, 599 bp, Chicken  19866894365573_1
  misc_feature (1)..(4): n is any nucleotide
nnnnctacgcaaacacttcatcagtatttactttgaactgacttccctgataaataactatgtatgaaaaccttcaaaactcccatgttaggataataaaattttaaacaaaaaaatactacaaaggaaaaatatatggaggggaaaaaaaaaaaatcaacagcaatgtacagaattgcacagttgctactagaagtaatgtggacaaccactctttgtaaaattgtcttctcactagaaaatgagaggtccaatgtagaaaacacaaaatgcaggaacacactgacagctatggttgasaactagttcactagataccataagctttaatccctaatacttgttaccctaaaattagagtcatagaactcctctggaaacatggcagccatacaatcccttaatttcccacacattttacaggactgaagcaccatcacaaaggtcctaattagacttctggagaaaaaattgaaaagtctctctatgagatgcactgagtcacaagtaacacaatgcaaacctcatccacgtgaggcgtgccaaatgcaccagggagggcaaaataaataagctcatcgagaatagacagcagctaa

SEQ ID NO: 77268 - DNA, 583 bp, Chicken  19866894365573_2
tagaactcctctggaaacatggcagccatacaatcccttaatttcccacacattttacaggactgaagcaccatcacaaaggtcctaattagacttctggagaaaaaattgaaaagtctctctatgagatgcactgagtcacaagtaacacaatgcaaacctcatccacgtgaggcgtgccaaatgcaccagggagggcaaaataaataagctcatcgagaatagacagcagctaaaaccatgttcccaaatggaaaactggcaatgaaaaaaccccagcactagcccctataagaatakccrtatttatcaaggaaattgtccatctgacagacttccagtaacttcacagcacttgtttgttcaatagccagtttcacaagtgaaattcctaacgcggatcattagctgccacatttaagtaaataagaacacacgtaaacatatccacgggtactgatagttcataattctaacagactccgtggaagctctaactgaccaactgaccttttccagaggtttgcctgaagaaatcccaataagtttccagtcgttcaacacttcttctatttttgaaata

SEQ ID NO: 77269 - DNA, 580 bp, Chicken  19866894365573_3
aactcctctggaaacatggcagccatacaatcccttaatttcccacacattttacaggactgaagcaccatcacaaaggtcctaattagacttctggagaaaaaattgaaaagtctctctatgagatgcactgagtcacaagtaacacaatgcaaacctcatccacgtgaggcgtgccaaatgcaccagggagggcaaaataaataagctcatcgagaatagacagcagctaaaaccatgttcccaaatggaaaactggcaatgaaaaaaccccagcactagcccctataagaatakccrtatttatcaaggaaattgtccatctgacagacttccagtaacttcacagcacttgtttgttcaatagccagtttcacaagtgaaattcctaacgcggatcattagctgccacatttaagtaaataagaacacacgtaaacatatccacgggtactgatagttcataattctaacagactccgtggaagctctaactgaccaactgaccttttccagaggtttgcctgaagaaatcccaataagtttccagtcgttcaacacttcttctatttttgaaata

SEQ ID NO: 77270 - DNA, 600 bp, Chicken  19866894365592_1
tctggctatttctgttccaaaagtcagagattggaaacacagtgcctgatagctttgaatttcccagggctattttctgacctacagcctctcccatagacccatttacaggggttgagatgggtttcgaagaagagcacacactgttcatgcacacttcatgccctccaacgtccttttgaggtcagtcccattctgcaagaatgaaggcagcacaaaaggagaatgtatttactatggttattgccctgtataaagtggtcttctgattctcacatttctgacttcagccacagaggratcctcatctcttgcaccaccagcatttctccttggacaggggcagctcctggctcacccatcctgagttggggtacacatcgcatggtgtgcccagaagmtatcacccatttggtgcgatgtgacagcttgcaaccaccttgggcatctttccaacccaagcagccatattggaggatatcaggcccacagggtgtttttgccctgcacagggcctggccaggggcactgactggtggtagactccccagcatgaggccaggcaaagcccacaccccactgcagatggagatgttacgg

SEQ ID NO: 77271 - DNA, 600 bp, Chicken  19866894365592_2
ccatttacaggggttgagatgggtttcgaagaagagcacacactgttcatgcacacttcatgccctccaacgtccttttgaggtcagtcccattctgcaagaatgaaggcagcacaaaaggagaatgtatttactatggttattgccctgtataaagtggtcttctgattctcacatttctgacttcagccacagaggratcctcatctcttgcaccaccagcatttctccttggacaggggcagctcctggctcacccatcctgagttggggtacacatcgcatggtgtgcccagaagmtatcacccatttggtgcgatgtgacagcttgcaaccaccttgggcatctttccaacccaagcagccatattggaggatatcaggcccacagggtgtttttgccctgcacagggcctggccaggggcactgactggtggtagactccccagcatgaggccaggcaaagcccacaccccactgcagatggagatgttacggttgcctgggaaacgactccatgggatcactaaaaagcattttatatatttgcctgcagatacaagattatcaccttgtctatggggacaaaatcctgacac

SEQ ID NO: 77272 - DNA, 434 bp, Chicken  19866894365592_3
ccttgggcatctttccaacccaagcagccatattggaggatatcaggcccacagggtgtttttgccctgcacagggcctggccaggggcactgactggtggtagactccccagcatgaggccaggcaaagcccacaccccactgcagatggagatgttacggttgcctgggaaacgactccatgggatcactaaaaagcattttatatatttgcctgcagatacaagattatcaccttgtctatggggacaaaatcctgacacaggataaacttagactggaacctgcaaaaatcaattwactcttttgtggtattagctggaatttcacagcactaaacgccatatgaaaagcttcattgtgcaacatgaaccaaatcttccccaaaagagccaagggggatttgtggttaaagcatctcactttccaccaaa

SEQ ID NO: 77273 - DNA, 600 bp, Chicken  19866894365593_1
catagaataccaaggccaaagacactgttaaactaaggagacctaccatcccctgacaagactgttgatgcctctggaaagcaaacacagacagaaaataactgtcatgcttttgtatgagttctccagaaaagtctgctgttggacaactgggtgccagctcatttaaatattggggaatggattgaattttcagtgacagtagcaacaagcacttctgaaaatgatctccatccatagtcatgtaactgtctgaaatacttacaattgcatccaggttaccaaagcaaccccaggaawgttgtcctgaaaatatcaggattctgtctgctatgtatgctacattggatgagactttattctttctgttcctttatgagcttcactaatttgccttgctttccttcttcttgaagacaaaattacattcaacattaataaaacttttcaagcaattcctacctcctacaaggcctcctgtagcctgtgttctactacatcacttcagacaggttttgcagttttgaaggcaatccacctacaacagctatttatgttaattttaggatttgatacagtctcagtgtagcaagcactgca

SEQ ID NO: 77274 - DNA, 600 bp, Chicken  19866894365593_2
caggattctgtctgctatgtatgctacattggatgagactttattctttctgttcctttatgagcttcactaatttgccttgctttccttcttcttgaagacaaaattacattcaacattaataaaacttttcaagcaattcctacctcctacaaggcctcctgtagcctgtgttctactacatcacttcagacaggttttgcagttttgaaggcaatccacctacaacagctatttatgttaattttaggatttgatacagtctcagtgtagcaagcactgcaggcagctactgcacamtacaactgtagctcaggataaggtttggctgttcttgagactgttgagatggctgcaggaatgctattaatgtcccagaaattattagcaacacaatgtgtcaaagtgaaaatccaacttcccccacagagaaactttccttactgagaaacaccttagttcacaatactattgaaagaaaaaaaaaaaaaaaaaaaagagagagagagagagagaaagtatcccaaacagcaaaaatatataataatgtcagttcctgctttgttggtccactatcaatcactacaatccatcatcagt

SEQ ID NO: 77275 - DNA, 600 bp, Chicken  19866894365594_1
tatttaaaataactgctattaaaaaaaatctatttaatgtgttaaagcacagcctgagctatgctagaagtggtctagaacagagatggcacaatgtgactaatctctacaaccatgatgacatcccttctgtaaagaccaaaccccccattagctgttcttttcacctagagcatgttcatgtgggatgcagtgaacaaatggcaatgcaggtgtttggctcatgttcacagtccttcagaatttaacaataggacaaataatgatgaaagtgtgacatttcaagggtataggcaaggwgtggtttgtaggaggaggaaagatgtactaaattagctgactgaactagaagaaactcttggactgaaaaataaatgaaaggcttatcagtttgtttaatcccagcttcagcaactggtttaataaaagaataccatctattcctttgaacttgtggacttttagtaaagtaacatttgtagtgtgcaatgactaaagatttctgaaatggactttccccaaaggattatttgataaggccaccctgagtcatacagtgacaaaggtttctctatctgattaatcagagactcttcagtc

SEQ ID NO: 77276 - DNA, 600 bp, Chicken  19866894365599_1
aggtaggaagccaagtacagcttgccttgttatggttggaaaacaagggatgcgttgcctcatgggacagtgccatggttagagtaacctgcaggaagtcatactcaccttctgagaggagggggaccaaagagagcctgacagcacacgtagctgtgtcaggctagggggaaacatcaatacttcgcccaaagcaaaggtttgggtgccctgccatgttgctgcagtgaaaatacttacttccagcatggatgctgttacaaaatctgactaacactcagccttttggttagttcatasaaaaagtggtgtgatctgctggttagacctggagacagacgttcttgactgctgagtcacatttgcaggtgtgtccatcacctggatggagagacctttcacactgccttggtttacctgtaagagaagacagcccactttgccagctgctctcatgggaaatgtggctcaggaggagcaccctgtgtggctgtggtgcctttggtgattatcaaagctcctcgttgcacagtggttgttcatcagaagggtacctcatactyccctctgatgctcccaggctgtactgtctgtgaggrc

SEQ ID NO: 77277 - DNA, 600 bp, Chicken  19866894365599_2
aatctgactaacactcagccttttggttagttcatasaaaaagtggtgtgatctgctggttagacctggagacagacgttcttgactgctgagtcacatttgcaggtgtgtccatcacctggatggagagacctttcacactgccttggtttacctgtaagagaagacagcccactttgccagctgctctcatgggaaatgtggctcaggaggagcaccctgtgtggctgtggtgcctttggtgattatcaaagctcctcgttgcacagtggttgttcatcagaagggtacctcatactyccctctgatgctcccaggctgtactgtctgtgaggrctgcccatgtttgtcatcttggtttggacactcctgtcatcatccctctccagcatacacagtgtattcatttttctccacatccatactatgccatgcctctacwttttaggaataataaaaaaaaataaatcaaaaattgttttccaaacgactggatgttataactgcaaaatattactgtactttattgataacgttgtttccataatagaactatttaacacaaagtatgatgtcctgtatgagccccacataaatatt

SEQ ID NO: 77278 - DNA, 600 bp, Chicken  19866894365599_3
saaaaagtggtgtgatctgctggttagacctggagacagacgttcttgactgctgagtcacatttgcaggtgtgtccatcacctggatggagagacctttcacactgccttggtttacctgtaagagaagacagcccactttgccagctgctctcatgggaaatgtggctcaggaggagcaccctgtgtggctgtggtgcctttggtgattatcaaagctcctcgttgcacagtggttgttcatcagaagggtacctcatactyccctctgatgctcccaggctgtactgtctgtgaggrctgcccatgtttgtcatcttggtttggacactcctgtcatcatccctctccagcatacacagtgtattcatttttctccacatccatactatgccatgcctctacwttttaggaataataaaaaaaaataaatcaaaaattgttttccaaacgactggatgttataactgcaaaatattactgtactttattgataacgttgtttccataatagaactatttaacacaaagtatgatgtcctgtatgagccccacataaatatttccattacatcgctgatagggatctgaaaaatttca

SEQ ID NO: 77279 - DNA, 600 bp, Chicken  19866894365599_4
gccttggtttacctgtaagagaagacagcccactttgccagctgctctcatgggaaatgtggctcaggaggagcaccctgtgtggctgtggtgcctttggtgattatcaaagctcctcgttgcacagtggttgttcatcagaagggtacctcatactyccctctgatgctcccaggctgtactgtctgtgaggrctgcccatgtttgtcatcttggtttggacactcctgtcatcatccctctccagcatacacagtgtattcatttttctccacatccatactatgccatgcctctacwttttaggaataataaaaaaaaataaatcaaaaattgttttccaaacgactggatgttataactgcaaaatattactgtactttattgataacgttgtttccataatagaactatttaacacaaagtatgatgtcctgtatgagccccacataaatatttccattacatcgctgatagggatctgaaaaatttcagtatgcacatcctgcaaatgtgagtgtaattgatacaaggtatgtatcttaatgtacatcttgagtaaacataaaaagaccatatcctaatggaaaacaggctctg

SEQ ID NO: 77280 - DNA, 600 bp, Chicken  19866894365599_5
agaactatttaacacaaagtatgatgtcctgtatgagccccacataaatatttccattacatcgctgatagggatctgaaaaatttcagtatgcacatcctgcaaatgtgagtgtaattgatacaaggtatgtatcttaatgtacatcttgagtaaacataaaaagaccatatcctaatggaaaacaggctctgtcttacaatgtacaatcacgctctcacatctaaactggactttgggtttagaaaacaaatcctaaatcaatcaatcgaaaggacagatcacagttcacatatttgwtaraaaaaamccttaagttctttggtggaaaagcttgggaaactccatccagccccagtggtggaggggtgggaaaggacggactgaggtatcagttcaaacaatctgaggaaaacgttgaataaacattgaagacaacagaatagaaaccagacgccaaatattcattcgtggggtcttcaaaggggattttgtgatttattttaattgttgttgaaagagaaagattaatttggggatgaaaaatgtatgcaaattcagctctggtcgttactaaaaaaaatacttcctactcaaagc

SEQ ID NO: 77281 - DNA, 600 bp, Chicken  19866894365599_6
actatttaacacaaagtatgatgtcctgtatgagccccacataaatatttccattacatcgctgatagggatctgaaaaatttcagtatgcacatcctgcaaatgtgagtgtaattgatacaaggtatgtatcttaatgtacatcttgagtaaacataaaaagaccatatcctaatggaaaacaggctctgtcttacaatgtacaatcacgctctcacatctaaactggactttgggtttagaaaacaaatcctaaatcaatcaatcgaaaggacagatcacagttcacatatttgttaraaaaaamccttaagttctttggtggaaaagcttgggaaactccatccagccccagtggtggaggggtgggaaaggacggactgaggtatcagttcaaacaatctgaggaaaacgttgaataaacattgaagacaacagaatagaaaccagacgccaaatattcattcgtggggtcttcaaaggggattttgtgatttattttaattgttgttgaaagagaaagattaatttggggatgaaaaatgtatgcaaattcagctctggtcgttactaaaaaaaatacttcctactcaaagcaga

SEQ ID NO: 77282 - DNA, 600 bp, Chicken  19866894365599_7
aacacaaagtatgatgtcctgtatgagccccacataaatatttccattacatcgctgatagggatctgaaaaatttcagtatgcacatcctgcaaatgtgagtgtaattgatacaaggtatgtatcttaatgtacatcttgagtaaacataaaaagaccatatcctaatggaaaacaggctctgtcttacaatgtacaatcacgctctcacatctaaactggactttgggtttagaaaacaaatcctaaatcaatcaatcgaaaggacagatcacagttcacatatttgttaraaaaaamccttaagttctttggtggaaaagcttgggaaactccatccagccccagtggtggaggggtgggaaaggacggactgaggtatcagttcaaacaatctgaggaaaacgttgaataaacattgaagacaacagaatagaaaccagacgccaaatattcattcgtggggtcttcaaaggggattttgtgatttattttaattgttgttgaaagagaaagattaatttggggatgaaaaatgtatgcaaattcagctctggtcgttactaaaaaaaatacttcctactcaaagcagaagaaagc

SEQ ID NO: 77283 - DNA, 600 bp, Chicken  19866894365601_1
ggacagccctgtgctctgctcacctccagctgctcactccagttgggcatcatcttctccataagaattccaccagcaacacagattaggaaagtgatgccaacagtaatgcaacagagggagtggagtgatggtgagatcccattatgcaaggacaagagagctgataacagctaataattagtatactaagatgcttgcagaactgcaatgtcagggatcaaatcagattaaaattctgctggaaatcatctgctctgtgaacatctcagtgaattggaaaagcggtgaagctggtcwacattgtgcccaactccctctgacactaaacatcatcacagtgtcattccaatttaaaaggctgccagagtacagaatcacagcctgtagctccctccacaaacgctgtacctgagcttccaagctggggtgcgtggagagtttagcttattcacaccccatcaattcctcctgtcttctgcagtcacagtgtgcccttcctctccattccccacaactcactgagatgcttctctgtctttttgcatagatcagagcaatagaagaggtatgatgcatgtccttctttctgaaacattc

SEQ ID NO: 77284 - DNA, 599 bp, Chicken  19866894365603_1
  misc_feature (1)..(8): n is any nucleotide
nnnnnnnncccttagagtgaggaaactggaaatcttttcacttttcatggtaatgtgataggaagagaatatttattattatacatgggtgtatagtgttttgttcctggtaatgaatgaaagtactgggttctgttctagagaacagaagttctcttctgttttatgaagaacgttgttgtgagaactaaaatttgtggtagaggagtggggaggtccttgacttctgataacccttccacactactagttgaagtaaatctgccagggcatctgtccaatcagttggatgagcactgrcactttcatcaccagaagtagtcagaatttccttcagaggaaaattgactttttgaactttcagactactgggctgagcagaatgaaaacaattgtttaaagacatcatgcacagatctgagggacagatgactctgaactatgccagagaattacgataagatattcaggctgcataccataacttttttttttttcaatttgtttccttttaatcattgttttttctctactgtttgttcacagtctcacttgcttgtcatcgtttctcagtaatagtgcatatataagatactctg

SEQ ID NO: 77285 - DNA, 600 bp, Chicken  19866894365612_1
acatttaccagtctgaacatagcagctgtctccacttgtttattggcaatttctatttctgcattagaaacaggtgggcaagctcagggagctaacaagtctctctttgatgtagacatggacaaatcctctcattaacagcacagcattttaaaaatcattacagggtattttcagtcttatttcattttatatataattgcagcccattaattgcaaattcttgtttctggaatcataagcaacaagaagcatcagccagtggtgcctgcaaactactagtttcaatatattgctgtwcttattttattgggataagattggctgtatcactcacatagcaatgatcctattctagaattaaagaaaagaaattcagttaaacagatctgatagaaatctgyagcgaacatcccagcaaaatcaactgacaggtgggaattactaacagcaggtgtttggtattacagatacaaaaccagggggaaaccaaatgcatgccacatactgcaaaaatgcctcctcacccactggggttctcaggtgtattaatattaggattagcagagagaaataccatttgctgtgtttcacatgaat

SEQ ID NO: 77286 - DNA, 600 bp, Chicken  19866894365612_2
ctttgatgtagacatggacaaatcctctcattaacagcacagcattttaaaaatcattacagggtattttcagtcttatttcattttatatataattgcagcccattaattgcaaattcttgtttctggaatcataagcaacaagaagcatcagccagtggtgcctgcaaactactagtttcaatatattgctgtwcttattttattgggataagattggctgtatcactcacatagcaatgatcctattctagaattaaagaaaagaaattcagttaaacagatctgatagaaatctgyagcgaacatcccagcaaaatcaactgacaggtgggaattactaacagcaggtgtttggtattacagatacaaaaccagggggaaaccaaatgcatgccacatactgcaaaaatgcctcctcacccactggggttctcaggtgtattaatattaggattagcagagagaaataccatttgctgtgtttcacatgaatgtagagctgcctccacggatgtgggcagagcagctgaacagtctgcctgcagctctgccaaacaggcagtaaagctgctccatgcagcccaaacaacatcaaca

SEQ ID NO: 77287 - DNA, 600 bp, Chicken  19866894365612_3
catcccagcaaaatcaactgacaggtgggaattactaacagcaggtgtttggtattacagatacaaaaccagggggaaaccaaatgcatgccacatactgcaaaaatgcctcctcacccactggggttctcaggtgtattaatattaggattagcagagagaaataccatttgctgtgtttcacatgaatgtagagctgcctccacggatgtgggcagagcagctgaacagtctgcctgcagctctgccaaacaggcagtaaagctgctccatgcagcccaaacaacatcaacaacttamaattcacaactagtttggtcagccaccgttaaaaggtgttccctacagcatttcccaatggtttatttgcttagcgtatkgataacacattccccyttgcacagcagaagcccactgttgcagagcagaaaatgcaagatccacaggaccacaagatagcagttcatctcctgaactatctctgagttgagttcccaaaccaaaagcaatgcttcactagaagagcagcagcacagcccactttttggacacactcaaagtaaargccaaagacgagtttattcgtatgagatgaaaagg

SEQ ID NO: 77288 - DNA, 600 bp, Chicken  19866894365612_4
caaatgcatgccacatactgcaaaaatgcctcctcacccactggggttctcaggtgtattaatattaggattagcagagagaaataccatttgctgtgtttcacatgaatgtagagctgcctccacggatgtgggcagagcagctgaacagtctgcctgcagctctgccaaacaggcagtaaagctgctccatgcagcccaaacaacatcaacaacttamaattcacaactagtttggtcagccaccgttaaaaggtgttccctacagcatttcccaatggtttatttgcttagcgtatkgataacacattccccyttgcacagcagaagcccactgttgcagagcagaaaatgcaagatccacaggaccacaagatagcagttcatctcctgaactatctctgagttgagttcccaaaccaaaagcaatgcttcactagaagagcagcagcacagcccactttttggacacactcaaagtaaargccaaagacgagtttattcgtatgagatgaaaaggcatcagaaagcaacgtgaatctggattaagcaacatgaatctggattgagaccagcacctgatccagagaagaaaaaata

SEQ ID NO: 77289 - DNA, 600 bp, Chicken  19866894365612_5
actgcaaaaatgcctcctcacccactggggttctcaggtgtattaatattaggattagcagagagaaataccatttgctgtgtttcacatgaatgtagagctgcctccacggatgtgggcagagcagctgaacagtctgcctgcagctctgccaaacaggcagtaaagctgctccatgcagcccaaacaacatcaacaacttamaattcacaactagtttggtcagccaccgttaaaaggtgttccctacagcatttcccaatggtttatttgcttagcgtatkgataacacattccccyttgcacagcagaagcccactgttgcagagcagaaaatgcaagatccacaggaccacaagatagcagttcatctcctgaactatctctgagttgagttcccaaaccaaaagcaatgcttcactagaagagcagcagcacagcccactttttggacacactcaaagtaaargccaaagacgagtttattcgtatgagatgaaaaggcatcagaaagcaacgtgaatctggattaagcaacatgaatctggattgagaccagcacctgatccagagaagaaaaaatacataactggagacaaa

SEQ ID NO: 77290 - DNA, 600 bp, Chicken  19866894365612_6
tgctccatgcagcccaaacaacatcaacaacttamaattcacaactagtttggtcagccaccgttaaaaggtgttccctacagcatttcccaatggtttatttgcttagcgtatkgataacacattccccyttgcacagcagaagcccactgttgcagagcagaaaatgcaagatccacaggaccacaagatagcagttcatctcctgaactatctctgagttgagttcccaaaccaaaagcaatgcttcactagaagagcagcagcacagcccactttttggacacactcaaagtaaargccaaagacgagtttattcgtatgagatgaaaaggcatcagaaagcaacgtgaatctggattaagcaacatgaatctggattgagaccagcacctgatccagagaagaaaaaatacataactggagacaaaagctgttctttatgacagcaagtacacttgtttggytctgacatcagctcatatgcatgctacacttggtgagctttccagccacgtattattctgtttcacaaggcaacctgccagctctcctgcctcttgctccccgagcacagcttgcctgggtagttagcaatga

SEQ ID NO: 77291 - DNA, 600 bp, Chicken  19866894365612_7
tgcaagatccacaggaccacaagatagcagttcatctcctgaactatctctgagttgagttcccaaaccaaaagcaatgcttcactagaagagcagcagcacagcccactttttggacacactcaaagtaaargccaaagacgagtttattcgtatgagatgaaaaggcatcagaaagcaacgtgaatctggattaagcaacatgaatctggattgagaccagcacctgatccagagaagaaaaaatacataactggagacaaaagctgttctttatgacagcaagtacacttgtttggytctgacatcagctcatatgcatgctacacttggtgagctttccagccacgtattattctgtttcacaaggcaacctgccagctctcctgcctcttgctccccgagcacagcttgcctgggtagttagcaatgaggagatacaaccaaacaaaggagaacaattggtcaccgtgacagcccagcagttcacctcctctgcttagaaaaatacttcttaattgccttacagacagcagatctagacggagaagagccctgcagacaagcagcgcatctaccaccacaaaactacagcttctt

SEQ ID NO: 77292 - DNA, 599 bp, Chicken  19866894365614_1
  misc_feature (1)..(96): n is any nucleotide
nnnnnnnnnnnnnnnnnnnnnnnnnnnnnnnnnnnnnnnnnnnnnnnnnnnnnnnnnnnnnnnnnnnnnnnnnnnnnnnnnnnnnnnnnnnnnnnncccaaaaaatcaggccatataactgagagcagtttcgatccacatcttgaactccatgcaccctggggctgtgatctctgccctggagagcctgttgcagtggctgaccagtgaagaacctgtgaagaacctttccttgatatccaacccgaacctccccctgtcacggctcccagaaacaggaatctcaggtgttttaatgarggattaattttccagtaaaatcattgtgagagctcaagtgtgttcaaatacaggagggactgggaaggcatttgttctttgtcctattttcagataaacagctgcagtgagaagtgctgtatctccctggaactgttctttcatacttcaatacttaattctagatgacctttaaaagttccttccaattcaaatgattctgtgactctcttttgcaagttaaagcttatagatagaagaaacaaaacaacaacaaaataaaaactttaagggtaggacccaggtaatacaactcagag

SEQ ID NO: 77293 - DNA, 599 bp, Chicken  19866894365621_1
  misc_feature (1)..(160): n is any nucleotide
nnnnnnnnnnnnnnnnnnnnnnnnnnnnnnnnnnnnnnnnnnnnnnnnnnnnnnnnnnnnnnnnnnnnnnnnnnnnnnnnnnnnnnnnnnnnnnnnnnnnnnnnnnnnnnnnnnnnnnnnnnnnnnnnnnnnnnnnnnnnnnnnnnnnnnnnnnnnnnnnaagcacaactaacgtgatagttttgtatctgttcatttccaaggcaagaattccaacttaaaaaggatgcttcaccttggagtcagccctgttgtccccaacataccactatatcagcttaaattttctttccaacaaasaggtacattttctgcatacaagctcagcaagtggtttcacagtaatacaaacctgactaggagagcaaaccaagctcattttatgctcttgaataaacactacagagmagtctgtccaacctgtttttcaaaataaataacaacatgagtagtttttgcttttgctactgtgccaagcactcatatcttattacctttcacagtccaggacagacawctcttgtacktttattctctacattgttcttcaacatcagctgtgatcagctacagataagaaacataatgtgctttctgaa

SEQ ID NO: 77294 - DNA, 599 bp, Chicken  19866894365621_2
  misc_feature (1)..(52): n is any nucleotide
nnnnnnnnnnnnnnnnnnnnnnnnnnnnnnnnnnnnnnnnnnnnnnnnnnnnaagcacaactaacgtgatagttttgtatctgttcatttccaaggcaagaattccaacttaaaaaggatgcttcaccttggagtcagccctgttgtccccaacataccactatatcagcttaaattttctttccaacaaasaggtacattttctgcatacaagctcagcaagtggtttcacagtaatacaaacctgactaggagagcaaaccaagctcattttatgctcttgaataaacactacagagmagtctgtccaacctgtttttcaaaataaataacaacatgagtagtttttgcttttgctactgtgccaagcactcatatcttattacctttcacagtccaggacagacawctcttgtacktttattctctacattgttcttcaacatcagctgtgatcagctacagataagaaacataatgtgctttctgaatgttagtactgaagtcaagtactgaaacctatgcttccctacatgttaggtttcccctgacacaaagactcttttgctttatttttaagcttattttctactaaagca

SEQ ID NO: 77295 - DNA, 600 bp, Chicken  19866894365621_3
ttaaaaaggatgcttcaccttggagtcagccctgttgtccccaacataccactatatcagcttaaattttctttccaacaaasaggtacattttctgcatacaagctcagcaagtggtttcacagtaatacaaacctgactaggagagcaaaccaagctcattttatgctcttgaataaacactacagagmagtctgtccaacctgtttttcaaaataaataacaacatgagtagtttttgcttttgctactgtgccaagcactcatatcttattacctttcacagtccaggacagacawctcttgtacktttattctctacattgttcttcaacatcagctgtgatcagctacagataagaaacataatgtgctttctgaatgttagtactgaagtcaagtactgaaacctatgcttccctacatgttaggtttcccctgacacaaagactcttttgctttatttttaagcttattttctactaaagcaacaaatcactgaaaaacattggtatgattgcacactccggtgtatttggattttttcttcgctattaattgctaaatgttttgctatcacacagaaaacacatgcctcta

SEQ ID NO: 77296 - DNA, 600 bp, Chicken  19866894365621_4
tgcttcaccttggagtcagccctgttgtccccaacataccactatatcagcttaaattttctttccaacaaasaggtacattttctgcatacaagctcagcaagtggtttcacagtaatacaaacctgactaggagagcaaaccaagctcattttatgctcttgaataaacactacagagmagtctgtccaacctgtttttcaaaataaataacaacatgagtagtttttgcttttgctactgtgccaagcactcatatcttattacctttcacagtccaggacagacawctcttgtacktttattctctacattgttcttcaacatcagctgtgatcagctacagataagaaacataatgtgctttctgaatgttagtactgaagtcaagtactgaaacctatgcttccctacatgttaggtttcccctgacacaaagactcttttgctttatttttaagcttattttctactaaagcaacaaatcactgaaaaacattggtatgattgcacactccggtgtatttggattttttcttcgctattaattgctaaatgttttgctatcacacagaaaacacatgcctctatctgaagctt

SEQ ID NO: 77297 - DNA, 600 bp, Chicken  19866894365625_1
ttttctaatttctacaacaaaacaactgctactgtctaattcaaataaagcaggctcccatcttcatgtggttatggtgaactgcctgtaagcacaaaatatttgtaaggttcaggtaaaatacatgaaataaaaggcacgggttcaaagggctcaaggaacagtaccagctgtttgcaaggccactgccctgctcttcctgacagcttattttctattctccccccagatactagcccagatacagttaaggattaactttataaacagtgtctgctatcagtggcacttttccatgtrttatttacagtcttygttgtatgaatcaatgagtccaaaaccccactgtctgctgttttggattttggagggctcamaatgaacacaaatacgctgtgtatcataaccagagtttattgctaccagccttacttgcactgagcagcatctcactctccaaacccagtgctaaaattttatatcgctacttatctcattgtgttacctgagcacattccatataaaactgacagcagcagggaatttcyttagcaggctccatcarctgccctcatattatggaaaatatctgcataaggc

SEQ ID NO: 77298 - DNA, 600 bp, Chicken  19866894365625_2
aacaaaacaactgctactgtctaattcaaataaagcaggctcccatcttcatgtggttatggtgaactgcctgtaagcacaaaatatttgtaaggttcaggtaaaatacatgaaataaaaggcacgggttcaaagggctcaaggaacagtaccagctgtttgcaaggccactgccctgctcttcctgacagcttattttctattctccccccagatactagcccagatacagttaaggattaactttataaacagtgtctgctatcagtggcacttttccatgtrttatttacagtcttygttgtatgaatcaatgagtccaaaaccccactgtctgctgttttggattttggagggctcamaatgaacacaaatacgctgtgtatcataaccagagtttattgctaccagccttacttgcactgagcagcatctcactctccaaacccagtgctaaaattttatatcgctacttatctcattgtgttacctgagcacattccatataaaactgacagcagcagggaatttcyttagcaggctccatcarctgccctcatattatggaaaatatctgcataaggcaacggactgcgagaa

SEQ ID NO: 77299 - DNA, 600 bp, Chicken  19866894365625_3
tgaactgcctgtaagcacaaaatatttgtaaggttcaggtaaaatacatgaaataaaaggcacgggttcaaagggctcaaggaacagtaccagctgtttgcaaggccactgccctgctcttcctgacagcttattttctattctccccccagatactagcccagatacagttaaggattaactttataaacagtgtctgctatcagtggcacttttccatgtrttatttacagtcttygttgtatgaatcaatgagtccaaaaccccactgtctgctgttttggattttggagggctcamaatgaacacaaatacgctgtgtatcataaccagagtttattgctaccagccttacttgcactgagcagcatctcactctccaaacccagtgctaaaattttatatcgctacttatctcattgtgttacctgagcacattccatataaaactgacagcagcagggaatttcyttagcaggctccatcarctgccctcatattatggaaaatatctgcataaggcaacggactgcgagaaaatagtttgttagagaatgtgggagatgtttcgtatgcttaagttgtttaaataaatctaaa

SEQ ID NO: 77300 - DNA, 600 bp, Chicken  19866894365625_4
taaggattaactttataaacagtgtctgctatcagtggcacttttccatgtrttatttacagtcttygttgtatgaatcaatgagtccaaaaccccactgtctgctgttttggattttggagggctcamaatgaacacaaatacgctgtgtatcataaccagagtttattgctaccagccttacttgcactgagcagcatctcactctccaaacccagtgctaaaattttatatcgctacttatctcattgtgttacctgagcacattccatataaaactgacagcagcagggaatttcyttagcaggctccatcarctgccctcatattatggaaaatatctgcataaggcaacggactgcgagaaaatagtttgttagagaatgtgggagatgtttcgtatgcttaagttgtttaaataaatctaaagtcaacattaagccatgtcttcccartaaaaaagtcttctcaagaagatgctaagatgatgaccaaacaaaaggaaagcaaaaacattcactcaattgcacctaccttttccctgccttctctgtccttctgattcatgtaaaatgttgcagtcaacactgcttaattttc

SEQ ID NO: 77301 - DNA, 600 bp, Chicken  19866894365625_5
aacagtgtctgctatcagtggcacttttccatgtrttatttacagtcttygttgtatgaatcaatgagtccaaaaccccactgtctgctgttttggattttggagggctcamaatgaacacaaatacgctgtgtatcataaccagagtttattgctaccagccttacttgcactgagcagcatctcactctccaaacccagtgctaaaattttatatcgctacttatctcattgtgttacctgagcacattccatataaaactgacagcagcagggaatttcyttagcaggctccatcarctgccctcatattatggaaaatatctgcataaggcaacggactgcgagaaaatagtttgttagagaatgtgggagatgtttcgtatgcttaagttgtttaaataaatctaaagtcaacattaagccatgtcttcccartaaaaaagtcttctcaagaagatgctaagatgatgaccaaacaaaaggaaagcaaaaacattcactcaattgcacctaccttttccctgccttctctgtccttctgattcatgtaaaatgttgcagtcaacactgcttaattttcgccaagtttcagatgcg

SEQ ID NO: 77302 - DNA, 600 bp, Chicken  19866894365625_6
taaccagagtttattgctaccagccttacttgcactgagcagcatctcactctccaaacccagtgctaaaattttatatcgctacttatctcattgtgttacctgagcacattccatataaaactgacagcagcagggaatttcyttagcaggctccatcarctgccctcatattatggaaaatatctgcataaggcaacggactgcgagaaaatagtttgttagagaatgtgggagatgtttcgtatgcttaagttgtttaaataaatctaaagtcaacattaagccatgtcttcccartaaaaaagtcttctcaagaagatgctaagatgatgaccaaacaaaaggaaagcaaaaacattcactcaattgcacctaccttttccctgccttctctgtccttctgattcatgtaaaatgttgcagtcaacactgcttaattttcgccaagtttcagatgcgaaggaagatttgcagaggcagggtagcaataaattaaaggtttatttactctcgtcttgaggtgcacagagataaccccctgattttatccgactctccattatttggccattcatgatctcatgcaccccacagtaa

SEQ ID NO: 77303 - DNA, 600 bp, Chicken  19866894365638_1
tgtccaagccaccggctgccagcttctcccagagaatagcatcaaagtctttactgaagtctaggtagactatatcaacaaccttttcctcattcaccagaggagtcactcaatcatagaaggagaactggttggtcaggcaggacctgctggctggacttgatcccctttaaccgctaggttaagtacggacttaaattcctctgaaactaagacacaatcacatgttgaaatgctttcctaaagtagagcagcctgctgcaccgggtcctgtttacaggctgtttgaacagactgtgyctggctattgagcatcacagaggaggatatgcacagacataaatccatctgcaaaatttggaggatgattaaacattgtctccccataatgagccggctttgtacttaatgatgatagcagtgaaaacaaacctaacagaccatttcatctgttaattttttacagctcattgcaattgattttaagaccctgtcatgtcttacaaaaatgatgtccaaaatgcaaatttaaagctaaaaagtatgtgagaatgactgaagcaaagaagatattggtgaaaaargttttgagaggatatg

SEQ ID NO: 77304 - DNA, 600 bp, Chicken  19866894365638_2
tttgaacagactgtgyctggctattgagcatcacagaggaggatatgcacagacataaatccatctgcaaaatttggaggatgattaaacattgtctccccataatgagccggctttgtacttaatgatgatagcagtgaaaacaaacctaacagaccatttcatctgttaattttttacagctcattgcaattgattttaagaccctgtcatgtcttacaaaaatgatgtccaaaatgcaaatttaaagctaaaaagtatgtgagaatgactgaagcaaagaagatattggtgaaaaargttttgagaggatatgggttctgcagcgggattcaaagaggaaagttagcatatggcacctgaaatttatttcacattatagattgctcaaaggcacatatgtttactctttgtgagagaaagcaggctggtgtctcttccaaacttcaaggtttttattattattcttaattacgctttttctctgatgccctaatggaagtaaaaagtaaatcatacctcagaacttcagcaaagtcataaaatgcctcactgtgcccttgaagttaatttttcctaattgctagacgtcccccaaaa

SEQ ID NO: 77305 - DNA, 600 bp, Chicken  19866894365639_1
tttttcaatattctacgctggaaaatcatatgatgatacaagaaaagatctctggaattcttctggtccaacatctcactaaaagtaagtatcagaaattagcctgagtttcaccctatggtttgagttttatctcaactctaaaatttcaaaaactcctgaacatcctttaaaatgaatgctgtcttaagtaatgttaacagaataaaacatcagttagaaatatccacaagcataaaacctccctgaaatttccctttaccagtgaaaataaacacaaatcttgttggattttttttwtcttatatcagatgcatcctattaagtgttctgaatactactgctgtgctatataaattgaatgtatttggaaaacactaaataattaatgacttttattaataatacagagtcatagaacagcttgggttggaaaagactttaaagaatgagattcttctttaacttttgcttcagaagagtaattaggtagttgtcatagaaattaaaaatatgaattacttctaacatctatgttttttgaggattactgcaatttctgttctgtttctgtgacatccactagcactagcattgctt

SEQ ID NO: 77306 - DNA, 599 bp, Chicken  19866894365642_1
  misc_feature (1)..(133): n is any nucleotide
nnnnnnnnnnnnnnnnnnnnnnnnnnnnnnnnnnnnnnnnnnnnnnnnnnnnnnnnnnnnnnnnnnnnnnnnnnnnnnnnnnnnnnnnnnnnnnnnnnnnnnnnnnnnnnnnnnnnnnnnnnnnnnnnnnnnnctaaataaatacagaaaatctacagcaaaatttatagtgccctgccattttgtggtgggaggatactggacatacaggaaatttggaaacaattgctagtaaaaaactgagaatttggttcagtctaactcaatgctaccgaacagcagtcttctaagtactaaaargagtagggtctggagtgaggagtcccatagagtcctcccccaccagcagaagacttcttgaacaaagtgtgcattcctctatggacagcaacaggagaaagctgtgaggaagaaaaaggctagggcattatatagccaactacatcgtgataccagagtagatgcatggtgggcagcctggtaaagaggtgacagatcacagaagctgaaccctgcttaagcgtggcagcatgcaaaagagagtatctacatttgagcttgttatctaaactcctggctaaatcagtgggcattaaatc

SEQ ID NO: 77307 - DNA, 600 bp, Chicken  19866894365642_2
gagaaagctgtgaggaagaaaaaggctagggcattatatagccaactacatcgtgataccagagtagatgcatggtgggcagcctggtaaagaggtgacagatcacagaagctgaaccctgcttaagcgtggcagcatgcaaaagagagtatctacatttgagcttgttatctaaactcctggctaaatcagtgggcattaaatcaatttgctataacgactggaacaagccaaattaggaacacaccaaacatgtcagaagaggccttcagaagcctgaagtattctagactgaaaatytgatcctaaacaagtaaactaagaaaatgtctttgaaaatggacttactgaaattatcaggataaaattacaattctacttctaaaatacaattctaaataaatctagaagacaagaaatcatgccagaaaagatctgagaagcaatctggaaaagacacaaactctaaaaatacagcttctgaaataaagctttctccatactaaaagactaatatgactaatggggcacgagctattgaaaatgtttcatgagaagatctagctaagtacaaagcaataagccttgcaacagttccag

SEQ ID NO: 77308 - DNA, 600 bp, Chicken  19866894365653_1
gggcaggatcctcacatggagcagctgggagttttggcacaaaatgccatcacttgggaaatccaatatgaatttccctccatgctgcccggggtgggttttggtcgctgccgtgcactgtgctgcaaagtgcagcctcagcaacactgctgctgttggcacagagcacgcagtgagagccgggaggcacttctccccttgcaccgtcctgcaggcaccgcatgcagcaccaacacctgcacctgtgcacaccccgacagggcgggctgtgatgcacagaggagcacgagggccattgaygtgaatcctgtggttctgaagtcacaaaaacaccattctacgttgctcagaaccacgattcccttctccctgcaaaggctgcaacgaagagcgtgtccagggtgcgcatcctcggtgctattgatagtgcatggcagagccttgtgagcatgggtcccatctgccacttccactccttctttaaaagatcctaatgactgtcagatccttttagttcttaattaatttcagagttcaactgcaaataggaaacaagacagcttttgcccttacgcatatgaatattactgttccatttaa

SEQ ID NO: 77309 - DNA, 600 bp, Chicken  19866894365654_1
tctgcttttttatcctcattcatgatggctttgtctccttcaattcattctgtttttaattttaccataaattttttgaggcagtaattgtctctaagtacagtttgtatgtgccgtgtagtctggagacacgtattgtgtgttcagagttgactggacagatgtgaatttagtggggaagaaggcagtagaactaagagatgaaagcccctctttaccacttcccttctttagcaccagctagtgctgtgcatgtatttgatatctatattcagcactgtattgaataagaattagctytaatcagaagcttgagtagctacatgagcgtgataatggccaattaattaaatcmagatctcataataatattgtgcaatttctacactggaggtagcagatgacctaccagtttggagcatgaatgaggcaaacatcttattatcaaaggaaaaatacccaccacgtggttaatttttagggagttctgagttgagccaggagttggaggcagtcatccttgtgggtcccttccaattctgaatatcctgtgattctgtgatcccggatgtttgatctagatgtatcttaatgcaaacg

SEQ ID NO: 77310 - DNA, 600 bp, Chicken  19866894365654_2
ttaattttaccataaattttttgaggcagtaattgtctctaagtacagtttgtatgtgccgtgtagtctggagacacgtattgtgtgttcagagttgactggacagatgtgaatttagtggggaagaaggcagtagaactaagagatgaaagcccctctttaccacttcccttctttagcaccagctagtgctgtgcatgtatttgatatctatattcagcactgtattgaataagaattagctytaatcagaagcttgagtagctacatgagcgtgataatggccaattaattaaatcmagatctcataataatattgtgcaatttctacactggaggtagcagatgacctaccagtttggagcatgaatgaggcaaacatcttattatcaaaggaaaaatacccaccacgtggttaatttttagggagttctgagttgagccaggagttggaggcagtcatccttgtgggtcccttccaattctgaatatcctgtgattctgtgatcccggatgtttgatctagatgtatcttaatgcaaacgaaccactgttgtataaagcttagattctattttattttttcaatagaaatggaat

SEQ ID NO: 77311 - DNA, 600 bp, Chicken  19866894365655_1
ttaatgaggtttacacaacattataggtagttgatttagctgtcacagctaccatctgtaactaatcttcccaggagctagcacgctgcacagcttgttcccatactctgtatttctcatgtggtacaacttataacctccataattctcaccccacatcagttttacgccactgtaacttctctgcactcatttggccactcagaccagccagtggagaacagcacccgtagggagaggctgtaaggaagctggatggtaacagcagcaggagggagctacttttcccattccttctcyccttttcccatccttttccccttttccctttcctttcctagaatcacagaatatcctgagttggaaggatcccataaggatcactgagtttaactcctgcccccccacagaaccatccagaattcagtgcctatgtttgagtactgtccaaacacttctctaactctgtcaggctkagtgccatgactgcttcgctggggagcctkttccastgcctgaccaccccctctcagygaagaaccttcatctgatgtccaacctgaacctaccctctcctctcccttggggctccatgaagaa

SEQ ID NO: 77312 - DNA, 539 bp, Chicken  19866894365655_2
aacttctctgcactcatttggccactcagaccagccagtggagaacagcacccgtagggagaggctgtaaggaagctggatggtaacagcagcaggagggagctacttttcccattccttctcyccttttcccatccttttccccttttccctttcctttcctagaatcacagaatatcctgagttggaaggatcccataaggatcactgagtttaactcctgcccccccacagaaccatccagaattcagtgcctatgtttgagtactgtccaaacacttctctaactctgtcaggctkagtgccatgactgcttcgctggggagcctkttccastgcctgaccaccccctctcagygaagaaccttcatctgatgtccaacctgaacctaccctctcctctcccttggggctccatgaagaagagatgccactttttcacaagggctagggaatggggaaagaagggcttacaaaaccataaacaataaacaaaataactgtttattgatgagtgatccgacacaagagccttcagg

SEQ ID NO: 77313 - DNA, 509 bp, Chicken  19866894365655_3
ccagccagtggagaacagcacccgtagggagaggctgtaaggaagctggatggtaacagcagcaggagggagctacttttcccattccttctcyccttttcccatccttttccccttttccctttcctttcctagaatcacagaatatcctgagttggaaggatcccataaggatcactgagtttaactcctgcccccccacagaaccatccagaattcagtgcctatgtttgagtactgtccaaacacttctctaactctgtcaggctkagtgccatgactgcttcgctggggagcctkttccastgcctgaccaccccctctcagygaagaaccttcatctgatgtccaacctgaacctaccctctcctctcccttggggctccatgaagaagagatgccactttttcacaagggctagggaatggggaaagaagggcttacaaaaccataaacaataaacaaaataactgtttattgatgagtgatccgacacaagagccttcagg

SEQ ID NO: 77314 - DNA, 503 bp, Chicken  19866894365655_4
agtggagaacagcacccgtagggagaggctgtaaggaagctggatggtaacagcagcaggagggagctacttttcccattccttctcyccttttcccatccttttccccttttccctttcctttcctagaatcacagaatatcctgagttggaaggatcccataaggatcactgagtttaactcctgcccccccacagaaccatccagaattcagtgcctatgtttgagtactgtccaaacacttctctaactctgtcaggctkagtgccatgactgcttcgctggggagcctkttccastgcctgaccaccccctctcagygaagaaccttcatctgatgtccaacctgaacctaccctctcctctcccttggggctccatgaagaagagatgccactttttcacaagggctagggaatggggaaagaagggcttacaaaaccataaacaataaacaaaataactgtttattgatgagtgatccgacacaagagccttcagg

SEQ ID NO: 77315 - DNA, 481 bp, Chicken  19866894365655_5
gagaggctgtaaggaagctggatggtaacagcagcaggagggagctacttttcccattccttctcyccttttcccatccttttccccttttccctttcctttcctagaatcacagaatatcctgagttggaaggatcccataaggatcactgagtttaactcctgcccccccacagaaccatccagaattcagtgcctatgtttgagtactgtccaaacacttctctaactctgtcaggctkagtgccatgactgcttcgctggggagcctkttccastgcctgaccaccccctctcagygaagaaccttcatctgatgtccaacctgaacctaccctctcctctcccttggggctccatgaagaagagatgccactttttcacaagggctagggaatggggaaagaagggcttacaaaaccataaacaataaacaaaataactgtttattgatgagtgatccgacacaagagccttcagg

SEQ ID NO: 77316 - DNA, 571 bp, Chicken  19866894365657_1
tccgacacagagctactgcttactttcacaatctaatctttaattatgatgtgaattctgtgctcggatatggccatttactctaccttcctctcttgatacaagagaaagtgcaaaaatcagattggaagtcaccagcaccccaacacatgggctttttgttgttgttgttttaaaacattcaacagatacagtgctggaaaatgcttccctaataaactaagacagcattttaatctacaccatggattactccaaaatgcttcctggactgtccaacttctgctcagcaacagcacrcagccttgaacttaartgcctgtgcccagctctttcccataggaaatgctgcacrggacagcccawtacaccccctgcagttatattttacacatcattaccttcttcctggacaattcaccaaagttgccaagaataaaaacaataattattaaaatctgtagagttgatgcacagcaccaagcctataatttcttaaagtgcacgctcagtcatgatcgaaagttgcaagtctttgaccttcagtttagtgaaggcagacacactgcat

SEQ ID NO: 77317 - DNA, 555 bp, Chicken  19866894365657_2
tgcttactttcacaatctaatctttaattatgatgtgaattctgtgctcggatatggccatttactctaccttcctctcttgatacaagagaaagtgcaaaaatcagattggaagtcaccagcaccccaacacatgggctttttgttgttgttgttttaaaacattcaacagatacagtgctggaaaatgcttccctaataaactaagacagcattttaatctacaccatggattactccaaaatgcttcctggactgtccaacttctgctcagcaacagcacrcagccttgaacttaartgcctgtgcccagctctttcccataggaaatgctgcacrggacagcccawtacaccccctgcagttatattttacacatcattaccttcttcctggacaattcaccaaagttgccaagaataaaaacaataattattaaaatctgtagagttgatgcacagcaccaagcctataatttcttaaagtgcacgctcagtcatgatcgaaagttgcaagtctttgaccttcagtttagtgaaggcagacacactgcat

SEQ ID NO: 77318 - DNA, 516 bp, Chicken  19866894365657_3
ttctgtgctcggatatggccatttactctaccttcctctcttgatacaagagaaagtgcaaaaatcagattggaagtcaccagcaccccaacacatgggctttttgttgttgttgttttaaaacattcaacagatacagtgctggaaaatgcttccctaataaactaagacagcattttaatctacaccatggattactccaaaatgcttcctggactgtccaacttctgctcagcaacagcacrcagccttgaacttaartgcctgtgcccagctctttcccataggaaatgctgcacrggacagcccawtacaccccctgcagttatattttacacatcattaccttcttcctggacaattcaccaaagttgccaagaataaaaacaataattattaaaatctgtagagttgatgcacagcaccaagcctataatttcttaaagtgcacgctcagtcatgatcgaaagttgcaagtctttgaccttcagtttagtgaaggcagacacactgcat

SEQ ID NO: 77319 - DNA, 505 bp, Chicken  19866894365657_4
gatatggccatttactctaccttcctctcttgatacaagagaaagtgcaaaaatcagattggaagtcaccagcaccccaacacatgggctttttgttgttgttgttttaaaacattcaacagatacagtgctggaaaatgcttccctaataaactaagacagcattttaatctacaccatggattactccaaaatgcttcctggactgtccaacttctgctcagcaacagcacrcagccttgaacttaartgcctgtgcccagctctttcccataggaaatgctgcacrggacagcccawtacaccccctgcagttatattttacacatcattaccttcttcctggacaattcaccaaagttgccaagaataaaaacaataattattaaaatctgtagagttgatgcacagcaccaagcctataatttcttaaagtgcacgctcagtcatgatcgaaagttgcaagtctttgaccttcagtttagtgaaggcagacacactgcat

SEQ ID NO: 77320 - DNA, 363 bp, Chicken  19866894365659_1
ctcccttcccccggtacaagaaattcatgacctttcattttcttttcagttttcatattccagaatacacgagttcttctcataatgcccttcttattttctctgaatgatcggagaggtctctcacttcctaacctagttacatctcagtcttctcttcctgatgccactgagatgagagataacgaaaaaaaaatagaaaggaacccaaaccaaacaagaacatgttttgccttctatatttgaagaggaaaaagaatagcctcaggacaagaagactcccttacggccaagacgacygacaaattcttgtggttttctccaaaagtcaaaccaaaatccaaccgccagccaagctgagtt

SEQ ID NO: 77321 - DNA, 568 bp, Chicken  19866894365660_1
ttcctgcacccaattttttcatgggtgaccatatatgccctgattgtctccccccaatgatgcaacgaggcagttctgacactgtctgctccccccgtagtgccaggcttctgttgtacagttggagtggactggaaatctctcactactccggcatgtctccctcttaccacggactacttccctgaccgccagagcctgcagaatgattacactgagggctgctacgatctcctcccagaggctgacatggacaggtttggccagcaccttttctgtgaagtgttttgcattgaatcygaggtgcttcaaacacagttgatgggagaggaatgctttgcagtttatacaagagaaaaatgagytgctgctgtcactagcagcaaaatacttggatttttctcatttcagtgataaattttgcaccttttctgatgttgccatctgacagtattacattctatgctttttcaggaatgttttgcttacaaagttctacttcaaaaaataacgaaaaccaagaggaaatatccctttagagcaggaggacaaagttcaagagaggaag

SEQ ID NO: 77322 - DNA, 503 bp, Chicken  19866894365660_2
cgaggcagttctgacactgtctgctccccccgtagtgccaggcttctgttgtacagttggagtggactggaaatctctcactactccggcatgtctccctcttaccacggactacttccctgaccgccagagcctgcagaatgattacactgagggctgctacgatctcctcccagaggctgacatggacaggtttggccagcaccttttctgtgaagtgttttgcattgaatcygaggtgcttcaaacacagttgatgggagaggaatgctttgcagtttatacaagagaaaaatgagytgctgctgtcactagcagcaaaatacttggatttttctcatttcagtgataaattttgcaccttttctgatgttgccatctgacagtattacattctatgctttttcaggaatgttttgcttacaaagttctacttcaaaaaataacgaaaaccaagaggaaatatccctttagagcaggaggacaaagttcaagagaggaag

SEQ ID NO: 77323 - DNA, 600 bp, Chicken  19866894365661_1
ctttaatgcagacatgatgctatggagacgcaggggagaagggcagccaatcctgctttatggtatgctgtcccaaacagttcataaaacagcattatttgttaaaaattgcaagtcagtcttcacaatagagcattgtatgaccacttagttggatgtatcctttcctgcattcgctcgtctgctgttctaaaaccagatcttattgcagcgctaactacagaatacccaaagcatcagaaatcagatacctgaaaggagaattctgtgatgatccccacatcaaaataggaggggggraatttgggtcattttatgcttacccagctgctgcagatagagaaaatgcagcagaaacagacactggctgcgccgctcctgatgtgcggtcagggtaaaggagaaggctgtgaagttggcccgagaccatcatttcatttgggaacatgttcatagcagttactgtaatttttcatagacctgatcatgaattttccagctttcctttaaaatgaagctgctgttggaaataaaggcgcaagttgttcaacgtcaactcatgcttcagagaagagttggaagcagtgcctgtgttcaggt

SEQ ID NO: 77324 - DNA, 600 bp, Chicken  19866894365669_1
tctgacagcttaggtgtgagatacagttttcaacaatactaaatcgttcatttcctaaggaagtgtcaacagatagatcataaaaaaagccctgatgtttcagattacttaatgaaagggcctatgaacagtaaccactacacgataagagaagattaaatatgtctttctttgaagtttgtatgatgagattttgctgttcaacatggagagcttatgccaggtcattcaacctggttgatgtgaagttgttcagggatgacataaagtaagactcaatttgcagataggtgggttctytaattataatgaagcaaatgaattatttgactaaagaatatgtcttctacataaacttaaaagtaagctaaatataatgtctttttaatgtgacttctgggatattcagagccgggggatcatttagactattattttagtcttacaaaaaaaatctattttacttatatagaggaaaaaagcagcctaggaaattcatacggcttccagcagtagcattattggtcattcttacagtattcagatgggtatttacaaagctagcctgaaatcagttagattccagagcatttaggtatg

SEQ ID NO: 77325 - DNA, 600 bp, Chicken  19866894365675_1
cgccaggtggcctctgatgctagctttcactcggtttctttttccgagtctgatcatcctcgggtgctaattacaggtcagcattcctatcgtaactgtatgcctgctccaggaattccccactcccctcctttctccccactgagcagaataatgggagcaaagatattcagagcaaaaaataataaaaaactttctggaatttttatggtcccatgtgaatcccccatgtgtaggggggggtgggttggatgcaataatctctactagaggtcccttccaacacctgcagtaccgtgrttctgtgcacttgcttccaatttttattccagaaatctactaaaaacagttgagttttaagctgttctcaaggaaaacatgctgattctgagaagagaatgaggtcagggtgacctcattacagcctttcagtacctaaagggagcctacaaacaggaggggagccaaatctttacaagggtagataacagcaggacaaggggaaatggttttaagttgaaggagggaagatttaggttggacatcagggggaagttctttactgtgagagtggtgaggagcccagagaggctgtggatg

SEQ ID NO: 77326 - DNA, 600 bp, Chicken  19866894365675_10
aagatgccctgcttagtgcagtgcaaatagaaataaaacttccttcaagattatgtaccctaatattttataattgacaaaagatgggctgatgcagcaggartagtagtaaatacraagtgtatcccttctatttctttctrttcccccacctcacacacacatgtaccttattttttcatggtatctttccaaaattctacaagctctcatcgctgtccatatactcactactcagctccagggtgtaatttgtatgcaggcagtgtttggastgataaaaggaagccaacatgctgyatttgatgccatgctgcagttcgaatgttttcaaccatttctatgatatacttaaaatcatgcaaataatggaaggctgcactgtactcctattccattagacttgctttcccagactgtgctgattagaacagtacaaggctgagatgactttatcagttctatttaccttgctgataggaaaacagctgctgttacagcacacccagtggctttttggtgcctatgggggagtagattttctggatacaattttcagcaagaggagggcaggaaggacttttctcaaatcattttctg

SEQ ID NO: 77327 - DNA, 600 bp, Chicken  19866894365675_2
gggaagcatttaaaagaatcctggtgagaaatgcagagttttttgctgcttggttttgtacataaccttaaacttctacctgtttttttaatttctgtacttggtttgtgttcactgatgcactttgtgtgtatgttggtcatggttcccaaaatagttttgtctgagaggctgaccactgagttcagcttgttcctggttcaatgacagtattcacaaccaatatcctcagagtgtggacagccaaataaggctgtgtttcactgcccaggagaaaaaggttgggattttatatgggtrctrtgggagwggaaaggagtayaaacatccacgtgaaaaaagcaagaactttgctaactgcccagcagctgcacttaactactgctaacctttttctctatgaaagtttcagttaagctgcctcaggaataagatgccctgcttagtgcagtgcaaatagaaataaaacttccttcaagattatgtaccctaatattttataattgacaaaagatgggctgatgcagcaggartagtagtaaatacraagtgtatcccttctatttctttctrttcccccacctcacacacacatgtacc

SEQ ID NO: 77328 - DNA, 600 bp, Chicken  19866894365675_3
aagcatttaaaagaatcctggtgagaaatgcagagttttttgctgcttggttttgtacataaccttaaacttctacctgtttttttaatttctgtacttggtttgtgttcactgatgcactttgtgtgtatgttggtcatggttcccaaaatagttttgtctgagaggctgaccactgagttcagcttgttcctggttcaatgacagtattcacaaccaatatcctcagagtgtggacagccaaataaggctgtgtttcactgcccaggagaaaaaggttgggattttatatgggtrctrtgggagwggaaaggagtayaaacatccacgtgaaaaaagcaagaactttgctaactgcccagcagctgcacttaactactgctaacctttttctctatgaaagtttcagttaagctgcctcaggaataagatgccctgcttagtgcagtgcaaatagaaataaaacttccttcaagattatgtaccctaatattttataattgacaaaagatgggctgatgcagcaggartagtagtaaatacraagtgtatcccttctatttctttctrttcccccacctcacacacacatgtacctta

SEQ ID NO: 77329 - DNA, 600 bp, Chicken  19866894365675_4
taaaagaatcctggtgagaaatgcagagttttttgctgcttggttttgtacataaccttaaacttctacctgtttttttaatttctgtacttggtttgtgttcactgatgcactttgtgtgtatgttggtcatggttcccaaaatagttttgtctgagaggctgaccactgagttcagcttgttcctggttcaatgacagtattcacaaccaatatcctcagagtgtggacagccaaataaggctgtgtttcactgcccaggagaaaaaggttgggattttatatgggtrctrtgggagwggaaaggagtayaaacatccacgtgaaaaaagcaagaactttgctaactgcccagcagctgcacttaactactgctaacctttttctctatgaaagtttcagttaagctgcctcaggaataagatgccctgcttagtgcagtgcaaatagaaataaaacttccttcaagattatgtaccctaatattttataattgacaaaagatgggctgatgcagcaggartagtagtaaatacraagtgtatcccttctatttctttctrttcccccacctcacacacacatgtaccttattttttc

SEQ ID NO: 77330 - DNA, 600 bp, Chicken  19866894365675_5
ggtgagaaatgcagagttttttgctgcttggttttgtacataaccttaaacttctacctgtttttttaatttctgtacttggtttgtgttcactgatgcactttgtgtgtatgttggtcatggttcccaaaatagttttgtctgagaggctgaccactgagttcagcttgttcctggttcaatgacagtattcacaaccaatatcctcagagtgtggacagccaaataaggctgtgtttcactgcccaggagaaaaaggttgggattttatatgggtrctrtgggagwggaaaggagtayaaacatccacgtgaaaaaagcaagaactttgctaactgcccagcagctgcacttaactactgctaacctttttctctatgaaagtttcagttaagctgcctcaggaataagatgccctgcttagtgcagtgcaaatagaaataaaacttccttcaagattatgtaccctaatattttataattgacaaaagatgggctgatgcagcaggartagtagtaaatacraagtgtatcccttctatttctttctrttcccccacctcacacacacatgtaccttattttttcatggtatctttc

SEQ ID NO: 77331 - DNA, 600 bp, Chicken  19866894365675_6
gtgtggacagccaaataaggctgtgtttcactgcccaggagaaaaaggttgggattttatatgggtrctrtgggagwggaaaggagtayaaacatccacgtgaaaaaagcaagaactttgctaactgcccagcagctgcacttaactactgctaacctttttctctatgaaagtttcagttaagctgcctcaggaataagatgccctgcttagtgcagtgcaaatagaaataaaacttccttcaagattatgtaccctaatattttataattgacaaaagatgggctgatgcagcaggartagtagtaaatacraagtgtatcccttctatttctttctrttcccccacctcacacacacatgtaccttattttttcatggtatctttccaaaattctacaagctctcatcgctgtccatatactcactactcagctccagggtgtaatttgtatgcaggcagtgtttggastgataaaaggaagccaacatgctgyatttgatgccatgctgcagttcgaatgttttcaaccatttctatgatatacttaaaatcatgcaaataatggaaggctgcactgtactcctattccattagac

SEQ ID NO: 77332 - DNA, 600 bp, Chicken  19866894365675_7
ataaggctgtgtttcactgcccaggagaaaaaggttgggattttatatgggtrctrtgggagwggaaaggagtayaaacatccacgtgaaaaaagcaagaactttgctaactgcccagcagctgcacttaactactgctaacctttttctctatgaaagtttcagttaagctgcctcaggaataagatgccctgcttagtgcagtgcaaatagaaataaaacttccttcaagattatgtaccctaatattttataattgacaaaagatgggctgatgcagcaggartagtagtaaatacraagtgtatcccttctatttctttctrttcccccacctcacacacacatgtaccttattttttcatggtatctttccaaaattctacaagctctcatcgctgtccatatactcactactcagctccagggtgtaatttgtatgcaggcagtgtttggastgataaaaggaagccaacatgctgyatttgatgccatgctgcagttcgaatgttttcaaccatttctatgatatacttaaaatcatgcaaataatggaaggctgcactgtactcctattccattagacttgctttcccagac

SEQ ID NO: 77333 - DNA, 600 bp, Chicken  19866894365675_8
gaaaaaggttgggattttatatgggtrctrtgggagwggaaaggagtayaaacatccacgtgaaaaaagcaagaactttgctaactgcccagcagctgcacttaactactgctaacctttttctctatgaaagtttcagttaagctgcctcaggaataagatgccctgcttagtgcagtgcaaatagaaataaaacttccttcaagattatgtaccctaatattttataattgacaaaagatgggctgatgcagcaggartagtagtaaatacraagtgtatcccttctatttctttctrttcccccacctcacacacacatgtaccttattttttcatggtatctttccaaaattctacaagctctcatcgctgtccatatactcactactcagctccagggtgtaatttgtatgcaggcagtgtttggastgataaaaggaagccaacatgctgyatttgatgccatgctgcagttcgaatgttttcaaccatttctatgatatacttaaaatcatgcaaataatggaaggctgcactgtactcctattccattagacttgctttcccagactgtgctgattagaacagtacaaggct

SEQ ID NO: 77334 - DNA, 600 bp, Chicken  19866894365675_9
gtttcagttaagctgcctcaggaataagatgccctgcttagtgcagtgcaaatagaaataaaacttccttcaagattatgtaccctaatattttataattgacaaaagatgggctgatgcagcaggartagtagtaaatacraagtgtatcccttctatttctttctrttcccccacctcacacacacatgtaccttattttttcatggtatctttccaaaattctacaagctctcatcgctgtccatatactcactactcagctccagggtgtaatttgtatgcaggcagtgtttggastgataaaaggaagccaacatgctgyatttgatgccatgctgcagttcgaatgttttcaaccatttctatgatatacttaaaatcatgcaaataatggaaggctgcactgtactcctattccattagacttgctttcccagactgtgctgattagaacagtacaaggctgagatgactttatcagttctatttaccttgctgataggaaaacagctgctgttacagcacacccagtggctttttggtgcctatgggggagtagattttctggatacaattttcagcaagaggagggcagga

SEQ ID NO: 77335 - DNA, 600 bp, Chicken  19866894365682_1
cttggcaaatacgcgtgttctttaagtccacagagagcacgctgcagctgatcaaaagcatgctgggatgttataattttgttctggcttgttttcttaaccaacagaaccctagggttactaactgtcctgatcaacatctctcctgaatccgttactaagaaagtaaataataaataaaaaatgacctgccatcctaaagcataaaacaagtagtgctactgctcattaaaaaggtcaccttgctcataccaaatgattaatcattaaatatatgactgtatttgataaacaacaaartgtgaaaaagacagagggaaaaaacatacaaaaaatgtagagaaactagccagcctcaaactcatcggcacaactttcagtaggtgaagttttgttgttcacaatgatacttaagtatctaaaaacacaaaactaaatcatttttccaattccataaccataaactagtttcccatactctcttttyttctgaaggcttacatctaagaagtatttttaatacacatggctatcttgttaaccaggaatagctagtaacatttacctgttttcagaaagaaatctatccagtagaagaag

SEQ ID NO: 77336 - DNA, 600 bp, Chicken  19866894365682_2
cctgccatcctaaagcataaaacaagtagtgctactgctcattaaaaaggtcaccttgctcataccaaatgattaatcattaaatatatgactgtatttgataaacaacaaartgtgaaaaagacagagggaaaaaacatacaaaaaatgtagagaaactagccagcctcaaactcatcggcacaactttcagtaggtgaagttttgttgttcacaatgatacttaagtatctaaaaacacaaaactaaatcatttttccaattccataaccataaactagtttcccatactctcttttyttctgaaggcttacatctaagaagtatttttaatacacatggctatcttgttaaccaggaatagctagtaacatttacctgttttcagaaagaaatctatccagtagaagaagtgcatctacaatttaatcaaagtatgcagtcaagtctgctcacctattgctttaataatcataatccagaactctgctttcacattaacttcatatttctgcagctaaaggtcccatcagactatatataaacagagtttacacatgtcttatgtgggcaatatcagcgttttcccccatgtgaata

SEQ ID NO: 77337 - DNA, 600 bp, Chicken  19866894365683_1
taaaaagcacagtgtatacaatgtaatctgcttggaggtgccctgaaaaacctaagtacatcagcttctggggctgtaatagctgcaatacaagagctgtaataaatacgtaaagcagtgctaagaatacccgtgctcgttggaaaacacgcttctgtgtttgcagagcgcctccgtgtttcataaaggtgcttgttctgaaacagtggtactaaataaagtgtttttaattttccagccaatacaaatagagtgatttatccctccggtggaagaaagaagggaaaggattatcatttycacctcccgtgtttcagaggtatcacatcaaactcaagatgacgtgacgtttacatggatcactgcttagtcattcgagattcagcatggctgaaagatgtcaagtgtagggcaaacacctgggtatttcaaggcggtaggagctacacgttgcgtgtaggactggtaaggggcggtgaggtggtgaaactgcaatggatgtgaaaggaaatgaccgtgatgagtgctggacctgttacgtaacaggagaaaggaaataatcgttaatgtaaaactcgggcacgttgtgattgctgatat

SEQ ID NO: 77338 - DNA, 600 bp, Chicken  19866894365693_1
acccaaaacttgtcctataaaggtgggtgtggggttgtcatgttgggaagggaagggtgctgacatgcagggctgggtgtgaggctgtggagtacagggatgcacatgggggcagggctgcatgggggcaggggtgtatgtaagagctggagaatgcatggctgcaggggtacatgtgagtggaggggtgtatgtatgacctgaaacatgtatgtgtgcagggatgtgcatgagcacaggggtgtgcatggatgtaggagaccacatgggcagaggggtgcccatgcatgcagcacacaygcaggggcagctctccctgccaggcaggagcagggctgagcagggcccagtcccatagtccctcggcactgctcttctctgcacatcacccacgtgtccccaaaccccagttccaaagcacagcatcacatccccaatgaaactcacccagacccaaagcagcctcatttccccctctgtttcccactagcacttcttcattcccatttctccacacaccattggcttgcaccaagatagctcagctcaccctcccagctcccctatccatttttccctggcctcatgacacatccccat

SEQ ID NO: 77339 - DNA, 599 bp, Chicken  19866894365701_1
  misc_feature (1)..(122): n is any nucleotide
nnnnnnnnnnnnnnnnnnnnnnnnnnnnnnnnnnnnnnnnnnnnnnnnnnnnnnnnnnnnnnnnnnnnnnnnnnnnnnnnnnnnnnnnnnnnnnnnnnnnnnnnnnnnnnnnnnnnnnnnnnaatgtccaattatggccttagtaaaggattgcagcccttggctctcccaggtgatgatgagaatggaactcccaattatagtttctaatgtgagatggtaattagacaaggaaaacgaaacaggacctgctatttggctctgtcttggttaatgaagataaatgcaacctctttctaygtatgttaattaacagctgtttcgcatgctaccaacagatgatattgattaaaaatgaaaacaaattaaaacaaacctataaaatcttccacagcattcaaggctgtgaagtgaacctcagaaacagagacaaatcgtctcactgcagcaataggcaagcaattaattcactacttgaccttctacatttagtgctgggagtgctcctcctcctctacaagaagcacaattattagtggtgaaggccacatttcacatcccaaaacaaggtgaagggaggtgaggcacgagtggcactt

SEQ ID NO: 77340 - DNA, 467 bp, Chicken  19866894365701_2
atattgattaaaaatgaaaacaaattaaaacaaacctataaaatcttccacagcattcaaggctgtgaagtgaacctcagaaacagagacaaatcgtctcactgcagcaataggcaagcaattaattcactacttgaccttctacatttagtgctgggagtgctcctcctcctctacaagaagcacaattattagtggtgaaggccacatttcacatcccaaaacaaggtgaagggaggtgaggcacgagtggcacttcaaaatgggaaccttatttcataaggaacaaagggacgttgytggaagcatagcttactgctccgtgcttacagcatcagttatgtgcagcagcctggaagaattaggagcacacacagtatcaagcacatagcaaaaagccagaaccagttctttcccttgcagccctccagtattcatctgtggtaagtatcacatcccaagctact

SEQ ID NO: 77341 - DNA, 600 bp, Chicken  19866894365707_1
ccaggaggaaggaagttggatcactgttgctagcggggcagagctgaggtttctacattattttctccacatattcccttacttggaaaaaggatcagattcctttcaggtttaaattcaggttgaatgtgtaagttgtcttgtaactccaacatttgagttatctttaggctgctgctgtatatggtgaaccttaacagtttttaataaggtcttagaaacatagtaaattgccagcaacaacatacactacagcagcaatagcttaggcacctgtaacatgtgcgtacagaaggcagragaatgttgcacatttgaaacctctactgtgaatagaaatgttaacaccaccaaatcattcctctactttgggaaaaaatgctggtacagaagaagcttggattagcattgcatgtcggagcagaatggagtagactgacttctttttttgtgaaaggatttctagagcagagcttctgggtgtttcatagtctcttgtctaaaggtctgcttgcaaagagaagtagttcactcgataatgactcactttagcagatataacacagaaaaccgccctgatagcacatcattctgagtcac

SEQ ID NO: 77342 - DNA, 600 bp, Chicken  19866894365707_2
actgacttctttttttgtgaaaggatttctagagcagagcttctgggtgtttcatagtctcttgtctaaaggtctgcttgcaaagagaagtagttcactcgataatgactcactttagcagatataacacagaaaaccgccctgatagcacatcattctgagtcacacttttccaatgtagcatccattcaatgtgcagggtctgactgtcatcttacacgatcaaacaaagcctggagaactgcaggaacaatactgaaggtatatcctaatggatatgcagctacgtgtgtaatggartacatcagcggaacaataaagttaacatgcagttctattatccttctttttgagcttttgtttgtatttttaaaacaactgctttatatgtcaacatctttgggtatcttctaggagaaaaatcaaggatggctaggtggggtggtgtaagtgtgcctaggtgtgcattcaaatgtattatatttgtaattatagagatatatgtatacacacacaaactatttttccatctcagttactttggctggacattataccatacaagtatggtataagtgagagcttgaagacctgtggcag

SEQ ID NO: 77343 - DNA, 600 bp, Chicken  19866894365717_1
tgaacaatgctgtcctgggggcactgtctcaaatttcttggagaaaattctcatcagatgttagagcctgaagatttgaattttaagaatttgtggttaactggggtcagtttttctgtttgtaagttaaatacaacttgttctttaaccactgattccagggttcagtggatgatttcttcttaaagatgaaacagttgactttgttgagatgtgaagaggtctgcagtgtcatctatgctcactccatgattcctagcctcctcgctttagaagaagcaatcactgcaggtagtaccmacagcagtgagtttgggtgtctggcttgtgcagcaggacatttgcctctttcactgactcagaaccactttttcttgtgattctggcctccattaacttagagacaagaagctgtcagaaagtttctcagccattctgtcctggctctcacttcttccctgcttccttggctgaaagtggggaattttgtcctggctggtttccccaggccagcagagctgttgtgcttgactgtcatagactgagcccagaactcagggctttgcaggaagcaagacttcatggccccaaggatttggc

SEQ ID NO: 77344 - DNA, 600 bp, Chicken  19866894365717_2
gccctatctgtgggtagggagtgtctcctgggaaccagctctctgtgcctgcaggagcaagcaggagatgagagctggatcctggctgacgttgctggggggctcatgcagatattaggaaggtatactgcagctgggaacctctgactttgagcttgtctttgggagatgtgtttgccgtttgtttttggctgagatgacttctgctcttgcattgaagtgggcttcattgtgggagagacctgtctaaaagacaagtacttcctcagatcttgttgctgtttttgtgagttaaaataygtacagtccaattccagcaacatactgtccttatagctgattatacaaattgaagtggtccaaacagtattgaccaaaaatgcaatgtactaccagaaaatctgctaagcccataataactgatagttcagttagagttgctaggctcaagtatcaaccttgcattaaggagtggtttaacaaactttttcaccctgcacctcataacaaagcagggactgttgaagtctgctttttgttgaaggttgtgatagaattgtattctatctgccacgtcccctccatcccctgacctgcatg

SEQ ID NO: 77345 - DNA, 599 bp, Chicken  19866894365738_1
  misc_feature (1)..(105): n is any nucleotide
nnnnnnnnnnnnnnnnnnnnnnnnnnnnnnnnnnnnnnnnnnnnnnnnnnnnnnnnnnnnnnnnnnnnnnnnnnnnnnnnnnnnnnnnnnnnnnnnnnnnnnnnncgtcttggaaaatatggaaaactgtatcactattgttgcacaaaataagatgatgtgctgagataaatccaacactaaatgcatgtaaccagtggatggataaggagagcttcaaataaaaatactaatgtaatagttcagatgctgtagagttgtctttcaggttcctacattaaatagtgactgtagtcaaaygtggaaacagacgatatttcaggagtcccacatttgttattaagctaaagtggcaaagatggtgttgcagaataagcatcaacacttcttttgtgtgtattactgtagtgattatactgattggaaataacagccaacaaacgtgaagtcagaaaatagcagattgcccaattctgctctttgatgtagatgtggacttgtgacccagctgttaggctttaagggtaatacggacttgtagggctcaggtttttctgagctctcttgaaatttactccaaatgtcagattttaatctac

SEQ ID NO: 77346 - DNA, 600 bp, Chicken  19866894365745_1
ccatacagttgtctcttttatacggtctgcatttctcgctttcctaaaagatccctgtactgttgctgctttcatttcctttaatggtagttaatttaatgtcccaatgaatagatgaggattccaggaaatgctgagtactggcatggatttctggtgaaacagaagtgcagtgagagtatggaatattttccagagatcttggacactgtggctgcagctgatgttcttaggagctgcaggtgcttgacattcctgccagtttgcccctaaataaatgtagctgagtcatctggttcyaaaaagggcataatttgcagagtatggccaccaaagagagaaacgarttttatcatcgggtctcaaaagggtttaaataagatgcaagtaggcaaaaataattttgagcattaaatcctactcaccttgctttcagcctcttatcctgaagtaatacggcaaattcaattacagatacaatgataggtggcttataatgagatttattggcataatcttccaaaggaagtgctggacctctattgatttaggtatataggatgtgagaacagaacagatgggcaagataaatgatgtgct

SEQ ID NO: 77347 - DNA, 600 bp, Chicken  19866894365745_2
aagatccctgtactgttgctgctttcatttcctttaatggtagttaatttaatgtcccaatgaatagatgaggattccaggaaatgctgagtactggcatggatttctggtgaaacagaagtgcagtgagagtatggaatattttccagagatcttggacactgtggctgcagctgatgttcttaggagctgcaggtgcttgacattcctgccagtttgcccctaaataaatgtagctgagtcatctggttcyaaaaagggcataatttgcagagtatggccaccaaagagagaaacgarttttatcatcgggtctcaaaagggtttaaataagatgcaagtaggcaaaaataattttgagcattaaatcctactcaccttgctttcagcctcttatcctgaagtaatacggcaaattcaattacagatacaatgataggtggcttataatgagatttattggcataatcttccaaaggaagtgctggacctctattgatttaggtatataggatgtgagaacagaacagatgggcaagataaatgatgtgctacgcacagcagctggactgaaatttcaatggttttctgctgctcact

SEQ ID NO: 77348 - DNA, 600 bp, Chicken  19866894365745_3
tcaaaagggtttaaataagatgcaagtaggcaaaaataattttgagcattaaatcctactcaccttgctttcagcctcttatcctgaagtaatacggcaaattcaattacagatacaatgataggtggcttataatgagatttattggcataatcttccaaaggaagtgctggacctctattgatttaggtatataggatgtgagaacagaacagatgggcaagataaatgatgtgctacgcacagcagctggactgaaatttcaatggttttctgctgctcactgtctcagtagtaagytagactgaggctagccagtttattcagcattgaggaatggatgaartctgctaatgtgcttttcatgcctgtagaagtcaccctgatcctggtttgccattctcttttggyctttagtattgaagaaggtaaagcatcgtctggtggagaacatgagctcagggacagcagatgccctggggttaagccgagccatactttgcaatggtgagtattacccagaaggacgttttcataagggaacacttgccttcctgtgcttaccacctttttataattacttgcatgtcccacattact

SEQ ID NO: 77349 - DNA, 600 bp, Chicken  19866894365745_4
cattaaatcctactcaccttgctttcagcctcttatcctgaagtaatacggcaaattcaattacagatacaatgataggtggcttataatgagatttattggcataatcttccaaaggaagtgctggacctctattgatttaggtatataggatgtgagaacagaacagatgggcaagataaatgatgtgctacgcacagcagctggactgaaatttcaatggttttctgctgctcactgtctcagtagtaagytagactgaggctagccagtttattcagcattgaggaatggatgaartctgctaatgtgcttttcatgcctgtagaagtcaccctgatcctggtttgccattctcttttggyctttagtattgaagaaggtaaagcatcgtctggtggagaacatgagctcagggacagcagatgccctggggttaagccgagccatactttgcaatggtgagtattacccagaaggacgttttcataagggaacacttgccttcctgtgcttaccacctttttataattacttgcatgtcccacattactacctcacagttctttccttcttctgtatctcgtggttttgattgcc

SEQ ID NO: 77350 - DNA, 600 bp, Chicken  19866894365745_5
gatacaatgataggtggcttataatgagatttattggcataatcttccaaaggaagtgctggacctctattgatttaggtatataggatgtgagaacagaacagatgggcaagataaatgatgtgctacgcacagcagctggactgaaatttcaatggttttctgctgctcactgtctcagtagtaagytagactgaggctagccagtttattcagcattgaggaatggatgaartctgctaatgtgcttttcatgcctgtagaagtcaccctgatcctggtttgccattctcttttggyctttagtattgaagaaggtaaagcatcgtctggtggagaacatgagctcagggacagcagatgccctggggttaagccgagccatactttgcaatggtgagtattacccagaaggacgttttcataagggaacacttgccttcctgtgcttaccacctttttataattacttgcatgtcccacattactacctcacagttctttccttcttctgtatctcgtggttttgattgcctcttcctgggtgatgtatattatatccttggtgccatttaaatgataacttagatcaaattaatt

SEQ ID NO: 77351 - DNA, 600 bp, Chicken  19866894365745_6
tctggtggagaacatgagctcagggacagcagatgccctggggttaagccgagccatactttgcaatggtgagtattacccagaaggacgttttcataagggaacacttgccttcctgtgcttaccacctttttataattacttgcatgtcccacattactacctcacagttctttccttcttctgtatctcgtggttttgattgcctcttcctgggtgatgtatattatatccttggtgccatttaaatgataacttagatcaaattaatttaaagtgggaacccttgtaatgaatgcygatagacagtgacctcacactgtaaaaccagtttgcagttagttattttaaaatcttcscatgttagactagaggacaggctttggatctgagggaagtttgaaccaaagataggaagctggtgtttttccagttagacaggtgttaaccagatcctagatttggttattgtagttcagtattctgattcttgtttacayttagatggattggtgaagagattggaggagctggagaggactgcagaactgtacaaaggtaagctatgtctttcatcacatactatatggggaggaaaga

SEQ ID NO: 77352 - DNA, 600 bp, Chicken  19866894365745_7
tttgcaatggtgagtattacccagaaggacgttttcataagggaacacttgccttcctgtgcttaccacctttttataattacttgcatgtcccacattactacctcacagttctttccttcttctgtatctcgtggttttgattgcctcttcctgggtgatgtatattatatccttggtgccatttaaatgataacttagatcaaattaatttaaagtgggaacccttgtaatgaatgcygatagacagtgacctcacactgtaaaaccagtttgcagttagttattttaaaatcttcscatgttagactagaggacaggctttggatctgagggaagtttgaaccaaagataggaagctggtgtttttccagttagacaggtgttaaccagatcctagatttggttattgtagttcagtattctgattcttgtttacayttagatggattggtgaagagattggaggagctggagaggactgcagaactgtacaaaggtaagctatgtctttcatcacatactatatggggaggaaagatgcctatgttgtgtttcagtgaaatgacttaaatgtctttttctgtcttccattacagg

SEQ ID NO: 77353 - DNA, 549 bp, Chicken  19866894365745_8
gattgcctcttcctgggtgatgtatattatatccttggtgccatttaaatgataacttagatcaaattaatttaaagtgggaacccttgtaatgaatgcygatagacagtgacctcacactgtaaaaccagtttgcagttagttattttaaaatcttcscatgttagactagaggacaggctttggatctgagggaagtttgaaccaaagataggaagctggtgtttttccagttagacaggtgttaaccagatcctagatttggttattgtagttcagtattctgattcttgtttacayttagatggattggtgaagagattggaggagctggagaggactgcagaactgtacaaaggtaagctatgtctttcatcacatactatatggggaggaaagatgcctatgttgtgtttcagtgaaatgacttaaatgtctttttctgtcttccattacaggcttgacagaacacaccaagagccttctcagagctttctttgagctatcccagacgcacagaggtaacaagtgagcaaagggagcagaaat

SEQ ID NO: 77354 - DNA, 600 bp, Chicken  19866894365747_1
catttttcctaagtatttaccgcattttacttaaaataactccaggataacatcttatttccctctgctccttcaaacttgtatgcttcattccagggaaggagtgaatttttatagctataacatgacagcaattttattcattaagactttgccagccaagacacttgggagtcgtagaagagtaataaacatgcattttaaaagacacaatagaaatattattttaaaaatagactaaaaacacaagttaagcaagcagaaaagtacaagattagtcagagaaaagccataagctcwttgaaatggaggagtctgttttgttcggtaataaagatgaattaaaagagaagtcacaggggtcctccaccttaatgttttttttgcagcacaagcataattatcagtcaacactaataccatgaacagaggaatctctacaaatgaacataacgcagctgcagcaaggtttaatatcagaaaggtgaaggtgttctcaatcacaaataacagaagacattaagtaaggacagcctgagcaaaacccaagaacgagtgagcagagatggaagcagtgtggtaaggaggcttctccactcc

SEQ ID NO: 77355 - DNA, 600 bp, Chicken  19866894365751_1
ccatcagagattattactcttagtatttccaacttcccatcttgctatagtaggatataaagtggatgatctgatctgaaccatcccagtaccctgtgtgctaatctgctgagtgatctgatgtgttggagcaaaaaaagctgtgagtcagtgatgtacagaactctttctgcaacggtgatgggaagtcctgtattagactgtagtgctaacgtccttatgttttgaagtcttgcttctgtcaagggagtaaggggctgaatatgaatattttgtcccaccccacaaaaatgtatagcwgggggttgatgtggctgttggcatatgcaagtgatgcagagagctgatcccagagtatttagcaactcctttagtaccaggagtagctccaattccagctatatgttatcaagcccaatagcaaaaaaatgcagctaccatgagggtgattatttacagcatcatacttcacagcttgtgaaagctatttgcatgcattctaaaaacagtaagggtatagcaaactgccattatgccaaaggggcagtatgaagccgaagacagccctagattattacaactaaggcaaggggtacatga

SEQ ID NO: 77356 - DNA, 600 bp, Chicken  19866894365751_2
acatgataatcatccacatagagatttcccagggagtcattaccactgtagacactgtcaaaatcaagcaaaccacaaggaagatcaagtagctttaaaatgaagtaattgttggattgtacaggcaagttagtattaggtagatcactatgagattccaatagtctgatgtcaggataggcagtagaatttaacagagagttcacacagtataaaaaaggtgagctgctgtgattatgtcttcagtggatatgctgtttgtctgaaaatctaggtcaccagcagcctcatgagtgagamcggtgctagaatacatgacagttgttactaaagatgagtattctggcaatagctcatttacagaaccactgtcatccatataatttagcattccatcatttccaaaattgcactcacacacagttttgccgtaatcagtgatagtcttgtgctagtgaaagacagaagagcagaaaatgaaagccaggattcaaatgccactgcataccagtgaaataaacttcactgttcaatgatttttacatcagacaggtttcatcacaaggaggcactggtcgatgctgatcactgtgattacga

SEQ ID NO: 77357 - DNA, 599 bp, Chicken  19866894365763_1
  misc_feature (1)..(19): n is any nucleotide
nnnnnnnnnnnnnnnnnnntctttttcattctaaaaaataggctgtatttcaggcatactgatttcatgggtgttatagcaagggacccattaaaactgctccaatgtaaacattaccagaatgtgggcatcccattgttgcaatttgagtggctaaatttcacttctcttttctgtaaaaatggataacaccttatttttattttactaatagatgtatttaacctatcagtagatattaagttaaattttattaaagctatctttcaaaaaatgagtttaaaactcataaagtaaaakaaatagttactgtatacttaacatagatatgtttagatagatatattcatatgtttgttcctttaatatgtttccatctcaaactgcagctgaaaatgagagcacaccaatccagcgattgctagaacacttccttcgtcagcttcaaaggtattaatatcttatccacaactgtgttgatagtgtctaacacatacgtgtcagattacaacttcttcttccggctttctgttttaaaatcttgcagagactggctttaatgtattgggtaacttttcaactacatcagacctcattgt

SEQ ID NO: 77358 - DNA, 599 bp, Chicken  19866894365767_1
  misc_feature (1)..(70): n is any nucleotide
nnnnnnnnnnnnnnnnnnnnnnnnnnnnnnnnnnnnnnnnnnnnnnnnnnnnnnnnnnnnnnnnnnnnnntgatctctctttgacccgtttccttccttagtataaattttaaaggaaactagcaactgccatgtttatatggagtcgaccaaagtatattctctggctgggccacactgaagtctctgagatgcaatcccagaggatacaccctctcctctaccccacaccctgctcccgccaggcaggaagaagacccattccccttatcccttcctatggcctggcttcctccgatmggcagctccgacaaagtgctcatctttcaactgccttccaccttcccaagataagaggctaaggagtatgyatgccatggggaagttctgatgatgtatttgtggggagaagcaggaggcagcggagcatgacggtgaagtgcatcaacctgacttggggagccaacacgtcttctcgtgactctggttctccccatttcatagacagtctgtcctgcattcttcacatactcaccattcccagagaaactgcagcaaagcccatcggtgtttctaaaaatggaacagttggaaatacg

SEQ ID NO: 77359 - DNA, 600 bp, Chicken  19866894365767_2
gatctctctttgacccgtttccttccttagtataaattttaaaggaaactagcaactgccatgtttatatggagtcgaccaaagtatattctctggctgggccacactgaagtctctgagatgcaatcccagaggatacaccctctcctctaccccacaccctgctcccgccaggcaggaagaagacccattccccttatcccttcctatggcctggcttcctccgatmggcagctccgacaaagtgctcatctttcaactgccttccaccttcccaagataagaggctaaggagtatgyatgccatggggaagttctgatgatgtatttgtggggagaagcaggaggcagcggagcatgacggtgaagtgcatcaacctgacttggggagccaacacgtcttctcgtgactctggttctccccatttcatagacagtctgtcctgcattcttcacatactcaccattcccagagaaactgcagcaaagcccatcggtgtttctaaaaatggaacagttggaaatacgcaaaaaatagagttcctgcttttaaaataaacgctgactcgtctctaatacaaagcatgcagccaagtgcct

SEQ ID NO: 77360 - DNA, 419 bp, Chicken  19866894365781_1
gcccagcccctccggctgctcagaccggaccctcggctatggcccaaccctctcctcgcagctcctggcccaccggttggccacactctggtggcgatgctccttacctcggccattttccaccttttcttcctgttcctccggcagccgctttgatccgccccatcgcagacccgtgcggaggagcagcgttaccccctcaccgctgctgctcatggccttggtattcttttgtttgtttgtttggcgtaagaacgaaaaagggttgtgtttgagcataatgtgtgtggccttggcctygctcgtggccttggccgtgtcagcccgcgtcctctctgagcgcactgacgttccagtttctgctctttcatctcagccccctctgctctccctgtagtgctgagatgtcaaagcatgcg

SEQ ID NO: 77361 - DNA, 600 bp, Chicken  19866894365785_1
tgaagatatccaaagctccctgagggcacggttgctcagtgcacattaaaatctgttcactttgctaacagttttagaaacacttccaattacatttggggtgttttttttttttttttcagcttcaatttgaatctgtgcagctttccttttcttttaacacattgtgaagggaagaagtttctgatcctttaagcgcttgtttctggcatttatcctgatttctcacctggacaaaaatgtatttttaattttaaaatgtattgtgaatagcaaggagggtttcctcacttattcttyggggtatgagggccagatgyacaattaaatgcccctcagataggagcatcctgctgtgggtgctttgtcctggactccttcacctgtccaatctgatgatcaatcccagcacaagctgaggtttaagcaacctttcagtcagataacaaccataagctgctgggcatgttcctcaagtaccacccaaacatcctgaggcacagcagaatcaaggctttcaagtagcacatatctgatttgctacccttggtctagtgtatcttttatctgctttccacattctgcctgaacamgcagcac

SEQ ID NO: 77362 - DNA, 600 bp, Chicken  19866894365785_2
tgagggcacggttgctcagtgcacattaaaatctgttcactttgctaacagttttagaaacacttccaattacatttggggtgttttttttttttttttcagcttcaatttgaatctgtgcagctttccttttcttttaacacattgtgaagggaagaagtttctgatcctttaagcgcttgtttctggcatttatcctgatttctcacctggacaaaaatgtatttttaattttaaaatgtattgtgaatagcaaggagggtttcctcacttattcttyggggtatgagggccagatgyacaattaaatgcccctcagataggagcatcctgctgtgggtgctttgtcctggactccttcacctgtccaatctgatgatcaatcccagcacaagctgaggtttaagcaacctttcagtcagataacaaccataagctgctgggcatgttcctcaagtaccacccaaacatcctgaggcacagcagaatcaaggctttcaagtagcacatatctgatttgctacccttggtctagtgtatcttttatctgctttccacattctgcctgaacamgcagcactggcactgggacagatttct

SEQ ID NO: 77363 - DNA, 600 bp, Chicken  19866894365785_3
attcttyggggtatgagggccagatgyacaattaaatgcccctcagataggagcatcctgctgtgggtgctttgtcctggactccttcacctgtccaatctgatgatcaatcccagcacaagctgaggtttaagcaacctttcagtcagataacaaccataagctgctgggcatgttcctcaagtaccacccaaacatcctgaggcacagcagaatcaaggctttcaagtagcacatatctgatttgctacccttggtctagtgtatcttttatctgctttccacattctgcctgaacamgcagcactggcactgggacagatttcttctatgaaccccctgacagtgccttgtgtgatgccgctctggtgtctgatgagggctggctaataaagaagctgggctgaggagaattttgttatgagtaatacggaggtgttcagagggataactttttctttttaatgaggatgatgcatatctttgtggtttggggagaaaaaagtatatttggtaaatacaatgtcttggctaaaacaaaaatgacttctaataaatagttttaagcaaagtacagaacttcttcacagtgtaattttc

SEQ ID NO: 77364 - DNA, 600 bp, Chicken  19866894365788_1
gtgtttgttatttatgtattgagagatgtgctctacaggaagaaaggtccagggaaaagaagtccaatatgcttactgctgtttaattctgaagggatttaaccaacaaatgaattctgtgtttattttccattgctgttaaatattttctcatgataatgtgagatgaaatctttttcattcccctctttccatgaaaagaatatgaaatttgtaaacaccagcaacatttccttcaacctatttctccagagtcttacttgacactagtgatgattatatgtgtgaatctatccagaycaaattgtcagaagcagaaaaaaggaaaggtaattcttggtcttattccttcctgtttgctggaagaagcatagtcattaaggcattcaactaatttttatcagggrgagtctggtcattctcctttgaaaattctctgtacccaaattatcttacccaaaatctccacacccttttattttatctcaaagaaatgcaaccttatgcgtagttttcctgatgcataccctttgaaggcagagggtatcatgtcctggttcaagagacctcaaagagagatgtatcacacagtagtgacta

SEQ ID NO: 77365 - DNA, 600 bp, Chicken  19866894365788_2
aaatgaattctgtgtttattttccattgctgttaaatattttctcatgataatgtgagatgaaatctttttcattcccctctttccatgaaaagaatatgaaatttgtaaacaccagcaacatttccttcaacctatttctccagagtcttacttgacactagtgatgattatatgtgtgaatctatccagaycaaattgtcagaagcagaaaaaaggaaaggtaattcttggtcttattccttcctgtttgctggaagaagcatagtcattaaggcattcaactaatttttatcagggrgagtctggtcattctcctttgaaaattctctgtacccaaattatcttacccaaaatctccacacccttttattttatctcaaagaaatgcaaccttatgcgtagttttcctgatgcataccctttgaaggcagagggtatcatgtcctggttcaagagacctcaaagagagatgtatcacacagtagtgactattgaatggtgatcacttatttttttgaacgtagttctgcagctagatgttggggtgggaattttatcttttaaatatatatttgagtgagtttgttaggaagagatt

SEQ ID NO: 77366 - DNA, 599 bp, Chicken  19866894365792_1
  misc_feature (1)..(101): n is any nucleotide
nnnnnnnnnnnnnnnnnnnnnnnnnnnnnnnnnnnnnnnnnnnnnnnnnnnnnnnnnnnnnnnnnnnnnnnnnnnnnnnnnnnnnnnnnnnnnnnnnnnnngatgaatgtattatgaaagtaaagataaaatattttataactctctgttcttagtgtatgttggatattaaaggatttttcaaaggaattttctcataacagggagggcaactggatgtggctttaaaatgagtaattgcaaaattgaatgactcttgcagggaaaccttactatccttttggtgaagaaaattctgtygtttgtcagtgttcaagatgctgattcagttgctgtctctgaatgcctccttcactccagarcacccttgcaagggwgggatggccggacagcctgccccctacctccagctgatggagtgaggtaagccctcgctctggcttttggtattctgggaaatgtagtgtaggagagaaatgtacattttgcatttgctctgcttgtttgtacactactgcatgtgaagtagggggtgttcagtgtacgggtgatgcctgccttgcatgctaagtccaagagatgtgttttcattaacgaac

SEQ ID NO: 77367 - DNA, 599 bp, Chicken  19866894365792_2
  misc_feature (1)..(39): n is any nucleotide
nnnnnnnnnnnnnnnnnnnnnnnnnnnnnnnnnnnnnnngatgaatgtattatgaaagtaaagataaaatattttataactctctgttcttagtgtatgttggatattaaaggatttttcaaaggaattttctcataacagggagggcaactggatgtggctttaaaatgagtaattgcaaaattgaatgactcttgcagggaaaccttactatccttttggtgaagaaaattctgtygtttgtcagtgttcaagatgctgattcagttgctgtctctgaatgcctccttcactccagarcacccttgcaagggwgggatggccggacagcctgccccctacctccagctgatggagtgaggtaagccctcgctctggcttttggtattctgggaaatgtagtgtaggagagaaatgtacattttgcatttgctctgcttgtttgtacactactgcatgtgaagtagggggtgttcagtgtacgggtgatgcctgccttgcatgctaagtccaagagatgtgttttcattaacgaacaaagagcttttttgatgagatgctctaagaaagctccttttataaaatggagggtgctagaa

SEQ ID NO: 77368 - DNA, 599 bp, Chicken  19866894365792_3
  misc_feature (1)..(24): n is any nucleotide
nnnnnnnnnnnnnnnnnnnnnnnngatgaatgtattatgaaagtaaagataaaatattttataactctctgttcttagtgtatgttggatattaaaggatttttcaaaggaattttctcataacagggagggcaactggatgtggctttaaaatgagtaattgcaaaattgaatgactcttgcagggaaaccttactatccttttggtgaagaaaattctgtygtttgtcagtgttcaagatgctgattcagttgctgtctctgaatgcctccttcactccagarcacccttgcaagggwgggatggccggacagcctgccccctacctccagctgatggagtgaggtaagccctcgctctggcttttggtattctgggaaatgtagtgtaggagagaaatgtacattttgcatttgctctgcttgtttgtacactactgcatgtgaagtagggggtgttcagtgtacgggtgatgcctgccttgcatgctaagtccaagagatgtgttttcattaacgaacaaagagcttttttgatgagatgctctaagaaagctccttttataaaatggagggtgctagaaagcctgtgtggctgc

SEQ ID NO: 77369 - DNA, 600 bp, Chicken  19866894365793_1
gattcctccacaaattgtgacttttaagtttagtcactgcagtattatttatgacagttacaggcctatatggcaatatctcaagaaggagaatgattcatcagccccaatactacttcttccagagacagagctgcagtgcatcacatcacaggccatagcattagatatgaagcaagaaatcttcagagaatgacgcaaaggctgctcaatcagcttaaaggtgcccatcgcttcaagtgagctttggagaagggctttaaagaaggccattgacaacagttgtatttgccagaaatyccttttgctgaagacatcatctctagcatactactaggactgaagcaacagccgcttatgcctcagagcgtctcagcacttgctctcaaagtccccccagtacagcccctggggacagcagatgcaccaagtttcctcattgccctctggccaccaggcaggctgaagccaaagcttccagcaaaatacctgactacaattcttatcggacattggcagctctgccacccgctttgatggcaatgcacaaatacaaacccagagtacgcctctctcatgcaatagccagccaataccgct

SEQ ID NO: 77370 - DNA, 600 bp, Chicken  19866894365802_1
atataattgtcctgaatgttttgctattttgacgtctgcattattaaaccaaattgcttcattttcatccagtgactgactgtcagtgagcagtataagcatgaaactccacttctttgtgatgaacaatcaccttctcatgcagattgactgtacagtgggtattggctggctcagcaccatgaaaacagttgtactgtttcctgggttatcatggttctggcattaacattttaacttctacatgactgaactgtgattgtatatgtctggactgtgcaggaccttacgcagcctagmgaaggacaaattagcttgaaatacttacccagtactgggacatcataagagaacaatatccagacagaaatttgcctccagactgaggaactacagctgcaatttggtttacaaatttatactgtgtacaaaccctcatggattggtgctaaagtaaggttggaacagttctaacagctggtggaagaaaaggaaagtgacaagtagtttacatggcatgttactcaatgtaaattaattcacaggtagagcatgatgagtgcatggagctacttgggaattggctttgcatatactcct

SEQ ID NO: 77371 - DNA, 600 bp, Chicken  19866894365805_1
attgaaacagcacaatgaaagaacagtcagcctgctcacgaggtcatcccacttcaggtgtgagacttcatccttgctctgatttatccagtaggcagtcgcacagaatggcatttacttttacaaagctgtaagaaaaacatgcatgaggagaaaacaagttcacttcttgctttacattcagcatctccggtggaagcaaggtaagacaacttttatgtacacttacttcttgtttgtttcatcaaccaactcgttagtcttcacgtagttgatgatgatgtttctcacctcactgcytgagaggatgcttccttttctaaatagaaagaaaacttgattgcttccccttgaaggtgaacaaaatggtagcagcacaagtttgttagcctatctcttaacccaacaatggttttgttgcatttttccagtgctcacctgtgtccagagtcctgaaacagtggcaccatctttgctgagaccccatacattggtatgatttcaggagcacggtatgcttgttccctgtcttcacttttgctgtcttgggcagcagaggctgaagaaaatccttcaggtactgcaaatgctttaatgctg

SEQ ID NO: 77372 - DNA, 600 bp, Chicken  19866894365808_1
acagactattgcataattactgcagataagttactgttttatccatagcaacataaggaatgaattacaacaataattatgtagttaatactgcctcttaagatgaataaaacatggaaaaccaaaattatagcaaggttacagaagacctactctaacaactgtgtgctgtttcttaaaaaaatacattgactgttggtatctctggatttggtgcaatccattttgtgtcttcagaaacatacaatccgaatggcttgcactgggagggaccttgaagatcatctagctccagctccraatttttgcttgtgattgtttttaaagcttcttgaaatatttcaatatttcagctttaccgtaagtattttcaatttaaaattacaaggttttaaaayttgcacagtgttttttctaacacraagagattcactaatgtaagccagtttaggaccttgtatactgttatggtgactggtgaccatcacttctggcttgcaatgaaaacagcaccgatttgaagtatatatgtcacccaatgcttcatgtatatactgtgatattattggtgttgttcaacaagttaccaccttcaaaagt

SEQ ID NO: 77373 - DNA, 600 bp, Chicken  19866894365808_2
taagatgaataaaacatggaaaaccaaaattatagcaaggttacagaagacctactctaacaactgtgtgctgtttcttaaaaaaatacattgactgttggtatctctggatttggtgcaatccattttgtgtcttcagaaacatacaatccgaatggcttgcactgggagggaccttgaagatcatctagctccagctccraatttttgcttgtgattgtttttaaagcttcttgaaatatttcaatatttcagctttaccgtaagtattttcaatttaaaattacaaggttttaaaayttgcacagtgttttttctaacacraagagattcactaatgtaagccagtttaggaccttgtatactgttatggtgactggtgaccatcacttctggcttgcaatgaaaacagcaccgatttgaagtatatatgtcacccaatgcttcatgtatatactgtgatattattggtgttgttcaacaagttaccaccttcaaaagtgcctacttatttcatccttcaagtgtttgtatttcactcaatgtcagagtaaattgcatgattgatgttytagtccatttatcaaggaactcatgcat

SEQ ID NO: 77374 - DNA, 600 bp, Chicken  19866894365808_3
caaaattatagcaaggttacagaagacctactctaacaactgtgtgctgtttcttaaaaaaatacattgactgttggtatctctggatttggtgcaatccattttgtgtcttcagaaacatacaatccgaatggcttgcactgggagggaccttgaagatcatctagctccagctccraatttttgcttgtgattgtttttaaagcttcttgaaatatttcaatatttcagctttaccgtaagtattttcaatttaaaattacaaggttttaaaayttgcacagtgttttttctaacacraagagattcactaatgtaagccagtttaggaccttgtatactgttatggtgactggtgaccatcacttctggcttgcaatgaaaacagcaccgatttgaagtatatatgtcacccaatgcttcatgtatatactgtgatattattggtgttgttcaacaagttaccaccttcaaaagtgcctacttatttcatccttcaagtgtttgtatttcactcaatgtcagagtaaattgcatgattgatgttytagtccatttatcaaggaactcatgcattcccttttaaaaatcaatatttaa

SEQ ID NO: 77375 - DNA, 600 bp, Chicken  19866894365808_4
tcaatttaaaattacaaggttttaaaayttgcacagtgttttttctaacacraagagattcactaatgtaagccagtttaggaccttgtatactgttatggtgactggtgaccatcacttctggcttgcaatgaaaacagcaccgatttgaagtatatatgtcacccaatgcttcatgtatatactgtgatattattggtgttgttcaacaagttaccaccttcaaaagtgcctacttatttcatccttcaagtgtttgtatttcactcaatgtcagagtaaattgcatgattgatgttytagtccatttatcaaggaactcatgcattcccttttaaaaatcaatatttaagaataaaatagccttgcaataatttatcagtgtaagtaaaaatgttgtctaatgttttacttggagaactaacttttgtagattaaataaatggcaaaactcacatcaagcttggctacctcagcattccttgtattggctctcttcatgcaagaaacagggcagaagtggaactatcatgtacgggtgagcagtgtgcaaaaaacctgtcagttgttccaaaaacactgatagtgattttactgtag

SEQ ID NO: 77376 - DNA, 600 bp, Chicken  19866894365815_1
attgctaatatgtttgtttctcctttgttatggtggaatgactgtctaatgcatgggttggaattgggtacattgcaaaaccagagaggttgtattatcttatgtaacctcatggacaaaaaaaaaagtatatatggttgattagagaaggctggcaatgtttcatatctccctctgtaagagatgaggatggaagggtcagcaggatcagcaggttcttgtttgcactgggggcattcctcctccttctgtgggcagctctgcaggcatgacagagtcagctccagtgaagaaagtggkatgctttcattctcactttgtgtgaattaataatccagagcattgcgtttgaactggaggcattttctctcagtggatcatcctatgaaagtaaagggtcagctttaatacagtgtctctgcctttggtgctgagttcattctgtagctcagtccttttgttctctgttgtagatgttagagtgaattatctgtcctgccagagcagtttgaaatgaatatacttcttttaggaaaactgcaaaattaaattaaactttaaagaaaccacagaatcccccttgaatatttaacataaacc

SEQ ID NO: 77377 - DNA, 600 bp, Chicken  19866894365822_1
gatctatctatcactgcctatataggtatgtatatgtgtgctttgtatgtatgtgtgtgtctactggggatacacactgcacctcactaccagttggacctggatgcatgctgtaatgtttctctctccatgctctcagatgcagtgtggctttcccctagcagtctcattaggtttttaatctctactgcattcatcagtggagaaataattgaatatctcatgtttgtagggtcacacaaagaccatggagtccaacccctgcctccacacaggaccacccaaaaatcagacgcaatwcctgggagcgtggtccagatgctccttaagctccagcagttcaggtccgtgcccactgccctgtgcagcccgttccatccccatcaccctctggcgcagaccctttccctgaccccsagctgcccctcccctgacacagctccatgccgttccctygggccctgttgctgtcacacagagcagagttcagcactgctctctgctccctgtgaggagctgcagccgccatgatggctcccctcagctcctctgctctgtgctgagcacacccagtgactgcagccactcctcacacatgtt

SEQ ID NO: 77378 - DNA, 600 bp, Chicken  19866894365822_2
gtttctctctccatgctctcagatgcagtgtggctttcccctagcagtctcattaggtttttaatctctactgcattcatcagtggagaaataattgaatatctcatgtttgtagggtcacacaaagaccatggagtccaacccctgcctccacacaggaccacccaaaaatcagacgcaatwcctgggagcgtggtccagatgctccttaagctccagcagttcaggtccgtgcccactgccctgtgcagcccgttccatccccatcaccctctggcgcagaccctttccctgaccccsagctgcccctcccctgacacagctccatgccgttccctygggccctgttgctgtcacacagagcagagttcagcactgctctctgctccctgtgaggagctgcagccgccatgatggctcccctcagctcctctgctctgtgctgagcacacccagtgactgcagccactcctcacacatgttgcccttcagacccttcaccatcttcatatctctcttttagacactctctgatagttttatattcttatttatcctcactcttgaatcttctgattcaagaggctattgctaatagtg

SEQ ID NO: 77379 - DNA, 600 bp, Chicken  19866894365822_3
cctagcagtctcattaggtttttaatctctactgcattcatcagtggagaaataattgaatatctcatgtttgtagggtcacacaaagaccatggagtccaacccctgcctccacacaggaccacccaaaaatcagacgcaatwcctgggagcgtggtccagatgctccttaagctccagcagttcaggtccgtgcccactgccctgtgcagcccgttccatccccatcaccctctggcgcagaccctttccctgaccccsagctgcccctcccctgacacagctccatgccgttccctygggccctgttgctgtcacacagagcagagttcagcactgctctctgctccctgtgaggagctgcagccgccatgatggctcccctcagctcctctgctctgtgctgagcacacccagtgactgcagccactcctcacacatgttgcccttcagacccttcaccatcttcatatctctcttttagacactctctgatagttttatattcttatttatcctcactcttgaatcttctgattcaagaggctattgctaatagtggaagtcaagtggcgttccttgaggaagtattgtaacaat

SEQ ID NO: 77380 - DNA, 600 bp, Chicken  19866894365822_4
gtgaggagctgcagccgccatgatggctcccctcagctcctctgctctgtgctgagcacacccagtgactgcagccactcctcacacatgttgcccttcagacccttcaccatcttcatatctctcttttagacactctctgatagttttatattcttatttatcctcactcttgaatcttctgattcaagaggctattgctaatagtggaagtcaagtggcgttccttgaggaagtattgtaacaatggattatcagatcatttaaaatcattctctaggatcaattgcatgtgaattyttgtagtgtggtagcagcatagctgcgaggcagatactcagaaaagtgaagtgaatagcgtccaattcttgcaggctgttttaatctttgagatactgaaaagcatatagttcaatttctaatggaactcaaagctcttgacctttcaggtagcttatatttttccccagcaagttgttcagcataaattgcatacttcatttgtgctcaatagttctttattttgggaaagcagaaacaacagatttgtaaggcttgagtgggttttacttgcttcttttacttcacgcacgtccaacc

SEQ ID NO: 77381 - DNA, 599 bp, Chicken  19866894365824_1
  misc_feature (1)..(29): n is any nucleotide
nnnnnnnnnnnnnnnnnnnnnnnnnnnnnctgttccttatctacgttgtgctccctggttttgtttgattttgattttgtttatttttaaattctgtgacaattcaaaagtattgaatgtaggtcttgtttaaaagctttcaactgagtggttgcctgccacgtctgggtctttgaattttcaaatgcattagtgattttatatcagttctgagacctgtttctgtttcattttcacagttaataaatgaaacttccaacagtaggtaatacaaagtcaaaacgtacagcgttagaaggrgttagatgaacttctctggaaagctgatactgactatagttcctttcctgttctctgagaagcacagtacttctttttttaatcatttataattrctgcttaaatcctaggccagcatttcttccagacccaaacgatggcagtttgtatacgcttggtggcaagaataatgaaggcctgactgtaagtgtcctttggagattctctctcagttttcagacgagtgccccaatcagactcacagaaaggatcagtttccaaaggaaccttctgctgtctcagcagtgctggtttgctat

SEQ ID NO: 77382 - DNA, 600 bp, Chicken  19866894365824_2
gtgacaattcaaaagtattgaatgtaggtcttgtttaaaagctttcaactgagtggttgcctgccacgtctgggtctttgaattttcaaatgcattagtgattttatatcagttctgagacctgtttctgtttcattttcacagttaataaatgaaacttccaacagtaggtaatacaaagtcaaaacgtacagcgttagaaggrgttagatgaacttctctggaaagctgatactgactatagttcctttcctgttctctgagaagcacagtacttctttttttaatcatttataattrctgcttaaatcctaggccagcatttcttccagacccaaacgatggcagtttgtatacgcttggtggcaagaataatgaaggcctgactgtaagtgtcctttggagattctctctcagttttcagacgagtgccccaatcagactcacagaaaggatcagtttccaaaggaaccttctgctgtctcagcagtgctggtttgctattgttcagtggaattgtaccagttttttggaaatctttgatcacagcaaaaccaaacatctgtcatatgtgcaagtttttagactgataatactctc

SEQ ID NO: 77383 - DNA, 599 bp, Chicken  19866894365825_1
  misc_feature (1)..(127): n is any nucleotide
nnnnnnnnnnnnnnnnnnnnnnnnnnnnnnnnnnnnnnnnnnnnnnnnnnnnnnnnnnnnnnnnnnnnnnnnnnnnnnnnnnnnnnnnnnnnnnnnnnnnnnnnnnnnnnnnnnnnnnnnnnnnnnnttttttcttacatttccaaattacaacttccattgtgcatagactacaaaagctgaaagctgctctgtaaactttcgctgttcttattggtagatcttcccattcagcattttcagctctcccaccctatcctccctgtttccatgtttaacccttactgagacacctttagytgctgactgtatsgttagaccatacagactctacagactayggtctttctttttgcctctttgaactggtttctttagtaaacaacataactatcctggggtcatcttgagaatgtcatttcagtagtgctgaatgaatcactttggttgagactctttcttctgatacaacagcgctgcttcttttctttgtctgcttcttcatttattttgggttcaactcatgagttacaccatccatggaaccaactcctcatctcttaggtatgatatatattgttgagtggatttaagctgac

SEQ ID NO: 77384 - DNA, 599 bp, Chicken  19866894365825_2
  misc_feature (1)..(114): n is any nucleotide
nnnnnnnnnnnnnnnnnnnnnnnnnnnnnnnnnnnnnnnnnnnnnnnnnnnnnnnnnnnnnnnnnnnnnnnnnnnnnnnnnnnnnnnnnnnnnnnnnnnnnnnnnnnnnnnnnnttttttcttacatttccaaattacaacttccattgtgcatagactacaaaagctgaaagctgctctgtaaactttcgctgttcttattggtagatcttcccattcagcattttcagctctcccaccctatcctccctgtttccatgtttaacccttactgagacacctttagytgctgactgtatsgttagaccatacagactctacagactayggtctttctttttgcctctttgaactggtttctttagtaaacaacataactatcctggggtcatcttgagaatgtcatttcagtagtgctgaatgaatcactttggttgagactctttcttctgatacaacagcgctgcttcttttctttgtctgcttcttcatttattttgggttcaactcatgagttacaccatccatggaaccaactcctcatctcttaggtatgatatatattgttgagtggatttaagctgaccagtactcaaaga

SEQ ID NO: 77385 - DNA, 599 bp, Chicken  19866894365825_3
  misc_feature (1)..(86): n is any nucleotide
nnnnnnnnnnnnnnnnnnnnnnnnnnnnnnnnnnnnnnnnnnnnnnnnnnnnnnnnnnnnnnnnnnnnnnnnnnnnnnnnnnnnnnttttttcttacatttccaaattacaacttccattgtgcatagactacaaaagctgaaagctgctctgtaaactttcgctgttcttattggtagatcttcccattcagcattttcagctctcccaccctatcctccctgtttccatgtttaacccttactgagacacctttagytgctgactgtatsgttagaccatacagactctacagactayggtctttctttttgcctctttgaactggtttctttagtaaacaacataactatcctggggtcatcttgagaatgtcatttcagtagtgctgaatgaatcactttggttgagactctttcttctgatacaacagcgctgcttcttttctttgtctgcttcttcatttattttgggttcaactcatgagttacaccatccatggaaccaactcctcatctcttaggtatgatatatattgttgagtggatttaagctgaccagtactcaaagaagctgattgatgatgatacctcagcaaa

SEQ ID NO: 77386 - DNA, 600 bp, Chicken  19866894365825_4
tgatgatacctcagcaaacaggtaatagtgtacaaattaccttactaggtgatttgaattagtgcacgccactgcctactactgcatacaagcaggggaaagggcataatttaaaaccaaatcaaaatggaagagatggtagtggtggtgccattgcaccagctacctgcggcttcttttaacttcaggtatccgttacagggagaaggaagccccagtaaagcagaaagaatgaaaatgataatctgctctgataagttaatctttgtttattatttcctgttcgagattttttttttwtttttttttttactaaagatttattttcaatttacttctctgtttccccattaatccargcccatactgcactcaattcctagttagtcaaattcgtgatttgttctgtttggggaataagttgtgtagaattttaatttgtaaggatgcttctgggaactgtccattcataccccaaatcgttayttttctgcacactttctcaattctgtcattcactctccaagcatttctactttctttaatgatcgcctgttcaagctttcactaagacagatacagctgtgcattttctaatac

SEQ ID NO: 77387 - DNA, 548 bp, Chicken  19866894365825_5
tagtgcacgccactgcctactactgcatacaagcaggggaaagggcataatttaaaaccaaatcaaaatggaagagatggtagtggtggtgccattgcaccagctacctgcggcttcttttaacttcaggtatccgttacagggagaaggaagccccagtaaagcagaaagaatgaaaatgataatctgctctgataagttaatctttgtttattatttcctgttcgagattttttttttwtttttttttttactaaagatttattttcaatttacttctctgtttccccattaatccargcccatactgcactcaattcctagttagtcaaattcgtgatttgttctgtttggggaataagttgtgtagaattttaatttgtaaggatgcttctgggaactgtccattcataccccaaatcgttayttttctgcacactttctcaattctgtcattcactctccaagcatttctactttctttaatgatcgcctgttcaagctttcactaagacagatacagctgtgcattttctaataccctcaaa

SEQ ID NO: 77388 - DNA, 421 bp, Chicken  19866894365825_6
aggtatccgttacagggagaaggaagccccagtaaagcagaaagaatgaaaatgataatctgctctgataagttaatctttgtttattatttcctgttcgagattttttttttwtttttttttttactaaagatttattttcaatttacttctctgtttccccattaatccargcccatactgcactcaattcctagttagtcaaattcgtgatttgttctgtttggggaataagttgtgtagaattttaatttgtaaggatgcttctgggaactgtccattcataccccaaatcgttayttttctgcacactttctcaattctgtcattcactctccaagcatttctactttctttaatgatcgcctgttcaagctttcactaagacagatacagctgtgcattttctaataccctcaaa

SEQ ID NO: 77389 - DNA, 600 bp, Chicken  19866894365829_1
accctgatgtgatgcaaattgacccaacagctgctgaaagttgaattctaacaatactttaaacatttgaaaaagactgctttcttctgagacattaatattaaaactgtatgtagaataagatttgacaggacttggccactgaaattgtataaggaatttgagataacttagaattacagaataaattgtagtttttagagggtacacacagctaatgacagttctcaaaataatgccagaccattgtgaaacttagcagtagagcatatgtaaaggatgaatttacctttgtaatgytgctattatttctttagaagcacagttgctagttttattacataaacttattaatttttaatctcaatatattaattgatgaaagtgtgctaagtggaactctacttgatgcttgaaaatgcagaaaatcaacatatttaagctaatgtaaaataatccaactaaagtgttcttaagactgaargatgtgtgttactaataaataaaaaaaagcagaagtttctacacacacacacacacamaaatcctacttatttcacttgagataccctgtatttgaagacagattctgaaatattt

SEQ ID NO: 77390 - DNA, 554 bp, Chicken  19866894365829_2
taaattgtagtttttagagggtacacacagctaatgacagttctcaaaataatgccagaccattgtgaaacttagcagtagagcatatgtaaaggatgaatttacctttgtaatgytgctattatttctttagaagcacagttgctagttttattacataaacttattaatttttaatctcaatatattaattgatgaaagtgtgctaagtggaactctacttgatgcttgaaaatgcagaaaatcaacatatttaagctaatgtaaaataatccaactaaagtgttcttaagactgaargatgtgtgttactaataaataaaaaaaagcagaagtttctacacacacacacacacamaaatcctacttatttcacttgagataccctgtatttgaagacagattctgaaatatttcattgagacaataaaatttaaggaaaaaaataataataatgggggagaaatctggttttcagagagttctacttgacatgctgtctgcaattctctgtatacagtgaataagctgaaaaacttctgacacttttaaca

SEQ ID NO: 77391 - DNA, 496 bp, Chicken  19866894365829_3
accattgtgaaacttagcagtagagcatatgtaaaggatgaatttacctttgtaatgytgctattatttctttagaagcacagttgctagttttattacataaacttattaatttttaatctcaatatattaattgatgaaagtgtgctaagtggaactctacttgatgcttgaaaatgcagaaaatcaacatatttaagctaatgtaaaataatccaactaaagtgttcttaagactgaargatgtgtgttactaataaataaaaaaaagcagaagtttctacacacacacacacacamaaatcctacttatttcacttgagataccctgtatttgaagacagattctgaaatatttcattgagacaataaaatttaaggaaaaaaataataataatgggggagaaatctggttttcagagagttctacttgacatgctgtctgcaattctctgtatacagtgaataagctgaaaaacttctgacacttttaaca

SEQ ID NO: 77392 - DNA, 600 bp, Chicken  19866894365837_1
gccagccaaacacctgaaggagctctctggctgataaaatttcacctctgaactcagccaattgaaaatgaacctcctgtatgctgcttctgggatagaatagaggactcgacggccagctgaacagcaacagccaaaagctggacatgcggagtgagcaaacactgagagaatcacatcccacagtacatcagtgtcacaaagttctgatggatttaactcagtgcacgttgtgtgctttgtgaaactatttcagtgcatcagagataccaagagattgtttatttaaaagcagggtaygaagtctcccttcgtaacacatttctattgttgttttcacttctctttaatttggatttgctcctttcagtgatgcagaaaaaccttcagatgagctgctgctgaactgtgggtatttgagagatcattagaagacacatcctcctttacagtaactttttaattaccaaaatgtggtttgaatcctccagcgtcttctgtattaaatccgtgtgtaatggactcatttcaaaagatggagcgaggcttaatattctattatctacaactaataataaggaatgcttttcttacttttat

SEQ ID NO: 77393 - DNA, 600 bp, Chicken  19866894365839_1
taaaagtatgattgcaagtgacttgagaatgccccagaatccacatccagctcactgacctgatgttcccagtccttgatttgatctttttaatagctctaaatatttgtgtgttctattcagaatctccagcttccagctcagtgttttccaagcctcaaccttgtgatgagatttctctagctggcatttttgcattatagcctcaagtgaaaatcagatgtatgctcccaacccacactgttcttagaacccattaacagttccagtttccctttgaaacagatctattgtttcaarcgttatccaatattcatagccttttctcaggagctgcacagtttctcagatttaatgaggaggctgaaaagttggtaaagaagttgaggaggggctgagataacagagaaaaggtcaggcagaatagagaatgcactgcatcaaggactgacgtgaaaacatcccttgtgatttattcagtacacaatgagccactccagatttctgcactctcagggcagacagcaatcctccacaggactgaaggtgagaggtgtcattggtacacaagaaagtcaggtcggaaaaacattaattatc

SEQ ID NO: 77394 - DNA, 599 bp, Chicken  19866894365843_1
  misc_feature (1)..(196): n is any nucleotide
nnnnnnnnnnnnnnnnnnnnnnnnnnnnnnnnnnnnnnnnnnnnnnnnnnnnnnnnnnnnnnnnnnnnnnnnnnnnnnnnnnnnnnnnnnnnnnnnnnnnnnnnnnnnnnnnnnnnnnnnnnnnnnnnnnnnnnnnnnnnnnnnnnnnnnnnnnnnnnnnnnnnnnnnnnnnnnnnnnnnnnnnnnnnnnnnnnnncccccccccccagagcgctcccgaagctcggtgctgggacagggcagcccatctctgccgtcccctctctgtccctccgttaatttcacccctgcctcaacccygggcagcatttcccrgaggggaaaggagaaaagaagcgagggacgggagtaggggtcagtttgggggcttaattagagaggaacacaagtcagaagaacccrcatcggcggtgctcccttccagcttaccccactgaacactttttacacctcgagcgtattggcttcggttaaaaactgtaattgtgctttgaggatggcgttctctttctgcgaccctcagctgagtcccaggaacaggcagggacccacccagacacccaactccccgcgctcaggcaggtttcttggtctgttct

SEQ ID NO: 77395 - DNA, 600 bp, Chicken  19866894365843_10
tccctttcataatagaagctacgaggggataaaagtacattctaattataatagttccttaattatctgcctaacatctcatctttctgtctaatcccacttttaattacagagtacctttttttttttttgcctgtcaccaactgaagcactctattttcctgacagtaaatccttctaagtggtgataccagaggaggagttctgccactgcccaccaggacacacactgcatggcagggaacatccaaccacagcttggggtagagcgcatggatgctcccttttggaacagcccartgtaagccctgtgggttttctcaagcaagaaagccctccctaaaccacacagctatttgagctatacaaattttccagcacgtttctcagttttccagactcctgcagcttggtctgacttccaaccaatgctcaatggggtcccagtggtggctggtgttggaatgagacttggcctttgaaccacagcggtgtgcagctcgcagagaggaaacaatacggtatcattgagctaccttatctccgggcatctgctcatcaagatctcacccggcgattgcggctggggaggaagcgctg

SEQ ID NO: 77396 - DNA, 599 bp, Chicken  19866894365843_2
  misc_feature (1)..(181): n is any nucleotide
nnnnnnnnnnnnnnnnnnnnnnnnnnnnnnnnnnnnnnnnnnnnnnnnnnnnnnnnnnnnnnnnnnnnnnnnnnnnnnnnnnnnnnnnnnnnnnnnnnnnnnnnnnnnnnnnnnnnnnnnnnnnnnnnnnnnnnnnnnnnnnnnnnnnnnnnnnnnnnnnnnnnnnnnnnnnnnnnnnnnncccccccccccagagcgctcccgaagctcggtgctgggacagggcagcccatctctgccgtcccctctctgtccctccgttaatttcacccctgcctcaacccygggcagcatttcccrgaggggaaaggagaaaagaagcgagggacgggagtaggggtcagtttgggggcttaattagagaggaacacaagtcagaagaacccrcatcggcggtgctcccttccagcttaccccactgaacactttttacacctcgagcgtattggcttcggttaaaaactgtaattgtgctttgaggatggcgttctctttctgcgaccctcagctgagtcccaggaacaggcagggacccacccagacacccaactccccgcgctcaggcaggtttcttggtctgttctgtgtctttccgtttg

SEQ ID NO: 77397 - DNA, 599 bp, Chicken  19866894365843_3
  misc_feature (1)..(94): n is any nucleotide
nnnnnnnnnnnnnnnnnnnnnnnnnnnnnnnnnnnnnnnnnnnnnnnnnnnnnnnnnnnnnnnnnnnnnnnnnnnnnnnnnnnnnnnnnnnnnncccccccccccagagcgctcccgaagctcggtgctgggacagggcagcccatctctgccgtcccctctctgtccctccgttaatttcacccctgcctcaacccygggcagcatttcccrgaggggaaaggagaaaagaagcgagggacgggagtaggggtcagtttgggggcttaattagagaggaacacaagtcagaagaacccrcatcggcggtgctcccttccagcttaccccactgaacactttttacacctcgagcgtattggcttcggttaaaaactgtaattgtgctttgaggatggcgttctctttctgcgaccctcagctgagtcccaggaacaggcagggacccacccagacacccaactccccgcgctcaggcaggtttcttggtctgttctgtgtctttccgtttgtttttacacaaaaccaaagaaacgtctcctacagcaaccagctcagctcaccccaacagcaacgttatttccacgcatcctccgtaa

SEQ ID NO: 77398 - DNA, 600 bp, Chicken  19866894365843_4
tcacctgttccctgtatttcctcaacaaatggtgtctcattcccagcttgttttatgtctgcgcggggacacgaagacagaatttacgtgtgctagtgtgcattaactcctgtcctgaccagtgctaattaccgctaatgatgtgggccagtgttaattctcttagcaacattactgctggccatacgcttctgaaagtgcctttgggtgaggtagcttactttgaaaagatatttatgtggagagtaaatacagagcagctaatacaccataaatccccccttgctggatcgcgggctscracggctccatagcacygaggtccctgggcacaaaggcagaggaaccctccagtaagaaccactcaatagaaaggtgttgggatcaccccgcgtgatcctgggaaagtaattctgatctggcacttctcttctctgaaattggaaaaacaatacgtccctcaccatctcaggggcgccatatttcttttccctgccttgccaatcattctcttcgctttcaaacaacggcctctaaaccctaattgtttttacgcctttgcagtataaaacagaaaggccgtaaacccatcgtattttc

SEQ ID NO: 77399 - DNA, 600 bp, Chicken  19866894365843_5
acctgttccctgtatttcctcaacaaatggtgtctcattcccagcttgttttatgtctgcgcggggacacgaagacagaatttacgtgtgctagtgtgcattaactcctgtcctgaccagtgctaattaccgctaatgatgtgggccagtgttaattctcttagcaacattactgctggccatacgcttctgaaagtgcctttgggtgaggtagcttactttgaaaagatatttatgtggagagtaaatacagagcagctaatacaccataaatccccccttgctggatcgcgggctscracggctccatagcacygaggtccctgggcacaaaggcagaggaaccctccagtaagaaccactcaatagaaaggtgttgggatcaccccgcgtgatcctgggaaagtaattctgatctggcacttctcttctctgaaattggaaaaacaatacgtccctcaccatctcaggggcgccatatttcttttccctgccttgccaatcattctcttcgctttcaaacaacggcctctaaaccctaattgtttttacgcctttgcagtataaaacagaaaggccgtaaacccatcgtattttcca

SEQ ID NO: 77400 - DNA, 600 bp, Chicken  19866894365843_6
tcctcaacaaatggtgtctcattcccagcttgttttatgtctgcgcggggacacgaagacagaatttacgtgtgctagtgtgcattaactcctgtcctgaccagtgctaattaccgctaatgatgtgggccagtgttaattctcttagcaacattactgctggccatacgcttctgaaagtgcctttgggtgaggtagcttactttgaaaagatatttatgtggagagtaaatacagagcagctaatacaccataaatccccccttgctggatcgcgggctscracggctccatagcacygaggtccctgggcacaaaggcagaggaaccctccagtaagaaccactcaatagaaaggtgttgggatcaccccgcgtgatcctgggaaagtaattctgatctggcacttctcttctctgaaattggaaaaacaatacgtccctcaccatctcaggggcgccatatttcttttccctgccttgccaatcattctcttcgctttcaaacaacggcctctaaaccctaattgtttttacgcctttgcagtataaaacagaaaggccgtaaacccatcgtattttccaaggcaatgttttcccc

SEQ ID NO: 77401 - DNA, 600 bp, Chicken  19866894365843_7
aatgttttccccattgtgccgtagcattactgctcagcggtctggcgatttgctaggaggacaaatgaagacataccgagcgcttcgacgcttggccaggcggcactgcagggctggaagatatcaccgggccgtgcacactgatttcagcagctccactctgatttatcatacaatcatagaaccatagaatggcctgggttgaaaaggaccacaatgatcatcgagtttcaacccccctgctatgtgcagggtcgccaaccagcagaccaagctgcccagagccacatccagcctggyctcgaatgcctccagggatggggcatccaaaacctccttaggcaacctgttccggtgtgacaccaccctctgagtgaaatttatggggctggatgccccagaactgctgcctgycccttcctcttccctgctgcagccctggatgcgcgcctcagtttgtggtcattaacagcagctgttggagcagcgcttgctgaagctccctgtcctttcagaatcaacacaggtttctgctttgcctggaaatatgcagcagtttagtttgtataaaggctgcatgaataaaaatttaatctaagg

SEQ ID NO: 77402 - DNA, 600 bp, Chicken  19866894365843_8
tggaagatatcaccgggccgtgcacactgatttcagcagctccactctgatttatcatacaatcatagaaccatagaatggcctgggttgaaaaggaccacaatgatcatcgagtttcaacccccctgctatgtgcagggtcgccaaccagcagaccaagctgcccagagccacatccagcctggyctcgaatgcctccagggatggggcatccaaaacctccttaggcaacctgttccggtgtgacaccaccctctgagtgaaatttatggggctggatgccccagaactgctgcctgycccttcctcttccctgctgcagccctggatgcgcgcctcagtttgtggtcattaacagcagctgttggagcagcgcttgctgaagctccctgtcctttcagaatcaacacaggtttctgctttgcctggaaatatgcagcagtttagtttgtataaaggctgcatgaataaaaatttaatctaaggctatcgctgctgtaatagcagtaatttctcttaaaggctgtatacaaagcatactaaatactgtctataaataagactgtatttaatggaggagagaagtgattgaatggcctt

SEQ ID NO: 77403 - DNA, 600 bp, Chicken  19866894365843_9
aacacaggtttctgctttgcctggaaatatgcagcagtttagtttgtataaaggctgcatgaataaaaatttaatctaaggctatcgctgctgtaatagcagtaatttctcttaaaggctgtatacaaagcatactaaatactgtctataaataagactgtatttaatggaggagagaagtgattgaatggccttactggcaaaactgccacttctgagcccaaatctgggtcttttctctgagcagaactgatgtcctgcagtgagaacttggacccagaaaactctgatttccaggtraagtcattcagcccaaagtttcctctgcaaaatgagagcaaaaacatcttaaagggaatatgtgttaagcagaggacatccctttcataatagaagctacgaggggataaaagtacattctaattataatagttccttaattatctgcctaacatctcatctttctgtctaatcccacttttaattacagagtacctttttttttttttgcctgtcaccaactgaagcactctattttcctgacagtaaatccttctaagtggtgataccagaggaggagttctgccactgcccaccagg

SEQ ID NO: 77404 - DNA, 600 bp, Chicken  19866894365851_1
tgcttccttttttattattccagcttacagcctctgaaataaaaaaaacctgctgcttatcaaagctcttctaaaatgattcattaaaacgggagcctctcaactttgtgaagcaaactgtggctgcttctcaggaaatgcaaggaccagagggagtagttttctcctctgctttatgctttagcttgtatgctcctttttcttttagtgctttacacttacgccttcatccagcacctgagcagagtgatttctgagctttcctcacctctttttgcacaactcattgatctctcaaaraagaaawtaagtaaactttgatcctgaatatgcatgcagcctgattttcctctgtagtgaggactcatttccctggtctccaaaccaaacaggagcagtgctggctcagggcttgattaaaatcagggcagagctctggagatgtgtcactgatatcggttatcgtgcatccttctttatcctgggatcacagactgctctgtccctgcctgcaggtgggagggggctttcccttcactgtaggtaaggccaagggcagccctgaaaacagacctgcttgccacgactgtgttgtatgcc

SEQ ID NO: 77405 - DNA, 600 bp, Chicken  19866894365851_2
ttttttattattccagcttacagcctctgaaataaaaaaaacctgctgcttatcaaagctcttctaaaatgattcattaaaacgggagcctctcaactttgtgaagcaaactgtggctgcttctcaggaaatgcaaggaccagagggagtagttttctcctctgctttatgctttagcttgtatgctcctttttcttttagtgctttacacttacgccttcatccagcacctgagcagagtgatttctgagctttcctcacctctttttgcacaactcattgatctctcaaaraagaaawtaagtaaactttgatcctgaatatgcatgcagcctgattttcctctgtagtgaggactcatttccctggtctccaaaccaaacaggagcagtgctggctcagggcttgattaaaatcagggcagagctctggagatgtgtcactgatatcggttatcgtgcatccttctttatcctgggatcacagactgctctgtccctgcctgcaggtgggagggggctttcccttcactgtaggtaaggccaagggcagccctgaaaacagacctgcttgccacgactgtgttgtatgccctgtctc

SEQ ID NO: 77406 - DNA, 600 bp, Chicken  19866894365856_1
tcaggacagtgcatcgtaagccaaactcattgttcatgtaaatatggcattgtgattgtccatgtatatacatacctacgtgtacacatgctctctattaaatgtatatatttttaatatgaatatatatttaattggatttgtctgtgtttagtgcagaaatggttgaactcttttaatactggcatgcccttttccctctgctgacatctgctgacatctcctcagccttgctgaagtctctttcaattcacctgactttggaccaaagcatctgaggagtatttgcacttcaatttktctgtacccaccttttgattaattygattacatatatgctttatgtttttcttctatcactacctatgccattgtgctgtgtgtaatgcagaatagattgccagtttgctactcaaaaagctggtttccatgcagagaagaatatagagaagttatttcaaatcaagttattaaaggtaaacatagttaccttaacacattccatcatttctgcatttcctcatttctgtcttggaggggctgagattcctctcactgctttgtctaagcctttgtattttgaatgaggaggaagtgtct

SEQ ID NO: 77407 - DNA, 600 bp, Chicken  19866894365856_2
ctcattgttcatgtaaatatggcattgtgattgtccatgtatatacatacctacgtgtacacatgctctctattaaatgtatatatttttaatatgaatatatatttaattggatttgtctgtgtttagtgcagaaatggttgaactcttttaatactggcatgcccttttccctctgctgacatctgctgacatctcctcagccttgctgaagtctctttcaattcacctgactttggaccaaagcatctgaggagtatttgcacttcaatttktctgtacccaccttttgattaattygattacatatatgctttatgtttttcttctatcactacctatgccattgtgctgtgtgtaatgcagaatagattgccagtttgctactcaaaaagctggtttccatgcagagaagaatatagagaagttatttcaaatcaagttattaaaggtaaacatagttaccttaacacattccatcatttctgcatttcctcatttctgtcttggaggggctgagattcctctcactgctttgtctaagcctttgtattttgaatgaggaggaagtgtcttgtatgtaaaaatgccttcttttcc

SEQ ID NO: 77408 - DNA, 600 bp, Chicken  19866894365858_1
ggcttggttttcacagcagttacagtagtgaccacagtcccacagggcatcacagttcgatccttttctaccttagtgcttggcactggagaagaagcttgccaagtctttaactcgctaggttcaataaacaagaactaggaagacaaaaaaatatttcaaagttgttaatatttctaactagtgctccttcaaaatttttattaacattcaagggccagctaatgcttttgatacacataaatacagcatgatgcgctatcataaattatgaatgtgatacggaaacttggccacacrttgcactgtgaactcacagatgagcactcacaaggatgtccagaacyaaaggatccaccataaaaacatccctatgccatacctctgcagtaatggatcctcgcccaggcctcagccctgggctgccgtcactggccctgctgctcagtgcaaagctttggtggccagaaggttgcttcctgaacaagtctagaggtatagttgcccttgcggatgaagaacctagaagaaataaaaaggctgagaraacaggaaaggaaacraaagaactayagcagctaattacgatacctggttata

SEQ ID NO: 77409 - DNA, 600 bp, Chicken  19866894365858_10
ttacaactacatttctgtactatctccttaattggttactcrtgtctttcttttcagagaacactccctgggttcctggtaaattggagcatcattaagaatattccttctttatttgatcttcagtgcaagctgagcagttctcttgttcctcccattacctaatgtctaatgtaagctacattagattggagcacactactagcaaaatcactcaggatttcagggattaaatcccagtgttctgcaaaayacaaaggcaaatagagttctacattatattcacattactcagctctyccctcactaatgcgattctactttgagttttccatttaaatctttgggagaacagctaagacagtggcaggggaggagaaagatgaccatcggtgcaatccacagagacttctttcgtttaaaccaggctgataattacactcttagtaggatgtggaatgctgctggtattgtttgaaatacccattatgaaaggtgattgagaattaacaggaacagatttcatgtaagaaacaatatgcatttgctgactgtacataggtctcatatgtctctcctctttttttcttaaatagaaga

SEQ ID NO: 77410 - DNA, 600 bp, Chicken  19866894365858_2
catcacagttcgatccttttctaccttagtgcttggcactggagaagaagcttgccaagtctttaactcgctaggttcaataaacaagaactaggaagacaaaaaaatatttcaaagttgttaatatttctaactagtgctccttcaaaatttttattaacattcaagggccagctaatgcttttgatacacataaatacagcatgatgcgctatcataaattatgaatgtgatacggaaacttggccacacrttgcactgtgaactcacagatgagcactcacaaggatgtccagaacyaaaggatccaccataaaaacatccctatgccatacctctgcagtaatggatcctcgcccaggcctcagccctgggctgccgtcactggccctgctgctcagtgcaaagctttggtggccagaaggttgcttcctgaacaagtctagaggtatagttgcccttgcggatgaagaacctagaagaaataaaaaggctgagaraacaggaaaggaaacraaagaactayagcagctaattacgatacctggttatacaccacggggcacaagggcagaaacatggcagtggtcagagccttct

SEQ ID NO: 77411 - DNA, 600 bp, Chicken  19866894365858_3
agcatgatgcgctatcataaattatgaatgtgatacggaaacttggccacacrttgcactgtgaactcacagatgagcactcacaaggatgtccagaacyaaaggatccaccataaaaacatccctatgccatacctctgcagtaatggatcctcgcccaggcctcagccctgggctgccgtcactggccctgctgctcagtgcaaagctttggtggccagaaggttgcttcctgaacaagtctagaggtatagttgcccttgcggatgaagaacctagaagaaataaaaaggctgagaraacaggaaaggaaacraaagaactayagcagctaattacgatacctggttatacaccacggggcacaagggcagaaacatggcagtggtcagagccttctttcctttttacaactattcctcagcctrgcctaaatactgagcaacaggaaagaatggagatgccttmcttacttgccactatttccagccattttttcccctatatatgccaaatgcttagaggaaaagaaaacacctagaaatattacaactacatttctgtactatctccttaattggttactcrtgtctttctttt

SEQ ID NO: 77412 - DNA, 600 bp, Chicken  19866894365858_4
ataaattatgaatgtgatacggaaacttggccacacrttgcactgtgaactcacagatgagcactcacaaggatgtccagaacyaaaggatccaccataaaaacatccctatgccatacctctgcagtaatggatcctcgcccaggcctcagccctgggctgccgtcactggccctgctgctcagtgcaaagctttggtggccagaaggttgcttcctgaacaagtctagaggtatagttgcccttgcggatgaagaacctagaagaaataaaaaggctgagaraacaggaaaggaaacraaagaactayagcagctaattacgatacctggttatacaccacggggcacaagggcagaaacatggcagtggtcagagccttctttcctttttacaactattcctcagcctrgcctaaatactgagcaacaggaaagaatggagatgccttmcttacttgccactatttccagccattttttcccctatatatgccaaatgcttagaggaaaagaaaacacctagaaatattacaactacatttctgtactatctccttaattggttactcrtgtctttcttttcagagaacactccctg

SEQ ID NO: 77413 - DNA, 600 bp, Chicken  19866894365858_5
aatgtgatacggaaacttggccacacrttgcactgtgaactcacagatgagcactcacaaggatgtccagaacyaaaggatccaccataaaaacatccctatgccatacctctgcagtaatggatcctcgcccaggcctcagccctgggctgccgtcactggccctgctgctcagtgcaaagctttggtggccagaaggttgcttcctgaacaagtctagaggtatagttgcccttgcggatgaagaacctagaagaaataaaaaggctgagaraacaggaaaggaaacraaagaactayagcagctaattacgatacctggttatacaccacggggcacaagggcagaaacatggcagtggtcagagccttctttcctttttacaactattcctcagcctrgcctaaatactgagcaacaggaaagaatggagatgccttmcttacttgccactatttccagccattttttcccctatatatgccaaatgcttagaggaaaagaaaacacctagaaatattacaactacatttctgtactatctccttaattggttactcrtgtctttcttttcagagaacactccctgggttcctggt

SEQ ID NO: 77414 - DNA, 600 bp, Chicken  19866894365858_6
gccatacctctgcagtaatggatcctcgcccaggcctcagccctgggctgccgtcactggccctgctgctcagtgcaaagctttggtggccagaaggttgcttcctgaacaagtctagaggtatagttgcccttgcggatgaagaacctagaagaaataaaaaggctgagaraacaggaaaggaaacraaagaactayagcagctaattacgatacctggttatacaccacggggcacaagggcagaaacatggcagtggtcagagccttctttcctttttacaactattcctcagcctrgcctaaatactgagcaacaggaaagaatggagatgccttmcttacttgccactatttccagccattttttcccctatatatgccaaatgcttagaggaaaagaaaacacctagaaatattacaactacatttctgtactatctccttaattggttactcrtgtctttcttttcagagaacactccctgggttcctggtaaattggagcatcattaagaatattccttctttatttgatcttcagtgcaagctgagcagttctcttgttcctcccattacctaatgtctaatgtaagctac

SEQ ID NO: 77415 - DNA, 600 bp, Chicken  19866894365858_7
ccctgggctgccgtcactggccctgctgctcagtgcaaagctttggtggccagaaggttgcttcctgaacaagtctagaggtatagttgcccttgcggatgaagaacctagaagaaataaaaaggctgagaraacaggaaaggaaacraaagaactayagcagctaattacgatacctggttatacaccacggggcacaagggcagaaacatggcagtggtcagagccttctttcctttttacaactattcctcagcctrgcctaaatactgagcaacaggaaagaatggagatgccttmcttacttgccactatttccagccattttttcccctatatatgccaaatgcttagaggaaaagaaaacacctagaaatattacaactacatttctgtactatctccttaattggttactcrtgtctttcttttcagagaacactccctgggttcctggtaaattggagcatcattaagaatattccttctttatttgatcttcagtgcaagctgagcagttctcttgttcctcccattacctaatgtctaatgtaagctacattagattggagcacactactagcaaaatcactcaggatt

SEQ ID NO: 77416 - DNA, 600 bp, Chicken  19866894365858_8
aaaggctgagaraacaggaaaggaaacraaagaactayagcagctaattacgatacctggttatacaccacggggcacaagggcagaaacatggcagtggtcagagccttctttcctttttacaactattcctcagcctrgcctaaatactgagcaacaggaaagaatggagatgccttmcttacttgccactatttccagccattttttcccctatatatgccaaatgcttagaggaaaagaaaacacctagaaatattacaactacatttctgtactatctccttaattggttactcrtgtctttcttttcagagaacactccctgggttcctggtaaattggagcatcattaagaatattccttctttatttgatcttcagtgcaagctgagcagttctcttgttcctcccattacctaatgtctaatgtaagctacattagattggagcacactactagcaaaatcactcaggatttcagggattaaatcccagtgttctgcaaaayacaaaggcaaatagagttctacattatattcacattactcagctctyccctcactaatgcgattctactttgagttttccatttaaatc

SEQ ID NO: 77417 - DNA, 600 bp, Chicken  19866894365858_9
ccctatatatgccaaatgcttagaggaaaagaaaacacctagaaatattacaactacatttctgtactatctccttaattggttactcrtgtctttcttttcagagaacactccctgggttcctggtaaattggagcatcattaagaatattccttctttatttgatcttcagtgcaagctgagcagttctcttgttcctcccattacctaatgtctaatgtaagctacattagattggagcacactactagcaaaatcactcaggatttcagggattaaatcccagtgttctgcaaaayacaaaggcaaatagagttctacattatattcacattactcagctctyccctcactaatgcgattctactttgagttttccatttaaatctttgggagaacagctaagacagtggcaggggaggagaaagatgaccatcggtgcaatccacagagacttctttcgtttaaaccaggctgataattacactcttagtaggatgtggaatgctgctggtattgtttgaaatacccattatgaaaggtgattgagaattaacaggaacagatttcatgtaagaaacaatatgcatttgctgact

SEQ ID NO: 77418 - DNA, 600 bp, Chicken  19866894365859_1
catcatctctctctgcacgtgccgtagctgggatcaattttgagttgtcacgctatcctcgctacgtctatgggctgccggaggacatcagtcatggctatggctggtccatgttctgtgcctggggaggcctgggcctcaccctgctggctgggttcctctgcactttagccccgtccctcaacacttcgcgggcatctgtacaaaaacccagacaagagaacggggccgtgtgaccttggcaggcgtgaggagagactctggaaagcgcagcctgggcagagctgtgggttaacaccrgaggaggtggcgtgttggtgtggggagcggtgccatagctgtggaaatactagcctgggggatgctgctacagactccagccatggacacggacattgcaagtaactccaggtttgaattattgcygatttgctcattgatggcttaaggggggacagttctgttttgtttctcttctgtttacaagggattaagtccaaggctgtgtcttcttttgtgctgttttttgaactgtacctccatggtcctgtttttgtccagttgtaagggatgtttacgcaccaactctactgctgcagg

SEQ ID NO: 77419 - DNA, 600 bp, Chicken  19866894365859_2
gaggcctgggcctcaccctgctggctgggttcctctgcactttagccccgtccctcaacacttcgcgggcatctgtacaaaaacccagacaagagaacggggccgtgtgaccttggcaggcgtgaggagagactctggaaagcgcagcctgggcagagctgtgggttaacaccrgaggaggtggcgtgttggtgtggggagcggtgccatagctgtggaaatactagcctgggggatgctgctacagactccagccatggacacggacattgcaagtaactccaggtttgaattattgcygatttgctcattgatggcttaaggggggacagttctgttttgtttctcttctgtttacaagggattaagtccaaggctgtgtcttcttttgtgctgttttttgaactgtacctccatggtcctgtttttgtccagttgtaagggatgtttacgcaccaactctactgctgcaggtctgtgtaatgcagacccaaattagggcaagaagctatgtgaagttggcttgaacacttttgcaacagacttgtccagtgttggctcaggccataatttcccaaaagaaccgtgatctaaagctgg

SEQ ID NO: 77420 - DNA, 600 bp, Chicken  19866894365865_1
tagtaatataagggtaccagagagggtaccaaaattcattgctgttacgctgcaactgcaaattggtgcataatgttctaatgatagactgacacagtatctacaagtgcatacattcagacacattataatgtctggaaacagagactcgggaggcacagatagtaacactaacagatattagctattactgatagaaacatctgacagtagttctttcatttcaagttcctacctggcagtcacaatctctaaaaggccaaaatcgtgagctctgatgcagcaagtcttttccagatkatgtggtctcagaggtaaggaaagaagatgccaagatacaaaactaggcttccaaaaaccataggtttcagtcccacatctgaagaggacttcctatctcgcttacaatgcatcagttccctcctgtggttttagtttatttgtggtattatttagaagtggggataaaaataattaatctataatttcactgaagagctccctgggacaagcagtctagcccatactatttaagagagaaagaaaaagaacatatcctcatttgctcccaatagrattcacacacaaactccggtcagt

SEQ ID NO: 77421 - DNA, 600 bp, Chicken  19866894365865_2
gatgcagcaagtcttttccagatkatgtggtctcagaggtaaggaaagaagatgccaagatacaaaactaggcttccaaaaaccataggtttcagtcccacatctgaagaggacttcctatctcgcttacaatgcatcagttccctcctgtggttttagtttatttgtggtattatttagaagtggggataaaaataattaatctataatttcactgaagagctccctgggacaagcagtctagcccatactatttaagagagaaagaaaaagaacatatcctcatttgctcccaatagrattcacacacaaactccggtcagtcctgagaagcacacacacacagttaaagccacaaccagataaattcactgagaatttaggcaatgatatcacagtgaccgaaagtaggccataaagtagacaaatgggctgtcagtactccctgaagtcatttgccagcccttggcaccaagatgaaaccataatgttttgtaattacagataaaagatattttacagaagacatctccaaaccagccaaacatcctgagaaaaaaaaaaaaaaaaggctagggaacgagaataaccatcaagaca

SEQ ID NO: 77422 - DNA, 600 bp, Chicken  19866894365866_1
tgcagttctatgattccacaacaaacatgacacatcttgtcttcatatctccattttaaaaaggtataaaatagctcagtcttcatccaattttgtagtaagctagtaaagcctaatactgcatgaatggaatgatggcctcttcatggggtggctggattattccttaattcacccagctcagaacaggatgttctctcttcatggtataccacatcttttgtgcaattaagtctaaagaattgcatactttaaatgtaaattataaatggattggccaataaaatatcaggcatcccwcaaaaaccatatgccaatacaaagtttgcagagggattattgtcatcttgcagctttatgtcacactaaaatctgacattttgcattaaattcaaaaggaaaagatgatcacaatatccagtctgaaatacaagactcgtttttgaataacattaaatgttttggttggtttttttgttgttttttggtttttccaactgggaatgtggaaatgaagcatccccctatggctaagctggcacagtctgcaacatttggtagtgattgctttctgctcttttatatgaaaaatttacattc

SEQ ID NO: 77423 - DNA, 600 bp, Chicken  19866894365867_1
cctcctttagtttaaaactattcctgcttgccctatcactatctacctgtgtaaaaagttgttatccctcctgcttattgtgtcctgttaaatattggaaggtctcccagagccttctcttctccacactgaataagccaagctccctcagcctgtcttctggggatgtactccagccctcttatcacctctgtggacctcctttggaccttctccaaaagctccacatctttcctgtgtgcagggccccagacctggatgcatgttctgatttttatcagtattccatatcatgacatsatgcggtaagcagttcagggagctgcatttcctgtttcctagttcctgacagtctcagctatttgcacttcctgggtcctagctcctgccagtctcacttattctcatatgggttctggctctctgagaggacagtatgacgaggagagacagactacagttccccaaagtctccagtactccccatgtgatttcccatttccaagtggtaagagagaaccttttctttctggacacagcagacagcagcacagtcagaaatcctttcctatttggttggtaatcacaattctcatttta

SEQ ID NO: 77424 - DNA, 600 bp, Chicken  19866894365873_1
gacaagaggtttgtgtgacttcaaataaagagattttccttggtcatcctttgatttcttacttgatcagatgcctgaggactccttggagacaggctgaaggctgaacagctggggttccccctgctggctgcctgtgcttggaaagtactccatcagcgagctgaatgagaactgtggaaacattcatatcaaacaggcttctgtcactcacaagacactcgttacagcttttgtggcatcgctgccttacaaacataacattacgtctttgtaatgaagtgatactgggctaagggraatggctttgctcaaaacagatgaaataatcagcagtgattcttactcaaggagaaaatgctgtggctgtttcatttgtggcaccaaatagacgtgtgtagcggagcatcgctgggctaaatgaaatctgttatttttgaaaccacacaaatttaaaaagtgacttaatagctttgaatgattgcatcctatcctaagtctcasttattgaagattgttttgcaaggaatccgcagcaaacatcayagtatgggaatgaaagcagagtagaaacatccactgcatgcgtacctttcaaca

SEQ ID NO: 77425 - DNA, 568 bp, Chicken  19866894365873_2
tgtcactcacaagacactcgttacagcttttgtggcatcgctgccttacaaacataacattacgtctttgtaatgaagtgatactgggctaagggraatggctttgctcaaaacagatgaaataatcagcagtgattcttactcaaggagaaaatgctgtggctgtttcatttgtggcaccaaatagacgtgtgtagcggagcatcgctgggctaaatgaaatctgttatttttgaaaccacacaaatttaaaaagtgacttaatagctttgaatgattgcatcctatcctaagtctcasttattgaagattgttttgcaaggaatccgcagcaaacatcayagtatgggaatgaaagcagagtagaaacatccactgcatgcgtacctttcaacacattagctttaatgtcttcccctttgtaagtggaagcttttatttgactcatgtgatgcttcacttaaaggagagagtaaatcttgatttttttcatcttattaaaaacatcttttcatccttattctacagaccactgaagaaaagcaatgttttcatttgtgccttgaag

SEQ ID NO: 77426 - DNA, 526 bp, Chicken  19866894365873_3
gccttacaaacataacattacgtctttgtaatgaagtgatactgggctaagggraatggctttgctcaaaacagatgaaataatcagcagtgattcttactcaaggagaaaatgctgtggctgtttcatttgtggcaccaaatagacgtgtgtagcggagcatcgctgggctaaatgaaatctgttatttttgaaaccacacaaatttaaaaagtgacttaatagctttgaatgattgcatcctatcctaagtctcasttattgaagattgttttgcaaggaatccgcagcaaacatcayagtatgggaatgaaagcagagtagaaacatccactgcatgcgtacctttcaacacattagctttaatgtcttcccctttgtaagtggaagcttttatttgactcatgtgatgcttcacttaaaggagagagtaaatcttgatttttttcatcttattaaaaacatcttttcatccttattctacagaccactgaagaaaagcaatgttttcatttgtgccttgaag

SEQ ID NO: 77427 - DNA, 600 bp, Chicken  19866894365878_1
attagtttctgctgttatattaagcccagacataagaaataaattagaaaattaaaaaaaaaaaaaaaaaagtaaccaacacggctgtattgcgtcactgtccattacagcgcctttgcctccacctggggctggggctgatggctccatcccatgttggctgggaagcagccctccctttcatgcttggatggacacagtgcccggaatgtttatttgtgtccaaccaggcaaaaatacagcctacataacaaaaaggtggaaaggcctgaggggaatttgcactaacgatggggaaarctagttaagggtctggaggaggtgaagatctggctcctggcttgagactagactgatttgccccaagggacaccctgcaggtacgggtttcttccctccagcctcccgctggctgctgctgcattttcctgctctgtaaaccctgcaggaatcaatgcggcagctaaagtggcacttctgacatttgagggagaattatctcagaagtgagtatataaatctgattcatcaccagtcctgatggctcgtcaagtccctgtcagcagtcccatgggtgcagcacccatcggctctgaatgt

SEQ ID NO: 77428 - DNA, 600 bp, Chicken  19866894365878_2
gtctggaggaggtgaagatctggctcctggcttgagactagactgatttgccccaagggacaccctgcaggtacgggtttcttccctccagcctcccgctggctgctgctgcattttcctgctctgtaaaccctgcaggaatcaatgcggcagctaaagtggcacttctgacatttgagggagaattatctcagaagtgagtatataaatctgattcatcaccagtcctgatggctcgtcaagtccctgtcagcagtcccatgggtgcagcacccatcggctctgaatgtgcaggtagartgggaaggaggcagcctgtccagttgygttgtttgctttgcaccggtgatgatgcagtggtatcattttcacactaaatgctaattttctgctttgctggcctcagaatctcctccatccgtccccttcattgcagcaattaaaggaccaggtgcttgatccgagacgcttacaacgagtgtggttttaatcagtgtgtgcaggagagagagagatgaatgcgtgggagtgggggggtgggagagccctatgcttcaacaacaggttgaaatgtccccctgctatggcttcttcccccaa

SEQ ID NO: 77429 - DNA, 600 bp, Chicken  19866894365878_3
tggcttgagactagactgatttgccccaagggacaccctgcaggtacgggtttcttccctccagcctcccgctggctgctgctgcattttcctgctctgtaaaccctgcaggaatcaatgcggcagctaaagtggcacttctgacatttgagggagaattatctcagaagtgagtatataaatctgattcatcaccagtcctgatggctcgtcaagtccctgtcagcagtcccatgggtgcagcacccatcggctctgaatgtgcaggtagartgggaaggaggcagcctgtccagttgygttgtttgctttgcaccggtgatgatgcagtggtatcattttcacactaaatgctaattttctgctttgctggcctcagaatctcctccatccgtccccttcattgcagcaattaaaggaccaggtgcttgatccgagacgcttacaacgagtgtggttttaatcagtgtgtgcaggagagagagagatgaatgcgtgggagtgggggggtgggagagccctatgcttcaacaacaggttgaaatgtccccctgctatggcttcttcccccaagggtaggagaggccatgtcacrtcagt

SEQ ID NO: 77430 - DNA, 514 bp, Chicken  19866894365878_4
gttgygttgtttgctttgcaccggtgatgatgcagtggtatcattttcacactaaatgctaattttctgctttgctggcctcagaatctcctccatccgtccccttcattgcagcaattaaaggaccaggtgcttgatccgagacgcttacaacgagtgtggttttaatcagtgtgtgcaggagagagagagatgaatgcgtgggagtgggggggtgggagagccctatgcttcaacaacaggttgaaatgtccccctgctatggcttcttcccccaagggtaggagaggccatgtcacrtcagtccttgctgctctgctcttcttagggaagttcagtacttatgtctgagggatgaagaccatcctgtctggtccccagcagagctatagctttctgccactgccaccatcctgtgaggataggcactgtgggagccacagcaaggtgacaaaacagccctgagatacagagctgctatcaaaggtgtgggagctgatgtgagggaaagggg

SEQ ID NO: 77431 - DNA, 599 bp, Chicken  19866894365880_1
  misc_feature (1)..(111): n is any nucleotide
nnnnnnnnnnnnnnnnnnnnnnnnnnnnnnnnnnnnnnnnnnnnnnnnnnnnnnnnnnnnnnnnnnnnnnnnnnnnnnnnnnnnnnnnnnnnnnnnnnnnnnnnnnnnnnntccttatctgttatacttcaacttgactgcttttccagtacttattgtccttcactttgtttacaacaggttgagaaattgatagtggtgtgagtagatacttttattttagctgttcacttttcaagcaggtatgtggaagtcatgttttcttgaaatcagtatgaaacaaaagagttcctttgtcayrcctttcacactgctgtgtatggttagatttttttttaaatacagtctgtattagtttgctgtaacttcactgttttctttaaggcttctgtattatttttgtttctctttctgttgtttcccttgtacccacccagcagcgtgcacccccctgcatcgtaaggcccctccagtcacacaactcccatattgcatttggtctgtgattttgtggcagcatctactgttgsttcataaattgktttttgtatttatctgaataaccatcatttcaaggaggttctgacctcacccttact

SEQ ID NO: 77432 - DNA, 600 bp, Chicken  19866894365880_10
tagtaattttcatccactgcctttataatgtatagcatttttattttggtctgtcatcagctggtccaccctgctacctacgaactatttcttcctcagctgcccttaaatgasgagtggctgggttactctgttgccaaatagtgtgtgttgaagcacagggcattttctcagctgtcttagctaggcaggggcagcgrttgtttcacttttcagcacaaagaatggaagtggcagtcataattgagggtgtcagaaacagagccttctctttttgttagccrgtatagttgaatgaaraygaaggaagggggcaagcaggctgaaacttgctttctaaagaagatttgagccctcgtgatgatcactgctctgggagacgtctgagccagacaaagaacatctgggacgcttacttctgcacagatcttcataatccctcacataggctttgtcttaacacagtacagtccttaaaggtgataatttactgaatgagtgaagcagcaaccctgggtgagagtgtgcctgtaggcattacacggaatcaagggaattgttatatgatgcaacagaagtaatccctggaaataaggacaa

SEQ ID NO: 77433 - DNA, 600 bp, Chicken  19866894365880_11
gtaattttcatccactgcctttataatgtatagcatttttattttggtctgtcatcagctggtccaccctgctacctacgaactatttcttcctcagctgcccttaaatgasgagtggctgggttactctgttgccaaatagtgtgtgttgaagcacagggcattttctcagctgtcttagctaggcaggggcagcgrttgtttcacttttcagcacaaagaatggaagtggcagtcataattgagggtgtcagaaacagagccttctctttttgttagccrgtatagttgaatgaaraygaaggaagggggcaagcaggctgaaacttgctttctaaagaagatttgagccctcgtgatgatcactgctctgggagacgtctgagccagacaaagaacatctgggacgcttacttctgcacagatcttcataatccctcacataggctttgtcttaacacagtacagtccttaaaggtgataatttactgaatgagtgaagcagcaaccctgggtgagagtgtgcctgtaggcattacacggaatcaagggaattgttatatgatgcaacagaagtaatccctggaaataaggacaaga

SEQ ID NO: 77434 - DNA, 599 bp, Chicken  19866894365880_2
  misc_feature (1)..(110): n is any nucleotide
nnnnnnnnnnnnnnnnnnnnnnnnnnnnnnnnnnnnnnnnnnnnnnnnnnnnnnnnnnnnnnnnnnnnnnnnnnnnnnnnnnnnnnnnnnnnnnnnnnnnnnnnnnnnnntccttatctgttatacttcaacttgactgcttttccagtacttattgtccttcactttgtttacaacaggttgagaaattgatagtggtgtgagtagatacttttattttagctgttcacttttcaagcaggtatgtggaagtcatgttttcttgaaatcagtatgaaacaaaagagttcctttgtcayrcctttcacactgctgtgtatggttagatttttttttaaatacagtctgtattagtttgctgtaacttcactgttttctttaaggcttctgtattatttttgtttctctttctgttgtttcccttgtacccacccagcagcgtgcacccccctgcatcgtaaggcccctccagtcacacaactcccatattgcatttggtctgtgattttgtggcagcatctactgttgsttcataaattgktttttgtatttatctgaataaccatcatttcaaggaggttctgacctcacccttactg

SEQ ID NO: 77435 - DNA, 600 bp, Chicken  19866894365880_3
cttttcaagcaggtatgtggaagtcatgttttcttgaaatcagtatgaaacaaaagagttcctttgtcayrcctttcacactgctgtgtatggttagatttttttttaaatacagtctgtattagtttgctgtaacttcactgttttctttaaggcttctgtattatttttgtttctctttctgttgtttcccttgtacccacccagcagcgtgcacccccctgcatcgtaaggcccctccagtcacacaactcccatattgcatttggtctgtgattttgtggcagcatctactgttgsttcataaattgktttttgtatttatctgaataaccatcatttcaaggaggttctgacctcacccttactgtagcacctgttgaattttrctacaaatttttgctgcacatctatttctatatgctagtcagttactgtagtggctactcaaggccttctcctgctgaagcacgtgctggttctaataggattttcctcatttaagaattgcagagctcaattctttgtccattctattagtatcgataattatgcttctctacttgacaccttttttaaatytgtgtgtggctgttgccc

SEQ ID NO: 77436 - DNA, 600 bp, Chicken  19866894365880_4
gtatgtggaagtcatgttttcttgaaatcagtatgaaacaaaagagttcctttgtcayrcctttcacactgctgtgtatggttagatttttttttaaatacagtctgtattagtttgctgtaacttcactgttttctttaaggcttctgtattatttttgtttctctttctgttgtttcccttgtacccacccagcagcgtgcacccccctgcatcgtaaggcccctccagtcacacaactcccatattgcatttggtctgtgattttgtggcagcatctactgttgsttcataaattgktttttgtatttatctgaataaccatcatttcaaggaggttctgacctcacccttactgtagcacctgttgaattttrctacaaatttttgctgcacatctatttctatatgctagtcagttactgtagtggctactcaaggccttctcctgctgaagcacgtgctggttctaataggattttcctcatttaagaattgcagagctcaattctttgtccattctattagtatcgataattatgcttctctacttgacaccttttttaaatytgtgtgtggctgttgccctatattgtgtga

SEQ ID NO: 77437 - DNA, 600 bp, Chicken  19866894365880_5
atggttagatttttttttaaatacagtctgtattagtttgctgtaacttcactgttttctttaaggcttctgtattatttttgtttctctttctgttgtttcccttgtacccacccagcagcgtgcacccccctgcatcgtaaggcccctccagtcacacaactcccatattgcatttggtctgtgattttgtggcagcatctactgttgsttcataaattgktttttgtatttatctgaataaccatcatttcaaggaggttctgacctcacccttactgtagcacctgttgaattttrctacaaatttttgctgcacatctatttctatatgctagtcagttactgtagtggctactcaaggccttctcctgctgaagcacgtgctggttctaataggattttcctcatttaagaattgcagagctcaattctttgtccattctattagtatcgataattatgcttctctacttgacaccttttttaaatytgtgtgtggctgttgccctatattgtgtgaatattaccttatagtaattttcatccactgcctttataatgtatagcatttttattttggtctgtcatcagctggtc

SEQ ID NO: 77438 - DNA, 600 bp, Chicken  19866894365880_6
ggcagcatctactgttgsttcataaattgktttttgtatttatctgaataaccatcatttcaaggaggttctgacctcacccttactgtagcacctgttgaattttrctacaaatttttgctgcacatctatttctatatgctagtcagttactgtagtggctactcaaggccttctcctgctgaagcacgtgctggttctaataggattttcctcatttaagaattgcagagctcaattctttgtccattctattagtatcgataattatgcttctctacttgacaccttttttaaatytgtgtgtggctgttgccctatattgtgtgaatattaccttatagtaattttcatccactgcctttataatgtatagcatttttattttggtctgtcatcagctggtccaccctgctacctacgaactatttcttcctcagctgcccttaaatgasgagtggctgggttactctgttgccaaatagtgtgtgttgaagcacagggcattttctcagctgtcttagctaggcaggggcagcgrttgtttcacttttcagcacaaagaatggaagtggcagtcataattgagggtgtcagaaa

SEQ ID NO: 77439 - DNA, 600 bp, Chicken  19866894365880_7
tagtggctactcaaggccttctcctgctgaagcacgtgctggttctaataggattttcctcatttaagaattgcagagctcaattctttgtccattctattagtatcgataattatgcttctctacttgacaccttttttaaatytgtgtgtggctgttgccctatattgtgtgaatattaccttatagtaattttcatccactgcctttataatgtatagcatttttattttggtctgtcatcagctggtccaccctgctacctacgaactatttcttcctcagctgcccttaaatgasgagtggctgggttactctgttgccaaatagtgtgtgttgaagcacagggcattttctcagctgtcttagctaggcaggggcagcgrttgtttcacttttcagcacaaagaatggaagtggcagtcataattgagggtgtcagaaacagagccttctctttttgttagccrgtatagttgaatgaaraygaaggaagggggcaagcaggctgaaacttgctttctaaagaagatttgagccctcgtgatgatcactgctctgggagacgtctgagccagacaaagaacatctgggacgctt

SEQ ID NO: 77440 - DNA, 600 bp, Chicken  19866894365880_8
tttgtccattctattagtatcgataattatgcttctctacttgacaccttttttaaatytgtgtgtggctgttgccctatattgtgtgaatattaccttatagtaattttcatccactgcctttataatgtatagcatttttattttggtctgtcatcagctggtccaccctgctacctacgaactatttcttcctcagctgcccttaaatgasgagtggctgggttactctgttgccaaatagtgtgtgttgaagcacagggcattttctcagctgtcttagctaggcaggggcagcgrttgtttcacttttcagcacaaagaatggaagtggcagtcataattgagggtgtcagaaacagagccttctctttttgttagccrgtatagttgaatgaaraygaaggaagggggcaagcaggctgaaacttgctttctaaagaagatttgagccctcgtgatgatcactgctctgggagacgtctgagccagacaaagaacatctgggacgcttacttctgcacagatcttcataatccctcacataggctttgtcttaacacagtacagtccttaaaggtgataatttactgaatgagt

SEQ ID NO: 77441 - DNA, 600 bp, Chicken  19866894365880_9
tgtgaatattaccttatagtaattttcatccactgcctttataatgtatagcatttttattttggtctgtcatcagctggtccaccctgctacctacgaactatttcttcctcagctgcccttaaatgasgagtggctgggttactctgttgccaaatagtgtgtgttgaagcacagggcattttctcagctgtcttagctaggcaggggcagcgrttgtttcacttttcagcacaaagaatggaagtggcagtcataattgagggtgtcagaaacagagccttctctttttgttagccrgtatagttgaatgaaraygaaggaagggggcaagcaggctgaaacttgctttctaaagaagatttgagccctcgtgatgatcactgctctgggagacgtctgagccagacaaagaacatctgggacgcttacttctgcacagatcttcataatccctcacataggctttgtcttaacacagtacagtccttaaaggtgataatttactgaatgagtgaagcagcaaccctgggtgagagtgtgcctgtaggcattacacggaatcaagggaattgttatatgatgcaacagaagtaatcc

SEQ ID NO: 77442 - DNA, 599 bp, Chicken  19866894365881_1
  misc_feature (1)..(124): n is any nucleotide
nnnnnnnnnnnnnnnnnnnnnnnnnnnnnnnnnnnnnnnnnnnnnnnnnnnnnnnnnnnnnnnnnnnnnnnnnnnnnnnnnnnnnnnnnnnnnnnnnnnnnnnnnnnnnnnnnnnnnnnnnnnnaaggctgttcatgctgcctcatcattgagactgtgatgaaaaaataattttctatttgtttatatgcatacgcatttacctgttgtaatcttctactgcatttcccaaatgctgttgaagagtaagtcagcattcagtgtcaggtgtggtagtacttctgtgtaccccagtaatcktctttcccagcaaatacctgcatagaaaaatggattttgtttgggataatccaaaaacaaacaaatcccaactttcttcgcatcagcagaaggggattctggtatttcacagcttttactgataatgatctgctacagattaaaaacaaaaaacagacatcgtggtgttggcagattgcaaaaggacttgctggttaaagctactgctcataggagaagaggatagagtttattgcatccatatggcccagagataagaaaggcaaagtgtctaggagaagtactgtgtcttcatatgt

SEQ ID NO: 77443 - DNA, 600 bp, Chicken  19866894365882_1
acagtgggtggtgacctggcccaggttttccattaaaagaatgaggctgttgtagttgggctttttggtcaggtggagccactcttctccctgctgcacacctacatctcccccctagtccttcactagtgattccggcctctcttacatttgttttattttctttacagtcaagcccacgtttatcgatgtggatatctacgtgaacagcattgggcccgtgtctgtcatccaaatggtgagtggtaccgctgctgtaggagcagagcactgcaactgagggcacagggtgtgggaggyaggtgggcctcactgctggctcgtgtcctgctggtgtcattacaagaaaggcattgaggccctagagcaygtctgaagaagggcaatggagctgtgaagggcatgaggcacaagtgtcatggggagtggctgagggaactgggattgtttagtctggagaagaggaggctcagggcagacctcattgttctctacatctctctgaaaggagacagtagtgaggtgcaggtcggcctcttctcttagataactgcaataagtaacggcctcaatttgtgccagggaaggttctggttggaa

SEQ ID NO: 77444 - DNA, 600 bp, Chicken  19866894365882_2
aggtggagccactcttctccctgctgcacacctacatctcccccctagtccttcactagtgattccggcctctcttacatttgttttattttctttacagtcaagcccacgtttatcgatgtggatatctacgtgaacagcattgggcccgtgtctgtcatccaaatggtgagtggtaccgctgctgtaggagcagagcactgcaactgagggcacagggtgtgggaggyaggtgggcctcactgctggctcgtgtcctgctggtgtcattacaagaaaggcattgaggccctagagcaygtctgaagaagggcaatggagctgtgaagggcatgaggcacaagtgtcatggggagtggctgagggaactgggattgtttagtctggagaagaggaggctcagggcagacctcattgttctctacatctctctgaaaggagacagtagtgaggtgcaggtcggcctcttctcttagataactgcaataagtaacggcctcaatttgtgccagggaaggttctggttggaaaaactccttctccagtagagtggtgaggcactggaacaggctgcctagagaggtggtggagtcactgccc

SEQ ID NO: 77445 - DNA, 600 bp, Chicken  19866894365882_3
ggctgcctagagaggtggtggagtcactgcccctgggggtatgcaagaaaaagtagatgtggcactgaggaacatgtttagtgggcatggtagggatgggctgatgattggactagttgatcttagatgtcttttccaactttaacatttctatgattctaagaggtggatctgtttgatttccttgggaagaggtgctctgacctgttgataactggggccaagaaggcttgattgctattcctggttaggagcaatgtgagctcagtgaccctgccatcctcacaagttttctcatakccaccagtcacgtggatggacatttctgyctgatgccatttccctrccagggagaacatgggcaccaggacacttcaggtgaactgcactgccctgtccgatttcatgctgtagcagctgggagagggagaaaccattgccatgtatggtgagaaayttgggtgcccaggaagcctgcaatgctgggagggggaatccggaggggagggcctcgtgtccaacaccctgcttctgctcctgccatcttagataatgccaccatcactgtgatggcttctgctcatggttcaagcctctgct

SEQ ID NO: 77446 - DNA, 600 bp, Chicken  19866894365882_4
cccctgggggtatgcaagaaaaagtagatgtggcactgaggaacatgtttagtgggcatggtagggatgggctgatgattggactagttgatcttagatgtcttttccaactttaacatttctatgattctaagaggtggatctgtttgatttccttgggaagaggtgctctgacctgttgataactggggccaagaaggcttgattgctattcctggttaggagcaatgtgagctcagtgaccctgccatcctcacaagttttctcatakccaccagtcacgtggatggacatttctgyctgatgccatttccctrccagggagaacatgggcaccaggacacttcaggtgaactgcactgccctgtccgatttcatgctgtagcagctgggagagggagaaaccattgccatgtatggtgagaaayttgggtgcccaggaagcctgcaatgctgggagggggaatccggaggggagggcctcgtgtccaacaccctgcttctgctcctgccatcttagataatgccaccatcactgtgatggcttctgctcatggttcaagcctctgctgcattgggagctctggaaacactcaatag

SEQ ID NO: 77447 - DNA, 600 bp, Chicken  19866894365882_5
gaaaaagtagatgtggcactgaggaacatgtttagtgggcatggtagggatgggctgatgattggactagttgatcttagatgtcttttccaactttaacatttctatgattctaagaggtggatctgtttgatttccttgggaagaggtgctctgacctgttgataactggggccaagaaggcttgattgctattcctggttaggagcaatgtgagctcagtgaccctgccatcctcacaagttttctcatakccaccagtcacgtggatggacatttctgyctgatgccatttccctrccagggagaacatgggcaccaggacacttcaggtgaactgcactgccctgtccgatttcatgctgtagcagctgggagagggagaaaccattgccatgtatggtgagaaayttgggtgcccaggaagcctgcaatgctgggagggggaatccggaggggagggcctcgtgtccaacaccctgcttctgctcctgccatcttagataatgccaccatcactgtgatggcttctgctcatggttcaagcctctgctgcattgggagctctggaaacactcaatagagatgctccttgctctg

SEQ ID NO: 77448 - DNA, 600 bp, Chicken  19866894365882_6
tctaagaggtggatctgtttgatttccttgggaagaggtgctctgacctgttgataactggggccaagaaggcttgattgctattcctggttaggagcaatgtgagctcagtgaccctgccatcctcacaagttttctcatakccaccagtcacgtggatggacatttctgyctgatgccatttccctrccagggagaacatgggcaccaggacacttcaggtgaactgcactgccctgtccgatttcatgctgtagcagctgggagagggagaaaccattgccatgtatggtgagaaayttgggtgcccaggaagcctgcaatgctgggagggggaatccggaggggagggcctcgtgtccaacaccctgcttctgctcctgccatcttagataatgccaccatcactgtgatggcttctgctcatggttcaagcctctgctgcattgggagctctggaaacactcaatagagatgctccttgctctgcagagcctccaggccatgcactggagagcaagtgttgattatttttcacaggaagctttcattactgttttcagtgtgaagtcattttttatcttccatcacactttgaaa

SEQ ID NO: 77449 - DNA, 600 bp, Chicken  19866894365892_1
gcagccctgtgcctccccatgcctttctccaataatcactgagttttttgagttgtttctgtttccccagtgcagaaccaggaaagagaggatgcaccctcctccatccatacttttatacagtgatcagcaatcaccatccattcctcggtggattgtgtgcatctcaccctctccatctccttgctcaggcctggggctgcttgccaagggcacggggcttccatgcatacctgcttttctacagacatctgagtagagaagagatagcgccggcaaacagatgtcggcagctcctcrctgggggagcggtccctctggacgcgtcgggtcggccaggagcaccggtgcctttcagcattgtcctaaaactcccagcccgaaccgtgccgcgggttcccacagctgcgctcacaaaggagacacaacgggctcctctggggacaaaacctaatctgagagataccaggctgagaaagctcttcctaaaaaaagacacagtcaaaagctctcggatgccccgcgtccgctgatacccgatccggccgcctgtgctaccattacctccaggcaggctttgtccgctgcggctcccctgaa

SEQ ID NO: 77450 - DNA, 600 bp, Chicken  19866894365904_1
atgtatgagaattggagagtgcgtaaaccttttgtctgcgatctgatagtgccttttgcacccccagagccatattgtttccggtcccagatatggtgctctggtgactcttttcccccagatgaacaaggttacggcactatcaaggtatgcagggcagatgaggatgagacaggttgcatctgtgacaagactaaactaggagaagatatgctgtgcctcctccatagccaaggcaatactaccagactcagcagtgaaatggaagacctcctgtgcttcaaaaatacgcaatatctygatgctgaccaagtcatgaagtggttccagattgcagtcaccaaggcctggaacaaaatttcccacaagtatgaatttgatctgtcttttagcctcttagactccccaggagccctgaagataaaatttagatcggggaaatcaattgccttcaacctcacccctgtggtgcagtacgagaactctgatgtttacttcatctctcatttccctcggaactgcctggcagcagatctcccctccagcactcactggttcctcacctttgcagtgtatgagaggaggttcatccagatgatc

SEQ ID NO: 77451 - DNA, 600 bp, Chicken  19866894365910_1
attgattttgttgacataaaaactacatatatttagggtcagagctcaaggcaacacatcttaatcaaaatctgtttactcttgcttaaagtatttagaaagcactgtgaactactggattccttaagctttccactgtgatctctgttactacttctatcaggaggttctgagctagtaaccagtataggataattaataattctggaactactcaaactgaatttaagactaacaggagatacaggcaaaggattcagaatgaaacgtggcattcctttctgatggaggggagaaaamagtacccaaaaatatgctgaatacaaatgtgtgaattaaaaatatatatttgtaagaattaactcaagcatttgatgtgggtgattttgaaatattttgctttgcttttcagcttttttatatataaatataaatataaatatatacattaactaaacctttcagatgaaaattttctttctgattagaaaaagggatttggattgtttcacctgaaaacgtgttgacatgggataatccaaccttctccaaatctgctttgaaaactttctgagattaaaaatctctcaaaacaactgt

SEQ ID NO: 77452 - DNA, 600 bp, Chicken  19866894365918_1
cagtagcgttttacaaatgcaggagaaagaatgatcagagcggagcatcactgggatgcaaatctcaaatacaacactggtgcagattctcagctttgcttgcacgtatttcacgcacatattcataggtacacaataatatgtgccctcatctagatgatgagcccaaattctgcatcaccatcccctctttctgccttacgagtggcagacgtgacatttaacagacaggtaagtctcacgttaattctgtgcaccagactgaattccagcccttgaggaagtcctgcaccttcctgyggagctaacgtcagggtagggttgcagatcagtaacagttaaagagggcagaaatctgaggctgctgggcgtagccccttggccctgcagcttcaccttgaactgaaccttctttcatcacatgtctgaataaggtctgacygtcttcagtcagtagtctccagtattctgcctcggaagaccactycccttccctttccctattgtctcctccctctgaatgtagacaggccactggctactgggagcaactctgatttgcctttggttttatctattttaactaacatatctgtaaaa

SEQ ID NO: 77453 - DNA, 600 bp, Chicken  19866894365918_2
gtgccctcatctagatgatgagcccaaattctgcatcaccatcccctctttctgccttacgagtggcagacgtgacatttaacagacaggtaagtctcacgttaattctgtgcaccagactgaattccagcccttgaggaagtcctgcaccttcctgyggagctaacgtcagggtagggttgcagatcagtaacagttaaagagggcagaaatctgaggctgctgggcgtagccccttggccctgcagcttcaccttgaactgaaccttctttcatcacatgtctgaataaggtctgacygtcttcagtcagtagtctccagtattctgcctcggaagaccactycccttccctttccctattgtctcctccctctgaatgtagacaggccactggctactgggagcaactctgatttgcctttggttttatctattttaactaacatatctgtaaaatcatcatactcaatttccaattcattgcttcgtcagtgacatgcttttagccccctgaatcttcctatcagccagcttgtccagtcttttaccatatattgctccccctgtacctgatccagcctgccagcgttctggcact

SEQ ID NO: 77454 - DNA, 600 bp, Chicken  19866894365918_3
ctctttctgccttacgagtggcagacgtgacatttaacagacaggtaagtctcacgttaattctgtgcaccagactgaattccagcccttgaggaagtcctgcaccttcctgyggagctaacgtcagggtagggttgcagatcagtaacagttaaagagggcagaaatctgaggctgctgggcgtagccccttggccctgcagcttcaccttgaactgaaccttctttcatcacatgtctgaataaggtctgacygtcttcagtcagtagtctccagtattctgcctcggaagaccactycccttccctttccctattgtctcctccctctgaatgtagacaggccactggctactgggagcaactctgatttgcctttggttttatctattttaactaacatatctgtaaaatcatcatactcaatttccaattcattgcttcgtcagtgacatgcttttagccccctgaatcttcctatcagccagcttgtccagtcttttaccatatattgctccccctgtacctgatccagcctgccagcgttctggcactgtggtgcctccaactaaaggtgatattccacatgccagcaaacca

SEQ ID NO: 77455 - DNA, 600 bp, Chicken  19866894365926_1
tttatatactacttacttgtttttacccacttcctaaatccttcaccagagtctcaagggattattcgtttgatataaagctaataacttgtgtatctttccagtatttaggtaagtggaaaagagcccattttcctaatctcaatggcatctagattgtattttatggattttatcatatggaactaatatttcagtacatttcagaaaagactctgcttaatgcaatccagcattgctgattgtactggccaatttttacaacattatgaaacaattaagatgatacatatgcaatakgaatatggcataagtaaaatatgagctgagcaacatgatagtgagcagatttatttatgggatgctttttgctggatacttgactgaatgaagagggatggggacaaaagtattgggaaggtgcttctctgtaagcctgtgtacagcccattcagttgactgcatgcaataaatgcaggatggggtggccagaagagacatcagtgtgcataggtcctaacagtkgtcctttctgcaaagccttgctgaagtcctacagaaaatccacaggagagcaggagttttgcccttcctgtccca

SEQ ID NO: 77456 - DNA, 600 bp, Chicken  19866894365926_2
caatccagcattgctgattgtactggccaatttttacaacattatgaaacaattaagatgatacatatgcaatakgaatatggcataagtaaaatatgagctgagcaacatgatagtgagcagatttatttatgggatgctttttgctggatacttgactgaatgaagagggatggggacaaaagtattgggaaggtgcttctctgtaagcctgtgtacagcccattcagttgactgcatgcaataaatgcaggatggggtggccagaagagacatcagtgtgcataggtcctaacagtkgtcctttctgcaaagccttgctgaagtcctacagaaaatccacaggagagcaggagttttgcccttcctgtcccatctgtatgtcgatgctaaagccatagatattgctcaaaatctttggttgttgttacgctattggagttactcatagaggcctgcaggtttgttgggctgcaggcacrgagatgtgagaatgaaagtgtcctgggaacatttctgagggtggtggagagcaagatgtcctgtgagaggagtgtgtgggyaccatcctccaaataytgggctcagrggaagaataga

SEQ ID NO: 77457 - DNA, 600 bp, Chicken  19866894365926_3
aagtattgggaaggtgcttctctgtaagcctgtgtacagcccattcagttgactgcatgcaataaatgcaggatggggtggccagaagagacatcagtgtgcataggtcctaacagtkgtcctttctgcaaagccttgctgaagtcctacagaaaatccacaggagagcaggagttttgcccttcctgtcccatctgtatgtcgatgctaaagccatagatattgctcaaaatctttggttgttgttacgctattggagttactcatagaggcctgcaggtttgttgggctgcaggcacrgagatgtgagaatgaaagtgtcctgggaacatttctgagggtggtggagagcaagatgtcctgtgagaggagtgtgtgggyaccatcctccaaataytgggctcagrggaagaatagacataggcagtgtgtttgctggtaaattacttggataaaaactgatgatgaatctcttgtatgagctctgcgcaatagttttaacattacaagaccctactgtcccatgcacggtgcctggcaagaatttatcatcaatagtctcatggcactgatcctgcaactgctctcctgaaggcactg

SEQ ID NO: 77458 - DNA, 600 bp, Chicken  19866894365926_4
ccagaagagacatcagtgtgcataggtcctaacagtkgtcctttctgcaaagccttgctgaagtcctacagaaaatccacaggagagcaggagttttgcccttcctgtcccatctgtatgtcgatgctaaagccatagatattgctcaaaatctttggttgttgttacgctattggagttactcatagaggcctgcaggtttgttgggctgcaggcacrgagatgtgagaatgaaagtgtcctgggaacatttctgagggtggtggagagcaagatgtcctgtgagaggagtgtgtgggyaccatcctccaaataytgggctcagrggaagaatagacataggcagtgtgtttgctggtaaattacttggataaaaactgatgatgaatctcttgtatgagctctgcgcaatagttttaacattacaagaccctactgtcccatgcacggtgcctggcaagaatttatcatcaatagtctcatggcactgatcctgcaactgctctcctgaaggcactgctgctgctatttccacagctttgcagcaatctcatgtgtccaagtcctactgcagtctctcctcctctccacctttgctgt

SEQ ID NO: 77459 - DNA, 600 bp, Chicken  19866894365926_5
tgtgcataggtcctaacagtkgtcctttctgcaaagccttgctgaagtcctacagaaaatccacaggagagcaggagttttgcccttcctgtcccatctgtatgtcgatgctaaagccatagatattgctcaaaatctttggttgttgttacgctattggagttactcatagaggcctgcaggtttgttgggctgcaggcacrgagatgtgagaatgaaagtgtcctgggaacatttctgagggtggtggagagcaagatgtcctgtgagaggagtgtgtgggyaccatcctccaaataytgggctcagrggaagaatagacataggcagtgtgtttgctggtaaattacttggataaaaactgatgatgaatctcttgtatgagctctgcgcaatagttttaacattacaagaccctactgtcccatgcacggtgcctggcaagaatttatcatcaatagtctcatggcactgatcctgcaactgctctcctgaaggcactgctgctgctatttccacagctttgcagcaatctcatgtgtccaagtcctactgcagtctctcctcctctccacctttgctgtgtgggggtcttatggg

SEQ ID NO: 77460 - DNA, 600 bp, Chicken  19866894365926_6
tcctaacagtkgtcctttctgcaaagccttgctgaagtcctacagaaaatccacaggagagcaggagttttgcccttcctgtcccatctgtatgtcgatgctaaagccatagatattgctcaaaatctttggttgttgttacgctattggagttactcatagaggcctgcaggtttgttgggctgcaggcacrgagatgtgagaatgaaagtgtcctgggaacatttctgagggtggtggagagcaagatgtcctgtgagaggagtgtgtgggyaccatcctccaaataytgggctcagrggaagaatagacataggcagtgtgtttgctggtaaattacttggataaaaactgatgatgaatctcttgtatgagctctgcgcaatagttttaacattacaagaccctactgtcccatgcacggtgcctggcaagaatttatcatcaatagtctcatggcactgatcctgcaactgctctcctgaaggcactgctgctgctatttccacagctttgcagcaatctcatgtgtccaagtcctactgcagtctctcctcctctccacctttgctgtgtgggggtcttatgggactccaggag

SEQ ID NO: 77461 - DNA, 600 bp, Chicken  19866894365929_1
ctccttgctatgaggcagaagtatgtgccccacatctcacggaggaggaaagcagcagaatggaccagcatggacatttgtctccagacctccctgtaaactcatatttcatcatcctggagagttttctaaatatttttttaaagcttttgttaatttacctgcctatcattcttctatataccttcaggggtaaggtacttgtcttgtgatttagaggtacaaggagtactctgactttggtcagcatatccgtttcattttagtggaataataatttcatcaggttattctgggggsaattgcattctttgacgattaactaggtagtatcaggtacatgtccagacaaatctcacaggaagccagtggactacataaatacacaaaggcctctagttcttgtatgttagttatgcatctgttggtatcgcaaactctgtgctgtgatctttaactataggaggtatcacctacctggaaagtatgatgagtgaagactgaatgacttttccaccaacagcctgtgccactacaggttcttactgaaaaactaggcttaattactagtgtctgtgcaaacgcagacatatggcttac

SEQ ID NO: 77462 - DNA, 600 bp, Chicken  19866894365943_1
aactcttgagcacagtggaatgaagttttgaaaatactgcactgaatattcttagtcttaaatggtattatttcaaagtatagttggctctggctaggcaggtggctcagaactcttcaactctaacacattgtacatagcagtttctatctggcttaaaacttgtgttcagtatgtgagctcttactcccagcccacgtcccaaagtgctgtagggtacatggggctgacagagtccaagcatctgcccttcatcctgtgcttgtatgagcactagtgcaaccagtcaaactggaaagsggttcttccatcacagctctcatttgtatcactatgtatgagaggccaacatttccacttgcagaagcttttcacagctccactgattctgtatggtgtgcttttacagctggcctatatatgactcaaaaaatctttttctccttgtcaaactattcagaaatagttctaacaagcagaagttcatgcttccaaacttgtcagctccttaatgactctctgcttggtaacttaaagaaggatcttactgctgctgtcctggtgtggaaggtgagtgtgctggtgggggactggggaatg

SEQ ID NO: 77463 - DNA, 600 bp, Chicken  19866894365948_1
tgtttggagttgctggtcaagtctctcctaccttcagtcttgtgaaaaatggcctttttagaatcttttagagctctgaatagagaactcagtttgtcagtgttgaattggattttctaggtgctgtgacacgtagcagaaagcttgtgtgtaggactaggcaaaggcagagcaaaaagatagtccatgtctctgaatggtgaaaaagacaaatggaacatacagggaagacttaaaaaggaaaagtagagtcttttctttttgaaatcaaatgcagtaggaacattctctattaaatgwatttgcttcttcattgtaaaattcagtcacctcttttttttccttgcagaatagagcacttttaataaattgtgtgttagaccaactcatttaattgagtaggtgtgcagtgattgtcctctgtttttatactgagaccagtcttgctgggatgaggacccagcttaagtcatcccagaaaggaaatggttctgaatgcctgaaaatgcattggccagaagatgactacagcagtgcagccacgctgtctgcactcttcctagtggtctagtcagaagttggcagaagtcccatctgata

SEQ ID NO: 77464 - DNA, 600 bp, Chicken  19866894365952_1
ttgctattctagtgggggggagaggcagttgaactctactcccccgaagatgtcaatttctgtctgaaaagtgatgacgcttacaatctcttaaccgtttccctcgaagcatcagctctgagtatgaataaaaattatcaaaaagagaagctgtccgtttataaaaatcattccaagaaacttattttcatactctcagaagtcatctaaagatagatcatcattacacacctataaatcctacataagcataatgaaaataaccacaacagttttcgcatctaattccacttttccacrtgcaactgaatggatcaatatcatctgtgcgtgtcacaatccaaattaaatacccttcaactcataagcttaggggcatgctggctgttcatgggctcacaaactggcatttgcatccctatgctcaggttcacatggattgcatctgattctatcctatcggtaagatatagtttgatatttttgacattcttttcactagaactactcttagatctcaattaaagtacctgggctcaaagacagcaaatgctgaaatcaacacagataaatagagaacaactcttgagcaaagaacaa

SEQ ID NO: 77465 - DNA, 600 bp, Chicken  19866894365952_2
ctgttcatgggctcacaaactggcatttgcatccctatgctcaggttcacatggattgcatctgattctatcctatcggtaagatatagtttgatatttttgacattcttttcactagaactactcttagatctcaattaaagtacctgggctcaaagacagcaaatgctgaaatcaacacagataaatagagaacaactcttgagcaaagaacaaagagaattagtagttgctaaagtgaataaatgcagtcagacatgggcaagaaagaggcttctgaagcatggagaagatttcccygagctaccgacacactgggaatctccacagcaaacaagcaaagctcctctgagctgctaagctaaacaaaaggacaaggggagatggagttctgcacagtgctctcggtaccctttggcaatacgaaccacactgcgaggcgctggctgagagacatacgtgagaacaggaagggatggaaatactacaggtgtgatttattaaaactagagagcacctccatgaaataaggaaatgagcgcaattgtcttcctaatcacccagaaactcaggcgttcactttcagtacagtacagtgtc

SEQ ID NO: 77466 - DNA, 600 bp, Chicken  19866894365956_1
attatcacacctagtgtacaattaagaactgcttcagattatttatatccaaaagggtccacttaaaacaagcatctcttaactttggagttctttttttcaagtttatgccactctgtaatgaatataaggtgatttctcgggagagggaggagaaatacaaccttctttcctgcatcccattcttttaatgcttgctggatcttattgccagttttctgcctttcttctcacttgttctccatctcagaccactgcctttgctcagtgaatttaagcacttctccaacagttccgagwcccactttccttctgacttcccccagaatcttcataccttgggtttcgaagtgtcaccaggttttttcctcacgtaaacaaaattctcttttgcctcctcctctgtactcactcaatgcttcctttctaaataaatgattattttcctaaaaccaaccccatggcctgtaacccatagaggcaatatgagggcaataagtagagctgatgaaagtcattatcatttcccaacaggcctagccaaacgcagacatcgggatgcaggtgcttacagaggaaaagagaacgtctggtggtgga

SEQ ID NO: 77467 - DNA, 600 bp, Chicken  19866894365965_1
gaccgtgttccaagactcgtagtcaggcaactacttctgtttcttctctgcactctgctttcatacttactgcctccaggaagagttgcacaactctcacttggatgttggtttcctttcactaaacaagcagtgtgtgtgcctgaatgtggctccaggaatccagagctggtgaatattttatagacacatttttaaaaattcatataagaaagaggctggcttgactggtatttatccacagctgctgctgtaacaggaaactaagctaattagaaacaacagcaactacatccaatsggggagagtaggtaattacaaagatagcaggcaacagttattgcaaactctcactatgacaaaaagatgcatttggtttccaaagttgtccgtcaacaatattttaatgtgggttcatttaccgttcactaaaaataaaacacattcactacatcacacattactcagcttctagcttgtcctttcttaccaaaagaaaccagaacaaaatcctgttagcagttcaaacccaaaaggtgctgtatagaatcacagaatcaccggggttggaaaagacccacatgatcactcagtccaacc

SEQ ID NO: 77468 - DNA, 600 bp, Chicken  19866894365969_1
aaactggctaggcattggtctgcttgtaggatatgtaagtgactacttgttttggtttttttaattattatttatttcgtattttcttcaattactaagctattttcatttcaacccattggttttcttgtgtttgttattacaattacctcactcatctcacatggagaggagtgaacttgcagctggtgggtgcttagtttctggctggggtcaacccactgcagataatcataatcaaagtcattatgctagttcataccctaagagagaacataatgcatcatttagatatacccygatattaataattgtcattttcagatgcagcaaatgtacaaatagggatatgcatctgacaccaaagatttctaaaaggaccactgactttcattttcaactaaacataccatttctttatttctatagtattcttaaaggatagactgaactggttctaaaacttcagcatgagtagagatgtagtgcttgattttaacatttatggtagaagtattctattaacaaagttttattaatttttgttactccagattttcatcctggttattgataggataacttttccatgccttgtat

SEQ ID NO: 77469 - DNA, 600 bp, Chicken  19866894365975_1
gtattgtctttatctgcaacaaaaattacatggaatatttcaaatatttgaaagtctgaatcaaggactgtctaaatgaaagctctatgtatcaatattttacagttgaaatgtgtgaacactagctgactcttaattcatgaatcttcataaatgttagattattctaaatgcattcatcacgcaatgcatttattgtttgtgctcagcttaaaggtgaagtacttctgaagatcctcttcatttgccaaagttagaatttgattttgttctgaattctctgactcacatatccttccytctcccacagttctacaaatttccctaatttgcataaaactgcaggcactgaattaataataaaggaataaggatttttacaaaatcatcctttgatgaataatctgaaaaaagtgagtatctcacacygttgaagtgtacaaatatgtagcagataagagttctttttcattatcatctttcctgacaaaactctaggtttaattagcacatttattattttctgtaattttctagaaaagatacctagtatatatttttcttcctatcataggaatagatatttcagagagcattgct

SEQ ID NO: 77470 - DNA, 600 bp, Chicken  19866894365975_2
ctcttaattcatgaatcttcataaatgttagattattctaaatgcattcatcacgcaatgcatttattgtttgtgctcagcttaaaggtgaagtacttctgaagatcctcttcatttgccaaagttagaatttgattttgttctgaattctctgactcacatatccttccytctcccacagttctacaaatttccctaatttgcataaaactgcaggcactgaattaataataaaggaataaggatttttacaaaatcatcctttgatgaataatctgaaaaaagtgagtatctcacacygttgaagtgtacaaatatgtagcagataagagttctttttcattatcatctttcctgacaaaactctaggtttaattagcacatttattattttctgtaattttctagaaaagatacctagtatatatttttcttcctatcataggaatagatatttcagagagcattgctaaaaaccaggggaaattgcagtttttgtacaaattatacagaagataytttacctgctgttttgaatcaaatgttttcaactgtaggcttaagtacttttctatctatctgaaaataaaacatatttta

SEQ ID NO: 77471 - DNA, 600 bp, Chicken  19866894365975_3
ctgaattaataataaaggaataaggatttttacaaaatcatcctttgatgaataatctgaaaaaagtgagtatctcacacygttgaagtgtacaaatatgtagcagataagagttctttttcattatcatctttcctgacaaaactctaggtttaattagcacatttattattttctgtaattttctagaaaagatacctagtatatatttttcttcctatcataggaatagatatttcagagagcattgctaaaaaccaggggaaattgcagtttttgtacaaattatacagaagataytttacctgctgttttgaatcaaatgttttcaactgtaggcttaagtacttttctatctatctgaaaataaaacatattttagtgtagaagaaaattcagaccataacccaagcagcagatgtctatctacatttgttgaaaatcttgcatgtttcctttgacctctggtcatgagaaaagttatgaaagagtgtctatcagagcagttgcaacttccatgatattctgtggaaagaaaaaggcatttctgaaatgtaatcgcaggttcagtggtcactttatggcagtgtctctttctat

SEQ ID NO: 77472 - DNA, 599 bp, Chicken  19866894365976_1
  misc_feature (1)..(126): n is any nucleotide
nnnnnnnnnnnnnnnnnnnnnnnnnnnnnnnnnnnnnnnnnnnnnnnnnnnnnnnnnnnnnnnnnnnnnnnnnnnnnnnnnnnnnnnnnnnnnnnnnnnnnnnnnnnnnnnnnnnnnnnnnnnnnnctgatggcagcctgctctagcacttcttggtgccacccagcaccctttggaaaaaggcattggcttgtgagaatgagacagacagggtgaggagacaagaagaggcatgagaatagctctgtgagctgcaggccacagtgcctcccacagcaggcagcaggatagccacaatgrggagcagtgcacgtcctgcctgtgccaccgccaccgtgctcaatgaaccagcagctgtcggcacaaggtcagatccctttgaaggagggcaatgtaggtatgccgtcagctatcaactcctggcctcaccgtggtgaaccatgggagcagggccctgctcttcttgaggagtttgagcacggccaaatgtgtgtcagcgtgcttggcctggggcacagcgagcctctgaagggtgtttactgagctgtaccctggcaccctcatccttcctttgcagctgctatttaccagaaggcatt

SEQ ID NO: 77473 - DNA, 600 bp, Chicken  19866894365980_1
tgttactcctgtagctttcccaagaccacacttactgataggacctttcagagacatactggggaagggatgttttgtttccttcctgagcaagaggcagttaaaaatgctagaaattgttaaggccattgtcattgtgttcctaataaatataattagctagctgcctgctcttgctgctctgacgctggaacgaagaaaagtaaatccaatctctgcacacgctgttccctgtgcagtaatgcttaacctttttacagatgtggctagggtagtgacttggttataaatgtcacctcrtactttgcattaggaaattttatctaagttcttccagaatattctagggtttgtttttttttgtttttgttttgtttttgtttttttctttgagtatatggcttgacattttccatgcccaaccacacataataaaatctttaatgaattcttaattcccttaatgaattctttgcactgttagttctgtcatgctgtctcaaactcaggcaaactgcctgcctgagtgaataaagactgctgctcttatacaacttaaaagtgcaatgtgtcaggatgcaatgaccatgactgagagtc

SEQ ID NO: 77474 - DNA, 600 bp, Chicken  19866894365983_1
atcagaattagagctcatgaataaagcgtctttgagcactttgcttatgatcctcatctgccatagtctcctagcagattctacacagtatctcaccctgattatgtgtgaatttagcaagaaaacagaactagaacaaaagagatcaatactgcacatttagggaaaacaatattacctgctgaaagacctgtcctctcatactgcagagctcttgatgatcctttaaacttctggtatatgacaggcaccactcttctgttacattagtcacagtacattggaagaatctggacagcmtctcascaggagttgtgattctttcacagttgttatgcactgaaaatagtgaatgaaatcctccttttacaggtgcattgaattgaaaatctgacagaggctgcatcttcactattctgggaaaaaatctgcatcttgaaagaaaaaatatcaaggaaatttagaggtaaagaaatatcacaagtagtaggaaaaaacatcaacgatttagtgaacacaatttgaactattttccataagtaagacaaagaccgcayatcattcaaagccaaaaactggtaggttgcatattacagacac

SEQ ID NO: 77475 - DNA, 600 bp, Chicken  19866894365983_2
attagagctcatgaataaagcgtctttgagcactttgcttatgatcctcatctgccatagtctcctagcagattctacacagtatctcaccctgattatgtgtgaatttagcaagaaaacagaactagaacaaaagagatcaatactgcacatttagggaaaacaatattacctgctgaaagacctgtcctctcatactgcagagctcttgatgatcctttaaacttctggtatatgacaggcaccactcttctgttacattagtcacagtacattggaagaatctggacagcmtctcascaggagttgtgattctttcacagttgttatgcactgaaaatagtgaatgaaatcctccttttacaggtgcattgaattgaaaatctgacagaggctgcatcttcactattctgggaaaaaatctgcatcttgaaagaaaaaatatcaaggaaatttagaggtaaagaaatatcacaagtagtaggaaaaaacatcaacgatttagtgaacacaatttgaactattttccataagtaagacaaagaccgcayatcattcaaagccaaaaactggtaggttgcatattacagacacgtgaga

SEQ ID NO: 77476 - DNA, 600 bp, Chicken  19866894365983_3
aaacagaactagaacaaaagagatcaatactgcacatttagggaaaacaatattacctgctgaaagacctgtcctctcatactgcagagctcttgatgatcctttaaacttctggtatatgacaggcaccactcttctgttacattagtcacagtacattggaagaatctggacagcmtctcascaggagttgtgattctttcacagttgttatgcactgaaaatagtgaatgaaatcctccttttacaggtgcattgaattgaaaatctgacagaggctgcatcttcactattctgggsaaaaatctgcatcttgaaagaaaaaatatcaaggaaatttagaggtaaagaaatatcacaagtagtaggaaaaaacatcaacgatttagtgaacacaatttgaactattttccataagtaagacaaagaccgcayatcattcaaagccaaaaactggtaggttgcatattacagacacgtgagaaaaagcttaatgatctggtcatagatctgtattcaaatatacgatggtatttaatggtatttaaaaatattctgaacacaagcagtataactcagtaaatcagtatccataaagga

SEQ ID NO: 77477 - DNA, 600 bp, Chicken  19866894365983_4
tctgttacattagtcacagtacattggaagaatctggacagcmtctcascaggagttgtgattctttcacagttgttatgcactgaaaatagtgaatgaaatcctccttttacaggtgcattgaattgaaaatctgacagaggctgcatcttcactattctgggaaaaaatctgcatcttgaaagaaaaaatatcaaggaaatttagaggtaaagaaatatcacaagtagtaggaaaaaacatcaacgatttagtgaacacaatttgaactattttccataagtaagacaaagaccgcayatcattcaaagccaaaaactggtaggttgcatattacagacacgtgagaaaaagcttaatgatctggtcatagatctgtattcaaatatacgatggtatttaatggtatttaaaaatattctgaacacaagcagtataactcagtaaatcagtatccataaaggaattgaaaagtggataaatttcttggtaaatgcaagtataactgcttagacttcacattgtcaaatttgctatcagtttatgccaatctttttccagaatatttggatatcttttctttctaaagaactgactgac

SEQ ID NO: 77478 - DNA, 600 bp, Chicken  19866894365987_1
agcctagctgcgacctgtcaagtgctgctctggcttttgctagctttgtaggaatagaagagacagtggggaaaaccgttttaacttcctatatagtgtaataaaaggtattttatagcttcagtcgtttgtaatgttaatagcaattgctggctagaatcaggtgctcattcatggatatcagtagatcagtaattgctatctcaggaatgatctcgttcccaaaagcacaccgtgctgagcagtggggcagggctttggctcccagctggggttgtgtgccagtcctcatgtgtgcaytgagtcctctgggtgcctgaggcagtgtggattgcacacwcctgctggagctctggttaagaagtgataagcttccaattctggtgaatttcttgccagcactcttgtttggaaacttttggccagctgtaataaaatggctcagtcttgaacctgtgatgttctcagaaacgagcttaaaatgcaagggaatcctcagaaggcagtggttttgtgtagtaacagttttcatcaccaccraattcacttctgcatattggatgctgttacacaatgaatgtgattttaagaacctaaatt

SEQ ID NO: 77479 - DNA, 600 bp, Chicken  19866894365987_2
tagctttgtaggaatagaagagacagtggggaaaaccgttttaacttcctatatagtgtaataaaaggtattttatagcttcagtcgtttgtaatgttaatagcaattgctggctagaatcaggtgctcattcatggatatcagtagatcagtaattgctatctcaggaatgatctcgttcccaaaagcacaccgtgctgagcagtggggcagggctttggctcccagctggggttgtgtgccagtcctcatgtgtgcaytgagtcctctgggtgcctgaggcagtgtggattgcacacwcctgctggagctctggttaagaagtgataagcttccaattctggtgaatttcttgccagcactcttgtttggaaacttttggccagctgtaataaaatggctcagtcttgaacctgtgatgttctcagaaacgagcttaaaatgcaagggaatcctcagaaggcagtggttttgtgtagtaacagttttcatcaccaccraattcacttctgcatattggatgctgttacacaatgaatgtgattttaagaacctaaattagtttgctcgaacagagggctgtacrtccaaacactgtga

SEQ ID NO: 77480 - DNA, 600 bp, Chicken  19866894365987_3
agcagtggggcagggctttggctcccagctggggttgtgtgccagtcctcatgtgtgcaytgagtcctctgggtgcctgaggcagtgtggattgcacacwcctgctggagctctggttaagaagtgataagcttccaattctggtgaatttcttgccagcactcttgtttggaaacttttggccagctgtaataaaatggctcagtcttgaacctgtgatgttctcagaaacgagcttaaaatgcaagggaatcctcagaaggcagtggttttgtgtagtaacagttttcatcaccaccraattcacttctgcatattggatgctgttacacaatgaatgtgattttaagaacctaaattagtttgctcgaacagagggctgtacrtccaaacactgtgaggagagcagccaaaaagaaagctgtgttgaacttgtattttccatgagctgtcttccctttattttcgtgcaggctgaatgaagctttattttagggaygcattccactttatttactcttttatctattgctgatctactaagcataagatattgaagacctcatctcttwtggaatggaatgcctaccatgaggtgct

SEQ ID NO: 77481 - DNA, 600 bp, Chicken  19866894365987_4
gtggattgcacacwcctgctggagctctggttaagaagtgataagcttccaattctggtgaatttcttgccagcactcttgtttggaaacttttggccagctgtaataaaatggctcagtcttgaacctgtgatgttctcagaaacgagcttaaaatgcaagggaatcctcagaaggcagtggttttgtgtagtaacagttttcatcaccaccraattcacttctgcatattggatgctgttacacaatgaatgtgattttaagaacctaaattagtttgctcgaacagagggctgtacrtccaaacactgtgaggagagcagccaaaaagaaagctgtgttgaacttgtattttccatgagctgtcttccctttattttcgtgcaggctgaatgaagctttattttagggaygcattccactttatttactcttttatctattgctgatctactaagcataagatattgaagacctcatctcttwtggaatggaatgcctaccatgaggtgctgtacgtggtgaactgtaccaggtttgtgtgcagagcctacttgaagagcgtagccagcagtgggtaaccacacctaacaagcattc

SEQ ID NO: 77482 - DNA, 600 bp, Chicken  19866894365987_5
gctcagtcttgaacctgtgatgttctcagaaacgagcttaaaatgcaagggaatcctcagaaggcagtggttttgtgtagtaacagttttcatcaccaccraattcacttctgcatattggatgctgttacacaatgaatgtgattttaagaacctaaattagtttgctcgaacagagggctgtacrtccaaacactgtgaggagagcagccaaaaagaaagctgtgttgaacttgtattttccatgagctgtcttccctttattttcgtgcaggctgaatgaagctttattttagggaygcattccactttatttactcttttatctattgctgatctactaagcataagatattgaagacctcatctcttwtggaatggaatgcctaccatgaggtgctgtacgtggtgaactgtaccaggtttgtgtgcagagcctacttgaagagcgtagccagcagtgggtaaccacacctaacaagcattccagtgtctgacttcaaaggtactgaacagcatccttgtttggaagcatttagcagtttggtttagtgctggtgtgtttgaattgctaaaactgagatcctgtaattcttcagt

SEQ ID NO: 77483 - DNA, 600 bp, Chicken  19866894365987_6
tgtgtagtaacagttttcatcaccaccraattcacttctgcatattggatgctgttacacaatgaatgtgattttaagaacctaaattagtttgctcgaacagagggctgtacrtccaaacactgtgaggagagcagccaaaaagaaagctgtgttgaacttgtattttccatgagctgtcttccctttattttcgtgcaggctgaatgaagctttattttagggaygcattccactttatttactcttttatctattgctgatctactaagcataagatattgaagacctcatctcttwtggaatggaatgcctaccatgaggtgctgtacgtggtgaactgtaccaggtttgtgtgcagagcctacttgaagagcgtagccagcagtgggtaaccacacctaacaagcattccagtgtctgacttcaaaggtactgaacagcatccttgtttggaagcatttagcagtttggtttagtgctggtgtgtttgaattgctaaaactgagatcctgtaattcttcagtcattaggtacaggcactgcttgctggcaggctggagcactaatttcctctttggtcttctcttaaatatgcag

SEQ ID NO: 77484 - DNA, 448 bp, Chicken  19866894365987_7
ttagtgctggtgtgtttgaattgctaaaactgagatcctgtaattcttcagtcattaggtacaggcactgcttgctggcaggctggagcactaatttcctctttggtcttctcttaaatatgcagtggtacagaagagagtggagtgccaattagcctttccattgggataatgcttaggatctcatggcttggattacaccagcagacttcagaactgggtccgaccattcttttacctcccaaacacatacacatggtagtttcttatgcctacaatggcagtgtaaatactgtagcyctaaagttagtgtagcgttgacattttaaagacagatttatcaaggacagaaagcttctggagcagaatgggtcaatgctatgctttgaatgcttatgaagctgaaggtcctcttctcttctgatgtctgtgcgattgggaagtgttc

SEQ ID NO: 77485 - DNA, 600 bp, Chicken  19866894365992_1
tccagtggaagaaaagcagaactctaaagggtaggctaaatactttcaggaacaaacagccatgcaaaaccacatgggcactcttgaaaattaatcccaaatcaaaagcaaactcatggagtgagttagtgactagagacagctctgcatgggaattgcctgctcttgagagtagcacaggatccatcctgctggcaggatttaagtgtgatcagctggtgagcaccagggctggctttcctctttgaatggagttagatatttggtacaggaactcttgtgctgttcttacacctggtrttcatctgctttgctttgttaagtgctgaggcattcaacatgaatcaaacattccacagggagttatcacctggcagtacagcccacttcactgcctttcttgtgacaggcacagaggaaagatgagccatttccatggtcttctgtgtccttgcagctgcaaggatgtgacagcaggtttgcatgccagctcaaggggggctgcaaagggcccagtgcaaacagactcagcctggtggctggctttatctgccctatataagtgatttactcagtgcctcagttttaaaggtaaggaat

SEQ ID NO: 77486 - DNA, 599 bp, Chicken  19866894365999_1
  misc_feature (1)..(106): n is any nucleotide
nnnnnnnnnnnnnnnnnnnnnnnnnnnnnnnnnnnnnnnnnnnnnnnnnnnnnnnnnnnnnnnnnnnnnnnnnnnnnnnnnnnnnnnnnnnnnnnnnnnnnnnnnntttgtggattttcatagataataggtataatttccccttactaaaaatcccacccaactgtctgtcatatgagtttttgaaaagccataataaatctttcttgcctgttttcatatgaactttggggctgaattatgagcagcacgttatttttccctctgtgacctcactaattctatttgttctgacttcartagatggtggctctggacacacatagtggttgtcattttgcatgaatgcaaacttgctgatattgctgcttgtgaccctccttctgacatgtgctgtgctgaaatgctctctcatgtgctgcctatttcagcctaaatacagtggaggtggttagtgattttcatatcaggtggatgttgaaatatgtaaatgacttgaaaaaatattggctgaaaagcagcatttgaaatstgtttattatcactgagcttattttagtatacagacttcaaaacacaggtgatagtacatcattatt

SEQ ID NO: 77487 - DNA, 600 bp, Chicken  19866894365999_2
gctgaattatgagcagcacgttatttttccctctgtgacctcactaattctatttgttctgacttcartagatggtggctctggacacacatagtggttgtcattttgcatgaatgcaaacttgctgatattgctgcttgtgaccctccttctgacatgtgctgtgctgaaatgctctctcatgtgctgcctatttcagcctaaatacagtggaggtggttagtgattttcatatcaggtggatgttgaaatatgtaaatgacttgaaaaaatattggctgaaaagcagcatttgaaatstgtttattatcactgagcttattttagtatacagacttcaaaacacaggtgatagtacatcattatttatattttaaatgtagtcagggaaaaaaaaagtggagaaaaagtaatgcagaaaatcaaagacagatctgggaattaggctcgcgtcttctgagtcttccttggcacattattgaccagatcagcaagtatagataatgaaccccacttagagttgaaccctacttcgtatgcctgagctctaccagtaatacagtcctcaagawttttcctaagttaccaggtatctcttat

SEQ ID NO: 77488 - DNA, 538 bp, Chicken  19866894365999_3
tattggctgaaaagcagcatttgaaatstgtttattatcactgagcttattttagtatacagacttcaaaacacaggtgatagtacatcattatttatattttaaatgtagtcagggaaaaaaaaagtggagaaaaagtaatgcagaaaatcaaagacagatctgggaattaggctcgcgtcttctgagtcttccttggcacattattgaccagatcagcaagtatagataatgaaccccacttagagttgaaccctacttcgtatgcctgagctctaccagtaatacagtcctcaagawttttcctaagttaccaggtatctcttatctcagtccctcagcttttctctgacaatcaagacacatagtaacactgtaattcccactttgactgtgatgtggttacagaatgaccatcaggtgttaccactagtcctccttggccaaaataagaattaaatgagtagttcaaagcagcccgtattaactcttccttcttcactacttttgtgtgtgcgtgtgtgtgtgtgtgtgtgtg

SEQ ID NO: 77489 - DNA, 600 bp, Chicken  19866894366009_1
ttgttccagattgcctggaattttgtgatgatgggaagagatttggaccttcatagtctccagtcaaagaatagaaaaaggtcaaaaaatgtcaatgttggcaattttccccttaagctgtccttaaattggtttcctcaggaacctgtttattttgccatcctctgaataaagctaacagtcaaaaatagttctgagacactggaatgtgttgataatgattttagccgagtctgacaataaaagtcttgcatgttttgtggaaggtggaggcaggaaggagaatcccaatcagagaaygtattctttccctaaaagtttttgagtctactttaggaaccttaagatccataagcttgtgggattcaatgagctaaatcccagggtcctgaaagaattggctgatgtggtttccaagcgactctccatcatattagaaaagtcacggctgtcaggtgaagttctcagtgactgtaaaaagagaaacataactcccattttcaagtagggtcaaattgaagacccggagaacctgtcagcctcacctctacgccaggaagatcttaaagtctgtgttaaggcgtattgaagatgggggtg

SEQ ID NO: 77490 - DNA, 600 bp, Chicken  19866894366015_1
atggagcagattgtcttgagggagatcacgtggcatgtgcaggacaactgggggatcaggccaagccagcctgggttcatgaagggcaggtcctgcttgaccaacctgatctccttctatgatctagtgacccgtctggtggatgagggaaaggctgttgatgtagcctacctagacttcagcaaagcctttgacacggtctcccacagtattctcctccagaagctggcagtccgtggcttggacagatacactcttggctgggtaaggaactagctggagggccaggcacagagagtsgtggtgaatggagttaaatccagctggcgaccggtcacaagtggtgttccccaggggtcggtgctggggcctgtcctctttaatatctttattgatgacctggatgagggcattgagtgcaccctcagtaagtttgcagatgacaccaagctggctgaaagtgttgatctgcctgagggtggcgaggccttacagagggatctggacagggtggatagctgggctgaagccaatgggatgggattcaacaagaccaaatgctgggtcctgcactttggccacagcaactccaggcaacgc

SEQ ID NO: 77491 - DNA, 600 bp, Chicken  19866894366022_1
tgtaacagaagtacagtgtaggtactgaggttaacaagtttatctcattccatgccatccattatctgtgcatctctgatattaattgagtaaactgaaaaaattaagaactgaataagcataacttgacacatatgagtcctgtattattccaattatactcttagcaatgtgaaaggcatgcagtaaaccgtcaatcagtctactgaagtgagagtgtagcaggtaaccgcagacgattcattccccagagacaatggtatccttaggactccctgttattaagtggcaatactatgygaaggacagcaaaataattatgttatttcaacctgagtgctgatataatttctgtcaaaacaaatgtgaaaagtgtccctttgggatgtggacttcagcatgatttcaactcatgttgaagtggtgatggaaggtgcctaggatatctcaggaaatagcaattcagtgaacaaggttcagaacctgcaggaaagggagtcattctcatctctacttctaaaagaaaaaagaaaaacaaatctttcttgttattaaaaacaaatttcccaagagcatctggactttccaaatgtttagtat

SEQ ID NO: 77492 - DNA, 600 bp, Chicken  19866894366022_2
tatttccagctagctaagtacttggaacagaccaattaagatggtctttccaggacacctctggtcagtagatcttgctagaatgtaatacaaaattttacatcacttctcgtgaggagtctttgcccaatcaggaacatcatttataatgaatgaaggacggaagagatgtatgaatctgtgggtacataaagatgtatgtacttgaagagaagatatgtaagtacctttatataactgcagatttccttgctaacaaaaatttttattaatatgagtagtttaaaggaaaaaaaatawatatatatatatagttatatgtttagtgtccacttgtcaasaggcctgaaaaaaacaggcatgggtaggagaacagcctcctctcaaaggctatgccagactcgggtggtgtcctctcaaagcaagctacaacttttcagctacattttaatgcaatgggcaggatcgtcattgtgacttcatattctcccatatgaagctgtcactacttttctctggatccttaagtaaaataattgaataggacagagacactagtccccttcctggggaacaatctgcatttcttgagctctgaaa

SEQ ID NO: 77493 - DNA, 600 bp, Chicken  19866894366022_3
tggtctttccaggacacctctggtcagtagatcttgctagaatgtaatacaaaattttacatcacttctcgtgaggagtctttgcccaatcaggaacatcatttataatgaatgaaggacggaagagatgtatgaatctgtgggtacataaagatgtatgtacttgaagagaagatatgtaagtacctttatataactgcagatttccttgctaacaaaaatttttattaatatgagtagtttaaaggaaaaaaaatawatatatatatatagttatatgtttagtgtccacttgtcaasaggcctgaaaaaaacaggcatgggtaggagaacagcctcctctcaaaggctatgccagactcgggtggtgtcctctcaaagcaagctacaacttttcagctacattttaatgcaatgggcaggatcgtcattgtgacttcatattctcccatatgaagctgtcactacttttctctggatccttaagtaaaataattgaataggacagagacactagtccccttcctggggaacaatctgcatttcttgagctctgaaaatccctttgccttccttactcctattcctgctatccattgc

SEQ ID NO: 77494 - DNA, 490 bp, Chicken  19866894366023_1
cagctttgtttgccgtagctaattctatattgttctttatcctgtatgtctcagtattagcagtccttgggtagtgaaaatagcatcataagaatttcctcaggcatttaatagtgtgtctgatgccagtgcaatttgcagaggaataatctttgtttgacagtaagctaatttttttttgttatgtaaattgctgtttacagtagtttttttccagcaagagtttttattaatttatttttcaatattacacaaaaataacttgctgttttcagtattatgttttattcttattttatsctttcttaaaaccctgctgtgttactgaaaatgtctatcaaaaacctgaaaagtataaaggcaaagatgaaaagttctagaaatatatcctacagaaaactccaatacaactggagatagctctcagcatcttacagttttctctactgattaactgttctgttacatactagacacacttcagttttct

SEQ ID NO: 77495 - DNA, 600 bp, Chicken  19866894366025_1
cttctgcagcagaaacacacagtaacagaaacaatagagtcatgagaaccctcagcgctgactaagcagaggttgagaacaaaagaagtcaaaaagatataggaaccaacaggttcccgtaagatgctgataatagtccaagtgggcataagtacagagagacaagataaataatttgcacagacagataggaagccaaagaccaggattgtagctttctctgatacagtgtatgtaagaatttaattactgatgtcagtatcctgtaactctcatacaggaacatgatgctgtgactgyatttttatacaccttcaatgacggcttaatgtaatggttaatcagggattccagacaggataagcagctcctgacttcgttctgacaataaggaggatctcattttaccttttatcaacattacctttcatggaggtagtaatagccgttttggttttgggcaggtcatgaaagtgtacatggagtacatgaagtgcaaacgggtgttctgttaatgtgatcaggagttttacttgtcagcgtactgtgctgagactcaggaggaaggctacattctgaagcaggtgtctcaggaacaga

SEQ ID NO: 77496 - DNA, 600 bp, Chicken  19866894366027_1
ctatgcaaggattttttttccccttattcttcacgtgtatctgtagtaaagtagggtattatctgaatgaaacagcatgactaattttcctcagttttacagaagtttcagagaagaaactcatttgaattctgagcaaaaaaacgtgaaattcaagagccttctgttcaagggagtgatagaagatctattcattgtctcactgtgccaaccaaaactgtgatgctgtgtgattttctgaatgaatggaacgggtctacaggacagtcatggcaaaaacagatggagaagaaagctgtrcctacgaatactcggtgtttagaggcataaatttgcctcaagagtggttacagattctctgggtttacagaaagtagtgttgagcctattgttctctgatcaaatgcaaccagaaaccaaaaccagaccagaccaggtaatggacctccaccacagcctcttgaaaggaggcatctcacctgactccggatatctccatcatgaagtgctcctacattaagcagtatctaatgtctccgttaaaaaaataatgaatgaaggaaatgcgtatttatctactaactatggccaataggatgt

SEQ ID NO: 77497 - DNA, 600 bp, Chicken  19866894366029_1
ccttgtatgcattgagctccggcagcaaatcgcatcaaagctgcaaaggcatctcctttggtctgggctgaggttgccaactgaccccaagtaacgtgctaaacttagcgaaaacattaaagattgactcaaaattatctgcttaaagagtttggcggctcaggtctggagtattttggccagtttttagccagcaattctgtctgtactgagcattgcatctgtacagtgaaattctccttgggggaagcatgagggagagcagggaaaccaatgggtttagttccgaagcctacgatrcgggagaaaaagacccagtaataaccaataaaaacacayaaacgacaaaaccaaacacaaattaagccaataaagttctgcttccatcacggttttgaagttggtgaggagaagcacaacagcctgtgcttagaaaggaatgggctccaactgtgccctatagcataagaaaacaagctttgtgatacccactttataataataatggagcaaaatggagggacctttgaggctgagctgtgtctgtgtctggctgttcctgggagcacttcattcattgaagatacagcaaacagtgag

SEQ ID NO: 77498 - DNA, 600 bp, Chicken  19866894366029_2
gctgcaaaggcatctcctttggtctgggctgaggttgccaactgaccccaagtaacgtgctaaacttagcgaaaacattaaagattgactcaaaattatctgcttaaagagtttggcggctcaggtctggagtattttggccagtttttagccagcaattctgtctgtactgagcattgcatctgtacagtgaaattctccttgggggaagcatgagggagagcagggaaaccaatgggtttagttccgaagcctacgatrcgggagaaaaagacccagtaataaccaataaaaacacayaaacgacaaaaccaaacacaaattaagccaataaagttctgcttccatcacggttttgaagttggtgaggagaagcacaacagcctgtgcttagaaaggaatgggctccaactgtgccctatagcataagaaaacaagctttgtgatacccactttataataataatggagcaaaatggagggacctttgaggctgagctgtgtctgtgtctggctgttcctgggagcacttcattcattgaagatacagcaaacagtgaggtgcacacagagctctatgaatgagccacctttagcact

SEQ ID NO: 77499 - DNA, 563 bp, Chicken  19866894366030_1
tcacagcactacacacatcacagacatctaccggactcggagaccatctttgcacagattccttcccaaatacaaggaaaaatcattaggaaaaaaaggaaagtgattcacataagcgaagtgacaaggaacaaatcagccacagaacgacttcttctaagagaaaaaggatgcattgaggaaggaagccctcaacttatgggtttggagaaataccccaacccaaggatgctgaaccagaggtggtcgtctttcaaacattaaaaacgttgattgttttgtttttaaattaacttaaaygtacaactgaaacacaaagaccaagcgagcgcctggagaaacaaacaaaaagaaggaatggaaggtgaatctgactcgtttaatttaaacatcgaggttgggtggattgcaccacatggaataaataatggagaagatcacggtgagcttgttcatctcgcacttaagataattcaccaaggattaacagcacagcccacgagagtacttaatgagaagccctctgacaagtggttgcagctggggcagcgtccctttggcag

SEQ ID NO: 77500 - DNA, 600 bp, Chicken  19866894366033_1
tcctccaatttaacaggtttttttaataataaaataaataaacaagacagcattgttgcttcctcagagattcctaccactgagaactgactacacacctgacaaattatggaagtagaaagcaattagtatgatcaaacaaactaagcagattacaggctaggaaaccaacaagaaaaatgctccactagcaaacactacaaacccaaatatctcattggtgcacggcagtgatatccaaatcatggtctgtaaaggactcatggttctcgcattgaaacttcttaccaggtttagaaragcaaacaagcggctgcaggctgggcaccagccactccccacgtaccgctgggactttttgcagccccaggaatgggctccccgtgctgccaggcatcccaacagctctccccaccctgctggyggatgtggcaaggagagccagcagttccagctgaagggctgcataccacactgcgaggagctgagggaggagggaatccttgcagccttccccttgctgtacttgggcattaacatgatagcagagggggaaaggataaagctgttttgctggttcctgtgtaaacacaggctaaa

SEQ ID NO: 77501 - DNA, 600 bp, Chicken  19866894366033_2
attagtatgatcaaacaaactaagcagattacaggctaggaaaccaacaagaaaaatgctccactagcaaacactacaaacccaaatatctcattggtgcacggcagtgatatccaaatcatggtctgtaaaggactcatggttctcgcattgaaacttcttaccaggtttagaaragcaaacaagcggctgcaggctgggcaccagccactccccacgtaccgctgggactttttgcagccccaggaatgggctccccgtgctgccaggcatcccaacagctctccccaccctgctggyggatgtggcaaggagagccagcagttccagctgaagggctgcataccacactgcgaggagctgagggaggagggaatccttgcagccttccccttgctgtacttgggcattaacatgatagcagagggggaaaggataaagctgttttgctggttcctgtgtaaacacaggctaaacaaccacaggcactggtctgattgctcaggactggccagtttcccatctccaggatttaaggctgtaaatcagaaactctcaaccatacagttgcttcttcaccctcttgcaacaaattcttgg

SEQ ID NO: 77502 - DNA, 600 bp, Chicken  19866894366036_1
agatccttttatatcagtaacatctttctgctgctgctggaggtctctcagttcagttaaatagtcttcctacacactaactgaattagacttgtaatttttggagaattcctcaaatctcaggctagggccaataggagtttatttttgttttgttcaattcaacagaatactgtaagaacaccagggaaaaccagaagctccatcttagtactaacaaacacactgtcccaaataaccaccctgaagccacaaaagctgctttttaagatgactgttcctaataatgtccgagtcccwtggttcacatctgtttggtttttcgcaatcagtgtggcactttgtgcaaagaactatgacagcaaacacgctgtgtgctctgctctgcaccaagcgtggacctctgggaggagaaatgccaccaggtaggagagctgtgaaacagcaagcagcttaaggacaaactcttccctgttttgctagcctactttcaaccaccaaagaatttggggatgtttacagactcagtgtccttaaagccaacagagctgcaatttcagctcagctggcaaattgctcccactgagagccaagtggcca

SEQ ID NO: 77503 - DNA, 599 bp, Chicken  19866894366052_1
  misc_feature (1)..(53): n is any nucleotide
nnnnnnnnnnnnnnnnnnnnnnnnnnnnnnnnnnnnnnnnnnnnnnnnnnnnncttcatacatatgcagagagaagagaggtgggcttgcatgatgcttttcctctgtggcaacgtgatgtaatgaagcatccagctatcttcttgtattattcagtctctagttctactcttaggtttaacattcagcattttcccctttggattctttatagtagaagaagataagttttaattgttggaacttgtggtgaaacaacttgtcttttgcaaggctttgcctctgcagggaggtattggrcttctgcaccttttggctgcccaggttgtgttcctgttcctgcaggtattacttgcaggtatctgatctgcttccctgaaatagaaatatggcaaaactcttaaatcagagctaaaaatatgcagataaaagggrtaaagaaccatcactcaactatttagcctgctcgtaagcagagtttctagctgctacattaaacctctgtatccactgcattgcccttcaccggctacctgcgcatmactaaaacccttcacaaacacttttttatggtcagatgcagccactcttacttcagc

SEQ ID NO: 77504 - DNA, 600 bp, Chicken  19866894366052_2
ctatcttcttgtattattcagtctctagttctactcttaggtttaacattcagcattttcccctttggattctttatagtagaagaagataagttttaattgttggaacttgtggtgaaacaacttgtcttttgcaaggctttgcctctgcagggaggtattggrcttctgcaccttttggctgcccaggttgtgttcctgttcctgcaggtattacttgcaggtatctgatctgcttccctgaaatagaaatatggcaaaactcttaaatcagagctaaaaatatgcagataaaagggrtaaagaaccatcactcaactatttagcctgctcgtaagcagagtttctagctgctacattaaacctctgtatccactgcattgcccttcaccggctacctgcgcatmactaaaacccttcacaaacacttttttatggtcagatgcagccactcttacttcagctgagaagtaccatatgctccaggtaacctctctgcagcagttgccagtgggactacttctgtacatgctcaccaatgtgagcagaggttacacaatctcacccatggtgaataataatgtcaaagagccattagcg

SEQ ID NO: 77505 - DNA, 600 bp, Chicken  19866894366052_3
acttgtggtgaaacaacttgtcttttgcaaggctttgcctctgcagggaggtattggrcttctgcaccttttggctgcccaggttgtgttcctgttcctgcaggtattacttgcaggtatctgatctgcttccctgaaatagaaatatggcaaaactcttaaatcagagctaaaaatatgcagataaaagggrtaaagaaccatcactcaactatttagcctgctcgtaagcagagtttctagctgctacattaaacctctgtatccactgcattgcccttcaccggctacctgcgcatmactaaaacccttcacaaacacttttttatggtcagatgcagccactcttacttcagctgagaagtaccatatgctccaggtaacctctctgcagcagttgccagtgggactacttctgtacatgctcaccaatgtgagcagaggttacacaatctcacccatggtgaataataatgtcaaagagccattagcggtgcggagtgacaaagtgtggagagatccatcagctcatcctgtgtttaatgaaacagaaatgaacatcatattgcccttgttttctgtcagattttccaggtctcc

SEQ ID NO: 77506 - DNA, 600 bp, Chicken  19866894366064_1
tctttgccaaaggagacagcaacatgcaaaaacaatatccacagatgcactgttttaaaacaaaccttcaccagtaaacctaaacacgcatcccactgagtgaaatgaatgttttgccacgaggtttcagtagggccattacctgtggccttattttctcctctgaggagcagcggctcagagcagaactgtgctcctgcagcaacacgtgtcgcttactcactgctcctgtgacctgtgctgtctcacccagtttgtcagggcagatgcatgcacgcccaggctgtgtgcatacacatrggacgagtggcagagccagttgccccaccacccagcacctccctgcagccattgcaacataggtttggggttattggttccaggcagctttcaggttcaggagcaaacaggaagactctttgcacaggaataactatccaggaacccagctctgctccctgtcctctgggctagggatgcaatgcatctccatgcagcctagcaggtacacacagctcccagggctgggtgcagccatggcctcccaccccttggcctggaactgagacaccaagctccctagagctccaacacacagac

SEQ ID NO: 77507 - DNA, 600 bp, Chicken  19866894366071_1
tgaggcatttctcccattcacagaacccatgaggcagttttataaactgccttttagggtaagcagataaatccatctatccccagctctagggctccacagactgctgctgtttgctagggagggtggtagctttccaactgaacacgtacctccattagggaatagattttgacttcaagttgttttgctaatttagcctcaggagagttagcacagtggtagcatgagaagagccttacgtctacatggaggttgtttacaacatttgaaaatgagagacttgatttttttagatgyactgctgtgatatctacctcatttcatgggatccacttactgtrgtgcagacaacgctcttggggtagctgagagtgagatcaaartcagaktgctagagtacagcaggacaacagctgtttcctaggaggaagggaaagaagtctattttatagcatcctgttcttaacaagaagtggttttgatagaaacaaagcttgatttaaatttaggaggaaagcataagaaactccttgtatttaaagtgtttccttttccagttagaagtccttgaagatgaaaaggtgtaaattccagtgc

SEQ ID NO: 77508 - DNA, 600 bp, Chicken  19866894366071_2
aactgccttttagggtaagcagataaatccatctatccccagctctagggctccacagactgctgctgtttgctagggagggtggtagctttccaactgaacacgtacctccattagggaatagattttgacttcaagttgttttgctaatttagcctcaggagagttagcacagtggtagcatgagaagagccttacgtctacatggaggttgtttacaacatttgaaaatgagagacttgatttttttagatgyactgctgtgatatctacctcatttcatgggatccacttactgtrgtgcagacaacgctcttggggtagctgagagtgagatcaaartcagaktgctagagtacagcaggacaacagctgtttcctaggaggaagggaaagaagtctattttatagcatcctgttcttaacaagaagtggttttgatagaaacaaagcttgatttaaatttaggaggaaagcataagaaactccttgtatttaaagtgtttccttttccagttagaagtccttgaagatgaaaaggtgtaaattccagtgctttgtttttggttttatgaggggctttctgtaataaagcccagg

SEQ ID NO: 77509 - DNA, 600 bp, Chicken  19866894366071_3
ctctagggctccacagactgctgctgtttgctagggagggtggtagctttccaactgaacacgtacctccattagggaatagattttgacttcaagttgttttgctaatttagcctcaggagagttagcacagtggtagcatgagaagagccttacgtctacatggaggttgtttacaacatttgaaaatgagagacttgatttttttagatgyactgctgtgatatctacctcatttcatgggatccacttactgtrgtgcagacaacgctcttggggtagctgagagtgagatcaaartcagaktgctagagtacagcaggacaacagctgtttcctaggaggaagggaaagaagtctattttatagcatcctgttcttaacaagaagtggttttgatagaaacaaagcttgatttaaatttaggaggaaagcataagaaactccttgtatttaaagtgtttccttttccagttagaagtccttgaagatgaaaaggtgtaaattccagtgctttgtttttggttttatgaggggctttctgtaataaagcccaggtgctcaaaggggcaaggaagagggtgcctttctcttcaagca

SEQ ID NO: 77510 - DNA, 600 bp, Chicken  19866894366071_4
ggctccacagactgctgctgtttgctagggagggtggtagctttccaactgaacacgtacctccattagggaatagattttgacttcaagttgttttgctaatttagcctcaggagagttagcacagtggtagcatgagaagagccttacgtctacatggaggttgtttacaacatttgaaaatgagagacttgatttttttagatgyactgctgtgatatctacctcatttcatgggatccacttactgtrgtgcagacaacgctcttggggtagctgagagtgagatcaaartcagaktgctagagtacagcaggacaacagctgtttcctaggaggaagggaaagaagtctattttatagcatcctgttcttaacaagaagtggttttgatagaaacaaagcttgatttaaatttaggaggaaagcataagaaactccttgtatttaaagtgtttccttttccagttagaagtccttgaagatgaaaaggtgtaaattccagtgctttgtttttggttttatgaggggctttctgtaataaagcccaggtgctcaaaggggcaaggaagagggtgcctttctcttcaagcattgtga

SEQ ID NO: 77511 - DNA, 600 bp, Chicken  19866894366073_1
ctgaaggaactggggctgtttagtctggggaaagggaggaggctgaggggagaccttattgctctcttccaatacctgaaaggtgcttaacagagagagcggggttggtctcttctcactgcttacaggtgacaggacaaggggaaatggcctcaagttgtgccagggtaagtttaggttggatatcaggaaaaacttctttacagaaagggctgtaaagcactggaataggctccccagggattccaggtggttgagtcaccatccctggatgtgtttaagagccctttggatgtggtrctcagggacatgatttagcggagggctgttagagttagggtagcatggtwaggttgtagttggactttatgatctttaaggtcttttccaacctgagcgattctatgattctatatagaacaaagatctggtgctttttttcccttgtcgctttgctttccattgtgcagaccaaactcagtttccttccttatgctgacaatgagcagatcagcactgctaccgagaactgtctcctttcctctgacctagaatctaagcctgtttctgaaatcccgtggtaggtgtctagacatcagg

SEQ ID NO: 77512 - DNA, 600 bp, Chicken  19866894366073_2
agaccttattgctctcttccaatacctgaaaggtgcttaacagagagagcggggttggtctcttctcactgcttacaggtgacaggacaaggggaaatggcctcaagttgtgccagggtaagtttaggttggatatcaggaaaaacttctttacagaaagggctgtaaagcactggaataggctccccagggattccaggtggttgagtcaccatccctggatgtgtttaagagccctttggatgtggtrctcagggacatgatttagcggagggctgttagagttagggtagcatggtwaggttgtagttggactttatgatctttaaggtcttttccaacctgagcgattctatgattctatatagaacaaagatctggtgctttttttcccttgtcgctttgctttccattgtgcagaccaaactcagtttccttccttatgctgacaatgagcagatcagcactgctaccgagaactgtctcctttcctctgacctagaatctaagcctgtttctgaaatcccgtggtaggtgtctagacatcaggccaaggtctacgtgcctagaacagaattcatgaatgtgccatcccctgag

SEQ ID NO: 77513 - DNA, 599 bp, Chicken  19866894366108_1
  misc_feature (1)..(3): n is any nucleotide
nnnagtctagtgcaaaatgcaaggaaaatctttcaagtcagaagtgaaacccaggcatttctagactcaggagaattctctcttcatcttgagttttgcctcattgtgtgtgatctctctttcttgttggtctaattaattctcctctatgtagaagcgcagtggcatggagtgtccaaacacaggatgggcaattggcagtggcaagaagattactgctgattagcatgctatctctttctagtcgatgaattttaaattgttatctgtagaccataatagctcaaccttcagcttagwaaaaaaaaaacaaactgaagtgccaacagcaattaagtgcctccaggacttggcagcaaagcagagatttttaggattgcaatataagtttggtgcccaagtattttctaacctaggaaaatccagtcatctraaacttttaacagtctggtggatgtggagtctatcacttaaytccttaaagggaggaaccacatctacctgcattttcattcacttacagatatagaattccaaaactgaaaaatgtgctacagctattctttacccgtcagactctgtaagggtctgtgtgtaat

SEQ ID NO: 77514 - DNA, 600 bp, Chicken  19866894366108_2
aattaattctcctctatgtagaagcgcagtggcatggagtgtccaaacacaggatgggcaattggcagtggcaagaagattactgctgattagcatgctatctctttctagtcgatgaattttaaattgttatctgtagaccataatagctcaaccttcagcttaggaaaaaaaaaacaaactgaagtgccaacagcaattaagtgcctccaggacttggcagcaaagcagagatttttaggattgcaatataagtttggtgcccaagtattttctaacctaggaaaatccagtcatctraaacttttaacagtctggtggatgtggagtctatcacttaaytccttaaagggaggaaccacatctacctgcattttcattcacttacagatatagaattccaaaactgaaaaatgtgctacagctattctttacccgtcagactctgtaagggtctgtgtgtaatacagctcattctctatatttcaatgaatctcagctccaaattgttggggattggaagcctgtctagagaatgagtcggtatgtatttgctgctgtcttttactctacccaagagtctgcttttggtcactatta

SEQ ID NO: 77515 - DNA, 600 bp, Chicken  19866894366108_3
ccaaacacaggatgggcaattggcagtggcaagaagattactgctgattagcatgctatctctttctagtcgatgaattttaaattgttatctgtagaccataatagctcaaccttcagcttaggaaaaaaaaaacaaactgaagtgccaacagcaattaagtgcctccaggacttggcagcaaagcagagatttttaggattgcaatataagtttggtgcccaagtattttctaacctaggaaaatccagtcatctraaacttttaacagtctggtggatgtggagtctatcacttaaytccttaaagggaggaaccacatctacctgcattttcattcacttacagatatagaattccaaaactgaaaaatgtgctacagctattctttacccgtcagactctgtaagggtctgtgtgtaatacagctcattctctatatttcaatgaatctcagctccaaattgttggggattggaagcctgtctagagaatgagtcggtatgtatttgctgctgtcttttactctacccaagagtctgcttttggtcactattatagacagatacttggatacacctactcctytgggtctgacag

SEQ ID NO: 77516 - DNA, 469 bp, Chicken  19866894366108_4
ctatcacttaaytccttaaagggaggaaccacatctacctgcattttcattcacttacagatatagaattccaaaactgaaaaatgtgctacagctattctttacccgtcagactctgtaagggtctgtgtgtaatacagctcattctctatatttcaatgaatctcagctccaaattgttggggattggaagcctgtctagagaatgagtcggtatgtatttgctgctgtcttttactctacccaagagtctgcttttggtcactattatagacagatacttggatacacctactcctytgggtctgacagggtacagcttttatgtacggtctgtggataaacaagctcttttccagagcaagtacagtgtgtgatgtattttaaaagagtgtgcatagttaaaagaataacccctcattaaacaatcttcctaaattttaattaaaaaaaaaaaaacaccaaaaaa

SEQ ID NO: 77517 - DNA, 600 bp, Chicken  19866894366110_1
gaatacataagaagcaagaattaatgtagtgtcagtgtatcgctacgagagaattccgtaacccacgggaaatggcgataaaccccacgcagcgcctttttttatatcctcttcctggcatactaaaaaaagagcatcgcatacacagcgtaaattaataaaaaataataaaaaaagaaaaacaaccaggcaatccaatagcaaataaaagaggcgggagggaaaggaccgcttgctgactttccccaggcacccggagggtgagaaagaacggcccgggcccggctcccgagtccgccracagaggcgccatgcgcggcaccacagcgccccctcgcggccgcctccggccctgcagctccctcctcgcggggaggcggtgactttccccagaataattttatgtccagtttataatcctgctctgtgtctgcttctttggtgsctttcagctttattmctgcctttgccttctcttctccaaatgcaaagaattatgtagacaaacttgtaaatcgaatagcctgtatcatttttgcacttttcatttagccaaatgcccacatttcctaacaatctctaccacttcaggtatccagt

SEQ ID NO: 77518 - DNA, 600 bp, Chicken  19866894366110_2
cagcgtaaattaataaaaaataataaaaaaagaaaaacaaccaggcaatccaatagcaaataaaagaggcgggagggaaaggaccgcttgctgactttccccaggcacccggagggtgagaaagaacggcccgggcccggctcccgagtccgccracagaggcgccatgcgcggcaccacagcgccccctcgcggccgcctccggccctgcagctccctcctcgcggggaggcggtgactttccccagaataattttatgtccagtttataatcctgctctgtgtctgcttctttggtgsctttcagctttattmctgcctttgccttctcttctccaaatgcaaagaattatgtagacaaacttgtaaatcgaatagcctgtatcatttttgcacttttcatttagccaaatgcccacatttcctaacaatctctaccacttcaggtatccagttcaacgtgctgtagaaaagggtcaggaacaaatttctgtgaagaagagaacatttttgtgagcagggagagagatgcacacaggaatttgtctctagctacaccccaatgccagcagatggcataacaaaattaatctgcttgta

SEQ ID NO: 77519 - DNA, 600 bp, Chicken  19866894366110_3
aaaaataataaaaaaagaaaaacaaccaggcaatccaatagcaaataaaagaggcgggagggaaaggaccgcttgctgactttccccaggcacccggagggtgagaaagaacggcccgggcccggctcccgagtccgccracagaggcgccatgcgcggcaccacagcgccccctcgcggccgcctccggccctgcagctccctcctcgcggggaggcggtgactttccccagaataattttatgtccagtttataatcctgctctgtgtctgcttctttggtgsctttcagctttattmctgcctttgccttctcttctccaaatgcaaagaattatgtagacaaacttgtaaatcgaatagcctgtatcatttttgcacttttcatttagccaaatgcccacatttcctaacaatctctaccacttcaggtatccagttcaacgtgctgtagaaaagggtcaggaacaaatttctgtgaagaagagaacatttttgtgagcagggagagagatgcacacaggaatttgtctctagctacaccccaatgccagcagatggcataacaaaattaatctgcttgtagaatcttcttttggg

SEQ ID NO: 77520 - DNA, 600 bp, Chicken  19866894366129_1
gaccctcctgccactgtgctgtgctcatgcccttacccacatgttctacttttcttcaaaaatagagatcatgaatgccacctgtgcaatattttgacttggatgaagtattgtcatgccaaaacatttggagcatctctaattaatgtgctctgattacagttatcactgtttttagctgaagtgctgtgcatacgatcagtgccccagagctgcaagctcagccagctggaaaatgaggaattcagctttagtggcttcgcaaggtttgctccatgtgcattgctcaacgaatgacargagcactgcagctggggcagctgcttctactatttctcagggcaacagtttgcacatggaaggtaccaccatgacaaataccaacttctgccattgaacagcaccgatccatacccggcacgtgtctgcctgtttgctcagtaactgtgctcagcagtctttaccctcaaattggagactgttcatatccaaatcttctcttcaaatatatataaaattcaaataacatcttttcttgagggtgtgtaatttcttaaagtcatgtattccttgatcaaatttgaggagatatgccctaag

SEQ ID NO: 77521 - DNA, 600 bp, Chicken  19866894366129_2
ggagactgttcatatccaaatcttctcttcaaatatatataaaattcaaataacatcttttcttgagggtgtgtaatttcttaaagtcatgtattccttgatcaaatttgaggagatatgccctaagacaggaaggagcgccagcttggattcacatctcccagtcagttcagttgaaggtgttcaggaaatatgcagatgtgtcactgtggaatgtggttcagtgggcaatactggtggcaggtgaagagttggactagatgatcttagaggccatttccaaccttcatgattctatgmttctattattctgttttcccaagtcytacttcctaaatgagaatgtccaggaatttttaaagggaaaatgaacagagattttatttatggacaaaagagcatgacttcctcccacttaatgttggagatcgatgtaactgtttcagcccatttattccctttcaactgtgcagccacactaccaacaaattacaagcaaactgagaggttcttaaaaatagtgacagctcaacaacatcatgagggtcttccagcaaaaaacatcacctttaagaaacaccaaaaaagtttactcattaa

SEQ ID NO: 77522 - DNA, 600 bp, Chicken  19866894366129_3
cttcaaatatatataaaattcaaataacatcttttcttgagggtgtgtaatttcttaaagtcatgtattccttgatcaaatttgaggagatatgccctaagacaggaaggagcgccagcttggattcacatctcccagtcagttcagttgaaggtgttcaggaaatatgcagatgtgtcactgtggaatgtggttcagtgggcaatactggtggcaggtgaagagttggactagatgatcttagaggccatttccaaccttcatgattctatgmttctattattctgttttcccaagtcytacttcctaaatgagaatgtccaggaatttttaaagggaaaatgaacagagattttatttatggacaaaagagcatgacttcctcccacttaatgttggagatcgatgtaactgtttcagcccatttattccctttcaactgtgcagccacactaccaacaaattacaagcaaactgagaggttcttaaaaatagtgacagctcaacaacatcatgagggtcttccagcaaaaaacatcacctttaagaaacaccaaaaaagtttactcattaaaatgggatatagcactgtttccctaa

SEQ ID NO: 77523 - DNA, 600 bp, Chicken  19866894366136_1
ctcatatgcttgattagccccctgaaattctgttcttattcatctcaaatgctgtgctatttgggaatccacaactgcaaagtgctagtagtgcccttcaaaggtcttagatggcaattttgaaaactcacaaccaggtagttttgtgtgagagttgttgccaaaagtttgcttaaagttacttagcagtaatcagagctcatcattatctgtaatccacgtgcatgtttgtacatctgcttctccttcagtattcctttgaatcacttgctttagacatttgacagctgaaataatatrgggtaaactcttcatgcactcttcatgtctaattagtaaatatgtgttttgttttggtgttttgttgttgtttttttctgtagaatatgcttagttctattgcctttataaagaaaaaatagcattcagtttctgtatgcaagatatcatggtgtgtctatctttaaggtaataaatacagaactgttgtctttagaatttgtggaacagtttccctgttaacagtatttttaaaaattctttttaggactgtgactctagaccacgcaacagacagtgcaaaagtcattggaaaagaaa

SEQ ID NO: 77524 - DNA, 600 bp, Chicken  19866894366140_1
catttttgctaaaaaagaaacagatgaagaagcaataactttgcttcactgatactaatctgctaggaaaaggcagacaccctggagtcaaatgcaaagccaaagagtttgttgttgtttcttcttgtgagttttcccttttccttactgcctctgtatgcagaaagcaaagctatttctcatgtcaaactagtaaagtgacaagaacttcatggctggcagagggaaaggtatgaacttaatgcaacaatctctgtgggctgcacaaagcgcaggtcaatccagccagcagcagcactrgaaatactgaatggcacaaagagcagctccatgcctctgcacctgagtatcccctgtatcactcccagcatctctgcaaaccttgtcatgctcctccccagagaatgagtctctccctgtgaaagttgcaccrtgttgacacttaccttcatagaatggctcgagttggaagggaccttgaagatcatatatagttccaactccataccaaaaataaaacaaaactatcttctgactaacttaatatcagacacaaataccagcatcattcacaagttaggagttaaattaactaaagct

SEQ ID NO: 77525 - DNA, 600 bp, Chicken  19866894366140_2
ttcccttttccttactgcctctgtatgcagaaagcaaagctatttctcatgtcaaactagtaaagtgacaagaacttcatggctggcagagggaaaggtatgaacttaatgcaacaatctctgtgggctgcacaaagcgcaggtcaatccagccagcagcagcactrgaaatactgaatggcacaaagagcagctccatgcctctgcacctgagtatcccctgtatcactcccagcatctctgcaaaccttgtcatgctcctccccagagaatgagtctctccctgtgaaagttgcaccrtgttgacacttaccttcatagaatggctcgagttggaagggaccttgaagatcatatatagttccaactccataccaaaaataaaacaaaactatcttctgactaacttaatatcagacacaaataccagcatcattcacaagttaggagttaaattaactaaagctacttgaggaaatgcctttccttctcttagttgggagcacttgtgcaaacaggcaggagagaagggagcagctcctggttgagcagcactggttatttaggtgaagatctctcccatgttttgcattttcttct

SEQ ID NO: 77526 - DNA, 600 bp, Chicken  19866894366144_1
cctatgggcatccccacgtgtctgttgcattctgcagcactttgtgctgagcaggagggtgaggcggctttgttcagtgacccaccatctcatttttatgaatggttctggtgtctttccatcttgtttccccctcaaaagttcaggagggtgtgtgctgcccagccctgtgcatcacaggggtgcatccacccatgctggggatgccccaggctgggcaccagcacatagggagaagatggtcccttggtggcttggttggggacattcagggtgggttggacacctgttgaaccaggytggaactgcagtcctgaggtgggtttttatggaaggtgagttattcatagaatcacagaatccttagagttggaagggacttctgagggccatccagtccaactcccgtgcaatgaacagggacaccacagctagatcaggttgcccagggcctgatccagcctggccttgaaagtctccatggacggagcatcaaccacatctctgggcaacctgttccagtgcctcaccaccctccctgtaaaagactttttccttatatctaacctaaatctcttttttcttgtttgggaagaacca

SEQ ID NO: 77527 - DNA, 599 bp, Chicken  19866894366145_1
  misc_feature (1)..(133): n is any nucleotide
nnnnnnnnnnnnnnnnnnnnnnnnnnnnnnnnnnnnnnnnnnnnnnnnnnnnnnnnnnnnnnnnnnnnnnnnnnnnnnnnnnnnnnnnnnnnnnnnnnnnnnnnnnnnnnnnnnnnnnnnnnnnnnnnnnnnnatccgtcctcttgggagtcagcccttaaacgggggcctaggagcggtggagcctagtcactcaggtgaaattgcgttcacttgtgcccctacagctgactcagcgctcgcctcaggtggtcaatcagagtttcaggctgtgattcaacagttcccatacaatcacartataatcctactcctatctggggttgttgcttttcacagctctccattgctgtacaacagaaagggagaatacaagaaagcagaatcattcatcttgtagtgagtgatcctttttaaattctcaggcacaacactcgtggtagtacatatatcaaatcaaaatcaactactagaaataattttatttatacatttaattattcatttatttgttttactaacaggactcgttcagacaaactatcatggttagctrtgtgatctgtagtagcaatataatatcaataatatttagagtt

SEQ ID NO: 77528 - DNA, 600 bp, Chicken  19866894366145_2
tcagagtttcaggctgtgattcaacagttcccatacaatcacartataatcctactcctatctggggttgttgcttttcacagctctccattgctgtacaacagaaagggagaatacaagaaagcagaatcattcatcttgtagtgagtgatcctttttaaattctcaggcacaacactcgtggtagtacatatatcaaatcaaaatcaactactagaaataattttatttatacatttaattattcatttatttgttttactaacaggactcgttcagacaaactatcatggttagctrtgtgatctgtagtagcaatataatatcaataatatttagagttttttattatttcatgaggcacatggactgccttgcctgcctttggcttatgacttagctcatataataaaaagatcagttccggaagtaagaaaatagaaaccagtgtatgttcagacaagtattcattttaccacctgcctttacaatagctctgaattgtaactgaggactgctgtgtatggacttttatcttggatctttgctttacagctgagctacagttgtaatcttttatatccatcaaatgtacaacta

SEQ ID NO: 77529 - DNA, 600 bp, Chicken  19866894366160_1
gcatcacaaaccctgagtaggtaatgcaaaaccatgccatgtatttactggatctacccactaggtagttttactccctaatgcaatcacacacaaaaaaatgcctcttatctattctcagtgctgatgtgctgtgtgttcagtaagatggcttctgaccttgtgtttcggcacttggagcgagtttaattttttgaatgtgaaggggaggaggggttgggagcaagaaagacatccaccttccattttgatctacgtgtagtagtggcttgatagtaggtgctgacctggctggcaatwtatagtgcctcttaatgcaatgaattccttctgctttcttcctgcttttcaaaaagcaaatcctatggctttatttattttcctcttctattttttcccccttactacagttgcrtattgttgctcacatgaatgaaacatgcaatcagttctctttgggtggccatgatgaaaaaatatgctattttatctgttcatactgagatgcttaggtgttattggaggaatttttctccatgaaaggaattttacatgacatggggcacttcagagcagggtctatagtgcagtagcagtgtg

SEQ ID NO: 77530 - DNA, 556 bp, Chicken  19866894366160_2
tctcagtgctgatgtgctgtgtgttcagtaagatggcttctgaccttgtgtttcggcacttggagcgagtttaattttttgaatgtgaaggggaggaggggttgggagcaagaaagacatccaccttccattttgatctacgtgtagtagtggcttgatagtaggtgctgacctggctggcaatwtatagtgcctcttaatgcaatgaattccttctgctttcttcctgcttttcaaaaagcaaatcctatggctttatttattttcctcttctattttttcccccttactacagttgcrtattgttgctcacatgaatgaaacatgcaatcagttctctttgggtggccatgatgaaaaaatatgctattttatctgttcatactgagatgcttaggtgttattggaggaatttttctccatgaaaggaattttacatgacatggggcacttcagagcagggtctatagtgcagtagcagtgtgtgtaagcacataaagtgctcgtattctttcatttaacgatgttccaacgcagtgcgagatattagcttcca

SEQ ID NO: 77531 - DNA, 600 bp, Chicken  19866894366167_1
attagctgtgtgcaaagttatttctgcaattggcaattacacataccctaaatatcaattctgcaagtacagcatgcaataatgcatgtatggtaccagaaatattaaagaaacgccatctgagtacttgttttccatcattctagacataaaactgaagagattggggtgagatttctatttaagacctcatttctcaaatccattgactatctgcccagaatttcactgaaacaagttctctccatgaagtacatttgcattaacagtccaaacagttttctccaaagaaaaatgtcytctttgtctaaaaatacatcctcctgatrtgctaatgggcagarcgaaaatgaaaaggtatctgaattycatgttcaaacaacgtgcttactctggaaartctccacattctgcccattacttctccaaaacccagcttataagcatatctagcctatattgtgcatcatacactgtaatggaaaatctggatttgtgcattcttactgatttctcacttacttcatgctcaaaagatacagcccggcagttctcgagctccctgcagcagcgtgatgaaggatggctgaaccccaagtg

SEQ ID NO: 77532 - DNA, 600 bp, Chicken  19866894366167_2
ttggcaattacacataccctaaatatcaattctgcaagtacagcatgcaataatgcatgtatggtaccagaaatattaaagaaacgccatctgagtacttgttttccatcattctagacataaaactgaagagattggggtgagatttctatttaagacctcatttctcaaatccattgactatctgcccagaatttcactgaaacaagttctctccatgaagtacatttgcattaacagtccaaacagttttctccaaagaaaaatgtcytctttgtctaaaaatacatcctcctgatrtgctaatgggcagarcgaaaatgaaaaggtatctgaattycatgttcaaacaacgtgcttactctggaaartctccacattctgcccattacttctccaaaacccagcttataagcatatctagcctatattgtgcatcatacactgtaatggaaaatctggatttgtgcattcttactgatttctcacttacttcatgctcaaaagatacagcccggcagttctcgagctccctgcagcagcgtgatgaaggatggctgaaccccaagtgtccttgaccaagatactcaacttgtgttc

SEQ ID NO: 77533 - DNA, 600 bp, Chicken  19866894366167_3
accctaaatatcaattctgcaagtacagcatgcaataatgcatgtatggtaccagaaatattaaagaaacgccatctgagtacttgttttccatcattctagacataaaactgaagagattggggtgagatttctatttaagacctcatttctcaaatccattgactatctgcccagaatttcactgaaacaagttctctccatgaagtacatttgcattaacagtccaaacagttttctccaaagaaaaatgtcytctttgtctaaaaatacatcctcctgatrtgctaatgggcagarcgaaaatgaaaaggtatctgaattycatgttcaaacaacgtgcttactctggaaartctccacattctgcccattacttctccaaaacccagcttataagcatatctagcctatattgtgcatcatacactgtaatggaaaatctggatttgtgcattcttactgatttctcacttacttcatgctcaaaagatacagcccggcagttctcgagctccctgcagcagcgtgatgaaggatggctgaaccccaagtgtccttgaccaagatactcaacttgtgttctacattctgaattta

SEQ ID NO: 77534 - DNA, 600 bp, Chicken  19866894366167_4
cagcatgcaataatgcatgtatggtaccagaaatattaaagaaacgccatctgagtacttgttttccatcattctagacataaaactgaagagattggggtgagatttctatttaagacctcatttctcaaatccattgactatctgcccagaatttcactgaaacaagttctctccatgaagtacatttgcattaacagtccaaacagttttctccaaagaaaaatgtcytctttgtctaaaaatacatcctcctgatrtgctaatgggcagarcgaaaatgaaaaggtatctgaattycatgttcaaacaacgtgcttactctggaaartctccacattctgcccattacttctccaaaacccagcttataagcatatctagcctatattgtgcatcatacactgtaatggaaaatctggatttgtgcattcttactgatttctcacttacttcatgctcaaaagatacagcccggcagttctcgagctccctgcagcagcgtgatgaaggatggctgaaccccaagtgtccttgaccaagatactcaacttgtgttctacattctgaatttagtttctctgtggacagaactctaca

SEQ ID NO: 77535 - DNA, 600 bp, Chicken  19866894366167_5
aatattaaagaaacgccatctgagtacttgttttccatcattctagacataaaactgaagagattggggtgagatttctatttaagacctcatttctcaaatccattgactatctgcccagaatttcactgaaacaagttctctccatgaagtacatttgcattaacagtccaaacagttttctccaaagaaaaatgtcytctttgtctaaaaatacatcctcctgatrtgctaatgggcagarcgaaaatgaaaaggtatctgaattycatgttcaaacaacgtgcttactctggaaartctccacattctgcccattacttctccaaaacccagcttataagcatatctagcctatattgtgcatcatacactgtaatggaaaatctggatttgtgcattcttactgatttctcacttacttcatgctcaaaagatacagcccggcagttctcgagctccctgcagcagcgtgatgaaggatggctgaaccccaagtgtccttgaccaagatactcaacttgtgttctacattctgaatttagtttctctgtggacagaactctacagctgccccagtacagcaagtttctctcaaag

SEQ ID NO: 77536 - DNA, 600 bp, Chicken  19866894366171_1
tccagagctctcagtcctgttgttacagcaacacacatccacagccacatcctggtgtctgctgctggagagggagaaccagaggaggggagaaacagaagggctgagagcaagcagagcagaagcactcaaaggagcactggcttagagaatcagatgaattacattataaagtatactcagatattataaatgcacataaacattatgcattttatccctcagaaagcaggaagaagaggctgaagctgatagcttggctgtacacctgcacagaaaccagcaatgcaggaagaaggraaaaaaaaaccatttcactgcttttatgttcagaaagcaaccagattttattgtattccagttggcagggaaaaaagcaaaccccactgaccacaaaatcagctggaagtctttaagatttaagataagacccacttgcatggagcaccctgcccagctgttaacgtgctggcataggggcagaggcattggtgtttggttgcaagagcagcaaagggctttgagctgtactgtgggaggctgtaattaatcacacagctgtgtgcagagaaatggatgggttcttgtgttgtatccctg

SEQ ID NO: 77537 - DNA, 600 bp, Chicken  19866894366171_2; identical to SEQ ID NO: 77536

SEQ ID NO: 77538 - DNA, 600 bp, Chicken  19866894366171_3
ccagagctctcagtcctgttgttacagcaacacacatccacagccacatcctggtgtctgctgctggagagggagaaccagaggaggggagaaacagaagggctgagagcaagcagagcagaagcactcaaaggagcactggcttagagaatcagatgaattacattataaagtatactcagatattataaatgcacataaacattatgcattttatccctcagaaagcaggaagaagaggctgaagctgatagcttggctgtacacctgcacagaaaccagcaatgcaggaagaaggaraaaaaaaaccatttcactgcttttatgttcagaaagcaaccagattttattgtattccagttggcagggaaaaaagcaaaccccactgaccacaaaatcagctggaagtctttaagatttaagataagacccacttgcatggagcaccctgcccagctgttaacgtgctggcataggggcagaggcattggtgtttggttgcaagagcagcaaagggctttgagctgtactgtgggaggctgtaattaatcacacagctgtgtgcagagaaatggatgggttcttgtgttgtatccctgc

SEQ ID NO: 77539 - DNA, 600 bp, Chicken  19866894366171_4
cagagctctcagtcctgttgttacagcaacacacatccacagccacatcctggtgtctgctgctggagagggagaaccagaggaggggagaaacagaagggctgagagcaagcagagcagaagcactcaaaggagcactggcttagagaatcagatgaattacattataaagtatactcagatattataaatgcacataaacattatgcattttatccctcagaaagcaggaagaagaggctgaagctgatagcttggctgtacacctgcacagaaaccagcaatgcaggaagaaggaaraaaaaaaccatttcactgcttttatgttcagaaagcaaccagattttattgtattccagttggcagggaaaaaagcaaaccccactgaccacaaaatcagctggaagtctttaagatttaagataagacccacttgcatggagcaccctgcccagctgttaacgtgctggcataggggcagaggcattggtgtttggttgcaagagcagcaaagggctttgagctgtactgtgggaggctgtaattaatcacacagctgtgtgcagagaaatggatgggttcttgtgttgtatccctgcc

SEQ ID NO: 77540 - DNA, 600 bp, Chicken  19866894366171_5
tcagtcctgttgttacagcaacacacatccacagccacatcctggtgtctgctgctggagagggagaaccagaggaggggagaaacagaagggctgagagcaagcagagcagaagcactcaaaggagcactggcttagagaatcagatgaattacattataaagtatactcagatattataaatgcacataaacattatgcattttatccctcagaaagcaggaagaagaggctgaagctgatagcttggctgtacacctgcacagaaaccagcaatgcaggaagaaggaaaaaaaaaarcatttcactgcttttatgttcagaaagcaaccagattttattgtattccagttggcagggaaaaaagcaaaccccactgaccacaaaatcagctggaagtctttaagatttaagataagacccacttgcatggagcaccctgcccagctgttaacgtgctggcataggggcagaggcattggtgtttggttgcaagagcagcaaagggctttgagctgtactgtgggaggctgtaattaatcacacagctgtgtgcagagaaatggatgggttcttgtgttgtatccctgcctaatartg

SEQ ID NO: 77541 - DNA, 600 bp, Chicken  19866894366171_6
accatttcactgcttttatgttcagaaagcaaccagattttattgtattccagttggcagggaaaaaagcaaaccccactgaccacaaaatcagctggaagtctttaagatttaagataagacccacttgcatggagcaccctgcccagctgttaacgtgctggcataggggcagaggcattggtgtttggttgcaagagcagcaaagggctttgagctgtactgtgggaggctgtaattaatcacacagctgtgtgcagagaaatggatgggttcttgtgttgtatccctgcctaatartggcaggggcagcaggctgggaggggaaacttggtatygcycttccccagrgggtgaacaaagaagcgcccctctgtgggtcagaggactcacccatccaagaagggattccccctgcaattcttctgctctctgttgggctccatcttccccctgactcctctgtttgcagaacccaacagcctgcagtgctccgtgtcctctgagcctcagttcacagctcctccaggacccatagcagctgctggggctgctccagtacctgcaccaggcacgttctcagttcccagttctcagccc

SEQ ID NO: 77542 - DNA, 600 bp, Chicken  19866894366171_7
tttattgtattccagttggcagggaaaaaagcaaaccccactgaccacaaaatcagctggaagtctttaagatttaagataagacccacttgcatggagcaccctgcccagctgttaacgtgctggcataggggcagaggcattggtgtttggttgcaagagcagcaaagggctttgagctgtactgtgggaggctgtaattaatcacacagctgtgtgcagagaaatggatgggttcttgtgttgtatccctgcctaatartggcaggggcagcaggctgggaggggaaacttggtatygcycttccccagrgggtgaacaaagaagcgcccctctgtgggtcagaggactcacccatccaagaagggattccccctgcaattcttctgctctctgttgggctccatcttccccctgactcctctgtttgcagaacccaacagcctgcagtgctccgtgtcctctgagcctcagttcacagctcctccaggacccatagcagctgctggggctgctccagtacctgcaccaggcacgttctcagttcccagttctcagcccccaggaacccccttggctcaggactgacgcacatctca

SEQ ID NO: 77543 - DNA, 600 bp, Chicken  19866894366171_8
attgtattccagttggcagggaaaaaagcaaaccccactgaccacaaaatcagctggaagtctttaagatttaagataagacccacttgcatggagcaccctgcccagctgttaacgtgctggcataggggcagaggcattggtgtttggttgcaagagcagcaaagggctttgagctgtactgtgggaggctgtaattaatcacacagctgtgtgcagagaaatggatgggttcttgtgttgtatccctgcctaatartggcaggggcagcaggctgggaggggaaacttggtatygcycttccccagrgggtgaacaaagaagcgcccctctgtgggtcagaggactcacccatccaagaagggattccccctgcaattcttctgctctctgttgggctccatcttccccctgactcctctgtttgcagaacccaacagcctgcagtgctccgtgtcctctgagcctcagttcacagctcctccaggacccatagcagctgctggggctgctccagtacctgcaccaggcacgttctcagttcccagttctcagcccccaggaacccccttggctcaggactgacgcacatctcagat

SEQ ID NO: 77544 - DNA, 600 bp, Chicken  19866894366171_9
agttggcagggaaaaaagcaaaccccactgaccacaaaatcagctggaagtctttaagatttaagataagacccacttgcatggagcaccctgcccagctgttaacgtgctggcataggggcagaggcattggtgtttggttgcaagagcagcaaagggctttgagctgtactgtgggaggctgtaattaatcacacagctgtgtgcagagaaatggatgggttcttgtgttgtatccctgcctaatartggcaggggcagcaggctgggaggggaaacttggtatygcycttccccagrgggtgaacaaagaagcgcccctctgtgggtcagaggactcacccatccaagaagggattccccctgcaattcttctgctctctgttgggctccatcttccccctgactcctctgtttgcagaacccaacagcctgcagtgctccgtgtcctctgagcctcagttcacagctcctccaggacccatagcagctgctggggctgctccagtacctgcaccaggcacgttctcagttcccagttctcagcccccaggaacccccttggctcaggactgacgcacatctcagatgctcattatc

SEQ ID NO: 77545 - DNA, 600 bp, Chicken  19866894366173_1
gagctattctctttctataatgattaccagtgaactacaggatatcttggaatcatagaagcacataatggtttgggttgaacagaatcttagagatcatctagtttcagcctccacccaaccccatcacaggcagaaacacattacattaaaccacattgcccaaagtcccatgcctttgttgccttctgcaactgcgatgttagccacctgtgttagccctcttgcgcacactgaccaattacctgatcagggccaaatgactgcagacgcataccaatatgatgagcagcaaaatgrcatctattcactactaagcacagcttatatatttttacttgagctatcgtgccctgtcctgattcgtccgtattggatcttagccccttactacaattccttatttggctcctattgtctcctcattccttcgccttcttatcttgtttactttgttagcaaggacagtctgtctgagcaccacagcaccctttcactgtgcttagggagaggcctatcccatacagcacgtatccccacaaagtgcctactacaacacccatctagcctggccttgaactcctctagggacagaacatc

SEQ ID NO: 77546 - DNA, 600 bp, Chicken  19866894366175_1
gtctttgttttttcctttgaaagcctgtgcaggatggacctccatttagaaaaaataagtcattaatgttgataggtgccttcagaaatgctagctattttcagactatattccataacctaaaatggtatttaattcatactagaaaagttggcacaaacatccagttcatccaaatactgactcagcttaatactgttttgcataatagtgtagtatagtcatttgttgttgtatcaaaatggctcaagttttgattacatgctataaatcttaattgtttgcaaaggcacagtagcwcttatagaatattaagaactttacctttatcaagtggcattcatgcatatgttagagcgcataaaatctacaatgcmtgagaacatgcataaggtttctctgttgaatgaagcacctttttcagttacagaatttgactgatgatgtttaaacaggtaaataattttaatgaggttggttttctgtatagtttatacttttgaaaactgattatacaagtttttttgttttgtttcataagtctagagatgtatgaagcagaagcaaaaaaaaatccatgagcaagaagtgtgcccttgt

SEQ ID NO: 77547 - DNA, 600 bp, Chicken  19866894366175_2
gccttcagaaatgctagctattttcagactatattccataacctaaaatggtatttaattcatactagaaaagttggcacaaacatccagttcatccaaatactgactcagcttaatactgttttgcataatagtgtagtatagtcatttgttgttgtatcaaaatggctcaagttttgattacatgctataaatcttaattgtttgcaaaggcacagtagcwcttatagaatattaagaactttacctttatcaagtggcattcatgcatatgttagagcgcataaaatctacaatgcmtgagaacatgcataaggtttctctgttgaatgaagcacctttttcagttacagaatttgactgatgatgtttaaacaggtaaataattttaatgaggttggttttctgtatagtttatacttttgaaaactgattatacaagtttttttgttttgtttcataagtctagagatgtatgaagcagaagcaaaaaaaaatccatgagcaagaagtgtgcccttgtaaaaaggccagtattgtactggaatatattaagaagagtgtggccagcaggtcgagggagattctcctccccctctg

SEQ ID NO: 77548 - DNA, 599 bp, Chicken  19866894366178_1
  misc_feature (1)..(182): n is any nucleotide
nnnnnnnnnnnnnnnnnnnnnnnnnnnnnnnnnnnnnnnnnnnnnnnnnnnnnnnnnnnnnnnnnnnnnnnnnnnnnnnnnnnnnnnnnnnnnnnnnnnnnnnnnnnnnnnnnnnnnnnnnnnnnnnnnnnnnnnnnnnnnnnnnnnnnnnnnnnnnnnnnnnnnnnnnnnnnnnnnnnnnnacatagcaccctgaagaagtgcatgtaaaaacttctctgatcatcacagtcagtgattagttgcaacaagaggcttggttttagcacccaggcttgtcttaaactttctgaaaacacrgtcttaaagacaatttggagtgcagctgtcctgccttcatcaggaattccaggctccatatgagacttagtgaagtttctcctcatgataaatgagtatcctatgacatggtactgttatattatccttctgcatcagcaatacagttgagcttattatacaacagaaaggttaaaaaacacatctattttatggcacaggaaaatgaatatggaagcatatatccaggtctttccctaatatgaacctccctaataaaytgaagaaccagttagtacacaatggagttgtacgctgta

SEQ ID NO: 77549 - DNA, 600 bp, Chicken  19866894366178_2
ttttagcacccaggcttgtcttaaactttctgaaaacacrgtcttaaagacaatttggagtgcagctgtcctgccttcatcaggaattccaggctccatatgagacttagtgaagtttctcctcatgataaatgagtatcctatgacatggtactgttatattatccttctgcatcagcaatacagttgagcttattatacaacagaaaggttaaaaaacacatctattttatggcacaggaaaatgaatatggaagcatatatccaggtctttccctaatatgaacctccctaataaaytgaagaaccagttagtacacaatggagttgtacgctgtacagtaatttattttattagtttggagctgaatgcaaacctagaagccattctgtcagacatgagtaaggagaatagctttgcattgatttaacccaggagtatcatataaactgtcattagcagtgcctataaacttagacttgtctaacatttgtatttagtatggaaaaatcatttttggagtgttcataatgcataaaatgtgttgatttttttttctttcttcaagttaagggattggagtattgtcaagacgaata

SEQ ID NO: 77550 - DNA, 599 bp, Chicken  19866894366181_1
  misc_feature (1)..(203): n is any nucleotide
nnnnnnnnnnnnnnnnnnnnnnnnnnnnnnnnnnnnnnnnnnnnnnnnnnnnnnnnnnnnnnnnnnnnnnnnnnnnnnnnnnnnnnnnnnnnnnnnnnnnnnnnnnnnnnnnnnnnnnnnnnnnnnnnnnnnnnnnnnnnnnnnnnnnnnnnnnnnnnnnnnnnnnnnnnnnnnnnnnnnnnnnnnnnnnnnnnnnnnnnnnntagacaaatgttatttactatgactttaatacttcctagtcttgtcataaatagattgttcagattgttgcaatgcatgacaggttaatccaaatgmagtaactgctgaggactgtgtattttagaatagagctgaggtaggatagagctgtgtaatacactaagaagtcaattgatacgggtttcattaaagcctctgttttttagtagcactatattattaacaaggtttgaaattgtgttactgtgtacagtaggagattatttcagtacacttcagagttattaacaggcttacatagaagagcctgttctatgacatatcatgagtactctaaaagctattgtatctacttcacctttagaaaaaaaatactgatatatgaatgtatttca

SEQ ID NO: 77551 - DNA, 600 bp, Chicken  19866894366181_2
gatagagctgtgtaatacactaagaagtcaattgatacgggtttcattaaagcctctgttttttagtagcactatattattaacaaggtttgaaattgtgttactgtgtacagtaggagattatttcagtacacttcagagttattaacaggcttacatagaagagcctgttctatgacatatcatgagtactctaaaagctattgtatctacttcacctttagaaaaaaaatactgatatatgaatgtatttcattaggatgtaatcaggtggggggcaatcctactaacctatactgrggatattgtagtttgatgtagtagygaaatttactcaaaaatgttgattcttctgtgcattgttacaggacttatttatagtggacatacgttttcattattacttgcgaagttggctgaactgtacactagatgttattggaaccgttctagttatcacrttttcctcaccactgttcatagtggtagttattcccctgggatacttgtattttgttatccaagtaagttcattaagcttttataaggttttctagatgtgtctatgtaggatttccaaaacatcygatgatacaggct

SEQ ID NO: 77552 - DNA, 600 bp, Chicken  19866894366181_3
agtcaattgatacgggtttcattaaagcctctgttttttagtagcactatattattaacaaggtttgaaattgtgttactgtgtacagtaggagattatttcagtacacttcagagttattaacaggcttacatagaagagcctgttctatgacatatcatgagtactctaaaagctattgtatctacttcacctttagaaaaaaaatactgatatatgaatgtatttcattaggatgtaatcaggtggggggcaatcctactaacctatactgrggatattgtagtttgatgtagtagygaaatttactcaaaaatgttgattcttctgtgcattgttacaggacttatttatagtggacatacgttttcattattacttgcgaagttggctgaactgtacactagatgttattggaaccgttctagttatcacrttttcctcaccactgttcatagtggtagttattcccctgggatacttgtattttgttatccaagtaagttcattaagcttttataaggttttctagatgtgtctatgtaggatttccaaaacatcygatgatacaggcttaaattattactcagagtggggaaa

SEQ ID NO: 77553 - DNA, 600 bp, Chicken  19866894366181_4
aagagcctgttctatgacatatcatgagtactctaaaagctattgtatctacttcacctttagaaaaaaaatactgatatatgaatgtatttcattaggatgtaatcaggtggggggcaatcctactaacctatactgrggatattgtagtttgatgtagtagygaaatttactcaaaaatgttgattcttctgtgcattgttacaggacttatttatagtggacatacgttttcattattacttgcgaagttggctgaactgtacactagatgttattggaaccgttctagttatcacrttttcctcaccactgttcatagtggtagttattcccctgggatacttgtattttgttatccaagtaagttcattaagcttttataaggttttctagatgtgtctatgtaggatttccaaaacatcygatgatacaggcttaaattattactcagagtggggaaaaaagtctacagaatgcatctatatttacttccataaaaaaatcttccagcttcttaaaaggaatttagaacagtccttgagtatatcctgtagtgcttgaaaacttttaacaatttgtatttttctccttagattt

SEQ ID NO: 77554 - DNA, 600 bp, Chicken  19866894366181_5
taacctatactgrggatattgtagtttgatgtagtagygaaatttactcaaaaatgttgattcttctgtgcattgttacaggacttatttatagtggacatacgttttcattattacttgcgaagttggctgaactgtacactagatgttattggaaccgttctagttatcacrttttcctcaccactgttcatagtggtagttattcccctgggatacttgtattttgttatccaagtaagttcattaagcttttataaggttttctagatgtgtctatgtaggatttccaaaacatcygatgatacaggcttaaattattactcagagtggggaaaaaagtctacagaatgcatctatatttacttccataaaaaaatcttccagcttcttaaaaggaatttagaacagtccttgagtatatcctgtagtgcttgaaaacttttaacaatttgtatttttctccttagattttctttcttagacagatacaatatcgatgtaaaagtagactgatgccttgttaccttttgctgttttttttactaaggtgtcagttatgctatggagaaactgaaagataatggttcagaaagacta

SEQ ID NO: 77555 - DNA, 577 bp, Chicken  19866894366183_1
aattcttaagaggggtggtttttgtagtgttcagtttcttactcactgatccctccttaacatccttgctgggtgcacaggagccagctgtactctcctacccactccctactcgatgcttcaaggcaccaggtgcctcttggcactgtgtgatggacgagccctgactgtaacctggaactggggctgtgctcttcaaacacggctgtttcctcgcatcttcccacagcagtacgtaaacaatcaccgcctgtattttggagctcaatatcagatgttcgtgggtttcagagcaggccrgagggaggagggcaggaggaacatgtcagggtactctaacaagagtcattgtcaaaccctccggctttgaaaaggaacattaaggtatcatttactctctgccctggcttcctgtagagcgcactaatgaaagacctctttgtgtgtgcagtcactaactacagggaccagtcaaagcttttgtggacacaaccataaaaaagagcctgtaggccagaactgatcctacaattagctcctgtctgtgtgagtggaagcacctgctccgccagcagtg

SEQ ID NO: 77556 - DNA, 600 bp, Chicken  19866894366184_1
gaaagcattttcaaggtgatgaaactccagtaagggcttatcagttggccaccaactccttcttgcaagattgtccctgcagcaccaagatcagcccagcccagagcccagccttcagcagcagccactataggaaatagaacctaggggtaagtatcaagtgatgttccctctgttttatgctcccagtgctcagcattgctccctccagtgcagtctgattttttaatacaacagcaatgagtgagatgatagctcagcccattacctgtgctttatacaattaagaagaacattatrttgacagacgtgactacagtctggaagaatagtaatagtgcactgtaaatattctcctttctctttcgatcgtttgtgcttacctcctccccacccctgcagttaactgaggcactacagagccccagtcctgtacagctgtgtcactgatctgtccagagaaaaccctgcaggtcaaagcagtcaccagaaccatttctcagaaggggaaccaggacctgatcaagctgatcctgaattaacccccagttaggacagctgcaccagcagtcagttcagatttgcatttcaagttacttg

SEQ ID NO: 77557 - DNA, 600 bp, Chicken  19866894366188_1
atttaggatggaattatttgggggggaaaaaaaaaatcttaaacagtgaatatactgctttcagtaccttaaggaaaaaaaaaaaagaaggtgggaatatgttgcagtttcggttgaatgggaaattagtttaaccacatatacctcagcaactatcactgtgctggattgttgcactaacaatggtttcttgggaagagtaaaatatgtgtgaaatgaaattaaaaataataaaaaccttttatttgctaccattagatatattcattatcttaaaaatgggagaggtttatcgtatcyctcaatatggaaaatccagtatgaaaatagaggcgagtagaaatatggcagatcttgcatgttaacggttacttttgccacatgttttgtaactgcgagctgtgatcaggcgtggaataaagctttctatggttgatggtgaaaaaggagaaaaagaagtgccgcgarctgtatcttttagtaatacccagcacatttctgagtctgcctttttgaagtccatgcttatggatacgcgttcttgatttaaaacacttgggagggaaatgttgtacatggaatgcaagtggtggctgtcaa

SEQ ID NO: 77558 - DNA, 600 bp, Chicken  19866894366188_2
ttgttgcactaacaatggtttcttgggaagagtaaaatatgtgtgaaatgaaattaaaaataataaaaaccttttatttgctaccattagatatattcattatcttaaaaatgggagaggtttatcgtatcyctcaatatggaaaatccagtatgaaaatagaggcgagtagaaatatggcagatcttgcatgttaacggttacttttgccacatgttttgtaactgcgagctgtgatcaggcgtggaataaagctttctatggttgatggtgaaaaaggagaaaaagaagtgccgcgarctgtatcttttagtaatacccagcacatttctgagtctgcctttttgaagtccatgcttatggatacgcgttcttgatttaaaacacttgggagggaaatgttgtacatggaatgcaagtggtggctgtcaaaactgaactttattgcaagagtagaagctttcagacgtgtagttatacaaagtaattttttataggactggaggtgcagattccaaataaacatttccatttaaaaaatattgcaacagattcaggcctatttcacagttgtttaagggattaattttaaaccccatt

SEQ ID NO: 77559 - DNA, 600 bp, Chicken  19866894366189_1
gtagaggagaacagggaagagaggagttaaatttattcactgtcatgatggctgtggtgccacatgaaaaacaggctttttcagcactggtagagttgcatttacaattcattgcactggcaatcttgttcacaaatcccagcaggagttagcctgtaacatccaacacattgagatgagaacgtttccccaaatgtctttcactttccaaggctaccagcagattgttatttacctggaagaacatgcaagcgagctaatccacttagataaagcatctgttcataggcacagggtcarttctgtgaataataacagaacaatattatgttcacctgaatttattatctagcaataattaatatagctaatattaatatgagtgtgcaaggggagtactagaggaaatamtctctcatctgtaatagcctctaagtgcataccatttcttatttttttcctagtgcagatagatttaggtcagaaaataattcttcatgggtaacaagtagttcatttgcaaattctcgttggatgctcttggcaggttaacatttgcctaaaggggcatctgatgaggagaaacaaggacttctgttt

SEQ ID NO: 77560 - DNA, 600 bp, Chicken  19866894366189_2
ttgcactggcaatcttgttcacaaatcccagcaggagttagcctgtaacatccaacacattgagatgagaacgtttccccaaatgtctttcactttccaaggctaccagcagattgttatttacctggaagaacatgcaagcgagctaatccacttagataaagcatctgttcataggcacagggtcarttctgtgaataataacagaacaatattatgttcacctgaatttattatctagcaataattaatatagctaatattaatatgagtgtgcaaggggagtactagaggaaatamtctctcatctgtaatagcctctaagtgcataccatttcttatttttttcctagtgcagatagatttaggtcagaaaataattcttcatgggtaacaagtagttcatttgcaaattctcgttggatgctcttggcaggttaacatttgcctaaaggggcatctgatgaggagaaacaaggacttctgtttccctcacagtcagtccactagcattagcctagatgaacaaacagagacatgaaaataaagttaccctataaccccaaaacaataataaagcaagaggggtccgtagttcaa

SEQ ID NO: 77561 - DNA, 600 bp, Chicken  19866894366197_1
cagctcaattagagagagcagtgcaggaacatgaaggacacaggatgaccgtgttttgtcgttcctcctggaaactcaacacgtgtagcgagcaggaaggagggaaaaggctctgatcggattcagacaggatttggatagcagttttcaaatgaaatttaaaggtcatttttaaacccaaatgcagagtgctgctccaagcatgagcagactggcaaacaatctgcatttttccacttaatattacttctagggatgtgtttaccacataggcaggcaaagcaacctcagggaaaaaaraaaaaaaggaaaaagaattacagatgttatgctgggtacattgtcgaaatacatacccacggagcaacagctggaagttacagatgttcttaacctaaggattttcttctctatwactgaccactgatactgattttttttttttgcacatgagcagtagtccacgtggcaaaagccaaatgtggaggaggatactaaaaagtggttgttggccacaatggctgttttccttagggctctggcgaccactggagacggatcactagcatccctatccgagtgctgcaatatggggttggt

SEQ ID NO: 77562 - DNA, 600 bp, Chicken  19866894366197_2
atcggattcagacaggatttggatagcagttttcaaatgaaatttaaaggtcatttttaaacccaaatgcagagtgctgctccaagcatgagcagactggcaaacaatctgcatttttccacttaatattacttctagggatgtgtttaccacataggcaggcaaagcaacctcagggaaaaaaraaaaaaaggaaaaagaattacagatgttatgctgggtacattgtcgaaatacatacccacggagcaacagctggaagttacagatgttcttaacctaaggattttcttctctatwactgaccactgatactgattttttttttttgcacatgagcagtagtccacgtggcaaaagccaaatgtggaggaggatactaaaaagtggttgttggccacaatggctgttttccttagggctctggcgaccactggagacggatcactagcatccctatccgagtgctgcaatatggggttggtttggggttttgctgcccttgcattcactctcccttgcaagcttccccacatgctgcccttccttccaagcagcacgggggggaaagacrccgccaccctacacactcccctttga

SEQ ID NO: 77563 - DNA, 600 bp, Chicken  19866894366197_3
tggatagcagttttcaaatgaaatttaaaggtcatttttaaacccaaatgcagagtgctgctccaagcatgagcagactggcaaacaatctgcatttttccacttaatattacttctagggatgtgtttaccacataggcaggcaaagcaacctcagggaaaaaaraaaaaaaggaaaaagaattacagatgttatgctgggtacattgtcgaaatacatacccacggagcaacagctggaagttacagatgttcttaacctaaggattttcttctctatwactgaccactgatactgawtttttttttttgcacatgagcagtagtccacgtggcaaaagccaaatgtggaggaggatactaaaaagtggttgttggccacaatggctgttttccttagggctctggcgaccactggagacggatcactagcatccctatccgagtgctgcaatatggggttggtttggggttttgctgcccttgcattcactctcccttgcaagcttccccacatgctgcccttccttccaagcagcacgggggggaaagacrccgccaccctacacactcccctttgaggccatgttttgctgtcct

SEQ ID NO: 77564 - DNA, 600 bp, Chicken  19866894366197_4
ttaacctaaggattttcttctctatwactgaccactgatactgattttttttttttgcacatgagcagtagtccacgtggcaaaagccaaatgtggaggaggatactaaaaagtggttgttggccacaatggctgttttccttagggctctggcgaccactggagacggatcactagcatccctatccgagtgctgcaatatggggttggtttggggttttgctgcccttgcattcactctcccttgcaagcttccccacatgctgcccttccttccaagcagcacgggggggaaagacrccgccaccctacacactcccctttgaggccatgttttgctgtcctggcatgtgcgcattgcctccaccgccgccctccgttgagctgtgcactgaatgatgatgaagtgacattgtcatggcaacacgtgttgacttcccggttgcatagcaacctgatgcaggctgatgtaagaggtgtgcttgtttcctctgctggctgcactcctttgatgtgcctacgagatttgggcttgttttagtctattttctttcattttctggacatgttgtgacatcagtgtgatgctgtgtgtgtgca

SEQ ID NO: 77565 - DNA, 600 bp, Chicken  19866894366197_5
caacacgtgttgacttcccggttgcatagcaacctgatgcaggctgatgtaagaggtgtgcttgtttcctctgctggctgcactcctttgatgtgcctacgagatttgggcttgttttagtctattttctttcattttctggacatgttgtgacatcagtgtgatgctgtgtgtgtgcacagaggaaaagagataaagcttatctccttcaaacgtcctccttggggcactaagatacacagcttgtttttagaggctcgatagcattcaatcttgtcattattttgtgtaatatagacycraggagaccagaagacacctttaagtgattttgactcaagcttccctcttgattttgcatagtcttttccaagtgcccaacatccttgcgtgtggggcaggtctgcttttcatggcatcacagctcagtgccatagggaagctgcaggtctgatttttgtgcagagtcagctgggtttgctgtttcatggggcatctgcagtagaggaagactactaaatctttgtttacagtcatcacattgaatttctgcacccagcaggaaatgataaaaatctgcaatgtccttcttgctgaagg

SEQ ID NO: 77566 - DNA, 600 bp, Chicken  19866894366197_6
acacgtgttgacttcccggttgcatagcaacctgatgcaggctgatgtaagaggtgtgcttgtttcctctgctggctgcactcctttgatgtgcctacgagatttgggcttgttttagtctattttctttcattttctggacatgttgtgacatcagtgtgatgctgtgtgtgtgcacagaggaaaagagataaagcttatctccttcaaacgtcctccttggggcactaagatacacagcttgtttttagaggctcgatagcattcaatcttgtcattattttgtgtaatatagacycraggagaccagaagacacctttaagtgattttgactcaagcttccctcttgattttgcatagtcttttccaagtgcccaacatccttgcgtgtggggcaggtctgcttttcatggcatcacagctcagtgccatagggaagctgcaggtctgatttttgtgcagagtcagctgggtttgctgtttcatggggcatctgcagtagaggaagactactaaatctttgtttacagtcatcacattgaatttctgcacccagcaggaaatgataaaaatctgcaatgtccttcttgctgaaggct

SEQ ID NO: 77567 - DNA, 599 bp, Chicken  19866894366200_1
  misc_feature (1)..(40): n is any nucleotide
nnnnnnnnnnnnnnnnnnnnnnnnnnnnnnnnnnnnnnnnattccttgacagtgctcttgatccttcgggacaatgctcaaagccacgaggagagcctggcagtgctgcgctccagcacggagttcatgcgctacgctgtcagtgtggcactacagaaggtgcagcagctggaggagatgggacaaaccgacggcccggatggacaaaaccctgagaagatgtttcagaacctctgcaaaatcacacggtgagtcactgtggaatgtgaagatatcagccctaaaaagtagcagtgcatktgggggatcagaaactgtttttgttgcagtcattaggactacatgcaaggtatgtgtttgcatgattggacattgaagtagaataagatcacctatgcagcagagagctaatgagaagaaaggagagggaacaaaaaagagaagaaacatacttaggggagcaggaaaaagatgtttacctgcaaatagaagtgtcttctttgagccaaccaatgttactttcttcaaagctgttcactttgctttacctgactttacctttctgattttatttatgtagagcactatagaaacagctg

SEQ ID NO: 77568 - DNA, 600 bp, Chicken  19866894366201_1
gagaggaaaacacgtccataacagtgcgtgtgtgaggggataatttgtgcgtacaagcactgattgagctttaaaagcatattgattcgtggattcacatgctgaaatagggtcactggtttttttgggcaccatccagaacactagtccccaaaagaaagatcctttccaagacaataagtggcttcctggactcaatatattttaaattctcgtgtcactcctattttgcaatgttgcagtattttttaccttccatgggaatataggtgcctttgacagattcagaagaaaccacasaaatctaaactgcctctgggaaagaccagactgaactgcatctctgtgtatactttctgtctcactgcagcacaaccaatatcagcaaaacatatgtgcacctatgtgtccgtatccttcaaggcagacctcatgggaaacagcctgaagtgatcccttgggaagggccccagtcctttcgggaacaggatatggggaaattgaggagtggggaaaaggggaaatcatcaaatcctacaggtgggtaaataaaaggagacaaagtttattacaatagcaaggcaaacataaggtttaagc

SEQ ID NO: 77569 - DNA, 600 bp, Chicken  19866894366205_1
gtctcaccagtagaggttcaggttggatattaggaacaaattcttctgtgaaagagtggtgagacatggaaacagggatggttgagtcacggtccctctaagtgttcaagagctgtgtagatgtactgagggacatggtgagtggagaatattggtgattgatggatggttggactagatcttggaggtcttttccaaccttggtgattctgtgattctatgatcccctgagtctataattctatggcaatgctacagtgtatcacagacactctccttgtcctttacttcacagaggawtctctgccattttcaggcatttcacattcagctctaatctatctgccattcttgcagataaagaagcatatctgaagcaataattaacttgaaagccatactctttcaattacgcagtaagacaatcctcagctctaattcatttcagcacagaaaatggaagtatgggtcttaaaacaattcactcatcgaacatccatcctataggaagtgaaacatgaccttttgttcccagtgtgccaccatctgtgttgaacctattgacaaaccgttcctgacaggatgaagcactgctcctgt

SEQ ID NO: 77570 - DNA, 599 bp, Chicken  19866894366214_1
  misc_feature (1)..(35): n is any nucleotide
nnnnnnnnnnnnnnnnnnnnnnnnnnnnnnnnnnntcctggcccgtattttgtatttcatattttgacaagctttgattcttgaccatgctactattgaattaatcatattgcttggaaaaaaatctcaaagaaccaaaaatcaaagtggtttaactgctccttgaagaatacagatgaaccttcacaattttgtccatgcagaaacatttatagtcccataggttataaatacagaacagattacctttctgaaagctgttagaaataatccctattctttgtttatgcaacagattgrctccagagctggcaaggaacttggttcttatcactttacaagcatgaagtaatcaaatatttatttatttacttaatttgaacagggcaactctaccattaatctgaaataaacagaagggcaaaaaagatatatataggcctatgatccactgtgtattcaaacagcatttttgttttgcagggacaagctgatcttctcaaatatgctaaaaatgaagcactggataatctgaaacaaatccattatgctactctttcatgtggactcaataagccaggcactgaaaatgctgaaat

SEQ ID NO: 77571 - DNA, 600 bp, Chicken  19866894366226_1
agaatcatggtatcatagaatggtttggattggaagggacctttaaaatcatctggttccaacccccccccaccctgcctggccttgaatgcttccagggagggggcatccacaacctttctgggtgaccagttccagtgtctcaccaccctcaccgtaaagaatttcttcccaatatctagtctaaatctaccctcttccagtttaaagccattttccctcatcttgttgttacatgcccttattaaagtctctccccgcctttcttgtaggcatctctcaggtactggaaggctgctrtaagtgctataagatcccytcggaaccttctcttctccagactgaagagcctcaacttttccagcctatcctcacaggggaggtgctccagccctctgatcatcttcatggccctcctctggacctgctccaacagctccrtgaccttcttgtgttgggggccccagaactggatgcaatactccaagtgggggctcacatgagcggagtagagggatagaatcactccctcaaccagctggtcacaattctcttgatgcaatccaagatattggttggtcttctgggctgcaagcacac

SEQ ID NO: 77572 - DNA, 600 bp, Chicken  19866894366226_2
atggtttggattggaagggacctttaaaatcatctggttccaacccccccccaccctgcctggccttgaatgcttccagggagggggcatccacaacctttctgggtgaccagttccagtgtctcaccaccctcaccgtaaagaatttcttcccaatatctagtctaaatctaccctcttccagtttaaagccattttccctcatcttgttgttacatgcccttattaaagtctctccccgcctttcttgtaggcatctctcaggtactggaaggctgctrtaagtgctataagatcccytcggaaccttctcttctccagactgaagagcctcaacttttccagcctatcctcacaggggaggtgctccagccctctgatcatcttcatggccctcctctggacctgctccaacagctccrtgaccttcttgtgttgggggccccagaactggatgcaatactccaagtgggggctcacatgagcggagtagagggatagaatcactccctcaaccagctggtcacaattctcttgatgcaatccaagatattggttggtcttctgggctgcaagcacacattgctggctcttgttgaa

SEQ ID NO: 77573 - DNA, 510 bp, Chicken  19866894366226_3
ctcaccaccctcaccgtaaagaatttcttcccaatatctagtctaaatctaccctcttccagtttaaagccattttccctcatcttgttgttacatgcccttattaaagtctctccccgcctttcttgtaggcatctctcaggtactggaaggctgctrtaagtgctataagatcccytcggaaccttctcttctccagactgaagagcctcaacttttccagcctatcctcacaggggaggtgctccagccctctgatcatcttcatggccctcctctggacctgctccaacagctccrtgaccttcttgtgttgggggccccagaactggatgcaatactccaagtgggggctcacatgagcggagtagagggatagaatcactccctcaaccagctggtcacaattctcttgatgcaatccaagatattggttggtcttctgggctgcaagcacacattgctggctcttgttgaacctttcatcaaccgacactcccaaatcctctc

SEQ ID NO: 77574 - DNA, 600 bp, Chicken  19866894366242_1
tttgttgactgagacttgatctcatgatgatgaaattagagctggataagaaggtatttcatcttaatgcagcggctttcaaactcagatttgcacaggcagagaataaaactttgccaaggttgaggggaaaatattaagcagcagcagcaggtcattcagcagccagacatgcttctgccgagatgcaggagtgccacggtcagtcatttctgctctagacaagattaatgtcctgacctttgtattcgttagcctaggatgtctccttgtcttcttggttttaaccagagacatctyctagtgttgctaaatctggtctgttctcagtctttcatctgttatgactaaaaataatttagttgaggtagtcaagaatttggctgttttgaataaagtcagatagggtgacttgccaaaccagaaggagcacaatggaatggtttcagtttgaagttgagttcatgtctttgctttagagataagaaattcctgaagcaagaaggcagatactacttccactttgagaaaggacactgggaaaggtcaaaacaatttagaagagatttgtctcttcaaataaagcaagtagttatgttg

SEQ ID NO: 77575 - DNA, 600 bp, Chicken  19866894366244_1
ttgtttcccttggaaaagtctgcgtatccatcactggtagactgtgcatacagcaaaattcagcagtattatcagctacatttctgtctttattctgattaatttcagcctgatcccccacagatttctcttgcttccatttcattttgcagtgaatcatgcaatttagaaactgtttctcctataactaaaggagattttgattgtattttgtattctccatcttcaggatccaataatttttgtttatcaggttgacaagatgccaagagctcatcttctctactacctcccatcacwgatttcagacattcgctttgctttgcagaactgcattcattgttgtcatgaggcttaacagttgccacatcagctgcatttttyccaagtttctgtcctagatttctgtgctcagaggtgtgtgtattcttctggacaacaggagattcgctccttgaatgttttggggtagaggactgagattttaatacagattgcccagctgtttttggttttgggtctttattgtttgttatctcacyatgctttaacagagcttgagctttgggtgttactgtttttgcagtggcttttgctaca

SEQ ID NO: 77576 - DNA, 600 bp, Chicken  19866894366244_2
tgtctttattctgattaatttcagcctgatcccccacagatttctcttgcttccatttcattttgcagtgaatcatgcaatttagaaactgtttctcctataactaaaggagattttgattgtattttgtattctccatcttcaggatccaataatttttgtttatcaggttgacaagatgccaagagctcatcttctctactacctcccatcacwgatttcagacattcgctttgctttgcagaactgcattcattgttgtcatgaggcttaacagttgccacatcagctgcatttttyccaagtttctgtcctagatttctgtgctcagaggtgtgtgtattcttctggacaacaggagattcgctccttgaatgttttggggtagaggactgagattttaatacagattgcccagctgtttttggttttgggtctttattgtttgttatctcacyatgctttaacagagcttgagctttgggtgttactgtttttgcagtggcttttgctacaggtgtttgtgatggcttaatacttttcttcttggctgaaggatgtttttctgggggcgttgtctgaaccagatgttgtgccaca

SEQ ID NO: 77577 - DNA, 600 bp, Chicken  19866894366244_3
ttgtttatcaggttgacaagatgccaagagctcatcttctctactacctcccatcacwgatttcagacattcgctttgctttgcagaactgcattcattgttgtcatgaggcttaacagttgccacatcagctgcatttttyccaagtttctgtcctagatttctgtgctcagaggtgtgtgtattcttctggacaacaggagattcgctccttgaatgttttggggtagaggactgagattttaatacagattgcccagctgtttttggttttgggtctttattgtttgttatctcacyatgctttaacagagcttgagctttgggtgttactgtttttgcagtggcttttgctacaggtgtttgtgatggcttaatacttttcttcttggctgaaggatgtttttctgggggcgttgtctgaaccagatgttgtgccacatttctttcttcattatgttttggagacactcctgatttcaatgagtttggtgactcccccacagttcctagcaagcagtaaaataaattaataaataaagattgtacattttagttaacatttatgcactcaacttatttgtgtgtatttttgttgag

SEQ ID NO: 77578 - DNA, 600 bp, Chicken  19866894366253_1
acgtgtaattctgctaaaaacatttgaaaatcccaacctgattttttagaggttctgagtctttcgtggaatactgtctcaaaggcagtattggggcagctgtagtaaaagcatcccagcttccagagatgcttccatggctgcacaacactcaaggggtgcgaggaatggaaacaagaaactgatttcaaagcaaaattgttccaaataatagaaagctgaagaatagaaggatttttaaaaagcaacagctgaaaaatgtgttggtttgtagttttctttttgattctttgttgattratctattgctaatattcacaagtgtttacatccartaatcactgaggttagctcactttggctttgttaatatatttaaattttgtagccactgcagttacgtgatccaggcaaaagaaagcttgaaaaaagtaatatttatttggagaacttgtctcccagaaaagacaatttatttrcaggttggcttaaccttcttgtgttgagccctgtgcgtgacagcagttatgcagagcccacagttttcactggttggatactgcttccataacttaatccagtttacaattacaagttttc

SEQ ID NO: 77579 - DNA, 600 bp, Chicken  19866894366253_2
acctgattttttagaggttctgagtctttcgtggaatactgtctcaaaggcagtattggggcagctgtagtaaaagcatcccagcttccagagatgcttccatggctgcacaacactcaaggggtgcgaggaatggaaacaagaaactgatttcaaagcaaaattgttccaaataatagaaagctgaagaatagaaggatttttaaaaagcaacagctgaaaaatgtgttggtttgtagttttctttttgattctttgttgattratctattgctaatattcacaagtgtttacatccartaatcactgaggttagctcactttggctttgttaatatatttaaattttgtagccactgcagttacgtgatccaggcaaaagaaagcttgaaaaaagtaatatttatttggagaacttgtctcccagaaaagacaatttatttrcaggttggcttaaccttcttgtgttgagccctgtgcgtgacagcagttatgcagagcccacagttttcactggttggatactgcttccataacttaatccagtttacaattacaagttttcccaccaccttcctgtcatctaactatgaattatcc

SEQ ID NO: 77580 - DNA, 600 bp, Chicken  19866894366253_3
aactgatttcaaagcaaaattgttccaaataatagaaagctgaagaatagaaggatttttaaaaagcaacagctgaaaaatgtgttggtttgtagttttctttttgattctttgttgattratctattgctaatattcacaagtgtttacatccartaatcactgaggttagctcactttggctttgttaatatatttaaattttgtagccactgcagttacgtgatccaggcaaaagaaagcttgaaaaaagtaatatttatttggagaacttgtctcccagaaaagacaatttatttrcaggttggcttaaccttcttgtgttgagccctgtgcgtgacagcagttatgcagagcccacagttttcactggttggatactgcttccataacttaatccagtttacaattacaagttttcccaccaccttcctgtcatctaactatgaattatcctttcatcatgcacattggtttctaagatgctatgttttcgatcagatgcaagaagttccttctttcctttttgaaggcagggatgcagtcaacaatcttcaacaggagatgatccagcaatctttggcaggagatgaggaatgg

SEQ ID NO: 77581 - DNA, 600 bp, Chicken  19866894366256_1
ctcaaagcttttcccagaacaaaatattagttttaagaacggacctaacaagctgggatctgctcgaaccattttctgtttcttctttttcttcccactctgtacagcttcaaaattcgattgctggttgttactctgattggtctgaaagactgaatgtagcgaactgtggttcattccccacaccgaatcctacaaaacaaagacagtattataaaatgacgttttctttacctatacttaaaccaaattgctttctacaacacatggggtagcgtgaagccactgatacatccatcyaatacacctatcccatctccttacgtgtatcagcrtgcgaagggactatttgttccacagctggcctcagctgytaattataaaggatattkgattctgcagtacatatgtgaaatctgctttatcctctgtaattcasatgacctgtaaagtcctgctcaaagtcaccaattagaaaagctgactcctcagactgaaacacagaaattatgtattcctaaatagtacagcatgcaagatgtacctgttgctgttgctgctgccgctgctgactggctttctgtttggcacggcgctcaa

SEQ ID NO: 77582 - DNA, 600 bp, Chicken  19866894366256_2
agaacggacctaacaagctgggatctgctcgaaccattttctgtttcttctttttcttcccactctgtacagcttcaaaattcgattgctggttgttactctgattggtctgaaagactgaatgtagcgaactgtggttcattccccacaccgaatcctacaaaacaaagacagtattataaaatgacgttttctttacctatacttaaaccaaattgctttctacaacacatggggtagcgtgaagccactgatacatccatcyaatacacctatcccatctccttacgtgtatcagcrtgcgaagggactatttgttccacagctggcctcagctgytaattataaaggatattkgattctgcagtacatatgtgaaatctgctttatcctctgtaattcasatgacctgtaaagtcctgctcaaagtcaccaattagaaaagctgactcctcagactgaaacacagaaattatgtattcctaaatagtacagcatgcaagatgtacctgttgctgttgctgctgccgctgctgactggctttctgtttggcacggcgctcaagaaactgcttggcaaactccttggcctcaggagta

SEQ ID NO: 77583 - DNA, 600 bp, Chicken  19866894366256_3
tctgtttcttctttttcttcccactctgtacagcttcaaaattcgattgctggttgttactctgattggtctgaaagactgaatgtagcgaactgtggttcattccccacaccgaatcctacaaaacaaagacagtattataaaatgacgttttctttacctatacttaaaccaaattgctttctacaacacatggggtagcgtgaagccactgatacatccatcyaatacacctatcccatctccttacgtgtatcagcrtgcgaagggactatttgttccacagctggcctcagctgytaattataaaggatattkgattctgcagtacatatgtgaaatctgctttatcctctgtaattcasatgacctgtaaagtcctgctcaaagtcaccaattagaaaagctgactcctcagactgaaacacagaaattatgtattcctaaatagtacagcatgcaagatgtacctgttgctgttgctgctgccgctgctgactggctttctgtttggcacggcgctcaagaaactgcttggcaaactccttggcctcaggagtatctccaagatacgctctgatgtaatcgtggacctcatag

SEQ ID NO: 77584 - DNA, 600 bp, Chicken  19866894366256_4
tcccactctgtacagcttcaaaattcgattgctggttgttactctgattggtctgaaagactgaatgtagcgaactgtggttcattccccacaccgaatcctacaaaacaaagacagtattataaaatgacgttttctttacctatacttaaaccaaattgctttctacaacacatggggtagcgtgaagccactgatacatccatcyaatacacctatcccatctccttacgtgtatcagcrtgcgaagggactatttgttccacagctggcctcagctgytaattataaaggatattkgattctgcagtacatatgtgaaatctgctttatcctctgtaattcasatgacctgtaaagtcctgctcaaagtcaccaattagaaaagctgactcctcagactgaaacacagaaattatgtattcctaaatagtacagcatgcaagatgtacctgttgctgttgctgctgccgctgctgactggctttctgtttggcacggcgctcaagaaactgcttggcaaactccttggcctcaggagtatctccaagatacgctctgatgtaatcgtggacctcatagggagactctacttccttc

SEQ ID NO: 77585 - DNA, 600 bp, Chicken  19866894366256_5
ttggtctgaaagactgaatgtagcgaactgtggttcattccccacaccgaatcctacaaaacaaagacagtattataaaatgacgttttctttacctatacttaaaccaaattgctttctacaacacatggggtagcgtgaagccactgatacatccatcyaatacacctatcccatctccttacgtgtatcagcrtgcgaagggactatttgttccacagctggcctcagctgytaattataaaggatattkgattctgcagtacatatgtgaaatctgctttatcctctgtaattcasatgacctgtaaagtcctgctcaaagtcaccaattagaaaagctgactcctcagactgaaacacagaaattatgtattcctaaatagtacagcatgcaagatgtacctgttgctgttgctgctgccgctgctgactggctttctgtttggcacggcgctcaagaaactgcttggcaaactccttggcctcaggagtatctccaagatacgctctgatgtaatcgtggacctcatagggagactctacttccttcaggaaagaaacaaacgtgggaactgcaaaaagaaggcagaccatgag

SEQ ID NO: 77586 - DNA, 600 bp, Chicken  19866894366260_1
ccttgccttgccttgcctagtcttgccctgcctggcctggacttgccttgccttggctggacttgccctgcctggcctggacttgccttgccttgccttgcatggcctggacttgccttgccttgcctggacttgccctgcctggcctgcatggccttgcctggccttgctttgccttgcctagcctggcctggccctgccttgagttgccttgctctgccaggcctggacttgtcttgtgttaccagcccttgccttgccttgcctagtcttgccctgtcaggcatggacttgacttgmcttgcctggccttgcattgccttgcttttcatagtcttgccctgccttgcgtggacttgtcttgtctagcgtttccttccctggctgggactggcctttccctgcgtggccaggacttgccttgccttgcctggacttgccctgcctggcctggacttgccctgcctggcctgcatggcctggcctggccatgcwttgccttgccttgactggcctagccctggcttgagttgtctcgctctgccaggcctggacttgtcttgtgttgcctggccttgccttgccttgcctagtcttgcc

SEQ ID NO: 77587 - DNA, 600 bp, Chicken  19866894366260_2
cctgccttgagttgccttgctctgccaggcctggacttgtcttgtgttaccagcccttgccttgccttgcctagtcttgccctgtcaggcatggacttgacttgmcttgcctggccttgcattgccttgcttttcatagtcttgccctgccttgcgtggacttgtcttgtctagcgtttccttccctggctgggactggcctttccctgcgtggccaggacttgccttgccttgcctggacttgccctgcctggcctggacttgccctgcctggcctgcatggcctggcctggccatgcwttgccttgccttgactggcctagccctggcttgagttgtctcgctctgccaggcctggacttgtcttgtgttgcctggccttgccttgccttgcctagtcttgccaggcctggcctggacttgccttgccttgccttgcatggcctggacttgccttgccttgctttgcctggacttgccctgcctggcctggtcttgccttgccttgcctggacttgccctgcctgacctgcatggcctggcctggccttattttgccttgcctagcctggcctagccctgccttgagttgccttgctc

SEQ ID NO: 77588 - DNA, 599 bp, Chicken  19866894366264_1
  misc_feature (1)..(99): n is any nucleotide
nnnnnnnnnnnnnnnnnnnnnnnnnnnnnnnnnnnnnnnnnnnnnnnnnnnnnnnnnnnnnnnnnnnnnnnnnnnnnnnnnnnnnnnnnnnnnnnnnnncgcaccggagagccatataaagtcttcccctatatattgccttctgcctacataacagatgactgacacatctgctggtgtctattccaagctctataacagccaaaaggaaagcaggctctcaagcactttcttgtactcccaagtctatggacagtctcagaacagtacctgaaagaggttcaagtgctaggggaaagmaattaccctctggtgctttggaaaatactaaagcctgcaggagtatgagaagtacacctggcccgggctgccctcagactcaagacagcaaacctcagctccagccktcctcatrcttccactatgagaaaacaaaaaccacaaaaacaaacaaaaaacctgttatttcataacagaatgagaaaatggtgaagatacaaaagaaatggactcaaaccaacctttaaagagagaagcaggggatggattttcatttatttgcaaaaatgacaatagccaaatccctcaacatgargrca

SEQ ID NO: 77589 - DNA, 600 bp, Chicken  19866894366264_2
agagccatataaagtcttcccctatatattgccttctgcctacataacagatgactgacacatctgctggtgtctattccaagctctataacagccaaaaggaaagcaggctctcaagcactttcttgtactcccaagtctatggacagtctcagaacagtacctgaaagaggttcaagtgctaggggaaagmaattaccctctggtgctttggaaaatactaaagcctgcaggagtatgagaagtacacctggcccgggctgccctcagactcaagacagcaaacctcagctccagccktcctcatrcttccactatgagaaaacaaaaaccacaaaaacaaacaaaaaacctgttatttcataacagaatgagaaaatggtgaagatacaaaagaaatggactcaaaccaacctttaaagagagaagcaggggatggattttcatttatttgcaaaaatgacaatagccaaatccctcaacatgargrcagaatcttcgagccttgctcttggaagatgccaggagatcagctttgcctacttacttggttctgcctacatagtcagaaataacctgaccagttycccccccccaacc

SEQ ID NO: 77590 - DNA, 600 bp, Chicken  19866894366264_3
ataaagtcttcccctatatattgccttctgcctacataacagatgactgacacatctgctggtgtctattccaagctctataacagccaaaaggaaagcaggctctcaagcactttcttgtactcccaagtctatggacagtctcagaacagtacctgaaagaggttcaagtgctaggggaaagmaattaccctctggtgctttggaaaatactaaagcctgcaggagtatgagaagtacacctggcccgggctgccctcagactcaagacagcaaacctcagctccagccktcctcatrcttccactatgagaaaacaaaaaccacaaaaacaaacaaaaaacctgttatttcataacagaatgagaaaatggtgaagatacaaaagaaatggactcaaaccaacctttaaagagagaagcaggggatggattttcatttatttgcaaaaatgacaatagccaaatccctcaacatgargrcagaatcttcgagccttgctcttggaagatgccaggagatcagctttgcctacttacttggttctgcctacatagtcagaaataacctgaccagttycccccccccaaccatcagggt

SEQ ID NO: 77591 - DNA, 600 bp, Chicken  19866894366264_4
aaagmaattaccctctggtgctttggaaaatactaaagcctgcaggagtatgagaagtacacctggcccgggctgccctcagactcaagacagcaaacctcagctccagccktcctcatrcttccactatgagaaaacaaaaaccacaaaaacaaacaaaaaacctgttatttcataacagaatgagaaaatggtgaagatacaaaagaaatggactcaaaccaacctttaaagagagaagcaggggatggattttcatttatttgcaaaaatgacaatagccaaatccctcaacatgargrcagaatcttcgagccttgctcttggaagatgccaggagatcagctttgcctacttacttggttctgcctacatagtcagaaataacctgaccagttycccccccccaaccatcagggttgtagaatacaaccctaagagtccaaaaagcaaaagagaatgtgtattctatcatctcccacactgtggtttttgtactgctagctctcttcagggattttccacagaattattcactagtcattgcagtgctcataaaacactttttaatcatgtatttgttccaactatcttaaaatg

SEQ ID NO: 77592 - DNA, 600 bp, Chicken  19866894366264_5
agmaattaccctctggtgctttggaaaatactaaagcctgcaggagtatgagaagtacacctggcccgggctgccctcagactcaagacagcaaacctcagctccagccktcctcatrcttccactatgagaaaacaaaaaccacaaaaacaaacaaaaaacctgttatttcataacagaatgagaaaatggtgaagatacaaaagaaatggactcaaaccaacctttaaagagagaagcaggggatggattttcatttatttgcaaaaatgacaatagccaaatccctcaacatgargrcagaatcttcgagccttgctcttggaagatgccaggagatcagctttgcctacttacttggttctgcctacatagtcagaaataacctgaccagttycccccccccaaccatcagggttgtagaatacaaccctaagagtccaaaaagcaaaagagaatgtgtattctatcatctcccacactgtggtttttgtactgctagctctcttcagggattttccacagaattattcactagtcattgcagtgctcataaaacactttttaatcatgtatttgttccaactatcttaaaatgag

SEQ ID NO: 77593 - DNA, 600 bp, Chicken  19866894366264_6
tcagctccagccktcctcatrcttccactatgagaaaacaaaaaccacaaaaacaaacaaaaaacctgttatttcataacagaatgagaaaatggtgaagatacaaaagaaatggactcaaaccaacctttaaagagagaagcaggggatggattttcatttatttgcaaaaatgacaatagccaaatccctcaacatgargrcagaatcttcgagccttgctcttggaagatgccaggagatcagctttgcctacttacttggttctgcctacatagtcagaaataacctgaccagttycccccccccaaccatcagggttgtagaatacaaccctaagagtccaaaaagcaaaagagaatgtgtattctatcatctcccacactgtggtttttgtactgctagctctcttcagggattttccacagaattattcactagtcattgcagtgctcataaaacactttttaatcatgtatttgttccaactatcttaaaatgagaactagtgtcactttcataaatgcctgactttattagctgtctgatacatcaaacttataaatgtgggttcatgacttcagatgcagtattttaata

SEQ ID NO: 77594 - DNA, 600 bp, Chicken  19866894366264_7
ccaactatcttaaaatgagaactagtgtcactttcataaatgcctgactttattagctgtctgatacatcaaacttataaatgtgggttcatgacttcagatgcagtattttaatacttccttgtgagcatttcaaagaaaaacagaagttctgagccatttcaaatctttcagagtacaagaataggttccatctcccaacaaaaacaccccatgtgttcttcctcagtgtagctgcaataactgaacttggaagctcaagaaatgtgagctatagggcttatacagagcaagcaaacygaaaatgaagaatcattgtatgaagaatatgcaacttcttccagttacaggaattcattcctcagtactactccacagcctcgctcattagaaacacctaatccactgaacaagcaaccatttatttctccttctgatttcttagtcctgagaagaagaacagaaaatatgatcttctccgaataatttatgaaattctcacatgatcacttctaactgaaatcctgttccaacacaaagtatggtgacaatccagaacaaaaaggaagcacaagtagggaaaactggaacttacagaaa

SEQ ID NO: 77595 - DNA, 600 bp, Chicken  19866894366272_1
gtcacggcagggacaagaaagagttgtatttgggtgaaggggaagggaggatgagagatgagcagaaagcatcactggagcatggactggaagctctggcatgcatcagatgtgtgagctcttaatgttattgctgcagcagactgtatggacaagagcacacatctgtgtgactatacttcatgaactctgctgcttgttctcaccttagggagtccttcagacaccagcaccctaaatggagtgtccactgccagaatctgtgcttcttctgtcaccccagtgctggtcaggacatcrtgagtatcagctgtcaatgaaccctgtaacatcaataaaaacccatggttctgtgtggccatgaaccacaaatgcaaaaagatagattctaatggcttatttctgcccatcaccctggcactccagaagtctctgtcccacctgctagccttcctataccaagatggagacagtaataagcaatccttgctcaccatttcatagaatcatagaatcattgcatagttcccactgagggacaacacgtcaatgatcttcatctggatgttgagccattgactgtcactctctttcttttcc

SEQ ID NO: 77596 - DNA, 600 bp, Chicken  19866894366280_1
agatttatgtaaaagctctgtgcagttatctgtatgttcctttgctgcggtttagtatgaattcagagactatggatagttggaatacagataatgggaggcagaagtccttctgatttgctgtgcagtggctgaaatttcacttattttctctgttttcttctaatacatacatacatacatttagctatcccatccatccatctagtcacatccatccatatatacaagcatgtatgtatatatctatgtgtatatatgtaaatatatgtatatatatatatatatatatatgtgcaytgcctcatgcatatctttcagaagctctttgaacaattttgggagctagtgatatttacttcataatacctggaagaaaagtggaaaatactgggggttttgctattcacaacaaattattggctacttccccagatttagtttaaaaaaaaaaaaaaaaaatctcgtaggaacctttatcaatttgttaatctaggtaccttacaaattttcaaattttcaaagtagattgctacagacagcaccacaaaaccacaatatatttatatactatcactttatttaacaggtctatggaaa

SEQ ID NO: 77597 - DNA, 600 bp, Chicken  19866894366287_1
gccttccgcacagtcatcaccacagatatttgccatagaaagtgaagcacaggagtgtttacaaaaagaagagcactgatgataaagcataccactgtgacacatcgcagctggagaaaagagagagggagagagaagagcgaacagcatattcttaaaacatgaaaaataaaaaaaacaagacaatatattgtaggagatcaaagcagcaatgcaaaatgatcttttgctgttctggaatgagttaaaatacgtgacaaaaatctactgttctattcatttctaaaattagaaatgttyggaatggccttatgttagaaaaaatccttagctggatgtaggcagtgtctattttctgtttctgcataaatgtgtgagtggtgtgtgtttatttatcacctaattcagactttcacragaggagaaattgtccagttaaaattaaggcattaccctataatctagaaattccctgttataatccctgctgtgccacagrtatgctatatcctgtttgtcatatccctggaccactctgctctgcctccccagaaakccccttccaccctgtctcaccttcccttatggaacagccttgat

SEQ ID NO: 77598 - DNA, 600 bp, Chicken  19866894366287_2
aaagagagagggagagagaagagcgaacagcatattcttaaaacatgaaaaataaaaaaaacaagacaatatattgtaggagatcaaagcagcaatgcaaaatgatcttttgctgttctggaatgagttaaaatacgtgacaaaaatctactgttctattcatttctaaaattagaaatgttyggaatggccttatgttagaaaaaatccttagctggatgtaggcagtgtctattttctgtttctgcataaatgtgtgagtggtgtgtgtttatttatcacctaattcagactttcacragaggagaaattgtccagttaaaattaaggcattaccctataatctagaaattccctgttataatccctgctgtgccacagrtatgctatatcctgtttgtcatatccctggaccactctgctctgcctccccagaaakccccttccaccctgtctcaccttcccttatggaacagccttgattctgtcaccccgtgatgctggtagcactagctatagccatgctgaccactgtagcctaatatgggcttccatatgagtgagagcctcaaggttagaaatktaagctccttctgtagc

SEQ ID NO: 77599 - DNA, 600 bp, Chicken  19866894366287_3
atcaaagcagcaatgcaaaatgatcttttgctgttctggaatgagttaaaatacgtgacaaaaatctactgttctattcatttctaaaattagaaatgttyggaatggccttatgttagaaaaaatccttagctggatgtaggcagtgtctattttctgtttctgcataaatgtgtgagtggtgtgtgtttatttatcacctaattcagactttcacragaggagaaattgtccagttaaaattaaggcattaccctataatctagaaattccctgttataatccctgctgtgccacagrtatgctatatcctgtttgtcatatccctggaccactctgctctgcctccccagaaakccccttccaccctgtctcaccttcccttatggaacagccttgattctgtcaccccgtgatgctggtagcactagctatagccatgctgaccactgtagcctaatatgggcttccatatgagtgagagcctcaaggttagaaatktaagctccttctgtagccaamagaaagggacaggcacctctgtcaggcagctcagggtctccaactcagatgcctaacataaaggctaccagcattctc

SEQ ID NO: 77600 - DNA, 596 bp, Chicken  19866894366287_4
acaaaaatctactgttctattcatttctaaaattagaaatgttyggaatggccttatgttagaaaaaatccttagctggatgtaggcagtgtctattttctgtttctgcataaatgtgtgagtggtgtgtgtttatttatcacctaattcagactttcacragaggagaaattgtccagttaaaattaaggcattaccctataatctagaaattccctgttataatccctgctgtgccacagrtatgctatatcctgtttgtcatatccctggaccactctgctctgcctccccagaaakccccttccaccctgtctcaccttcccttatggaacagccttgattctgtcaccccgtgatgctggtagcactagctatagccatgctgaccactgtagcctaatatgggcttccatatgagtgagagcctcaaggttagaaatktaagctccttctgtagccaamagaaagggacaggcacctctgtcaggcagctcagggtctccaactcagatgcctaacataaaggctaccagcattctcctctgagtgtgtcattcacccttagcacaactctagcttccataaaaagacat

SEQ ID NO: 77601 - DNA, 452 bp, Chicken  19866894366287_5
taattcagactttcacragaggagaaattgtccagttaaaattaaggcattaccctataatctagaaattccctgttataatccctgctgtgccacagrtatgctatatcctgtttgtcatatccctggaccactctgctctgcctccccagaaakccccttccaccctgtctcaccttcccttatggaacagccttgattctgtcaccccgtgatgctggtagcactagctatagccatgctgaccactgtagcctaatatgggcttccatatgagtgagagcctcaaggttagaaatktaagctccttctgtagccaamagaaagggacaggcacctctgtcaggcagctcagggtctccaactcagatgcctaacataaaggctaccagcattctcctctgagtgtgtcattcacccttagcacaactctagcttccataaaaagacat

SEQ ID NO: 77602 - DNA, 431 bp, Chicken  19866894366287_6
gagaaattgtccagttaaaattaaggcattaccctataatctagaaattccctgttataatccctgctgtgccacagrtatgctatatcctgtttgtcatatccctggaccactctgctctgcctccccagaaakccccttccaccctgtctcaccttcccttatggaacagccttgattctgtcaccccgtgatgctggtagcactagctatagccatgctgaccactgtagcctaatatgggcttccatatgagtgagagcctcaaggttagaaatktaagctccttctgtagccaamagaaagggacaggcacctctgtcaggcagctcagggtctccaactcagatgcctaacataaaggctaccagcattctcctctgagtgtgtcattcacccttagcacaactctagcttccataaaaagacat

SEQ ID NO: 77603 - DNA, 600 bp, Chicken  19866894366288_1
aggcaaaagagcttcatgtattatttcaggacctttttgcaaactcccttgtagcctgccaacccatttggctgaaacacatctatttctgcataactcctagccattccagacagagggataaaggctgtgattcactgtgattctcccagctgggatcaatggcttctactacccagtagatattcagtctctgtccggatcctggttattattttagaagcagctattggcatactgaaagctaaaacttaatttggtcactgaaaactgaatggctgtgctgaatcacactcctgsattcatgtgctggtacaggaaaattagagaagattattcagctttgtacatatgagatggtcatctgcasatccataattttcccaagaggcagtagttattcatggaataatatttggtgaggaagctgccttgttacttcaagtgatagcgcttggtcagactagatcatctccttgaagaagcagagcacaatgttyccttttgaaaaatgctatcctggctgttgtggattttcagtaactgttcagttaaggaaccaaggacaagtatttcctaaggactttgtatatgtaatta

SEQ ID NO: 77604 - DNA, 600 bp, Chicken  19866894366288_2
gctgaaacacatctatttctgcataactcctagccattccagacagagggataaaggctgtgattcactgtgattctcccagctgggatcaatggcttctactacccagtagatattcagtctctgtccggatcctggttattattttagaagcagctattggcatactgaaagctaaaacttaatttggtcactgaaaactgaatggctgtgctgaatcacactcctgsattcatgtgctggtacaggaaaattagagaagattattcagctttgtacatatgagatggtcatctgcasatccataattttcccaagaggcagtagttattcatggaataatatttggtgaggaagctgccttgttacttcaagtgatagcgcttggtcagactagatcatctccttgaagaagcagagcacaatgttyccttttgaaaaatgctatcctggctgttgtggattttcagtaactgttcagttaaggaaccaaggacaagtatttcctaaggactttgtatatgtaattatgaacttcatttatttattaaattgatggcttcttataggcttaatgaattgttggtattgatcgccctt

SEQ ID NO: 77605 - DNA, 600 bp, Chicken  19866894366288_3
gatcctggttattattttagaagcagctattggcatactgaaagctaaaacttaatttggtcactgaaaactgaatggctgtgctgaatcacactcctgsattcatgtgctggtacaggaaaattagagaagattattcagctttgtacatatgagatggtcatctgcasatccataattttcccaagaggcagtagttattcatggaataatatttggtgaggaagctgccttgttacttcaagtgatagcgcttggtcagactagatcatctccttgaagaagcagagcacaatgttyccttttgaaaaatgctatcctggctgttgtggattttcagtaactgttcagttaaggaaccaaggacaagtatttcctaaggactttgtatatgtaattatgaacttcatttatttattaaattgatggcttcttataggcttaatgaattgttggtattgatcgccctttttttttatactgcttgcaagcagtcttgtaatagtctttatcacacagtcagaatctcctgatcatccatggcgttatgtttggagagaaaggaagcaatgtgcaacctagatttttctgccctctcag

SEQ ID NO: 77606 - DNA, 599 bp, Chicken  19866894366295_1
  misc_feature (1)..(125): n is any nucleotide
nnnnnnnnnnnnnnnnnnnnnnnnnnnnnnnnnnnnnnnnnnnnnnnnnnnnnnnnnnnnnnnnnnnnnnnnnnnnnnnnnnnnnnnnnnnnnnnnnnnnnnnnnnnnnnnnnnnnnnnnnnnnnaatgtgtaatattttttaaaaatctgataaaaaactggttgctgaaattcatgccattacatctttgtacaaatgaaaatgctatttatttacatcacaatctagcctttgaaatgtgcgagggcttctctgaaagtaatgcatcctattttattatgttggcccatgacattaraggcatcgagctgacacagaggttgaaccttcacaccaatatcccattacatgttgctgctgcgtgatagatggcagcagagggrcagtctgacaaaatggcatctgacatggaagtgtggatgaagcaaaggtgtgtaactgaattcctycacgtggaaaaaaatggcayycactgtcattcattgattcttgcagatcatttatggagacaaaacagtggatttcagaacagtgaggtggtgggtagtgcatttcagcagaggcgaaagcaacgtgaaagataagcaatgttkcaga

SEQ ID NO: 77607 - DNA, 599 bp, Chicken  19866894366295_2
  misc_feature (1)..(40): n is any nucleotide
nnnnnnnnnnnnnnnnnnnnnnnnnnnnnnnnnnnnnnnnaatgtgtaatattttttaaaaatctgataaaaaactggttgctgaaattcatgccattacatctttgtacaaatgaaaatgctatttatttacatcacaatctagcctttgaaatgtgcgagggcttctctgaaagtaatgcatcctattttattatgttggcccatgacattaraggcatcgagctgacacagaggttgaaccttcacaccaatatcccattacatgttgctgctgcgtgatagatggcagcagagggrcagtctgacaaaatggcatctgacatggaagtgtggatgaagcaaaggtgtgtaactgaattcctycacgtggaaaaaaatggcayycactgtcattcattgattcttgcagatcatttatggagacaaaacagtggatttcagaacagtgaggtggtgggtagtgcatttcagcagaggcgaaagcaacgtgaaagataagcaatgttkcagatgtccatgcagatttttatgagtacagcatgyaggctcctgttcattgctagcaaaaatgtacagctaatggtggtgactatgct

SEQ ID NO: 77608 - DNA, 600 bp, Chicken  19866894366295_3
ataaaaaactggttgctgaaattcatgccattacatctttgtacaaatgaaaatgctatttatttacatcacaatctagcctttgaaatgtgcgagggcttctctgaaagtaatgcatcctattttattatgttggcccatgacattaraggcatcgagctgacacagaggttgaaccttcacaccaatatcccattacatgttgctgctgcgtgatagatggcagcagagggrcagtctgacaaaatggcatctgacatggaagtgtggatgaagcaaaggtgtgtaactgaattcctycacgtggaaaaaaatggcayycactgtcattcattgattcttgcagatcatttatggagacaaaacagtggatttcagaacagtgaggtggtgggtagtgcatttcagcagaggcgaaagcaacgtgaaagataagcaatgttkcagatgtccatgcagatttttatgagtacagcatgyaggctcctgttcattgctagcaaaaatgtacagctaatggtggtgactatgctgataacagtgttttgtagctgagaacttgctctatcaaatagtgctactgtgctctttgtatctgtt

SEQ ID NO: 77609 - DNA, 600 bp, Chicken  19866894366295_4
attcatgccattacatctttgtacaaatgaaaatgctatttatttacatcacaatctagcctttgaaatgtgcgagggcttctctgaaagtaatgcatcctattttattatgttggcccatgacattaraggcatcgagctgacacagaggttgaaccttcacaccaatatcccattacatgttgctgctgcgtgatagatggcagcagagggrcagtctgacaaaatggcatctgacatggaagtgtggatgaagcaaaggtgtgtaactgaattcctycacgtggaaaaaaatggcayycactgtcattcattgattcttgcagatcatttatggagacaaaacagtggatttcagaacagtgaggtggtgggtagtgcatttcagcagaggcgaaagcaacgtgaaagataagcaatgttkcagatgtccatgcagatttttatgagtacagcatgyaggctcctgttcattgctagcaaaaatgtacagctaatggtggtgactatgctgataacagtgttttgtagctgagaacttgctctatcaaatagtgctactgtgctctttgtatctgttgtagcttccatggaaataaa

SEQ ID NO: 77610 - DNA, 600 bp, Chicken  19866894366295_5
ttcatgccattacatctttgtacaaatgaaaatgctatttatttacatcacaatctagcctttgaaatgtgcgagggcttctctgaaagtaatgcatcctattttattatgttggcccatgacattaraggcatcgagctgacacagaggttgaaccttcacaccaatatcccattacatgttgctgctgcgtgatagatggcagcagagggrcagtctgacaaaatggcatctgacatggaagtgtggatgaagcaaaggtgtgtaactgaattcctycacgtggaaaaaaatggcayycactgtcattcattgattcttgcagatcatttatggagacaaaacagtggatttcagaacagtgaggtggtgggtagtgcatttcagcagaggcgaaagcaacgtgaaagataagcaatgttkcagatgtccatgcagatttttatgagtacagcatgyaggctcctgttcattgctagcaaaaatgtacagctaatggtggtgactatgctgataacagtgttttgtagctgagaacttgctctatcaaatagtgctactgtgctctttgtatctgttgtagcttccatggaaataaat

SEQ ID NO: 77611 - DNA, 600 bp, Chicken  19866894366295_6
attaraggcatcgagctgacacagaggttgaaccttcacaccaatatcccattacatgttgctgctgcgtgatagatggcagcagagggrcagtctgacaaaatggcatctgacatggaagtgtggatgaagcaaaggtgtgtaactgaattcctycacgtggaaaaaaatggcayycactgtcattcattgattcttgcagatcatttatggagacaaaacagtggatttcagaacagtgaggtggtgggtagtgcatttcagcagaggcgaaagcaacgtgaaagataagcaatgttkcagatgtccatgcagatttttatgagtacagcatgyaggctcctgttcattgctagcaaaaatgtacagctaatggtggtgactatgctgataacagtgttttgtagctgagaacttgctctatcaaatagtgctactgtgctctttgtatctgttgtagcttccatggaaataaataggaggcattatttccagagcaacccatgtatattttcagtgttcagctgccttagcacccatggacctacacctacactgagcaagaggaaatctgtccctcacctatcctctgtaaagctg

SEQ ID NO: 77612 - DNA, 600 bp, Chicken  19866894366295_7
cacaccaatatcccattacatgttgctgctgcgtgatagatggcagcagagggrcagtctgacaaaatggcatctgacatggaagtgtggatgaagcaaaggtgtgtaactgaattcctycacgtggaaaaaaatggcayycactgtcattcattgattcttgcagatcatttatggagacaaaacagtggatttcagaacagtgaggtggtgggtagtgcatttcagcagaggcgaaagcaacgtgaaagataagcaatgttkcagatgtccatgcagatttttatgagtacagcatgyaggctcctgttcattgctagcaaaaatgtacagctaatggtggtgactatgctgataacagtgttttgtagctgagaacttgctctatcaaatagtgctactgtgctctttgtatctgttgtagcttccatggaaataaataggaggcattatttccagagcaacccatgtatattttcagtgttcagctgccttagcacccatggacctacacctacactgagcaagaggaaatctgtccctcacctatcctctgtaaagctggaaaaacatatagttaaaataataattccattgatt

SEQ ID NO: 77613 - DNA, 600 bp, Chicken  19866894366297_1
agagctcattcaattagcgtgatcagtattgctatagctgttattgttctatcagatggctcctctgacattatagcaaaagctgtgcaatgaaatagctattttctcgtagaaacagctatctgccacaagcaaaagcttaaaaatcgtatcccaaaatcattgggcagaatttgccagccctttccatgtgaggcatagatgagagggcggaaggcagggtgaaatgtcaatgtttccatttgctagagagaatgataacattgatacaggcagaaaaagcaagtcattttgtaatgytgattctttcttgacagatggaagtccataaacaaagggatatcccatgtcttccttctacagttaacttttgctgaggacagcaccatccagaggaaagagcagtgacagggcacgtgtctttgttggagcaaattttgcaattctagaatagaatttctgcctctagaaaagttaagaatttttgtttagtataggtttactttttgttttgcattctttttttgtttgtttgtttttccaaataggcctctgaaatacagggaatagtgaaagctcggaagttttcctgggataaat

SEQ ID NO: 77614 - DNA, 599 bp, Chicken  19866894366298_1
  misc_feature (1)..(198): n is any nucleotide
nnnnnnnnnnnnnnnnnnnnnnnnnnnnnnnnnnnnnnnnnnnnnnnnnnnnnnnnnnnnnnnnnnnnnnnnnnnnnnnnnnnnnnnnnnnnnnnnnnnnnnnnnnnnnnnnnnnnnnnnnnnnnnnnnnnnnnnnnnnnnnnnnnnnnnnnnnnnnnnnnnnnnnnnnnnnnnnnnnnnnnnnnnnnnnnnnnnnnnaataggtgaaagacaacagtgaagtgctacacagaagctttttttctgagtacacacaaaaaattatcctaacagaatctccactactctgtattgtgaagrgatttattttctttttcgttttgccatttcattctgttttccttttatctctttccctttctcactttgataatctcactgaattcccactatttcatctccaggtacactaaatatcatagtgtatcttttgctctaatgaagaaattaatacagaaatattataatatttcaacacttatccataactatggggtatcactgcataactatattatataatgtacccatgttctgcaagccagccttgctagtcttcattttattgtytacctctcttacctgttctgtttcattta

SEQ ID NO: 77615 - DNA, 600 bp, Chicken  19866894366298_2
cagaatctccactactctgtattgtgaagrgatttattttctttttcgttttgccatttcattctgttttccttttatctctttccctttctcactttgataatctcactgaattcccactatttcatctccaggtacactaaatatcatagtgtatcttttgctctaatgaagaaattaatacagaaatattataatatttcaacacttatccataactatggggtatcactgcataactatattatataatgtacccatgttctgcaagccagccttgctagtcttcattttattgtytacctctcttacctgttctgtttcatttagtttgatatcatggttctgtwtaacactagaatctcatgattgtggcattgctaaaatgccattgctgttggtcaggtactaatgaacagtgaatgcagttccccaccaaattaggactactgttttaaaagcrgtactctaaaaacaagtcgtggttagagatgtatgtttacactgtgcaccaaaaaaggaaatacasagatcaatctgaaatctataatcattttgcatgtacatagattgttctgaaactaatgcctcctatttatt

SEQ ID NO: 77616 - DNA, 600 bp, Chicken  19866894366298_3
ttgccatttcattctgttttccttttatctctttccctttctcactttgataatctcactgaattcccactatttcatctccaggtacactaaatatcatagtgtatcttttgctctaatgaagaaattaatacagaaatattataatatttcaacacttatccataactatggggtatcactgcataactatattatataatgtacccatgttctgcaagccagccttgctagtcttcattttattgtytacctctcttacctgttctgtttcatttagtttgatatcatggttctgtwtaacactagaatctcatgattgtggcattgctaaaatgccattgctgttggtcaggtactaatgaacagtgaatgcagttccccaccaaattaggactactgttttaaaagcrgtactctaaaaacaagtcgtggttagagatgtatgtttacactgtgcaccaaaaaaggaaatacasagatcaatctgaaatctataatcattttgcatgtacatagattgttctgaaactaatgcctcctatttatttcatggaaactacaacagatacaaaaagcacaataacactattttgtaga

SEQ ID NO: 77617 - DNA, 550 bp, Chicken  19866894366298_4
ctctaatgaagaaattaatacagaaatattataatatttcaacacttatccataactatggggtatcactgcataactatattatataatgtacccatgttctgcaagccagccttgctagtcttcattttattgtytacctctcttacctgttctgtttcatttagtttgatatcatggttctgtwtaacactagaatctcatgattgtggcattgctaaaatgccattgctgttggtcaggtactaatgaacagtgaatgcagttccccaccaaattaggactactgttttaaaagcrgtactctaaaaacaagtcgtggttagagatgtatgtttacactgtgcaccaaaaaaggaaatacasagatcaatctgaaatctataatcattttgcatgtacatagattgttctgaaactaatgcctcctatttatttcatggaaactacaacagatacaaaaagcacaataacactattttgtagaccaaattctcacctacgaaacagtatttttcaacatagtcaccatcattaattatgcattttt

SEQ ID NO: 77618 - DNA, 484 bp, Chicken  19866894366298_5
cactgcataactatattatataatgtacccatgttctgcaagccagccttgctagtcttcattttattgtytacctctcttacctgttctgtttcatttagtttgatatcatggttctgtwtaacactagaatctcatgattgtggcattgctaaaatgccattgctgttggtcaggtactaatgaacagtgaatgcagttccccaccaaattaggactactgttttaaaagcrgtactctaaaaacaagtcgtggttagagatgtatgtttacactgtgcaccaaaaaaggaaatacasagatcaatctgaaatctataatcattttgcatgtacatagattgttctgaaactaatgcctcctatttatttcatggaaactacaacagatacaaaaagcacaataacactattttgtagaccaaattctcacctacgaaacagtatttttcaacatagtcaccatcattaattatgcattttt

SEQ ID NO: 77619 - DNA, 600 bp, Chicken  19866894366302_1
gacccaaaggctctgtgtctgccaaaaatgccttcttgcaggcgggtcggcagcccgggggtgtggcggtgctaccgtggccatggctggagcagcagcgaggcaggggtgccagaagcacttaccctccgcctgcaccctcgctctttgtcccacgcttttacacgctcccaaagaggctggctgccttaaaaccacccctgccagcgctgcccctcaccccagcgccagccccagtgctggctcggccaagtgaagcggcttccaaaatcacttctgtgagctgtgcctcactcagasctgcgtgcttcagaagagacaagagggcaaatggcggccgtgctggcactgctggcccagcaggtctgcgtgtcggccacaagcccagtgctgccaggaaggggggtttgggaagggcttagcagagaaagatacgtaaacttcttgaagaaatcagcagccggacagcattctgargtgactgcaaatgtctctgtttgaggctcggctggagtgcggctttctttccttctgcatctgcaaacgcaaagggaaaggacgtttcattcacagcattgttcacgagggccgcacgtaact

SEQ ID NO: 77620 - DNA, 600 bp, Chicken  19866894366302_2
ggctggctgccttaaaaccacccctgccagcgctgcccctcaccccagcgccagccccagtgctggctcggccaagtgaagcggcttccaaaatcacttctgtgagctgtgcctcactcagasctgcgtgcttcagaagagacaagagggcaaatggcggccgtgctggcactgctggcccagcaggtctgcgtgtcggccacaagcccagtgctgccaggaaggggggtttgggaagggcttagcagagaaagatacgtaaacttcttgaagaaatcagcagccggacagcattctgargtgactgcaaatgtctctgtttgaggctcggctggagtgcggctttctttccttctgcatctgcaaacgcaaagggaaaggacgtttcattcacagcattgttcacgagggccgcacgtaacttctccactcagtaaatatttggggagcaaaccgtgtaagaggctgtgctatcaggcagcagtgggaatgggccgtgctgtgctgtcagcatgggcttagcggggctttttttttgacmgaagcacttaaaggcagcagcagccaaagcaaacagggagattttgctctaaaattgta

SEQ ID NO: 77621 - DNA, 600 bp, Chicken  19866894366302_3
ttagcagagaaagatacgtaaacttcttgaagaaatcagcagccggacagcattctgargtgactgcaaatgtctctgtttgaggctcggctggagtgcggctttctttccttctgcatctgcaaacgcaaagggaaaggacgtttcattcacagcattgttcacgagggccgcacgtaacttctccactcagtaaatatttggggagcaaaccgtgtaagaggctgtgctatcaggcagcagtgggaatgggccgtgctgtgctgtcagcatgggcttagcggggctttttttttgacmgaagcacttaaaggcagcagcagccaaagcaaacagggagattttgctctaaaattgtagcatcacaaractttggaccgggatrtgagctttgggacagctttacaattgctcacaaccttcctcttaagcaatgccttgaggcacagggacagctgggccttgctgcctcttgggcctgtggccagacacacaccaaggcctggagcagtggctttggggaaggcagtgaggggcagcctgggctggcgtcctggggctgggcctcgtcaatggcaaaccaatgcagctggctgtgtt

SEQ ID NO: 77622 - DNA, 600 bp, Chicken  19866894366302_4
atgtctctgtttgaggctcggctggagtgcggctttctttccttctgcatctgcaaacgcaaagggaaaggacgtttcattcacagcattgttcacgagggccgcacgtaacttctccactcagtaaatatttggggagcaaaccgtgtaagaggctgtgctatcaggcagcagtgggaatgggccgtgctgtgctgtcagcatgggcttagcggggctttttttttgacmgaagcacttaaaggcagcagcagccaaagcaaacagggagattttgctctaaaattgtagcatcacaaractttggaccgggatrtgagctttgggacagctttacaattgctcacaaccttcctcttaagcaatgccttgaggcacagggacagctgggccttgctgcctcttgggcctgtggccagacacacaccaaggcctggagcagtggctttggggaaggcagtgaggggcagcctgggctggcgtcctggggctgggcctcgtcaatggcaaaccaatgcagctggctgtgttgtttatgtgcacgtagtccctgctggctcacgttctttaatcaaaacaatgttttttcctaataaatat

SEQ ID NO: 77623 - DNA, 600 bp, Chicken  19866894366302_5
ctcggctggagtgcggctttctttccttctgcatctgcaaacgcaaagggaaaggacgtttcattcacagcattgttcacgagggccgcacgtaacttctccactcagtaaatatttggggagcaaaccgtgtaagaggctgtgctatcaggcagcagtgggaatgggccgtgctgtgctgtcagcatgggcttagcggggctttttttttgacmgaagcacttaaaggcagcagcagccaaagcaaacagggagattttgctctaaaattgtagcatcacaaractttggaccgggatrtgagctttgggacagctttacaattgctcacaaccttcctcttaagcaatgccttgaggcacagggacagctgggccttgctgcctcttgggcctgtggccagacacacaccaaggcctggagcagtggctttggggaaggcagtgaggggcagcctgggctggcgtcctggggctgggcctcgtcaatggcaaaccaatgcagctggctgtgttgtttatgtgcacgtagtccctgctggctcacgttctttaatcaaaacaatgttttttcctaataaatatgtttccttaaggcgtg

SEQ ID NO: 77624 - DNA, 599 bp, Chicken  19866894366310_1
  misc_feature (1)..(43): n is any nucleotide
nnnnnnnnnnnnnnnnnnnnnnnnnnnnnnnnnnnnnnnnnnnttatcaagatttgcatagtactagtgcctcaaatgcaagtttttcctctgtattaggtttacaaaaccaggtttcagttgcagaatggggctgcagaggtggcctctgtgaagagagtccagggctgccccatgatggacacagtcaggtccagctgtggtcccaccacagagcatggttgccaagatggtcgcaccctggggaaaacaactctaaagaagagcaaaatgcttcggtatatttctcatgagaaatgrgggggggggggggggggaacgagacagagagagaaaaaatccagtggaccccagcatcagttaagaaggataggaaggaagtgttccatacacaagagtcaagattcccctgaagcccatggaagaccacactggagcagatatccacaccacagcatgaagaaaatgaatatgcccccgaggaagctgcagcccatggacaggagcccatactggggatggagaaaagcgtggggggaaggtagtagcagagaagagctgttacaggctgaccacagtttgagatgtaagggtaaagg

SEQ ID NO: 77625 - DNA, 600 bp, Chicken  19866894366314_1
tgagagcaatctctacagttgtattttacattgcagtgtgctcacagctaccactcatggcagtatttctttagaggcacagtagaataccaatagctctgaaaaactcagagctgaattttcatatatttgaaacacagtacttgtgacattatggtatctgttactccttggcaacatctaacattaacatttttgtatgtaaatcacttacatacagtgatgacaccacacccagagaaccacatcttattttcaacgtttcagaaagacatagataagctgaatcaagtccagctygagttcagccagttacattttaggaataacaaagtcaccacagacacagttaaaattcgaatcaagttgcccagaaaggctgtagaaccaccatcctcagagattttcaaaacccacctagacaaagcaacttggaaggtagctccctgtgaggtttgcmttgctttgaggaccagactaccttcagasatccccctctacctgacttattctgcgattttattgatttgaaatgagaattagacctagaggacatcatgttagaatagccataagaatttagacaatttaaaatgaaga

SEQ ID NO: 77626 - DNA, 600 bp, Chicken  19866894366314_2
ctgttactccttggcaacatctaacattaacatttttgtatgtaaatcacttacatacagtgatgacaccacacccagagaaccacatcttattttcaacgtttcagaaagacatagataagctgaatcaagtccagctygagttcagccagttacattttaggaataacaaagtcaccacagacacagttaaaattcgaatcaagttgcccagaaaggctgtagaaccaccatcctcagagattttcaaaacccacctagacaaagcaacttggaaggtagctccctgtgaggtttgcmttgctttgaggaccagactaccttcagasatccccctctacctgacttattctgcgattttattgatttgaaatgagaattagacctagaggacatcatgttagaatagccataagaatttagacaatttaaaatgaagaatcccaagacatttttcttctgcagccaaatgcctgcaaaactccgtgaaaaaaacgtgtctcattccccctctagtggctggtacacaaaggacaactaaccactgcaaccaattcgtaaactaacagcaagtacctgacaagtaaaagataattactg

SEQ ID NO: 77627 - DNA, 600 bp, Chicken  19866894366314_3
acatttttgtatgtaaatcacttacatacagtgatgacaccacacccagagaaccacatcttattttcaacgtttcagaaagacatagataagctgaatcaagtccagctygagttcagccagttacattttaggaataacaaagtcaccacagacacagttaaaattcgaatcaagttgcccagaaaggctgtagaaccaccatcctcagagattttcaaaacccacctagacaaagcaacttggaaggtagctccctgtgaggtttgcmttgctttgaggaccagactaccttcagasatccccctctacctgacttattctgcgattttattgatttgaaatgagaattagacctagaggacatcatgttagaatagccataagaatttagacaatttaaaatgaagaatcccaagacatttttcttctgcagccaaatgcctgcaaaactccgtgaaaaaaacgtgtctcattccccctctagtggctggtacacaaaggacaactaaccactgcaaccaattcgtaaactaacagcaagtacctgacaagtaaaagataattactgcatactgcatctcagtgggatgtgtttat

SEQ ID NO: 77628 - DNA, 600 bp, Chicken  19866894366319_1
tgaattctttaaaatctatgcatgtctccccctctgcagtgactacaaatagagcctatataaccactcgaatttgaatgctcccatgttagatagctaaacttaggctgagacatgccccacctatcttattgacaagacaaaataattcattaatagcgcagcatgtgtctttactgttactgtacactatcctgaaatctttcccaaagcatctctggttgcactgagactggttttaaggaacccaaatactgggcagtaggaatagggaatgtggctggaaatccattaaaaatraacttgttaacgtgtttctcattgtctctgagataaccataacaggtacagagaaactaaataattaaaatgttgagttataataactcattttctgaacaacttaagaaagacacggatggaaggcaacgttgccattttggaactactccttaacaaaattttagtattcctatactgccaaaggctgaaatgccagctggaaagcaacatgacaaataaaggcaaggacactgtggcacgcactgctaatacagacaggtgagctgcaggtttcaggaatcctatctctagaattaa

SEQ ID NO: 77629 - DNA, 600 bp, Chicken  19866894366320_1
taggaaaattgctcttggatcctatggatgtcaagagggagggaaagtgccccagtgcttgaaattttcaaagtcgactggagcatggagatcatccattgtcccagtaattaaatatcacaggcacatgtcatacacagctcagtccagcagtaggcatccagtgccacctatgttctgcttgttctgagcccaagatgaaaaccagcccaagttgggaaggagctgcgttgttctcctttatctgacagtccatctttcccttgcaggttgagcacaatgaacacatgttgagcacaygtgttgtctgggttccccattgatctaccattatatgttcatccattgctgtgtacaccaacttacagccttatgggatgtagtcacatcctagccatcatctagaataatggattcttatttaattcataggacataaaccagtgaagtagcacaaattactacaaacatgtctgtatgagtgaataaaagatatgtccaaatcacttcagctagtctaaaattctagggtggggaaagtttcaggttgaagaggcttgaccaaatcacaaaatgctcaaacgatgatacagttctcta

SEQ ID NO: 77630 - DNA, 599 bp, Chicken  19866894366326_1
  misc_feature (1)..(56): n is any nucleotide
nnnnnnnnnnnnnnnnnnnnnnnnnnnnnnnnnnnnnnnnnnnnnnnnnnnnnnnntaaacaagttggagaggtctcaagagaacagctgatcatcagccctgcactgaggcaggcacaggaatacctgtcttgtccccaacagacgtttttcctatttgttcttaaaggtcttcagtgaaggagatttcatatctctaaagcaaactcatgccctaaatttaggtggtttttttcccgttctttttttcccccttttctgtataacttttctccttcgcaaatctggctgatttctgtsttcaatttctgaaaagaaaactaacaaaattccttacactagtagagaataaacagaggtagagtgatgctcttcatcagggtttaatccatggagttgaatgcgatttcccgtgaccaccatgactaccatgacagtagtattgcagacattgcttccactaatgtaacctctcatgctcatgtttaaagacgatgtatattcgtaatgcaaatgagtcgttaatactgtgtatcagctaggttataaatctgttcgaacactcatctctwtgctgcagattgggctgtgaaccggag

SEQ ID NO: 77631 - DNA, 600 bp, Chicken  19866894366326_2
tccttcgcaaatctggctgatttctgtsttcaatttctgaaaagaaaactaacaaaattccttacactagtagagaataaacagaggtagagtgatgctcttcatcagggtttaatccatggagttgaatgcgatttcccgtgaccaccatgactaccatgacagtagtattgcagacattgcttccactaatgtaacctctcatgctcatgtttaaagacgatgtatattcgtaatgcaaatgagtcgttaatactgtgtatcagctaggttataaatctgttcgaacactcatctctwtgctgcagattgggctgtgaaccggagtgataatgctcattgccaccaatacttaaaactgcttctttatagaaatcatccagcttctgtaggcgaaatgttataggttatgctgtgttggcactgtgggagtcagtgaaattagtcaccaggttaaagacattaatcctttgtttttcagagtggagaccatccgcatcctgctttaatcacagcttygttttttscaggttgtgtgcattcaccctttatttaatggtactctggaaggtaagacgtgcattccacaggagggtgatg

SEQ ID NO: 77632 - DNA, 600 bp, Chicken  19866894366326_3
acgatgtatattcgtaatgcaaatgagtcgttaatactgtgtatcagctaggttataaatctgttcgaacactcatctctwtgctgcagattgggctgtgaaccggagtgataatgctcattgccaccaatacttaaaactgcttctttatagaaatcatccagcttctgtaggcgaaatgttataggttatgctgtgttggcactgtgggagtcagtgaaattagtcaccaggttaaagacattaatcctttgtttttcagagtggagaccatccgcatcctgctttaatcacagcttygttttttscaggttgtgtgcattcaccctttatttaatggtactctggaaggtaagacgtgcattccacaggagggtgatgctccaattgtggcaggtttaaaagctatgaagcaacgttccatgtatttctttgtcttttggaaacaaggaycaatagttggcattctctgatgaagaggtgaattttggtgattgtcagatctgactagagaaatggaaatcctttgaactgagcaataaattattctgttaattacttaattcatgggcacgtgaaagagtcctggaagagttggca

SEQ ID NO: 77633 - DNA, 600 bp, Chicken  19866894366326_4
tattcgtaatgcaaatgagtcgttaatactgtgtatcagctaggttataaatctgttcgaacactcatctctwtgctgcagattgggctgtgaaccggagtgataatgctcattgccaccaatacttaaaactgcttctttatagaaatcatccagcttctgtaggcgaaatgttataggttatgctgtgttggcactgtgggagtcagtgaaattagtcaccaggttaaagacattaatcctttgtttttcagagtggagaccatccgcatcctgctttaatcacagcttygttttttscaggttgtgtgcattcaccctttatttaatggtactctggaaggtaagacgtgcattccacaggagggtgatgctccaattgtggcaggtttaaaagctatgaagcaacgttccatgtatttctttgtcttttggaaacaaggaycaatagttggcattctctgatgaagaggtgaattttggtgattgtcagatctgactagagaaatggaaatcctttgaactgagcaataaattattctgttaattacttaattcatgggcacgtgaaagagtcctggaagagttggcagagcaact

SEQ ID NO: 77634 - DNA, 600 bp, Chicken  19866894366326_5
aaatcatccagcttctgtaggcgaaatgttataggttatgctgtgttggcactgtgggagtcagtgaaattagtcaccaggttaaagacattaatcctttgtttttcagagtggagaccatccgcatcctgctttaatcacagcttygttttttscaggttgtgtgcattcaccctttatttaatggtactctggaaggtaagacgtgcattccacaggagggtgatgctccaattgtggcaggtttaaaagctatgaagcaacgttccatgtatttctttgtcttttggaaacaaggaycaatagttggcattctctgatgaagaggtgaattttggtgattgtcagatctgactagagaaatggaaatcctttgaactgagcaataaattattctgttaattacttaattcatgggcacgtgaaagagtcctggaagagttggcagagcaactgaataactcccaggttcaggctttttattaccattatcttataattgctgattggcacagggttctgcacactgctccctagggaagtcagcagtacgygtgtctgagtggtgagattcctagacagcgatttatgcagtggttt

SEQ ID NO: 77635 - DNA, 600 bp, Chicken  19866894366326_6
atgaagcaacgttccatgtatttctttgtcttttggaaacaaggaycaatagttggcattctctgatgaagaggtgaattttggtgattgtcagatctgactagagaaatggaaatcctttgaactgagcaataaattattctgttaattacttaattcatgggcacgtgaaagagtcctggaagagttggcagagcaactgaataactcccaggttcaggctttttattaccattatcttataattgctgattggcacagggttctgcacactgctccctagggaagtcagcagtacgygtgtctgagtggtgagattcctagacagcgatttatgcagtggttttgatagatagaagaaggcagtaagagtttattagcagagtatcattgttggggggtttggggcatatgaattcccttgctgatgaatgaaaagaataaaaccgaaataagaagagtagcaattgtgaggcaatcatttactctagaaagaaggtggaaatatttgatcatgttcacagctttgtcattttgctttctttgcttgtgactctatcagtagaaaggctgaatatcactaactagaggggaaatcaa

SEQ ID NO: 77636 - DNA, 599 bp, Chicken  19866894366332_1
  misc_feature (1)..(89): n is any nucleotide
nnnnnnnnnnnnnnnnnnnnnnnnnnnnnnnnnnnnnnnnnnnnnnnnnnnnnnnnnnnnnnnnnnnnnnnnnnnnnnnnnnnnnnnnnattctcctccacctcaacgtactagtaagagcagatccgaactgcctcagtgccaggtcattgtacaattgccaagctgtactgaaaattcagcagtggaaaatacctttgtcacagtagctgcaagttccaaacttaagtattcaaataacacattgtcaaaatcaaatttcttggtttagctccattttggcactttgaaccaaatgtrtaattcatgttccacagtatcacctttaaaagacctggaaattttgaaaaggaaaaaayaatgtcacatgataacacactgaacttcccccctctgagttcatcaacgtggttagagtccatagagccttacctctgttctctaccaggctggagaaagccattttcagtgtggattagatatgartgtgatggggacacatacttttctactagagttcatggatatttatgtatcaataaataacaggatcaggtctctgcagtggcgtttttcctggaggccatcactctttcaat

SEQ ID NO: 77637 - DNA, 599 bp, Chicken  19866894366332_2
  misc_feature (1)..(30): n is any nucleotide
nnnnnnnnnnnnnnnnnnnnnnnnnnnnnnattctcctccacctcaacgtactagtaagagcagatccgaactgcctcagtgccaggtcattgtacaattgccaagctgtactgaaaattcagcagtggaaaatacctttgtcacagtagctgcaagttccaaacttaagtattcaaataacacattgtcaaaatcaaatttcttggtttagctccattttggcactttgaaccaaatgtrtaattcatgttccacagtatcacctttaaaagacctggaaattttgaaaaggaaaaaayaatgtcacatgataacacactgaacttcccccctctgagttcatcaacgtggttagagtccatagagccttacctctgttctctaccaggctggagaaagccattttcagtgtggattagatatgartgtgatggggacacatacttttctactagagttcatggatatttatgtatcaataaataacaggatcaggtctctgcagtggcgtttttcctggaggccatcactctttcaatttatctttctctttcacaagtctgaatttaccatccctggccagtttttcacactgtgc

SEQ ID NO: 77638 - DNA, 600 bp, Chicken  19866894366332_3
ggaaaatacctttgtcacagtagctgcaagttccaaacttaagtattcaaataacacattgtcaaaatcaaatttcttggtttagctccattttggcactttgaaccaaatgtrtaattcatgttccacagtatcacctttaaaagacctggaaattttgaaaaggaaaaaayaatgtcacatgataacacactgaacttcccccctctgagttcatcaacgtggttagagtccatagagccttacctctgttctctaccaggctggagaaagccattttcagtgtggattagatatgartgtgatggggacacatacttttctactagagttcatggatatttatgtatcaataaataacaggatcaggtctctgcagtggcgtttttcctggaggccatcactctttcaatttatctttctctttcacaagtctgaatttaccatccctggccagtttttcacactgtgctcttctcaggtttggtyrtcttgcccyttctcagcctcctcaaatttgagtctacctcttgttgttttcctaattttttccagggatgtctagcccaagtatagaggcactaagagaagcttatgaac

SEQ ID NO: 77639 - DNA, 600 bp, Chicken  19866894366332_4
acactgaacttcccccctctgagttcatcaacgtggttagagtccatagagccttacctctgttctctaccaggctggagaaagccattttcagtgtggattagatatgartgtgatggggacacatacttttctactagagttcatggatatttatgtatcaataaataacaggatcaggtctctgcagtggcgtttttcctggaggccatcactctttcaatttatctttctctttcacaagtctgaatttaccatccctggccagtttttcacactgtgctcttctcaggtttggtyrtcttgcccyttctcagcctcctcaaatttgagtctacctcttgttgttttcctaattttttccagggatgtctagcccaagtatagaggcactaagagaagcttatgaacactgtcttctttcatgtgaaagtccttgagtaggcactacagtgcatgcatttgcagatgcctggtgtttctgttaagccaacatgaaaatactggactcactcaaagctgaagatgttggatattaggaaaaacttctccagaagagtgtatgggcactggcacagactgccagcgaggtggtagact

SEQ ID NO: 77640 - DNA, 600 bp, Chicken  19866894366332_5
cactgaacttcccccctctgagttcatcaacgtggttagagtccatagagccttacctctgttctctaccaggctggagaaagccattttcagtgtggattagatatgartgtgatggggacacatacttttctactagagttcatggatatttatgtatcaataaataacaggatcaggtctctgcagtggcgtttttcctggaggccatcactctttcaatttatctttctctttcacaagtctgaatttaccatccctggccagtttttcacactgtgctcttctcaggtttggtyrtcttgcccyttctcagcctcctcaaatttgagtctacctcttgttgttttcctaattttttccagggatgtctagcccaagtatagaggcactaagagaagcttatgaacactgtcttctttcatgtgaaagtccttgagtaggcactacagtgcatgcatttgcagatgcctggtgtttctgttaagccaacatgaaaatactggactcactcaaagctgaagatgttggatattaggaaaaacttctccagaagagtgtatgggcactggcacagactgccagcgaggtggtagactc

SEQ ID NO: 77641 - DNA, 600 bp, Chicken  19866894366332_6
tcccccctctgagttcatcaacgtggttagagtccatagagccttacctctgttctctaccaggctggagaaagccattttcagtgtggattagatatgartgtgatggggacacatacttttctactagagttcatggatatttatgtatcaataaataacaggatcaggtctctgcagtggcgtttttcctggaggccatcactctttcaatttatctttctctttcacaagtctgaatttaccatccctggccagtttttcacactgtgctcttctcaggtttggtyrtcttgcccyttctcagcctcctcaaatttgagtctacctcttgttgttttcctaattttttccagggatgtctagcccaagtatagaggcactaagagaagcttatgaacactgtcttctttcatgtgaaagtccttgagtaggcactacagtgcatgcatttgcagatgcctggtgtttctgttaagccaacatgaaaatactggactcactcaaagctgaagatgttggatattaggaaaaacttctccagaagagtgtatgggcactggcacagactgccagcgaggtggtagactcactgtccct

SEQ ID NO: 77642 - DNA, 600 bp, Chicken  19866894366340_1
agatggagattattgcatttccagactgcaggatactggggagtgaatagatcacagaggtgacaaatttataatctgtggagacaaagtgttagccacatcatcaggcagttgaaccacaaactagtgttagcaccagctgtcatcattcctgtaagagaggactgtgtgccagaggcaggggaaaagagagaggcagggagaatcctgagcattgtgctgtgcttcatggctgcccactctagctaaaggtatgatgttgcaaagagaatgaagaattctcatagatgtattttgctytatctgctgaggtttcttctgcactgcacttagtatgccccgcacacatttcgcaaactttgtaaaagtcaaaactctgtctaaaaatacacatttaaaattaaatgagtctaaagatggaattctcccttacattaaaaaaaaaaaaaaagacattcaattgggactttattttttttaaaaattgtcaccatttaatttagttttatgatggataaagctaaatgattttggtgaaataacccgtagacgttaccaatgcaaaaaaaaaacagaggatgacaaagactagacctagcc

SEQ ID NO: 77643 - DNA, 600 bp, Chicken  19866894366342_1
aacctcatatatttgctacccaaactatagcaaaataaaaagaaacagggactgcacaacagctacaggcaagtgaacttctaaaattttaattagaaccatacttgtgagctagtaatgggaataccataaagcttagcaatgaacaaagaaatcagccttcttccataaaaccaatattacacacacttactccacctcatttgtaaaattaacagcctccctcagacaattaaaaatcatgctgagtaccaagccccagtaaattacaaatataattaagtaaataatatgaaagcygaactccctacttcaatacactgccaattcagctaatccaagcacagcaaatattaatgcaatacttcagtgtctacagctgagctagtgatgtgcagtaataataacacattaagattttgtccatagtcagagcaaactgcttattttccccaagacaactggaacagtgagttaccaataataagttgctcgtagcttcagtcatcctactccatttaacctgattgtttttgccaccaattatacacacatggtcttccaaatatacctcactctaaactgaaaagaagtcaatct

SEQ ID NO: 77644 - DNA, 600 bp, Chicken  19866894366344_1
acccgtgggctatagcatcacagctctcctgtgctttacatccaagctcaaagtgggctagagagggctacaaggatggaaaagagcagctgaggccactgagtctgttgggcccagagcaaagcaggctgagcgtaggcctcattgtggcctgcagctcctcacatgacacagaggggcagcactcagttctgctctctgtgacagcagcagggtctgaggtaatggcacacgaaagattttgccccagagggcacagaacagtcagcccaatgagcagacacagccccaagctgctgragctcaggaagtattgggacatcactctcagacatacggtttgggtggtgctgtgtggagccagggtttgcactcagtgatccttgtgagtcccttccaatgcaagatattctatgattctatgaaacagggtaggaaatgggaaaggtattggagggtctgaaagaggccacaagcatgaacctgggggatggaggaaaaaaacaaatggttaaatgcatctttagaggaatcacagtgacggctgcactgcaccaaataccacagtcagcaggggggcacgttgccaggatacagctg

SEQ ID NO: 77645 - DNA, 600 bp, Chicken  19866894366344_2
cagttctgctctctgtgacagcagcagggtctgaggtaatggcacacgaaagattttgccccagagggcacagaacagtcagcccaatgagcagacacagccccaagctgctgragctcaggaagtattgggacatcactctcagacatacggtttgggtggtgctgtgtggagccagggtttgcactcagtgatccttgtgagtcccttccaatgcaagatattctatgattctatgaaacagggtaggaaatgggaaaggtattggagggtctgaaagaggccacaagcatgaacctrggggatggaggaaaaaaacaaatggttaaatgcatctttagaggaatcacagtgacggctgcactgcaccaaataccacagtcagcaggggggcacgttgccaggatacagctggacatgcatctgagcagatctgaactctatctgtrcccttcctggtgcgaaagacatactctttctgcaggctgtgcaacagggatggatttcatttgtttttcataggcatctgtcctgaatatcagccagaacacagagacccaatgtttgtaagccagccatcagcaggattttatttcctag

SEQ ID NO: 77646 - DNA, 600 bp, Chicken  19866894366344_3
acggtttgggtggtgctgtgtggagccagggtttgcactcagtgatccttgtgagtcccttccaatgcaagatattctatgattctatgaaacagggtaggaaatgggaaaggtattggagggtctgaaagaggccacaagcatgaacctgggggatggaggaaaaaaacaaatggttaaatgcatctttagaggaatcacagtgacggctgcactgcaccaaataccacagtcagcaggggggcacgttgccaggatacagctggacatgcatctgagcagatctgaactctatctgtrcccttcctggtgcgaaagacatactctttctgcaggctgtgcaacagggatggatttcatttgtttttcataggcatctgtcctgaatatcagccagaacacagagacccaatgtttgtaagccagccatcagcaggattttatttcctagtctctctttaattgcagtgttaacttgtcaaataccacagtattgcttttccatgacctttgctgttaaccagagacttcagggcaagctggattgctccttgtgctcagcagcagctgtgggagcagccaactgcattaggcaatctg

SEQ ID NO: 77647 - DNA, 479 bp, Chicken  19866894366346_1
agattgagtttctgacagcccttaaaaaacctaaacggccccccacctttttttccttcttccattgcccaaggcgctctgtactgccaccgttcatccgatctccccttccatctgctgaaattaaggaattaatgagcgctatacgctttacagcgggccccaggaatgtttactggtgattaaattataatgcagccaagctgtataattcatgaaccaattaaaggaagtgttagttgatttgatgggaagaggacgtacaaaaagcatttaactaatagggaaccgtgggctgcygggygctttggctttctcggattacgcggctaattgctctgctttatagggctgtcacagatagccatacatatttcattgttctcaaatacttcaattgtttgctttcgtgttgctgctgtaatatgtagaagcccagccaaacttcagtgtagttaaagcactactctgcaaaagca

SEQ ID NO: 77648 - DNA, 475 bp, Chicken  19866894366346_2
tgagtttctgacagcccttaaaaaacctaaacggccccccacctttttttccttcttccattgcccaaggcgctctgtactgccaccgttcatccgatctccccttccatctgctgaaattaaggaattaatgagcgctatacgctttacagcgggccccaggaatgtttactggtgattaaattataatgcagccaagctgtataattcatgaaccaattaaaggaagtgttagttgatttgatgggaagaggacgtacaaaaagcatttaactaatagggaaccgtgggctgcygggygctttggctttctcggattacgcggctaattgctctgctttatagggctgtcacagatagccatacatatttcattgttctcaaatacttcaattgtttgctttcgtgttgctgctgtaatatgtagaagcccagccaaacttcagtgtagttaaagcactactctgcaaaagca

SEQ ID NO: 77649 - DNA, 599 bp, Chicken  19866894366350_1
  misc_feature (1)..(65): n is any nucleotide
nnnnnnnnnnnnnnnnnnnnnnnnnnnnnnnnnnnnnnnnnnnnnnnnnnnnnnnnnnnnnnnnncacacacacatatataggtttatgctaaagtgcaagtttttcttagcataagattctttcttagctgctttagcatcttgactggcatgcagtggtcagtgatgagcctgtacctgagcaggcatgctccagagagtcccatgctccagagagtcccagaagctgcatccttctgtatccttcttccaagtaatgtgttttttggatggcacttgttagagccagtcagaatagstactctgagttattttcccctccctacctaatgtgcaaggaatgtcctgatttttctgtcgtcatctactaggtgctggcctrttatctcatggtgtgggagattaagtcatttccctccactctcttaagctctgttgactacagttgctgtatctcaactagtgcatctcccatgctgaaccacaggtgcttaggaggcaccttgtgcattttatgcttgtcataatttattgcattttaacaatgtagaatgtaaaagagtgtagtaaattgcaagawtgaatttcataaattcag

SEQ ID NO: 77650 - DNA, 600 bp, Chicken  19866894366350_2
tttatgctaaagtgcaagtttttcttagcataagattctttcttagctgctttagcatcttgactggcatgcagtggtcagtgatgagcctgtacctgagcaggcatgctccagagagtcccatgctccagagagtcccagaagctgcatccttctgtatccttcttccaagtaatgtgttttttggatggcacttgttagagccagtcagaatagstactctgagttattttcccctccctacctaatgtgcaaggaatgtcctgatttttctgtcgtcatctactaggtgctggcctrttatctcatggtgtgggagattaagtcatttccctccactctcttaagctctgttgactacagttgctgtatctcaactagtgcatctcccatgctgaaccacaggtgcttaggaggcaccttgtgcattttatgcttgtcataatttattgcattttaacaatgtagaatgtaaaagagtgtagtaaattgcaagawtgaatttcataaattcagcttaatatgcctataaaaataaatatgctacttcagatagggtgatcaagtatttagaataagtaagctgtcttcctcctattt

SEQ ID NO: 77651 - DNA, 600 bp, Chicken  19866894366350_3
tagagccagtcagaatagstactctgagttattttcccctccctacctaatgtgcaaggaatgtcctgatttttctgtcgtcatctactaggtgctggcctrttatctcatggtgtgggagattaagtcatttccctccactctcttaagctctgttgactacagttgctgtatctcaactagtgcatctcccatgctgaaccacaggtgcttaggaggcaccttgtgcattttatgcttgtcataatttattgcattttaacaatgtagaatgtaaaagagtgtagtaaattgcaagawtgaatttcataaattcagcttaatatgcctataaaaataaatatgctacttcagatagggtgatcaagtatttagaataagtaagctgtcttcctcctatttgcagagttggcttttaaaaaaataggaggagggctcttagatgacacagttgagagtactttctgaaattgatagattttgtgttgagggggaaaagtgtggaactctcaggctgctttttttaaatgagttactcagatttcttttcatttgggcagtgtttctactttggagagaggaaatatatgccctgtacct

SEQ ID NO: 77652 - DNA, 600 bp, Chicken  19866894366352_1
atgcagcttgaattcaaacataactgattttaattcagtgtctgaaatgcattacttgcttattctatcatggcaagtaaaattgaaacaaataaaagccccaaaacttccagttactgagcagagtactcaattccctctaattcaaattggttcatttgcaaatttaaaacaatatacaattttaaaccttcctaaaaagatgttaagaggacctgagtgtcccctgtacatgagtcacatacaaagcagaactcaccagcaagttagaacaaaatcattagaaaattttctgctagyttttcatctaccastttcctataattaaacatatttatgtacaggaaagccaaatttcaaatttcactccagagtttattgaacagcattcaaaacaacataaatccagtttaaactactgctgaaaatgggttgtgctgtactgtagtactcagcaaacattgtgtcaacatcttcattagaagatttgctgaattcattacataacccttcaaattaacttaggtctggaaaaaaatgtgtgatgcttgtgacattttgctgataagagagttcaaacaaagacaattaagtcacatt

SEQ ID NO: 77653 - DNA, 600 bp, Chicken  19866894366352_2
caaacataactgattttaattcagtgtctgaaatgcattacttgcttattctatcatggcaagtaaaattgaaacaaataaaagccccaaaacttccagttactgagcagagtactcaattccctctaattcaaattggttcatttgcaaatttaaaacaatatacaattttaaaccttcctaaaaagatgttaagaggacctgagtgtcccctgtacatgagtcacatacaaagcagaactcaccagcaagttagaacaaaatcattagaaaattttctgctagyttttcatctaccastttcctataattaaacatatttatgtacaggaaagccaaatttcaaatttcactccagagtttattgaacagcattcaaaacaacataaatccagtttaaactactgctgaaaatgggttgtgctgtactgtagtactcagcaaacattgtgtcaacatcttcattagaagatttgctgaattcattacataacccttcaaattaacttaggtctggaaaaaaatgtgtgatgcttgtgacattttgctgataagagagttcaaacaaagacaattaagtcacattagacactaagcaaa

SEQ ID NO: 77654 - DNA, 600 bp, Chicken  19866894366352_3
attgaacagcattcaaaacaacataaatccagtttaaactactgctgaaaatgggttgtgctgtactgtagtactcagcaaacattgtgtcaacatcttcattagaagatttgctgaattcattacataacccttcaaattaacttaggtctggaaaaaaatgtgtgatgcttgtgacattttgctgataagagagttcaaacaaagacaattaagtcacattagacactaagcaaaaaccactgaatacatttcttgatatttctagacctttaatttcagtatctagagaagagattracgtacataaattttaccattgattgttgggaatgtggtacgagaacttcatatatctaaggaggaaatcagtaatttaaaataagtaatccaccttattttcagtttgaatgatgagggaaagagagacaagcaagtactgaaatgaagactaaatggctgaataagcaaatgcaaagttaacgcattattttgctattacgtatcttttactggaaaagacaagaacattttcaggagaaacatctgtaagcagacaacaaacttaaagagatgattcaccataatgttctagtaaaa

SEQ ID NO: 77655 - DNA, 600 bp, Chicken  19866894366354_1
gtggctgaaacaaaggccacagtcccggtggcttcttgaggctgtttccagcccaatttttttcatagctttaagtgcaaggtgatctaatttgcttccatacctgggtcactaagacccatgctgcttacacaaggactggattgagcctactttgcgagctcccagactccttcccatgctctgggggaaatctgtttgcttagcagtatctttggcaggaaaggtaccattgagtacagaacacaggagccagtaccagctgtgtcagacagatatttctcatgtccttcaccaacsgactgacccatatgaggctggagagcagaacaacttgactcactgacggtggaacctgtactgctatttggaaagctctgtcactgccttctggcagatgatattgcagacagaaagaagacagaaaaaatgtaccctactccatcctaggtgttggtggygagctgagaaacggcccgtgttgctgcacagcagcaccagtagcccttgaacatagcaaaatggagcaaagcatccttcctatgcctaattgtgaaaaaaaattacttccaagtccttcctagcagaaacagagattaa

SEQ ID NO: 77656 - DNA, 600 bp, Chicken  19866894366354_2
ctcccagactccttcccatgctctgggggaaatctgtttgcttagcagtatctttggcaggaaaggtaccattgagtacagaacacaggagccagtaccagctgtgtcagacagatatttctcatgtccttcaccaacsgactgacccatatgaggctggagagcagaacaacttgactcactgacggtggaacctgtactgctatttggaaagctctgtcactgccttctggcagatgatattgcagacagaaagaagacagaaaaaatgtaccctactccatcctaggtgttggtggygagctgagaaacggcccgtgttgctgcacagcagcaccagtagcccttgaacatagcaaaatggagcaaagcatccttcctatgcctaattgtgaaaaaaaattacttccaagtccttcctagcagaaacagagattaaaaagccacatggtaaaacctgggcaacaccacaaggcttggcaaatgaaccaagaaccagctgtcaccgcaaatgtatggtgatgaccaaaaccagtgcatcaaattgaggtttctcacttgaaacttttccattcccagctgacttctggctctccagac

SEQ ID NO: 77657 - DNA, 599 bp, Chicken  19866894366359_1
  misc_feature (1)..(141): n is any nucleotide
nnnnnnnnnnnnnnnnnnnnnnnnnnnnnnnnnnnnnnnnnnnnnnnnnnnnnnnnnnnnnnnnnnnnnnnnnnnnnnnnnnnnnnnnnnnnnnnnnnnnnnnnnnnnnnnnnnnnnnnnnnnnnnnnnnnnnnnnnnnnnctgttgctgctgtggcttcatgtcccatggccctgatatcaacttatgagagaccctgttatataacttaaagaaaaccgtagacatacaagaacaaaaccaacataacttcattcctaaaatgaatgttcatggagaagagtcttcctaaaacctgayatgctatctgttcacatctctcgtggagatgaatatgragaaaggttgagggaactgggcttgtttagcttggagaaggctctggggagacctcattgtggccttccagtacttgaagggatcatataaataggagggggaacagctgtttacaaggatgtatagtgataggacaagggggaatggttttaaattaagacaagggaggtttaagttaaatcttaggaggaagtttttcactcagagggtggtgacgcactggaacaggttgccgaaggaggttgtggatgccccatctc

SEQ ID NO: 77658 - DNA, 599 bp, Chicken  19866894366359_2
  misc_feature (1)..(103): n is any nucleotide
nnnnnnnnnnnnnnnnnnnnnnnnnnnnnnnnnnnnnnnnnnnnnnnnnnnnnnnnnnnnnnnnnnnnnnnnnnnnnnnnnnnnnnnnnnnnnnnnnnnnnnnctgttgctgctgtggcttcatgtcccatggccctgatatcaacttatgagagaccctgttatataacttaaagaaaaccgtagacatacaagaacaaaaccaacataacttcattcctaaaatgaatgttcatggagaagagtcttcctaaaacctgayatgctatctgttcacatctctcgtggagatgaatatgragaaaggttgagggaactgggcttgtttagcttggagaaggctctggggagacctcattgtggccttccagtacttgaagggatcatataaataggagggggaacagctgtttacaaggatgtatagtgataggacaagggggaatggttttaaattaagacaagggaggtttaagttaaatcttaggaggaagtttttcactcagagggtggtgacgcactggaacaggttgccgaaggaggttgtggatgccccatctctggaggcattcaaagccaggctggatgtggctctgggc

SEQ ID NO: 77659 - DNA, 600 bp, Chicken  19866894366369_1
taaacacgttaatgctaagttagtgtatgtaagtaactgtcgtgtttcttccttttttttttcagctcaagtgccacttgaggattataagcagctgctaggtaagcaaaatcagttacttctatgaaccaatatgcagatagaaagcaacgttatcgtggcaaagggtaaaagcttttgtttagcttgaggaatacaagaacaggcagtcatggttaaaatttaataataaccttagcttatattaaagtaatgaaggtgaagtgggtgttcgtgctactggtttaaaaaaaaaaaaawgtatgtctaaaaatattctctaaattatttgctttaatttctggtggcagtctagctatagtcccatgagttaatcattctgctgttccctttgtctgtggtttggaatgctgaatttgagtgttaatgcatatggggagtagacttctacaaagctctgagggtatggatcgctttagcagctatcttgcttttatcacattgcttcagtgttctacagttgatattttgattcagtaaaaaaaaaaaaaaacctcacattttttggtaattgcatttttagccaaatacatgcttgta

SEQ ID NO: 77660 - DNA, 600 bp, Chicken  19866894366376_1
taaagctgtggggagagatcttgcatagtgatttcactaattggattacacatgtgaagactcacatgaagaaaatgatctggaagcagctagcacatgctaaggttctagaatgcagcagtctgtgttttaagctgtgttgtctttttaatgaagtcattatatgtgcttttgctctagcttatggcaagcagtagaagtaatatccttctgatagtggaaaaaaaacactttaaaagctgatattttaaggtatttaattctatggccctgggtgatagctttctctatgcatttccwaaaaaaaacccccatgaaatgttggttacatgttagatgctttttggatgtgcaaagcctgatttctgtggcttttctaagcagcctgtgaaaggcaggatttgctgttttggttaaaggatatgtaattaggtattagttgcaatgttttttcaatgctaaattgtcactgcctacagttagtacctcccggatcggttgttccatgtgttggcaccacatagctttgtacagtcttgcagtgaactgagtggggggaygtggtatggtcacagcatgtgyrgtctcaccactttgtgt

SEQ ID NO: 77661 - DNA, 600 bp, Chicken  19866894366376_2
ttctatggccctgggtgatagctttctctatgcatttccaaaaaaaaacccccatgaaatgttggttacatgttagatgctttttggatgtgcaaagcctgatttctgtggcttttctaagcagcctgtgaaaggcaggatttgctgttttggttaaaggatatgtaattaggtattagttgcaatgttttttcaatgctaaattgtcactgcctacagttagtacctcccggatcggttgttccatgtgttggcaccacatagctttgtacagtcttgcagtgaactgagtggggggaygtggtatggtcacagcatgtgyrgtctcaccactttgtgttcctatatctgaataggaaagacagagcagtgctgtatgaagacgcccagagagaatgcagttacatacttatcctgctccagtttcacttattcagatcaggtggtgcatgttccctgggtgtttgacagaaagcaacgttcggatgtccttctgcatgtcactgagtgaggcaggtagcctgttcagttttcagttttgacaatcattttttttttcctatatccagggagaagaggctggtgttcctagtgtgcaac

SEQ ID NO: 77662 - DNA, 600 bp, Chicken  19866894366376_3
tttctctatgcatttccaaaaaaaaacccccatgaaatgttggttacatgttagatgctttttggatgtgcaaagcctgatttctgtggcttttctaagcagcctgtgaaaggcaggatttgctgttttggttaaaggatatgtaattaggtattagttgcaatgttttttcaatgctaaattgtcactgcctacagttagtacctcccggatcggttgttccatgtgttggcaccacatagctttgtacagtcttgcagtgaactgagtggggggaygtggtatggtcacagcatgtgyrgtctcaccactttgtgttcctatatctgaataggaaagacagagcagtgctgtatgaagacgcccagagagaatgcagttacatacttatcctgctccagtttcacttattcagatcaggtggtgcatgttccctgggtgtttgacagaaagcaacgttcggatgtccttctgcatgtcactgagtgaggcaggtagcctgttcagttttcagttttgacaatcattttttttttcctatatccagggagaagaggctggtgttcctagtgtgcaacattacacttaaatttgtgtgtg

SEQ ID NO: 77663 - DNA, 600 bp, Chicken  19866894366376_4
ttctctatgcatttccaaaaaaaaacccccatgaaatgttggttacatgttagatgctttttggatgtgcaaagcctgatttctgtggcttttctaagcagcctgtgaaaggcaggatttgctgttttggttaaaggatatgtaattaggtattagttgcaatgttttttcaatgctaaattgtcactgcctacagttagtacctcccggatcggttgttccatgtgttggcaccacatagctttgtacagtcttgcagtgaactgagtggggggaygtggtatggtcacagcatgtgyrgtctcaccactttgtgttcctatatctgaataggaaagacagagcagtgctgtatgaagacgcccagagagaatgcagttacatacttatcctgctccagtttcacttattcagatcaggtggtgcatgttccctgggtgtttgacagaaagcaacgttcggatgtccttctgcatgtcactgagtgaggcaggtagcctgttcagttttcagttttgacaatcattttttttttcctatatccagggagaagaggctggtgttcctagtgtgcaacattacacttaaatttgtgtgtgt

SEQ ID NO: 77664 - DNA, 600 bp, Chicken  19866894366376_5
ccctccccctcacttgagttatctcatagaatggcgctgagcttactgcatgggaatgcaacgcgaaagtgatgggaattaaattaagctcatgagtgcttcaggtttttttccttccccctttataaggtactgtcttaatgtaatgtgctgtggctagtttcagaattctagaggatctgtgtttaaaggagcctcttgatgtagggtgggaaagggccttggacctccatttcctttgagtaaccagcagtgggagaaccccattccaaggcttcagtatttagagttaagttacaytggtaaagtacttctcagccaaagtgctcactgtagcttttgcctttccttcagttgcttatttcagccctatggctggagtagcagggtggttgtgcatgggtctgagcggtgatctgagctgcattaaaaataaccgcaggggtggcagaaggaatgtcaggttacatctgagcagctccttgatctgagtcagcaggtggctgtgaatctgcatgccctgacacatgggggaagcagtgctgtgctgaaacaagtaaagggtggagataaatgttcctagcttgttcttcgttaact

SEQ ID NO: 77665 - DNA, 600 bp, Chicken  19866894366383_1
tgtatttctgaaacagtgactgacagaaaaggctaaaacaaaccagcctcattacaggcagttgagtaaataagatgcatccctgaaattactttatgtactgcgttgcagatttgcttgatggttctaatggctttgctaagaagaaattattgcctatcaggaaagtgatcatcatcatttccacctcatctctaaaaaggagtcgacagtcttcctggctaaacttatggaataagaaggtgccacagacctggctgataggtggctgttggagctctgctggtgccagtgtgagargaatgggcattggccatatcttgctgaggagctcttggaggagggagctgaggggtggccatgccctgcgttgcratggagcccatgtggggatgaggaccaacatgtcttgatggttcaagtccagcatgaaaggtatttccaccaggtatgaagatgcttttatactttcaaaataatacacgtagatttatatatgtgccatgcatatatatagatataattccccaaattatgtacagggaagttttcagtggtgcaggaaaggcagtaaagttttctgtttgctgtataattctc

SEQ ID NO: 77666 - DNA, 600 bp, Chicken  19866894366383_2
tgcatccctgaaattactttatgtactgcgttgcagatttgcttgatggttctaatggctttgctaagaagaaattattgcctatcaggaaagtgatcatcatcatttccacctcatctctaaaaaggagtcgacagtcttcctggctaaacttatggaataagaaggtgccacagacctggctgataggtggctgttggagctctgctggtgccagtgtgagargaatgggcattggccatatcttgctgaggagctcttggaggagggagctgaggggtggccatgccctgcgttgcratggagcccatgtggggatgaggaccaacatgtcttgatggttcaagtccagcatgaaaggtatttccaccaggtatgaagatgcttttatactttcaaaataatacacgtagatttatatatgtgccatgcatatatatagatataattccccaaattatgtacagggaagttttcagtggtgcaggaaaggcagtaaagttttctgtttgctgtataattctcaaaggctgaagacccaaatcagcctgaagagctgatgttgtaggtactgtgcaacagtcattttcatttactgga

SEQ ID NO: 77667 - DNA, 600 bp, Chicken  19866894366385_1
ttcattttgccctgaccacagtttggtgcttaggtagcaccaactgagggcttcaaaacacagctgtagcaaataatctggctcagaaatactatagaaatagttgaatagctttgcagcatcagcttttttttttattgataggtattacgtgattaccagtgcctatttatgggtctggggtttggcactgccaacagagaaactaaagcacatttcaagatcgaagtacaagacagaaatacagcgtaccagagttctggagcattataaatttcttatgttattatttcagatatrtttggggaagatatttgctccaccagaagttcctggaaggctccgcattgctttcagtgatcccaattgcagcccagaaagagctgacctaaatctaaaataaggtatagaaaaggaagcagatttagatttgaatctcaactccatcactgaatttcttcattagttctggtaaatcattttgacttttattacttctatgtccgattctcaatttccaagataagaatcagttctttttcacacagcgctgcaaggatcctttaaaaaagaaatcacataaaatacaatggctccatc

SEQ ID NO: 77668 - DNA, 600 bp, Chicken  19866894366385_2
agttcctggaaggctccgcattgctttcagtgatcccaattgcagcccagaaagagctgacctaaatctaaaataaggtatagaaaaggaagcagatttagatttgaatctcaactccatcactgaatttcttcattagttctggtaaatcattttgacttttattacttctatgtccgattctcaatttccaagataagaatcagttctttttcacacagcgctgcaaggatcctttaaaaaagaaatcacataaaatacaatggctccatctgagggaagatgaatagataactgaayataccttcttagaagaaaacagctttaaaaagccagaaaaatctctttatgtccataaggaaaacagaatttccttcagctgaaaacctgactagayattagaataggctgcaaagcgtgcttaaagctgccaagaaagccctgggcagaaaagagtttcagattccagtattaattttcaaggatcttgcttttaaaaacgaagtccatatgaatgtttagtttgcagcttttatctggtcttggaagacagtcagggcatcagatgtcctgcagactaactggtccttatttcacttg

SEQ ID NO: 77669 - DNA, 600 bp, Chicken  19866894366385_3
ttagatttgaatctcaactccatcactgaatttcttcattagttctggtaaatcattttgacttttattacttctatgtccgattctcaatttccaagataagaatcagttctttttcacacagcgctgcaaggatcctttaaaaaagaaatcacataaaatacaatggctccatctgagggaagatgaatagataactgaayataccttcttagaagaaaacagctttaaaaagccagaaaaatctctttatgtccataaggaaaacagaatttccttcagctgaaaacctgactagayattagaataggctgcaaagcgtgcttaaagctgccaagaaagccctgggcagaaaagagtttcagattccagtattaattttcaaggatcttgcttttaaaaacgaagtccatatgaatgtttagtttgcagcttttatctggtcttggaagacagtcagggcatcagatgtcctgcagactaactggtccttatttcacttgcatcatggatggcagaaaggctggaagagtaatttcaggattatctgcagcgttggttttggtgtgaacctgttggcaaggaatgcaggaggttctg

SEQ ID NO: 77670 - DNA, 427 bp, Chicken  19866894366390_1
aaggaagatgtgtaaaagtttaagatactagatatgtaaaaatgatgttcccaatgcaaggaaacataagaagaggacacactgctacagtctgcagttacagtttaatatctctaaacttccattaccttctcataggtgtagttgaattgatagaattcaccatgctgcctgggttttaggttttaaaaagaaacggtgatggtgtttagatagtggggaataacattccccacacactgcaagactgtagatttagaaagtatgaactcctggtggaatctgctttcattttttccwtagtaggagctttctgtgacacaggatcccaattcagatgacagaatgcagatattgctggaagtacccttgccaaactgtgtgcagttcttcatctctctgtgcctgtagggctccacatccgcag

SEQ ID NO: 77671 - DNA, 506 bp, Chicken  19866894366393_1
gatgaggcaccatgaatcaggattcatgaagtacataccaagtagtgttgttctgcaaagaaatgctaatgttctgagtggggacagagaaaacatgctaatgtagaagaacaaaaattatcacagaggggttattgtagaatgggtacgtcttgtgtagaaactcactgctcaccttctggcatggagcgtcacagtgtagatagcaaggatgtttcctaggattctcccgtcataaaacaacaacacagaccctctgtcatggaagctgacaaaaaggattctttttttcaagaaaasggtagacatggcatggaggggcataatggtggagatggcttggttccaacctgaatgattctatgattctgtgattcttttttaccccgtgatattcagtcattcatcttctgaaatggaattggtccaacaccaagagttcaaaagtccccggtcaccaagctgggttggtgttagccctacatcttccacttgtccaccctctg

SEQ ID NO: 77672 - DNA, 600 bp, Chicken  19866894366398_1
atatctggaatagaatgacagtacaggtaacaacagctgcccatgagccttattttagggcatggaagaactccagagcttgctctctcattcagaaaaacagtgaacatctgtgaatatattgcctataccttaaggggaatcattttcaaggacaaactaagtaaaagcccctcaaggtgtgaaaaaacaccatctgatttcttagtctgacagaatcactaatagcaatctagatttagaatcatagttgagctcctattccaagataccttgccaacgcaaagatggcttcttggkgaagtggatagaacaactggacagaagcaagacaggttatacaacatctgcacttataaaaatacaggggactgtgtttgctcctataaatacatctatggtgtacaggtaggtaagggtggggcttttgttgcactttctgaaacrtgttgagagcagatccacatcccaaagaaagttgatttcatgtagaggataaaggcaatcacctctttttgctgggcctctcaagactgcgttgatttggcaagcaggtaaaaagcacctgtccctctgtccctgcagactttayccaacaca

SEQ ID NO: 77673 - DNA, 600 bp, Chicken  19866894366398_2
ttcaaggacaaactaagtaaaagcccctcaaggtgtgaaaaaacaccatctgatttcttagtctgacagaatcactaatagcaatctagatttagaatcatagttgagctcctattccaagataccttgccaacgcaaagatggcttcttggkgaagtggatagaacaactggacagaagcaagacaggttatacaacatctgcacttataaaaatacaggggactgtgtttgctcctataaatacatctatggtgtacaggtaggtaagggtggggcttttgttgcactttctgaaacrtgttgagagcagatccacatcccaaagaaagttgatttcatgtagaggataaaggcaatcacctctttttgctgggcctctcaagactgcgttgatttggcaagcaggtaaaaagcacctgtccctctgtccctgcagactttayccaacacagtttctggtggtaagacagccttytcagaattccctggctsgaggatgcctgaagtaacttgcaacaatttaccacctgagaagacagagcactgggaagcgacagaaaaatccacctgattgcatgggtaatgagcaggcacgggt

SEQ ID NO: 77674 - DNA, 600 bp, Chicken  19866894366398_3
ttcttggkgaagtggatagaacaactggacagaagcaagacaggttatacaacatctgcacttataaaaatacaggggactgtgtttgctcctataaatacatctatggtgtacaggtaggtaagggtggggcttttgttgcactttctgaaacrtgttgagagcagatccacatcccaaagaaagttgatttcatgtagaggataaaggcaatcacctctttttgctgggcctctcaagactgcgttgatttggcaagcaggtaaaaagcacctgtccctctgtccctgcagactttayccaacacagtttctggtggtaagacagccttytcagaattccctggctsgaggatgcctgaagtaacttgcaacaatttaccacctgagaagacagagcactgggaagcgacagaaaaatccacctgattgcatgggtaatgagcaggcacgggtctgtatttcctgcaaatcactcattcattatctctcaggaactaacgcttctcattatatctcacagatctggatgggaccaaaaaccttattgataacttcactgacacctggttattccacatccttgacaacaggaaccaat

SEQ ID NO: 77675 - DNA, 600 bp, Chicken  19866894366398_4
aagcaagacaggttatacaacatctgcacttataaaaatacaggggactgtgtttgctcctataaatacatctatggtgtacaggtaggtaagggtggggcttttgttgcactttctgaaacrtgttgagagcagatccacatcccaaagaaagttgatttcatgtagaggataaaggcaatcacctctttttgctgggcctctcaagactgcgttgatttggcaagcaggtaaaaagcacctgtccctctgtccctgcagactttayccaacacagtttctggtggtaagacagccttytcagaattccctggctsgaggatgcctgaagtaacttgcaacaatttaccacctgagaagacagagcactgggaagcgacagaaaaatccacctgattgcatgggtaatgagcaggcacgggtctgtatttcctgcaaatcactcattcattatctctcaggaactaacgcttctcattatatctcacagatctggatgggaccaaaaaccttattgataacttcactgacacctggttattccacatccttgacaacaggaaccaatatgaaagaatgccacgctagttcacacaacag

SEQ ID NO: 77676 - DNA, 600 bp, Chicken  19866894366398_5
caacatctgcacttataaaaatacaggggactgtgtttgctcctataaatacatctatggtgtacaggtaggtaagggtggggcttttgttgcactttctgaaacrtgttgagagcagatccacatcccaaagaaagttgatttcatgtagaggataaaggcaatcacctctttttgctgggcctctcaagactgcgttgatttggcaagcaggtaaaaagcacctgtccctctgtccctgcagactttayccaacacagtttctggtggtaagacagccttytcagaattccctggctsgaggatgcctgaagtaacttgcaacaatttaccacctgagaagacagagcactgggaagcgacagaaaaatccacctgattgcatgggtaatgagcaggcacgggtctgtatttcctgcaaatcactcattcattatctctcaggaactaacgcttctcattatatctcacagatctggatgggaccaaaaaccttattgataacttcactgacacctggttattccacatccttgacaacaggaaccaatatgaaagaatgccacgctagttcacacaacagctgaatgggtgtctccc

SEQ ID NO: 77677 - DNA, 599 bp, Chicken  19866894366399_1
  misc_feature (1)..(61): n is any nucleotide
nnnnnnnnnnnnnnnnnnnnnnnnnnnnnnnnnnnnnnnnnnnnnnnnnnnnnnnnnnnnnggggacagtttggtgaggcagcaacgagaacaaccaccttttcttcttctcctgcccttgcacgtaagggagtgaagcaggttactttgcttgtgattcatttttaaaacctttccctttgttgagccagtttcacaaaacagcacacactccggttcttttaagtgctttccagcacttgttgggcagattatggaaatagcctttttccttgtattttgctctgctggaccaagttyagccctcttttctaggccagctggcttgtgagtgccagaacagttgaacttgattcaggcagtggcaagagcttgataaaatgaaacctgcrtatctcaccaatgccagacagcaccttgttggcagatgagcacctggaggctcagagtcagtgggctctgggcaaggtggtccyctgtagaggtgccyatgggaagccctccccactgagtcctktctgggtttgtggtagtcctcacaggctcctcaaaacttggggaaaagcagctgccctgcaacatggaacatgcatgcacat

SEQ ID NO: 77678 - DNA, 600 bp, Chicken  19866894366399_2
aaccaccttttcttcttctcctgcccttgcacgtaagggagtgaagcaggttactttgcttgtgattcatttttaaaacctttccctttgttgagccagtttcacaaaacagcacacactccggttcttttaagtgctttccagcacttgttgggcagattatggaaatagcctttttccttgtattttgctctgctggaccaagttyagccctcttttctaggccagctggcttgtgagtgccagaacagttgaacttgattcaggcagtggcaagagcttgataaaatgaaacctgcrtatctcaccaatgccagacagcaccttgttggcagatgagcacctggaggctcagagtcagtgggctctgggcaaggtggtccyctgtagaggtgccyatgggaagccctccccactgagtcctktctgggtttgtggtagtcctcacaggctcctcaaaacttggggaaaagcagctgccctgcaacatggaacatgcatgcacatgcatcttggaggaactgtattgtaagggcaagtgacaggcagggagcaggcttgtrgggtacagctaggaggagcaggtcttgtgccaacaat

SEQ ID NO: 77679 - DNA, 600 bp, Chicken  19866894366399_3
cctttgttgagccagtttcacaaaacagcacacactccggttcttttaagtgctttccagcacttgttgggcagattatggaaatagcctttttccttgtattttgctctgctggaccaagttyagccctcttttctaggccagctggcttgtgagtgccagaacagttgaacttgattcaggcagtggcaagagcttgataaaatgaaacctgcrtatctcaccaatgccagacagcaccttgttggcagatgagcacctggaggctcagagtcagtgggctctgggcaaggtggtccyctgtagaggtgccyatgggaagccctccccactgagtcctktctgggtttgtggtagtcctcacaggctcctcaaaacttggggaaaagcagctgccctgcaacatggaacatgcatgcacatgcatcttggaggaactgtattgtaagggcaagtgacaggcagggagcaggcttgtrgggtacagctaggaggagcaggtcttgtgccaacaatgtgacacttccgaggaacgatttgaaggtacagttatatgctggaatggctagaatcacaagcagcaagatgttttctggggaa

SEQ ID NO: 77680 - DNA, 600 bp, Chicken  19866894366399_4
gtttcacaaaacagcacacactccggttcttttaagtgctttccagcacttgttgggcagattatggaaatagcctttttccttgtattttgctctgctggaccaagttyagccctcttttctaggccagctggcttgtgagtgccagaacagttgaacttgattcaggcagtggcaagagcttgataaaatgaaacctgcrtatctcaccaatgccagacagcaccttgttggcagatgagcacctggaggctcagagtcagtgggctctgggcaaggtggtccyctgtagaggtgccyatgggaagccctccccactgagtcctktctgggtttgtggtagtcctcacaggctcctcaaaacttggggaaaagcagctgccctgcaacatggaacatgcatgcacatgcatcttggaggaactgtattgtaagggcaagtgacaggcagggagcaggcttgtrgggtacagctaggaggagcaggtcttgtgccaacaatgtgacacttccgaggaacgatttgaaggtacagttatatgctggaatggctagaatcacaagcagcaagatgttttctggggaaacatgcagcaaagg

SEQ ID NO: 77681 - DNA, 600 bp, Chicken  19866894366399_5
tcttttaagtgctttccagcacttgttgggcagattatggaaatagcctttttccttgtattttgctctgctggaccaagttyagccctcttttctaggccagctggcttgtgagtgccagaacagttgaacttgattcaggcagtggcaagagcttgataaaatgaaacctgcrtatctcaccaatgccagacagcaccttgttggcagatgagcacctggaggctcagagtcagtgggctctgggcaaggtggtccyctgtagaggtgccyatgggaagccctccccactgagtcctktctgggtttgtggtagtcctcacaggctcctcaaaacttggggaaaagcagctgccctgcaacatggaacatgcatgcacatgcatcttggaggaactgtattgtaagggcaagtgacaggcagggagcaggcttgtrgggtacagctaggaggagcaggtcttgtgccaacaatgtgacacttccgaggaacgatttgaaggtacagttatatgctggaatggctagaatcacaagcagcaagatgttttctggggaaacatgcagcaaagggtgtgccgtgcactgcaaacgctcagc

SEQ ID NO: 77682 - DNA, 544 bp, Chicken  19866894366399_6
caggcagtggcaagagcttgataaaatgaaacctgcrtatctcaccaatgccagacagcaccttgttggcagatgagcacctggaggctcagagtcagtgggctctgggcaaggtggtccyctgtagaggtgccyatgggaagccctccccactgagtcctktctgggtttgtggtagtcctcacaggctcctcaaaacttggggaaaagcagctgccctgcaacatggaacatgcatgcacatgcatcttggaggaactgtattgtaagggcaagtgacaggcagggagcaggcttgtrgggtacagctaggaggagcaggtcttgtgccaacaatgtgacacttccgaggaacgatttgaaggtacagttatatgctggaatggctagaatcacaagcagcaagatgttttctggggaaacatgcagcaaagggtgtgccgtgcactgcaaacgctcagctcacgatgtgtgtgaagggaggaaaccttagtgaaacctctggctcctgcttactgggtgctgaccttgctcaaccgtagta

SEQ ID NO: 77683 - DNA, 600 bp, Chicken  19866894366403_1
aattaaaataggtccgctttaaaccaaggcaatgctttgttaagcatcagttatttaaagttcctttccctttccttctctttttccttgctttctttgttcctttcttcggaacatgtatagttgaagttttcaaaataattaagaagctgagtattaaagcaggaacagcccactaatttgataattctaattagaaaactcttagacctcatactgacaaactaatatacttaaatagatgaataccaatgtgtatcttctctgtgaatccttgatattgtattacgttcttgctgmcttgtctgtgtctgtctatcaaatagatcttgccaaaatgacagtaatacgtccaagcaatatagaaagtttcacagcatctcatttcttaggcaagaatcataaatgtaaaactattttattaaaaattagcagtaattttggtaggatttctattttgttcatattatttcttctaaaaacttgtatgtaaaaatacatctaagactccattcttcttccttccaagacttgaaagagagagctaaggaaggacaaacctcatgaaaattcaccttgaagctaatgtggcaacaggtg

SEQ ID NO: 77684 - DNA, 530 bp, Chicken  19866894366405_1
aagctctctcttttgtttggttgtcacttcagcaaaaaatgataagcccacctctcttctgcagggacttctcagttacttttttagctagtttcatgaactgactgtcttcaccgatatcttcctcctcctcctcctcctgctctttatttttttccttctgtagcaaagagaagacattttgtaaaactgaaagagctcgtactaagcatgaacattcagtaacttaagtagaccatgtcttcccattataaagataaatctatgagtattattgtttccagaatctgacattggtartggtgcaaagaaggactggacaagatgcccttctggcagccaatacctgctcacgaagccactgttctcgttcaaatctctctttcctccattttacttctgtttcatcaaatgattcattttcatcttcattatcagaatccctctgaaacaagtccatctgtgaagcatcatctagaaaaagagaaaaaatagtcatacaccttctctctaacctttcaccccgtctc

SEQ ID NO: 77685 - DNA, 535 bp, Chicken  19866894366411_1
tcatggtaactatataaaagagttaaaggcaaacatctcatgtaggccagccaccaggcaggacccacttagcatctagttagctattcacaaggtatgatccagtattgcagtttagaggtgaaggaatcattaatttgcctccacagctacttgtcttatctagacacatattttttttcattttcactactaaccacctgttctcaactgtatgggaactgttgaatgatggcctgaacctctgattgaccacctgaggcaagcactgagtcagccatgggagcacaggtgaaggcrattcatcctgtgtgaytggaaggggtgaagccaggctccacctctcctagaccccatttaagtgctgattgccaatgaggaagggtctctttttggagattgctccttgtggagtttcttgtaagcctacaatatgggtgagcactttcatttatctatgattttctttttcaacatgatgatctttacaaagtctaacttctctgtatacttactgataatccaatactttaaa

SEQ ID NO: 77686 - DNA, 519 bp, Chicken  19866894366411_2
aaagagttaaaggcaaacatctcatgtaggccagccaccaggcaggacccacttagcatctagttagctattcacaaggtatgatccagtattgcagtttagaggtgaaggaatcattaatttgcctccacagctacttgtcttatctagacacatattttttttcattttcactactaaccacctgttctcaactgtatgggaactgttgaatgatggcctgaacctctgattgaccacctgaggcaagcactgagtcagccatgggagcacaggtgaaggcrattcatcctgtgtgaytggaaggggtgaagccaggctccacctctcctagaccccatttaagtgctgattgccaatgaggaagggtctctttttggagattgctccttgtggagtttcttgtaagcctacaatatgggtgagcactttcatttatctatgattttctttttcaacatgatgatctttacaaagtctaacttctctgtatacttactgataatccaatactttaaa

SEQ ID NO: 77687 - DNA, 600 bp, Chicken  19866894366417_1
ccccttccatcaacaaataggtaaatgaaataaagtgataagacaagggtatatattatctattctttttaaaacatctgtagaaaaaaatcaggacacaaaaggaggaactgccatttaaagtgaagaagagggtcatctttttctaatgggaatacattcggacatttaggattattttctatacacactcggcacttggaattcctgagtccttttcatgggctgaggacattgtgacttgtaaactggctgtagaaatgtgaattaaacaaagtttgtccccttgtgcactacatwtttagttagtccttgagaaagtaagtggaaaaattatatgttcagaaatgaagaaaagttcactttcaaaataaagatagcagtttctgaaatatttagtctgcttctgtatttctgaagaaagaaagcaaactttgaatttgttctattgtagaggaaaatccaaacttgattataaaatattctgttaggattcaaaaagaatacttctatcaaaaaaagatgaaatttacataaatatgccaccagtgggatttcacatgtagccttaggattttttaatgcatatttaaagtcaca

SEQ ID NO: 77688 - DNA, 600 bp, Chicken  19866894366419_1
ttgaagccctggctaagatttacccaatattcgaatgcaactgcaaaagaccctttcagtagtcagaaaataagatagtactaggaaaaaggaattttttgcccagaaataacaagttcatatagatctaagtaatccaagaaatacccctcagtcttctaaatatcaaagacacattccttcttttagaagggcctatgcttttcttcactattcttttctccagtgatggaaagtgctgctccacagtcttgtagaaggcaagtccaataaggtaatgaataatcttactgtcctacrcttcaatgactgaacttgttgccacacaaggatgatatrtatttatccagacaattccagctccaacaaacatagtccaagaacagagcacacattcctgagtgtctatcatttactggtagggtttatattttctgtttcttgttactgaaaatgcatacaggaacatgaaataccacaaaatgtctcacctgccattttgaaacaatctaaarctttaggtcactagtgaacactttaagctcaagggcccatcaattgggtgatattttttctgaattttaattgcatattgatggg

SEQ ID NO: 77689 - DNA, 600 bp, Chicken  19866894366419_2
actgcaaaagaccctttcagtagtcagaaaataagatagtactaggaaaaaggaattttttgcccagaaataacaagttcatatagatctaagtaatccaagaaatacccctcagtcttctaaatatcaaagacacattccttcttttagaagggcctatgcttttcttcactattcttttctccagtgatggaaagtgctgctccacagtcttgtagaaggcaagtccaataaggtaatgaataatcttactgtcctacrcttcaatgactgaacttgttgccacacaaggatgatatrtatttatccagacaattccagctccaacaaacatagtccaagaacagagcacacattcctgagtgtctatcatttactggtagggtttatattttctgtttcttgttactgaaaatgcatacaggaacatgaaataccacaaaatgtctcacctgccattttgaaacaatctaaarctttaggtcactagtgaacactttaagctcaagggcccatcaattgggtgatattttttctgaattttaattgcatattgatgggattatagttttggactatgtgctttatgtgtaagaaatg

SEQ ID NO: 77690 - DNA, 600 bp, Chicken  19866894366419_3
cttttctccagtgatggaaagtgctgctccacagtcttgtagaaggcaagtccaataaggtaatgaataatcttactgtcctacrcttcaatgactgaacttgttgccacacaaggatgatatrtatttatccagacaattccagctccaacaaacatagtccaagaacagagcacacattcctgagtgtctatcatttactggtagggtttatattttctgtttcttgttactgaaaatgcatacaggaacatgaaataccacaaaatgtctcacctgccattttgaaacaatctaaarctttaggtcactagtgaacactttaagctcaagggcccatcaattgggtgatattttttctgaattttaattgcatattgatgggattatagttttggactatgtgctttatgtgtaagaaatgtacagtaggagtaaatcaaagtatatctttttctgttaaatgtggagaagcatacatatattttacactgttaccctgaaaaaaaaaaaaagcaaggaacttcaaaatattatttgcacaagtaattaccctgtttgtttcctgcatctccaaatcttaattctcctatatgaaat

SEQ ID NO: 77691 - DNA, 599 bp, Chicken  19866894366427_1
  misc_feature (1)..(160): n is any nucleotide
nnnnnnnnnnnnnnnnnnnnnnnnnnnnnnnnnnnnnnnnnnnnnnnnnnnnnnnnnnnnnnnnnnnnnnnnnnnnnnnnnnnnnnnnnnnnnnnnnnnnnnnnnnnnnnnnnnnnnnnnnnnnnnnnnnnnnnnnnnnnnnnnnnnnnnnnnnnnnnnnaaatatatttattatgtccgatttgtttttattttctggtaatgcatgaataacaacaatcaggagttcaatcccatcagactttcaatcagatattgctcttattgtagtatgttaaccattgtctctgtatgtttacrtgtatgtgtgacagaaacgaggaatttgttctctgcagacatgatttcaacwgggaagaaawctaaaagataaccaaaatactgaggataatgatggtgacatattagaaaaccagatatttatattttttcaggatttcgttgttgttgttttttgtttgcttaatgttgctaaaggaaccccttatgtttgttaaacttggagacatacaggtagaggtacacacatgcaaaaccaaacaatattgtggggtagtcaaaaagagaaacgctttacagaagaaaytgcctcttctttc

SEQ ID NO: 77692 - DNA, 599 bp, Chicken  19866894366427_2
  misc_feature (1)..(108): n is any nucleotide
nnnnnnnnnnnnnnnnnnnnnnnnnnnnnnnnnnnnnnnnnnnnnnnnnnnnnnnnnnnnnnnnnnnnnnnnnnnnnnnnnnnnnnnnnnnnnnnnnnnnnnnnnnnnaaatatatttattatgtccgatttgtttttattttctggtaatgcatgaataacaacaatcaggagttcaatcccatcagactttcaatcagatattgctcttattgtagtatgttaaccattgtctctgtatgtttacrtgtatgtgtgacagaaacgaggaatttgttctctgcagacatgatttcaacwgggaagaaawctaaaagataaccaaaatactgaggataatgatggtgacatattagaaaaccagatatttatattttttcaggatttcgttgttgttgttttttgtttgcttaatgttgctaaaggaaccccttatgtttgttaaacttggagacatacaggtagaggtacacacatgcaaaaccaaacaatattgtggggtagtcaaaaagagaaacgctttacagaagaaaytgcctcttctttctatgcttcatatatttctggagatgttcctaaaacacctaagcacttttgmc

SEQ ID NO: 77693 - DNA, 599 bp, Chicken  19866894366427_3
  misc_feature (1)..(98): n is any nucleotide
nnnnnnnnnnnnnnnnnnnnnnnnnnnnnnnnnnnnnnnnnnnnnnnnnnnnnnnnnnnnnnnnnnnnnnnnnnnnnnnnnnnnnnnnnnnnnnnnnnaaatatatttattatgtccgatttgtttttattttctggtaatgcatgaataacaacaatcaggagttcaatcccatcagactttcaatcagatattgctcttattgtagtatgttaaccattgtctctgtatgtttacrtgtatgtgtgacagaaacgaggaatttgttctctgcagacatgatttcaacwgggaagaaawctaaaagataaccaaaatactgaggataatgatggtgacatattagaaaaccagatatttatattttttcaggatttcgttgttgttgttttttgtttgcttaatgttgctaaaggaaccccttatgtttgttaaacttggagacatacaggtagaggtacacacatgcaaaaccaaacaatattgtggggtagtcaaaaagagaaacgctttacagaagaaaytgcctcttctttctatgcttcatatatttctggagatgttcctaaaacacctaagcacttttgmcatcagccaat

SEQ ID NO: 77694 - DNA, 600 bp, Chicken  19866894366427_4
tctgtatgtttacrtgtatgtgtgacagaaacgaggaatttgttctctgcagacatgatttcaacwgggaagaaawctaaaagataaccaaaatactgaggataatgatggtgacatattagaaaaccagatatttatattttttcaggatttcgttgttgttgttttttgtttgcttaatgttgctaaaggaaccccttatgtttgttaaacttggagacatacaggtagaggtacacacatgcaaaaccaaacaatattgtggggtagtcaaaaagagaaacgctttacagaagaaaytgcctcttctttctatgcttcatatatttctggagatgttcctaaaacacctaagcacttttgmcatcagccaatggaaccttgctcttcacctcccaagctcagctctaagtgttcctgttttcacgggtgctgagagagaaacagtcagacttcaaggctgatggggatcaggggtgccttttattttgcaaaatattttgtgaatctgctttgcaacccacacagagagtcccagatattttacaagtcacaatatttttgagtttactggtggtgattctgctccagatgaatgat

SEQ ID NO: 77695 - DNA, 566 bp, Chicken  19866894366427_5
cwgggaagaaawctaaaagataaccaaaatactgaggataatgatggtgacatattagaaaaccagatatttatattttttcaggatttcgttgttgttgttttttgtttgcttaatgttgctaaaggaaccccttatgtttgttaaacttggagacatacaggtagaggtacacacatgcaaaaccaaacaatattgtggggtagtcaaaaagagaaacgctttacagaagaaaytgcctcttctttctatgcttcatatatttctggagatgttcctaaaacacctaagcacttttgmcatcagccaatggaaccttgctcttcacctcccaagctcagctctaagtgttcctgttttcacgggtgctgagagagaaacagtcagacttcaaggctgatggggatcaggggtgccttttattttgcaaaatattttgtgaatctgctttgcaacccacacagagagtcccagatattttacaagtcacaatatttttgagtttactggtggtgattctgctccagatgaatgatttgctttagggtcatttctgttattgacag

SEQ ID NO: 77696 - DNA, 600 bp, Chicken  19866894366428_1
ttgcatgttcctctccagccttctgcaggtccccactgcagatctctctacccacctccaaaactttgtgtacctctgtgatgttatctgtcaggggaaggctgcattatttattgactcgcagagcggaaggcaaagatagaagcacaaaggttactggaccttaaaagccagacaaagccaataacctttatgcaggatatcagcgtggggaaacatgcttggacagttataaatatcaccagaaagggagtattttgttttgtattaacttccatattttaaataaataggcaaccrtagcagcaaagcttcaattccagctaacagagagtccttgctacgtatctgcatttcatttcaggattgtttctcrgaggtatccccctgtgaatgttgtccccaaggatgarcctcctgccaggctgcctcccatacaccccacgttcctgtgctgaagcccttccctacacagccctgtttggtgttcttggggtctgyggaggarggggaggcagcacagctcacacctctgatccttcacgccaatgaggcgatccctctctgtgcatatctgggtcctcgaagcataggcatatt

SEQ ID NO: 77697 - DNA, 594 bp, Chicken  19866894366428_2
tgtgatgttatctgtcaggggaaggctgcattatttattgactcgcagagcggaaggcaaagatagaagcacaaaggttactggaccttaaaagccagacaaagccaataacctttatgcaggatatcagcgtggggaaacatgcttggacagttataaatatcaccagaaagggagtattttgttttgtattaacttccatattttaaataaataggcaaccrtagcagcaaagcttcaattccagctaacagagagtccttgctacgtatctgcatttcatttcaggattgtttctcrgaggtatccccctgtgaatgttgtccccaaggatgarcctcctgccaggctgcctcccatacaccccacgttcctgtgctgaagcccttccctacacagccctgtttggtgttcttggggtctgyggaggarggggaggcagcacagctcacacctctgatccttcacgccaatgaggcgatccctctctgtgcatatctgggtcctcgaagcataggcatattctttgttattcatacagtttgctctaccttcttgattctctgatgcctaaagaacaagtggaaagactga

SEQ ID NO: 77698 - DNA, 557 bp, Chicken  19866894366428_3
ttgactcgcagagcggaaggcaaagatagaagcacaaaggttactggaccttaaaagccagacaaagccaataacctttatgcaggatatcagcgtggggaaacatgcttggacagttataaatatcaccagaaagggagtattttgttttgtattaacttccatattttaaataaataggcaaccrtagcagcaaagcttcaattccagctaacagagagtccttgctacgtatctgcatttcatttcaggattgtttctcrgaggtatccccctgtgaatgttgtccccaaggatgarcctcctgccaggctgcctcccatacaccccacgttcctgtgctgaagcccttccctacacagccctgtttggtgttcttggggtctgyggaggarggggaggcagcacagctcacacctctgatccttcacgccaatgaggcgatccctctctgtgcatatctgggtcctcgaagcataggcatattctttgttattcatacagtttgctctaccttcttgattctctgatgcctaaagaacaagtggaaagactga

SEQ ID NO: 77699 - DNA, 469 bp, Chicken  19866894366428_4
atcagcgtggggaaacatgcttggacagttataaatatcaccagaaagggagtattttgttttgtattaacttccatattttaaataaataggcaaccrtagcagcaaagcttcaattccagctaacagagagtccttgctacgtatctgcatttcatttcaggattgtttctcrgaggtatccccctgtgaatgttgtccccaaggatgarcctcctgccaggctgcctcccatacaccccacgttcctgtgctgaagcccttccctacacagccctgtttggtgttcttggggtctgyggaggarggggaggcagcacagctcacacctctgatccttcacgccaatgaggcgatccctctctgtgcatatctgggtcctcgaagcataggcatattctttgttattcatacagtttgctctaccttcttgattctctgatgcctaaagaacaagtggaaagactga

SEQ ID NO: 77700 - DNA, 462 bp, Chicken  19866894366428_5
tggggaaacatgcttggacagttataaatatcaccagaaagggagtattttgttttgtattaacttccatattttaaataaataggcaaccrtagcagcaaagcttcaattccagctaacagagagtccttgctacgtatctgcatttcatttcaggattgtttctcrgaggtatccccctgtgaatgttgtccccaaggatgarcctcctgccaggctgcctcccatacaccccacgttcctgtgctgaagcccttccctacacagccctgtttggtgttcttggggtctgyggaggarggggaggcagcacagctcacacctctgatccttcacgccaatgaggcgatccctctctgtgcatatctgggtcctcgaagcataggcatattctttgttattcatacagtttgctctaccttcttgattctctgatgcctaaagaacaagtggaaagactga

SEQ ID NO: 77701 - DNA, 543 bp, Chicken  19866894366431_1
agttcaagtaatgagtcaaacagaaaacatgaaaaagcctcaattttgagggatgggaagagcatctggccctctctgtttcaggtaggtctggaaaagatgactcataggtaattaatttacacaagggggtgactttgcaaaatcatccccccgaacagcttcatcccgtgtttctggagcagtgatcctcggtttattttggtagctgttctaagccttcatttgatcctgcagcttccacaccgcagcggccccagtggggctgttcaccaggtgtgcacatttgcacacccaaarccctgtgatgctttgggcattgcttcttgggatgccctccatcccctgtagctccacctgaaagctttttcccactgctgtgcagctcaggagggcatcagcaccaaagggattccccgtcctttgcacccctgcagcaccacagggctgactcagagtgtgcagagcctgaatcccacccttggttaccaagaagtgtgatgagtcagtgctttcctttcacccctcaggctccattttaca

SEQ ID NO: 77702 - DNA, 599 bp, Chicken  19866894366432_1
  misc_feature (1)..(64): n is any nucleotide
nnnnnnnnnnnnnnnnnnnnnnnnnnnnnnnnnnnnnnnnnnnnnnnnnnnnnnnnnnnnnnnntctggacaaaacaaatgcaagagaaaacctttgtagtctgtcagtttttagataattgatcgcttttagagtgaggtctgtgcatactgacaggaaagaggcaatttaaagggaccggaccgaaaggaactgtaaaaacaaagtgggaattgagaatgcaagagagaaaaaacagcaaacgattgttcaagaggttggtacactctcttactctttttggctgtggacagagcacrttaagctttaacctcttgcgttgtcggatgctatctggttgagcagttcctgctgcgaggctgggggctgtggatcccctcagcccacctgcctgccgccaggtctgtcctcccagtgcatggaggtcggcacagctccaggcagagcaccccatgccccatgacacgctgctgtcggctgctcctcacttctcttctttcccacaggttgttcccacagccccatgggagggcagttcacaggaccctgctcttctggatgcggtgacttcttgccaggcaccgggaaagcactcagc

SEQ ID NO: 77703 - DNA, 599 bp, Chicken  19866894366438_1
  misc_feature (1)..(147): n is any nucleotide
nnnnnnnnnnnnnnnnnnnnnnnnnnnnnnnnnnnnnnnnnnnnnnnnnnnnnnnnnnnnnnnnnnnnnnnnnnnnnnnnnnnnnnnnnnnnnnnnnnnnnnnnnnnnnnnnnnnnnnnnnnnnnnnnnnnnnnnnnnnnnnnnnnngggcctcgatcccggccccacagaatggtcggggtctctttgctgctgggatggatgggaggaacacgaaggctgagcctcagttatttatggcacgtctcttttttttcatctgatctgtccttaaaagtcctttggatccccccggacccwccccagacccacaacagccttctgtctaccactgcagccccttctctgccccctccacagggggagctgtgcagagtcaccccccagcagcccattgcctgcatggggctgggcagggggcttcggggcagccctgcttccctttcgtctgggaggagaagagctgcagctctgtagggtttggtgctgggagcaccctgaggggcagagctgtccctgatgggatcccaaccccacagctcggtgtgggtcgyggctgtcggctcactgctgccatggccacgtggttacccacgacc

SEQ ID NO: 77704 - DNA, 600 bp, Chicken  19866894366438_2
ttcatctgatctgtccttaaaagtcctttggatccccccggacccwccccagacccacaacagccttctgtctaccactgcagccccttctctgccccctccacagggggagctgtgcagagtcaccccccagcagcccattgcctgcatggggctgggcagggggcttcggggcagccctgcttccctttcgtctgggaggagaagagctgcagctctgtagggtttggtgctgggagcaccctgaggggcagagctgtccctgatgggatcccaaccccacagctcggtgtgggtcgyggctgtcggctcactgctgccatggccacgtggttacccacgacctctgctttcctctttcaattcaatccctgtccctcgtggctgcgggaccttccctctgcaaagcctcggrtaacagaaagaaacaacctygtgctccatcaggcttccttccacgggctgctcctacagtgtcgttggctcccggtgctgcttcatcccrctctgcccatccccacgtgccttaacagctttggaggtggccctgtgctatccggagtgcgaggggtaggaaggagaccagcaaaggtccgtaac

SEQ ID NO: 77705 - DNA, 489 bp, Chicken  19866894366438_3
tgcagagtcaccccccagcagcccattgcctgcatggggctgggcagggggcttcggggcagccctgcttccctttcgtctgggaggagaagagctgcagctctgtagggtttggtgctgggagcaccctgaggggcagagctgtccctgatgggatcccaaccccacagctcggtgtgggtcgyggctgtcggctcactgctgccatggccacgtggttacccacgacctctgctttcctctttcaattcaatccctgtccctcgtggctgcgggaccttccctctgcaaagcctcggrtaacagaaagaaacaacctygtgctccatcaggcttccttccacgggctgctcctacagtgtcgttggctcccggtgctgcttcatcccrctctgcccatccccacgtgccttaacagctttggaggtggccctgtgctatccggagtgcgaggggtaggaaggagaccagcaaaggtccgtaacccct

SEQ ID NO: 77706 - DNA, 469 bp, Chicken  19866894366438_4
gcccattgcctgcatggggctgggcagggggcttcggggcagccctgcttccctttcgtctgggaggagaagagctgcagctctgtagggtttggtgctgggagcaccctgaggggcagagctgtccctgatgggatcccaaccccacagctcggtgtgggtcgyggctgtcggctcactgctgccatggccacgtggttacccacgacctctgctttcctctttcaattcaatccctgtccctcgtggctgcgggaccttccctctgcaaagcctcggrtaacagaaagaaacaacctygtgctccatcaggcttccttccacgggctgctcctacagtgtcgttggctcccggtgctgcttcatcccrctctgcccatccccacgtgccttaacagctttggaggtggccctgtgctatccggagtgcgaggggtaggaaggagaccagcaaaggtccgtaacccct

SEQ ID NO: 77707 - DNA, 399 bp, Chicken  19866894366438_5
agagctgcagctctgtagggtttggtgctgggagcaccctgaggggcagagctgtccctgatgggatcccaaccccacagctcggtgtgggtcgyggctgtcggctcactgctgccatggccacgtggttacccacgacctctgctttcctctttcaattcaatccctgtccctcgtggctgcgggaccttccctctgcaaagcctcggrtaacagaaagaaacaacctygtgctccatcaggcttccttccacgggctgctcctacagtgtcgttggctcccggtgctgcttcatcccrctctgcccatccccacgtgccttaacagctttggaggtggccctgtgctatccggagtgcgaggggtaggaaggagaccagcaaaggtccgtaacccct

SEQ ID NO: 77708 - DNA, 599 bp, Chicken  19866894366439_1
  misc_feature (1)..(143): n is any nucleotide
nnnnnnnnnnnnnnnnnnnnnnnnnnnnnnnnnnnnnnnnnnnnnnnnnnnnnnnnnnnnnnnnnnnnnnnnnnnnnnnnnnnnnnnnnnnnnnnnnnnnnnnnnnnnnnnnnnnnnnnnnnnnnnnnnnnnnnnnnnnnnnnatttaggatgtggaattgcagatatttctaaattgtccagaataagtgtgtccaggtgcagagtaattgtgttttcttaaagacacatttcaaataactatttgagaaaatattgttcatagataatttcacattagctagatctagagaataccawtttttttttyycctttggtcctttgctatctgacaaagccttgaataagacaaggtattacattctgaagtttgattgcatatcatctcttsaaaaccatcggtaattgaaaatcagcataaaagagaaggaagaggaaatgattgcttccaatttcaaacaatgcaactcctacataaaagctttgtttgtcctgctcacaaagaatttgaacaccattagtttctgaaacatgaraagaatccaaattgaaacaacatccattttatttggacatgttaaataggaagcattaaaac

SEQ ID NO: 77709 - DNA, 599 bp, Chicken  19866894366439_2
  misc_feature (1)..(133): n is any nucleotide
nnnnnnnnnnnnnnnnnnnnnnnnnnnnnnnnnnnnnnnnnnnnnnnnnnnnnnnnnnnnnnnnnnnnnnnnnnnnnnnnnnnnnnnnnnnnnnnnnnnnnnnnnnnnnnnnnnnnnnnnnnnnnnnnnnnnnatttaggatgtggaattgcagatatttctaaattgtccagaataagtgtgtccaggtgcagagtaattgtgttttcttaaagacacatttcaaataactatttgagaaaatattgttcatagataatttcacattagctagatctagagaataccawtttttttttyycctttggtcctttgctatctgacaaagccttgaataagacaaggtattacattctgaagtttgattgcatatcatctcttsaaaaccatcggtaattgaaaatcagcataaaagagaaggaagaggaaatgattgcttccaatttcaaacaatgcaactcctacataaaagctttgtttgtcctgctcacaaagaatttgaacaccattagtttctgaaacatgaraagaatccaaattgaaacaacatccattttatttggacatgttaaataggaagcattaaaacaaaaccagtg

SEQ ID NO: 77710 - DNA, 599 bp, Chicken  19866894366439_3
  misc_feature (1)..(132): n is any nucleotide
nnnnnnnnnnnnnnnnnnnnnnnnnnnnnnnnnnnnnnnnnnnnnnnnnnnnnnnnnnnnnnnnnnnnnnnnnnnnnnnnnnnnnnnnnnnnnnnnnnnnnnnnnnnnnnnnnnnnnnnnnnnnnnnnnnnnatttaggatgtggaattgcagatatttctaaattgtccagaataagtgtgtccaggtgcagagtaattgtgttttcttaaagacacatttcaaataactatttgagaaaatattgttcatagataatttcacattagctagatctagagaataccawtttttttttyycctttggtcctttgctatctgacaaagccttgaataagacaaggtattacattctgaagtttgattgcatatcatctcttsaaaaccatcggtaattgaaaatcagcataaaagagaaggaagaggaaatgattgcttccaatttcaaacaatgcaactcctacataaaagctttgtttgtcctgctcacaaagaatttgaacaccattagtttctgaaacatgaraagaatccaaattgaaacaacatccattttatttggacatgttaaataggaagcattaaaacaaaaccagtgt

SEQ ID NO: 77711 - DNA, 599 bp, Chicken  19866894366439_4
  misc_feature (1)..(51): n is any nucleotide
nnnnnnnnnnnnnnnnnnnnnnnnnnnnnnnnnnnnnnnnnnnnnnnnnnnatttaggatgtggaattgcagatatttctaaattgtccagaataagtgtgtccaggtgcagagtaattgtgttttcttaaagacacatttcaaataactatttgagaaaatattgttcatagataatttcacattagctagatctagagaataccawtttttttttyycctttggtcctttgctatctgacaaagccttgaataagacaaggtattacattctgaagtttgattgcatatcatctcttsaaaaccatcggtaattgaaaatcagcataaaagagaaggaagaggaaatgattgcttccaatttcaaacaatgcaactcctacataaaagctttgtttgtcctgctcacaaagaatttgaacaccattagtttctgaaacatgaraagaatccaaattgaaacaacatccattttatttggacatgttaaataggaagcattaaaacaaaaccagtgtattttacgaatagcaatatgaaatgccctacatttttttccttatagtaatacttctataaaaaccacacaagaacagtta

SEQ ID NO: 77712 - DNA, 600 bp, Chicken  19866894366439_5
taactatttgagaaaatattgttcatagataatttcacattagctagatctagagaataccawtttttttttyycctttggtcctttgctatctgacaaagccttgaataagacaaggtattacattctgaagtttgattgcatatcatctcttsaaaaccatcggtaattgaaaatcagcataaaagagaaggaagaggaaatgattgcttccaatttcaaacaatgcaactcctacataaaagctttgtttgtcctgctcacaaagaatttgaacaccattagtttctgaaacatgaraagaatccaaattgaaacaacatccattttatttggacatgttaaataggaagcattaaaacaaaaccagtgtattttacgaatagcaatatgaaatgccctacatttttttccttatagtaatacttctataaaaaccacacaagaacagttaccctaaagaacgctgactaaaaagtattcctaacacatatcttttgggttttgcaaagaggtctttatgtcacacttgctaataaaattaaatgttaacttccttatatttttgcttaaacattcttattgcttatcctctccatc

SEQ ID NO: 77713 - DNA, 600 bp, Chicken  19866894366442_1
ggacgtggggagggagatggggccctttgtcaactcctagtgctgcaatgaactggttgcttgccagactgggaatgaatttctcttttccacccattgctgttaactttctgtaaagggggcttccccacacgctttcaagggggaggaggatgatcggcttccttacgatgggacagttcttttgacttgaggggtcccgctcttgtgtgaagcgagagccgtgaagatcagtcacaggggcagttaacgcagtcttgctgtaaaatttctctggtttgaggccgcatccgcgtatgwcaagatgggagagttgaatcctagcatgaggctttagcacacttctctccctgaagatccgagaccagctgtccaaatccccctcctctccctctccccactcaatcgtatttggctccagaacgatggggcacccgaatggacttgcagtgcagcccgtgcttgataggtcattactgctttaagtaagatattaacagctttgactgcagcattagagcaatttaaattgtttaaaaattttaaaagttccctgcggacatgtacttaccatcagttttgatgtggaaacactgtgat

SEQ ID NO: 77714 - DNA, 599 bp, Chicken  19866894366446_1
  misc_feature (1)..(175): n is any nucleotide
nnnnnnnnnnnnnnnnnnnnnnnnnnnnnnnnnnnnnnnnnnnnnnnnnnnnnnnnnnnnnnnnnnnnnnnnnnnnnnnnnnnnnnnnnnnnnnnnnnnnnnnnnnnnnnnnnnnnnnnnnnnnnnnnnnnnnnnnnnnnnnnnnnnnnnnnnnnnnnnnnnnnnnnnnnnnnnnctggaagctttgaaaaagcttgatactcttgatgtatgctgtaattataaagatgaaagtacatatttaaaaataaaaaacatcagtgagaatctaaaggcttgttaatgtttaaagcaaagggraaaaraagaagtctgtgctgttttcagagtatatcaacatcagttgtatattactctctcagcctgacagcatgcaagacctacctgtggacttgtctttctgaaagtgtcagtcccatgtatgacatctcttattatcctttctctcagattattgtactcctcttcggtgagctcactatcttccagctgatggttgcaaacgggacactgtccgctgcaaatagtgaaacaagaagacaaaaataagatacaagaagatgaaaataaayaagcatcaccttagattttacaatctt

SEQ ID NO: 77715 - DNA, 599 bp, Chicken  19866894366446_2
  misc_feature (1)..(170): n is any nucleotide
nnnnnnnnnnnnnnnnnnnnnnnnnnnnnnnnnnnnnnnnnnnnnnnnnnnnnnnnnnnnnnnnnnnnnnnnnnnnnnnnnnnnnnnnnnnnnnnnnnnnnnnnnnnnnnnnnnnnnnnnnnnnnnnnnnnnnnnnnnnnnnnnnnnnnnnnnnnnnnnnnnnnnnnnnnctggaagctttgaaaaagcttgatactcttgatgtatgctgtaattataaagatgaaagtacatatttaaaaataaaaaacatcagtgagaatctaaaggcttgttaatgtttaaagcaaagggraaaaraagaagtctgtgctgttttcagagtatatcaacatcagttgtatattactctctcagcctgacagcatgcaagacctacctgtggacttgtctttctgaaagtgtcagtcccatgtatgacatctcttattatcctttctctcagattattgtactcctcttcggtgagctcactatcttccagctgatggttgcaaacgggacactgtccgctgcaaatagtgaaacaagaagacaaaaataagatacaagaagatgaaaataaayaagcatcaccttagattttacaatcttaatgg

SEQ ID NO: 77716 - DNA, 600 bp, Chicken  19866894366446_3
aggcttgttaatgtttaaagcaaagggraaaaraagaagtctgtgctgttttcagagtatatcaacatcagttgtatattactctctcagcctgacagcatgcaagacctacctgtggacttgtctttctgaaagtgtcagtcccatgtatgacatctcttattatcctttctctcagattattgtactcctcttcggtgagctcactatcttccagctgatggttgcaaacgggacactgtccgctgcaaatagtgaaacaagaagacaaaaataagatacaagaagatgaaaataaayaagcatcaccttagattttacaatcttaatgggcatctgactataagaacattttttcccacaaatccaacacaataaaataatgagaaaattggttgtggtttttctggtatgcatccaaaactctgaagtcgctgtggccgcttctagatttttgtatgacattccagaactatgcctggagaaacaataagaatctttttaaagacacagcctttttaaagttggttcatgtcccacagccacagtctctgccctaacccatagtctgaagaaaatccaactgtaactgtcattgcc

SEQ ID NO: 77717 - DNA, 600 bp, Chicken  19866894366449_1
atctgtcagacgggacatacttgcctaggttaaaatatgatattagagcataatatctgttgggaatcaaaatatatactgggaattagatttaaaaaaatagaaggggcattctttcatcagccttatttgccaactcattaaacgtgttttctccatgtggctaatactcacttggagctacatgtcttgtatagaaatgatatataatttcttagctacctataaagaaataactgtaatcagtagttggctgtaaaaatcatactcttacctaagagttttttttaactagttgcratgatgtcgtgttacttcttaaagcctttgtggtgtaaaaccaacgcaatttgaataatctaactgaagtaataatcctgatacatcrtactgtattatgatggaacatctatgtgtataattgttctcacccaagtgtggagtacatgaagtccgtattgaagtgaacagcttaagtagccttatttttatttcaaagctgagttatcaaatcctggtgatgcctgcctgccaattagggtttcatgcttacctcatgaaagcaaatgaagaaatttcagtatytgtggcaatggaaac

SEQ ID NO: 77718 - DNA, 600 bp, Chicken  19866894366449_2
gatttaaaaaaatagaaggggcattctttcatcagccttatttgccaactcattaaacgtgttttctccatgtggctaatactcacttggagctacatgtcttgtatagaaatgatatataatttcttagctacctataaagaaataactgtaatcagtagttggctgtaaaaatcatactcttacctaagagttttttttaactagttgcratgatgtcgtgttacttcttaaagcctttgtggtgtaaaaccaacgcaatttgaataatctaactgaagtaataatcctgatacatcrtactgtattatgatggaacatctatgtgtataattgttctcacccaagtgtggagtacatgaagtccgtattgaagtgaacagcttaagtagccttatttttatttcaaagctgagttatcaaatcctggtgatgcctgcctgccaattagggtttcatgcttacctcatgaaagcaaatgaagaaatttcagtatytgtggcaatggaaactatgctaaaaagatggtrttgtggcatcatttcctgaggctttcctctgcactgcctaggggaggatttttttttwaattggggcaat

SEQ ID NO: 77719 - DNA, 600 bp, Chicken  19866894366449_3
ttttaactagttgcratgatgtcgtgttacttcttaaagcctttgtggtgtaaaaccaacgcaatttgaataatctaactgaagtaataatcctgatacatcrtactgtattatgatggaacatctatgtgtataattgttctcacccaagtgtggagtacatgaagtccgtattgaagtgaacagcttaagtagccttatttttatttcaaagctgagttatcaaatcctggtgatgcctgcctgccaattagggtttcatgcttacctcatgaaagcaaatgaagaaatttcagtatytgtggcaatggaaactatgctaaaaagatggtrttgtggcatcatttcctgaggctttcctctgcactgcctaggggaggatttttttttwaattggggcaattacaggtacagaaattatttttctcttaactcttttgcttctaaaaagtgatttcctaaatgaaaactctatgtctacactgctcacttcagctttgaataataatttttaataagacccgcaatactcttcagaatggaatataggaaatattacattgygggtcattttctaaggaaagcagtcagcttactgct

SEQ ID NO: 77720 - DNA, 600 bp, Chicken  19866894366449_4
ttaaagcctttgtggtgtaaaaccaacgcaatttgaataatctaactgaagtaataatcctgatacatcrtactgtattatgatggaacatctatgtgtataattgttctcacccaagtgtggagtacatgaagtccgtattgaagtgaacagcttaagtagccttatttttatttcaaagctgagttatcaaatcctggtgatgcctgcctgccaattagggtttcatgcttacctcatgaaagcaaatgaagaaatttcagtatytgtggcaatggaaactatgctaaaaagatggtrttgtggcatcatttcctgaggctttcctctgcactgcctaggggaggatttttttttwaattggggcaattacaggtacagaaattatttttctcttaactcttttgcttctaaaaagtgatttcctaaatgaaaactctatgtctacactgctcacttcagctttgaataataatttttaataagacccgcaatactcttcagaatggaatataggaaatattacattgygggtcattttctaaggaaagcagtcagcttactgctagctgtttcaggcttgttggcttttattgcatt

SEQ ID NO: 77721 - DNA, 600 bp, Chicken  19866894366449_5
cctgatacatcrtactgtattatgatggaacatctatgtgtataattgttctcacccaagtgtggagtacatgaagtccgtattgaagtgaacagcttaagtagccttatttttatttcaaagctgagttatcaaatcctggtgatgcctgcctgccaattagggtttcatgcttacctcatgaaagcaaatgaagaaatttcagtatytgtggcaatggaaactatgctaaaaagatggtrttgtggcatcatttcctgaggctttcctctgcactgcctaggggaggatttttttttwaattggggcaattacaggtacagaaattatttttctcttaactcttttgcttctaaaaagtgatttcctaaatgaaaactctatgtctacactgctcacttcagctttgaataataatttttaataagacccgcaatactcttcagaatggaatataggaaatattacattgygggtcattttctaaggaaagcagtcagcttactgctagctgtttcaggcttgttggcttttattgcattatcacacccttctgagctttctcttacatatactgtgtgggtaaatccttattgttta

SEQ ID NO: 77722 - DNA, 600 bp, Chicken  19866894366449_6
ttacctcatgaaagcaaatgaagaaatttcagtatytgtggcaatggaaactatgctaaaaagatggtrttgtggcatcatttcctgaggctttcctctgcactgcctaggggaggatttttttttwaattggggcaattacaggtacagaaattatttttctcttaactcttttgcttctaaaaagtgatttcctaaatgaaaactctatgtctacactgctcacttcagctttgaataataatttttaataagacccgcaatactcttcagaatggaatataggaaatattacattgygggtcattttctaaggaaagcagtcagcttactgctagctgtttcaggcttgttggcttttattgcattatcacacccttctgagctttctcttacatatactgtgtgggtaaatccttattgtttaaatctctacctgcatctattgcacacaactgtgcatttccagaagaggagcggacgtggtatgaaaataaataacctggcaagtaatgtgatttgaacaaaaagtgtggatggtgttggagcagagttatccctcagtgtgttctattagcacattttatcttgctactgtgc

SEQ ID NO: 77723 - DNA, 599 bp, Chicken  19866894366452_1
  misc_feature (1)..(61): n is any nucleotide
nnnnnnnnnnnnnnnnnnnnnnnnnnnnnnnnnnnnnnnnnnnnnnnnnnnnnnnnnnnnncttgtgcctgttctgttttttaaggggggagggttccgtgcatgtgaggctgactggtggcgggggttcagggcagccagtagcagcagatgggaaaagtcttgtaacatttaatgcttctttgactgtttctaaaataggtgtcaattcacaacaggcttcaaacgtaccagcacaactccgccctggggcccgagagtggaatgcagcccagcatgcgtcttaacatgccacgggarcggctggagacagcactggtgccctcacaccccgcctcggcggggacacttgtacagtgccagcagattgtcaaagtcattgtcttggacaagccgtgcctcgctcgaatggagccggccctcaaccagactctgacacgctacgtcacctccgattcctgcacctccaccccctggcgcggtgtgggcagtgggctccccgggacccccatgaagctggtccatcagcctcccctgccacctccacctcctccctacaaccacccccatcagtattgcccccccagctccctgcttca

SEQ ID NO: 77724 - DNA, 599 bp, Chicken  19866894366461_1
  misc_feature (1)..(89): n is any nucleotide
nnnnnnnnnnnnnnnnnnnnnnnnnnnnnnnnnnnnnnnnnnnnnnnnnnnnnnnnnnnnnnnnnnnnnnnnnnnnnnnnnnnnnnnnncatgtactcgcgccgctcgctctatcacacccggcatgaaggacctcaaaggacttcatcccgcgtgcaccgcctgccccagcagctcaagcagaggatgctggagtacttccaagaccacctggtcggtgaacaacgggcatagatgctaacgaggtaggagggttcatagggctggacctgctgctctcctgcacccagggccagtgayaggagtgcaggcgtgtgcgtgtgcagacgtccatgttctgctgctggagagatcagagctgtgtgcaggarcagggcaggttcctggctgtgtggggcaygagagcacacacatggagcagtggcagcctgtcctgagctgtcctragtttgccatgcagagaggccctggcaatgttctcagccctacagggcacagggatgcaacattctcccatcctggctcctctctctccagctgctgcgtgacttccccgacgagctccgtgccgacgtggccatgcacctgaacaaggacat

SEQ ID NO: 77725 - DNA, 599 bp, Chicken  19866894366461_2
  misc_feature (1)..(18): n is any nucleotide
nnnnnnnnnnnnnnnnnncatgtactcgcgccgctcgctctatcacacccggcatgaaggacctcaaaggacttcatcccgcgtgcaccgcctgccccagcagctcaagcagaggatgctggagtacttccaagaccacctggtcggtgaacaacgggcatagatgctaacgaggtaggagggttcatagggctggacctgctgctctcctgcacccagggccagtgayaggagtgcaggcgtgtgcgtgtgcagacgtccatgttctgctgctggagagatcagagctgtgtgcaggarcagggcaggttcctggctgtgtggggcaygagagcacacacatggagcagtggcagcctgtcctgagctgtcctragtttgccatgcagagaggccctggcaatgttctcagccctacagggcacagggatgcaacattctcccatcctggctcctctctctccagctgctgcgtgacttccccgacgagctccgtgccgacgtggccatgcacctgaacaaggacatcctgcagctgcccatctttgagaccgccagccgaggctgcttgcgctccctctcgctgcacatcaagacgt

SEQ ID NO: 77726 - DNA, 600 bp, Chicken  19866894366461_3
gccgctcgctctatcacacccggcatgaaggacctcaaaggacttcatcccgcgtgcaccgcctgccccagcagctcaagcagaggatgctggagtacttccaagaccacctggtcggtgaacaacgggcatagatgctaacgaggtaggagggttcatagggctggacctgctgctctcctgcacccagggccagtgayaggagtgcaggcgtgtgcgtgtgcagacgtccatgttctgctgctggagagatcagagctgtgtgcaggarcagggcaggttcctggctgtgtggggcaygagagcacacacatggagcagtggcagcctgtcctgagctgtcctragtttgccatgcagagaggccctggcaatgttctcagccctacagggcacagggatgcaacattctcccatcctggctcctctctctccagctgctgcgtgacttccccgacgagctccgtgccgacgtggccatgcacctgaacaaggacatcctgcagctgcccatctttgagaccgccagccgaggctgcttgcgctccctctcgctgcacatcaagacgtcgttctgtgcgccgggcgagtacctgctgc

SEQ ID NO: 77727 - DNA, 600 bp, Chicken  19866894366461_4
atcccgcgtgcaccgcctgccccagcagctcaagcagaggatgctggagtacttccaagaccacctggtcggtgaacaacgggcatagatgctaacgaggtaggagggttcatagggctggacctgctgctctcctgcacccagggccagtgayaggagtgcaggcgtgtgcgtgtgcagacgtccatgttctgctgctggagagatcagagctgtgtgcaggarcagggcaggttcctggctgtgtggggcaygagagcacacacatggagcagtggcagcctgtcctgagctgtcctragtttgccatgcagagaggccctggcaatgttctcagccctacagggcacagggatgcaacattctcccatcctggctcctctctctccagctgctgcgtgacttccccgacgagctccgtgccgacgtggccatgcacctgaacaaggacatcctgcagctgcccatctttgagaccgccagccgaggctgcttgcgctccctctcgctgcacatcaagacgtcgttctgtgcgccgggcgagtacctgctgcggcagggcgatgcgctgcaggccaactactttgtctgctccggctc

SEQ ID NO: 77728 - DNA, 508 bp, Chicken  19866894366461_5
cgagctccgtgccgacgtggccatgcacctgaacaaggacatcctgcagctgcccatctttgagaccgccagccgaggctgcttgcgctccctctcgctgcacatcaagacgtcgttctgtgcgccgggcgagtacctgctgcggcagggcgatgcgctgcaggccaactactttgtctgctccggctccctcgaggtgctgagggacagcgtggtgttggccatcctgggtgagggccgtccccacagcatgttgctgcctgcccggcacggggctggcaccgccatagcccatgctcygtcccctcccacaggcaaaggggatctgatcggtgccgacctggccagcagggacccggtgatcaaaaccaacgcggacgtgaaggcgctgacctactgcgacctgcagtacattgggctgcgggggctgcgtgaggtgctgcagctctaccccgagtatgccagcaagttcgcagcggacatccaccaggacctcaccttcaacctg

SEQ ID NO: 77729 - DNA, 600 bp, Chicken  19866894366471_1
ggcagcctggtctagtggttggcaaccctgcacatagcaggggggttgaaactaaatgatcattgtggtccttttcagccaaggcccttctatgataactatgaagaacataaagtgcttgctttctgctatatggataagccacaatttcaagctatttgcttttttcatcatttaaacttactccccagttttatctgcacacattgttagtgtgactcagtgggtgcagttctatgaaaccatatgctcagaagtctgagggctgctgaagcctgtcaacagtcagacatatcaacrgctgacatctgcaccagttgtcagaccaatgactatgaatgtcactgctcattagacttattttcagtcatccagctatagtgatatgatctgtaactcttcctgctactgcaggatacaaggaccgatagtctgattcacccagttggagaaatactagaatgctgatagtatcctcagttgctatgacagcatcacagtcagggtgtgatccaggattcataatgcctgacaacaggaaaaacagagtccaagctctaagaggtaatgcatatgtatagaagaagtaaaacatgcaca

SEQ ID NO: 77730 - DNA, 600 bp, Chicken  19866894366472_1
taatgaaatagatgcatccagcagactggtgcaaaggcttcatcctgacatggaaagtagtcctagaaaaattgtggtctgggacacattcgaagtctattgtacagtgaataccatccctgttctaattcatgcaaagggcagagaagaccatgcatggccgaggccagacaggttgtgttcatcttctactcacattccttcctcttcagataaaaggacaaagcagacgaaaagtcaattccatgtaattttattaaatcaaaatttctacctctttgaaagagaggtgaaacaackaaaatgtctgcagctggccagaacaaagattcatcttttcaataaattccaatttttctgcttttagtttaatgtagagatgtgcagatgctaaatattcacagcctgtgcaccttataattacacgaacaattcatttcccttgtaatgttcctgttcccaagctgacagaagataaattctaataataatagtaaggagaaaaaaaagaacaaattttagtttagctttgttgcattgttctccagagattacaacaaacagacatctgtttgctgtggtatggctaccgtgcagctg

SEQ ID NO: 77731 - DNA, 600 bp, Chicken  19866894366472_2
ggccagaacaaagattcatcttttcaataaattccaatttttctgcttttagtttaatgtagagatgtgcagatgctaaatattcacagcctgtgcaccttataattacacgaacaattcatttcccttgtaatgttcctgttcccaagctgacagaagataaattctaataataatagtaaggagaaaaaaaagaacaaattttagtttagctttgttgcattgttctccagagattacaacaaacagacatctgtttgctgtggtatggctaccgtgcagctggacagtatattatayacagacaaacagctaaagtttaaaagggaaaagttattaaggacaaaaacataaactggatatttaaataagttgcactgtgctgaaggcragtgactgttaagttgctaggaagctcctctgaaggaaacaagtccccttccttgtctgctttgaggcaaagaccttgaacactgaagcctatgctcactctgattctttacgatttcacgtaagtaactttgccctgggttctcttcctatacttcagcttatctgaagtacatatctccaaaaccagtggcatgatctagtcagaag

SEQ ID NO: 77732 - DNA, 600 bp, Chicken  19866894366472_3
tgtgcaccttataattacacgaacaattcatttcccttgtaatgttcctgttcccaagctgacagaagataaattctaataataatagtaaggagaaaaaaaagaacaaattttagtttagctttgttgcattgttctccagagattacaacaaacagacatctgtttgctgtggtatggctaccgtgcagctggacagtatattatayacagacaaacagctaaagtttaaaagggaaaagttattaaggacaaaaacataaactggatatttaaataagttgcactgtgctgaaggcragtgactgttaagttgctaggaagctcctctgaaggaaacaagtccccttccttgtctgctttgaggcaaagaccttgaacactgaagcctatgctcactctgattctttacgatttcacgtaagtaactttgccctgggttctcttcctatacttcagcttatctgaagtacatatctccaaaaccagtggcatgatctagtcagaagactgtggtacgttaaggagccagagctacatgtaacagttacactgaggttgtgctgtgcccagcagcacatacagcttgcactcctggcc

SEQ ID NO: 77733 - DNA, 600 bp, Chicken  19866894366476_1
aggatatgtaaaaaggagaaaaatcagtcctgcttaattccaaaacctgtggcccatgcaaacaaaactgaggactgaatcctgaaaaataatgactgattcaggaatcgtgacacacatgaactacttcttcaatatgaactacttctaaaaagctattatgatctttggatatgtgagaatttgattagagacactattaaaaagatattttgggcaggtctgaaatctgcgcttttcctctttttgtttctgaataacagaatcaaggacaaagagattatataagctatcagtacygtttatcaaaaagaagactgagatgttttgcctactgtctacggaacaacttcaagaagaaaaaatacagctactaaaaagctccttgatctgagaaagccataataagaagcaattgctgaaagctgcacttggagaagagcaaattggaaacatggaacaaaggtaatatttttcaaacagtgagaataatactgggaagcagtgagaaaagatgaattcttcaactgttatgtcttaccaatgatgtaaaaattaatacataatatataaaatgctcatgtgttaatatgatctttc

SEQ ID NO: 77734 - DNA, 600 bp, Chicken  19866894366482_1
gcacctataaaaggacttactatttttgggtttgagaagctgtggagatcttcattcagaaacgtgcctgaattttgttccttcatggcacagacgtcattcaactgtagatctgcatgagtgtttaagtgcatctttttgtatttaatgtgactggttttcttgggtttgcaacagcagggtctttcctgcatgtttgaacagcacatgcacaaagcccttactctgagcacagctactgaatgtatatgtttatttcagttttatatgccaggcactgagcaaaccctcaacaaatgktgtcctcagaacttggccgcacacccaagccagtcaaactttccatggagtcagaacctcaaaaatycctcaccaagaaggaaacattggttgcctgaatccatttaagtagaggagaggggaaaaaaagaaaacacattcatcaagttctgtctggtcagatgataatggccagaaactcagccttccacttttgttaggttttacaacctcactgacgagctacatcttaggctggggacaagggtagggtggagacggagaggaccaaaccaaaccaatgcctcattgttgatgctg

SEQ ID NO: 77735 - DNA, 600 bp, Chicken  19866894366482_2
ctgaattttgttccttcatggcacagacgtcattcaactgtagatctgcatgagtgtttaagtgcatctttttgtatttaatgtgactggttttcttgggtttgcaacagcagggtctttcctgcatgtttgaacagcacatgcacaaagcccttactctgagcacagctactgaatgtatatgtttatttcagttttatatgccaggcactgagcaaaccctcaacaaatgktgtcctcagaacttggccgcacacccaagccagtcaaactttccatggagtcagaacctcaaaaatycctcaccaagaaggaaacattggttgcctgaatccatttaagtagaggagaggggaaaaaaagaaaacacattcatcaagttctgtctggtcagatgataatggccagaaactcagccttccacttttgttaggttttacaacctcactgacgagctacatcttaggctggggacaagggtagggtggagacggagaggaccaaaccaaaccaatgcctcattgttgatgctgttcaatgggaagcctgctgtgcccttggagaggccccagctctcaaaggaaggatggtttttgctgt

SEQ ID NO: 77736 - DNA, 599 bp, Chicken  19866894366490_1
  misc_feature (1)..(35): n is any nucleotide
nnnnnnnnnnnnnnnnnnnnnnnnnnnnnnnnnnngcatgtttttgttttcaacccaaacaattgtaacctttctatcgtttttaccttcactggctggtaaactcagtacagttgcttcccctttcaacctactttgctctgtaaggtttctctgctaggattttactttaatgctcttaattgttttgtaagcatatgtttttgccagctgtgaagatgctggctcttgaggacaaattctttaaatggcaagtcatacagagtgaatatgggaaggacttgttttcattaaaaacawtttaatcccttctctgagttagtcatcagctgacttctgccttccacacttgttgttaggaattatttgattaatgatccataaaatatgtattaggctgaggattatttacgtatttttcacctaactactgctttgaatgtttgccatttgcaatttgacatatgtgctatgcaatcagtgaccttggttacacgatattattttggtactccaattgcgtatttggagagcagccaagaagccttcaagataactgtgtacatatctactatgaataatcaggtgaatacatattg

SEQ ID NO: 77737 - DNA, 600 bp, Chicken  19866894366492_1
gagaaatctatttctgaaacaacagaaaagggaaaagctagataaaaaataaaattagatggtatgctccaagaaataagctaggggaatcattggcagcaggttatactggaggataagagagcacttgtcaaggttggagaaaagtaagtgattaggacaaaagatgtgatgtgcattctccactaacacgtggagatatgtcttagacacataatatggaaactatgcaattgaagcctgaatatgagatagcttttgctttattctttttctctttttatattgttttcatccttrattttaatttctaacctaaaattttttgacagtggattctatcatccacaggcattttgctcaactatcctttcaggaaatatcttcaacctgaacatgccccacagtcattttaatgcatttccaacattccctgaaagcactgtgaattggtccactgatttcaatagtctttagatcagacccatgggactgctagataaatgcgttacatactccagaatgaacagttagaaagacagtgctctaagattaatgtaactgttgtttccacagtgagtcttttcaagaaagtgaata

SEQ ID NO: 77738 - DNA, 600 bp, Chicken  19866894366494_1
cagtaacaagtcttaacagatgaaaaagaacaaattgtaattcactatgcatcaagatttcttggacttctatggaagcaagcaaacatttaccactttatccatagcaactacaatttcctacaggtactcaaattcccaatgcagtttaatttgggtagaattcttacacttctgctctagatagttttttcttaaaataaacgcatcacacaaaggttagtaaccagtggacacttgttttttgttaactgtacttctctctgggggggcagaagaaggcaataaatagagaaaatwggaaaacacaaatgttctttgcaagacacatttcaagactaacacaagctggcagaagcattaacattcactttyaaagctcatagttgttctttatcctagaacatctacatgcagcattacaaatttcatataaatcagctgcagaagctaactagtcctaatacaggaggttactgtaaatataacatttctctcagactctgtaaaaacacatttttataacctaacaatatattaatgcctgtatatacaagtcattttacctatcactaaggaaaatttagttttaagggtcta

SEQ ID NO: 77739 - DNA, 600 bp, Chicken  19866894366494_2
aagcaagcaaacatttaccactttatccatagcaactacaatttcctacaggtactcaaattcccaatgcagtttaatttgggtagaattcttacacttctgctctagatagttttttcttaaaataaacgcatcacacaaaggttagtaaccagtggacacttgttttttgttaactgtacttctctctgggggggcagaagaaggcaataaatagagaaaatwggaaaacacaaatgttctttgcaagacacatttcaagactaacacaagctggcagaagcattaacattcactttyaaagctcatagttgttctttatcctagaacatctacatgcagcattacaaatttcatataaatcagctgcagaagctaactagtcctaatacaggaggttactgtaaatataacatttctctcagactctgtaaaaacacatttttataacctaacaatatattaatgcctgtatatacaagtcattttacctatcactaaggaaaatttagttttaagggtctactgtgaacaggaacatgacaggttagatataagtcacctttcttgaagaactaatccctccgaattcagtgtgat

SEQ ID NO: 77740 - DNA, 600 bp, Chicken  19866894366496_1
actcacaaggacacagggcattcagcttcggggcggaggatggaggcagctccatggctggatgcccccacgcctctccccagtccagcagccgctctacacaccattaagagccctgctccctgcggggaacacatcagcaccgagcagccctcgcgctttgcatcacttgcaatctcgaatattcgcacgtagcggaacgcggaaactttttaaggcagctttgggatatccatgatcaaaatatgacattcagagagggtcagatcaaggagattgctcctgatcagggcagactgygggccaggtgaaagcacggttcgcttcattgagtgctggtttatcgaggatttgtgataaattgaggagcactcagatggagaccaataaatatgagttttaatcgaaatttgattgcagaggacataaaccagcrcaaatgtcagagcacagttgctccaccaaaagatcaggatgaggaaaccgaagccatggcccagaatgactcctctcctgagcagagctctccagytccagcctggaaactgcagggcaggatggacaacagcctcagagagagcagcctcctggggatgggga

SEQ ID NO: 77741 - DNA, 600 bp, Chicken  19866894366496_2
tcagcaccgagcagccctcgcgctttgcatcacttgcaatctcgaatattcgcacgtagcggaacgcggaaactttttaaggcagctttgggatatccatgatcaaaatatgacattcagagagggtcagatcaaggagattgctcctgatcagggcagactgygggccaggtgaaagcacggttcgcttcattgagtgctggtttatcgaggatttgtgataaattgaggagcactcagatggagaccaataaatatgagttttaatcgaaatttgattgcagaggacataaaccagcrcaaatgtcagagcacagttgctccaccaaaagatcaggatgaggaaaccgaagccatggcccagaatgactcctctcctgagcagagctctccagytccagcctggaaactgcagggcaggatggacaacagcctcagagagagcagcctcctggggatggggatggagaagcaataaaagtgtactctgatgtgttccaaaggcacagcccaagttatcacagcaacattaacttgccattwgggcttgcaggaatcaaagaggaagattttgatttctaaaagcagagtcaaagggaa

SEQ ID NO: 77742 - DNA, 556 bp, Chicken  19866894366496_3
ccatgatcaaaatatgacattcagagagggtcagatcaaggagattgctcctgatcagggcagactgygggccaggtgaaagcacggttcgcttcattgagtgctggtttatcgaggatttgtgataaattgaggagcactcagatggagaccaataaatatgagttttaatcgaaatttgattgcagaggacataaaccagcrcaaatgtcagagcacagttgctccaccaaaagatcaggatgaggaaaccgaagccatggcccagaatgactcctctcctgagcagagctctccagytccagcctggaaactgcagggcaggatggacaacagcctcagagagagcagcctcctggggatggggatggagaagcaataaaagtgtactctgatgtgttccaaaggcacagcccaagttatcacagcaacattaacttgccattwgggcttgcaggaatcaaagaggaagattttgatttctaaaagcagagtcaaagggaaaacacaagctgaaaaagaatatattcaatcctcttaaatcctgacctaaaaa

SEQ ID NO: 77743 - DNA, 409 bp, Chicken  19866894366496_4
gagaccaataaatatgagttttaatcgaaatttgattgcagaggacataaaccagcrcaaatgtcagagcacagttgctccaccaaaagatcaggatgaggaaaccgaagccatggcccagaatgactcctctcctgagcagagctctccagytccagcctggaaactgcagggcaggatggacaacagcctcagagagagcagcctcctggggatggggatggagaagcaataaaagtgtactctgatgtgttccaaaggcacagcccaagttatcacagcaacattaacttgccattwgggcttgcaggaatcaaagaggaagattttgatttctaaaagcagagtcaaagggaaaacacaagctgaaaaagaatatattcaatcctcttaaatcctgacctaaaaa

SEQ ID NO: 77744 - DNA, 599 bp, Chicken  19866894366498_1
  misc_feature (1)..(164): n is any nucleotide
nnnnnnnnnnnnnnnnnnnnnnnnnnnnnnnnnnnnnnnnnnnnnnnnnnnnnnnnnnnnnnnnnnnnnnnnnnnnnnnnnnnnnnnnnnnnnnnnnnnnnnnnnnnnnnnnnnnnnnnnnnnnnnnnnnnnnnnnnnnnnnnnnnnnnnnnnnnnnnnnnnnnggttgcctgccatttcacccttgctacgggcagaggatggtgctcaccaacagcattcttaccttcaccagcagtgctaccaagtggctgtgtacaccaaagcagtggcgtagtgattgctgttgctccaaaaagmaatggatatcacccaaaagtcacctccaccacacaggccagatgaagaggatggatgtttttgcaagacgcaccttgctgatgcttgggtccagccctgcattaactccatgtccaattgcatctccagagcctaaattactctcgctctaaaaatactgggtaattaatttacctcgctggatgtaattcagactggtgacacagtagtgaacttctttgttgcttttgactctggcagcartgaagatggggacttttgtcagctccctcccaagcagcctgtctgctctcatctac

SEQ ID NO: 77745 - DNA, 578 bp, Chicken  19866894366498_2
ccaagtggctgtgtacaccaaagcagtggcgtagtgattgctgttgctccaaaaagmaatggatatcacccaaaagtcacctccaccacacaggccagatgaagaggatggatgtttttgcaagacgcaccttgctgatgcttgggtccagccctgcattaactccatgtccaattgcatctccagagcctaaattactctcgctctaaaaatactgggtaattaatttacctcgctggatgtaattcagactggtgacacagtagtgaacttctttgttgcttttgactctggcagcartgaagatggggacttttgtcagctccctcccaagcagcctgtctgctctcatctaccagcaagaccagaagatgctggatgatgctcrgggcttggctgtcagcattgtggccatttcagggactgtataattattgaattactcaattactccagcccagcctcttcatttctcgcgatccattttcttttgtcaaggttgctaaggaactacctgctggctttggatgcctcgatcaggcaagcttctcctccctgcacctccttgcaaggctttg

SEQ ID NO: 77746 - DNA, 490 bp, Chicken  19866894366498_3
cacaggccagatgaagaggatggatgtttttgcaagacgcaccttgctgatgcttgggtccagccctgcattaactccatgtccaattgcatctccagagcctaaattactctcgctctaaaaatactgggtaattaatttacctcgctggatgtaattcagactggtgacacagtagtgaacttctttgttgcttttgactctggcagcartgaagatggggacttttgtcagctccctcccaagcagcctgtctgctctcatctaccagcaagaccagaagatgctggatgatgctcrgggcttggctgtcagcattgtggccatttcagggactgtataattattgaattactcaattactccagcccagcctcttcatttctcgcgatccattttcttttgtcaaggttgctaaggaactacctgctggctttggatgcctcgatcaggcaagcttctcctccctgcacctccttgcaaggctttg

SEQ ID NO: 77747 - DNA, 599 bp, Chicken  19866894366502_1
  misc_feature (1)..(23): n is any nucleotide
nnnnnnnnnnnnnnnnnnnnnnntgtgttgatcaagataggtaggcccaaaggatcagatttcatatgaatttctaccagttttgtttaacttaagttttgtttctaagatgagagaggaagaagaagagcagaaggaatccttcataataatcatttctcaatttggtttaataaagctgggttaaaattgctttttgcagggctggatcccttgagcatggcaaggtgagccaatgggtattcttcgagcattgtaggcctgtaccagccccttcacgggacactggtccttgtatasctgctttcaaggtagctgtttttggttgttttttttattatttattttaattgaaaaaagcagtgtaagaatagtatgcaagatgcatttcattcatgcctgcaatgcccagaaagcctgctggtttcttctcagcactgaacaatgtgttttatgtgtgtaatctttaaactgttttgcattttccattctgaaattcattttaataaaaccaatatcaaaacaaagtgccttgagaacaactgtacggtcagagatatgctgatgaagtaagcaattaatgttactgcttatctgga

SEQ ID NO: 77748 - DNA, 600 bp, Chicken  19866894366503_1
tcattttcatttgaaccagagaggacttgctttaagagaagtcagtgtgggccatagcagttattcatttactttaatgaggctttgttctccaccttacaatagctgtgggtgaggcagcactctactacaacctctatacttttattctgtgctaatatttgattttccatcctcactgtgttccatctgcataattctggaatgtggaatggttctgatacaaaatttctaaaaaggagttgaaattcttgcttatagtattgcagtcactctttctcttttgtggtatagagaaaratcaaacttgcagctgctctctggttgtattttgattattttttttaaatttacttatgcttttattctttatggaaagttagaaaaagcttgtagatataatatttaccaattaaacaagacagaaatatgcttatatgctttatgatatgtacagctttattttaaattattttgcaaaggctgtgactgcgattcctcacttgattatcatagctgtaaaagtagcaaaagagaaagagacatgctaatgcacatacagcttctataataggacagaataggattgccatgaggaat

SEQ ID NO: 77749 - DNA, 600 bp, Chicken  19866894366507_1
ttggtccgtaagtttctcttcacaaataattttccaacaaattttttcatagaaatatattgttattctgttgagcaacagggaaagaggaaatttccaggaggcaatgtaagctgatacagtagctgacctttctcaatttctgggacatattgattgctgctggaatgtgttctgtacttggagaggcagagctgacttttattttagagaaatgaacatggacttactgaatagcaattgacttttttttttacaaatatctttctcattttttatatttaaaacttctcatctagraacttactagtcaagtactaaatcaacctctcgtgcctcgttttttgttagtatctgtctaacttkgtgtgataaaagaaataatttttgtgctgttctgtgataacgcgagaaaaaaaacactgcatagctgggaattcacagttaaaactgctaaacagttaaycatatgattggaagtagacaaatcaacttagagcacctctgtcttatctaaacaagcattctttgtgagccatttaaattcatcaagatgcaacatagtgagtcaatttagaaatgcagatagaaaaaacagaa

SEQ ID NO: 77750 - DNA, 600 bp, Chicken  19866894366507_2
tctgttgagcaacagggaaagaggaaatttccaggaggcaatgtaagctgatacagtagctgacctttctcaatttctgggacatattgattgctgctggaatgtgttctgtacttggagaggcagagctgacttttattttagagaaatgaacatggacttactgaatagcaattgacttttttttttacaaatatctttctcattttttatatttaaaacttctcatctagraacttactagtcaagtactaaatcaacctctcgtgcctcgttttttgttagtatctgtctaacttkgtgtgataaaagaaataatttttgtgctgttctgtgataacgcgagaaaaaaaacactgcatagctgggaattcacagttaaaactgctaaacagttaaycatatgattggaagtagacaaatcaacttagagcacctctgtcttatctaaacaagcattctttgtgagccatttaaattcatcaagatgcaacatagtgagtcaatttagaaatgcagatagaaaaaacagaattgtttttatttacatatcctttattgsttccctttttatacctaggcttctctaccctttttgca

SEQ ID NO: 77751 - DNA, 600 bp, Chicken  19866894366507_3
aatgtgttctgtacttggagaggcagagctgacttttattttagagaaatgaacatggacttactgaatagcaattgacttttttttttacaaatatctttctcattttttatatttaaaacttctcatctagraacttactagtcaagtactaaatcaacctctcgtgcctcgttttttgttagtatctgtctaacttkgtgtgataaaagaaataatttttgtgctgttctgtgataacgcgagaaaaaaaacactgcatagctgggaattcacagttaaaactgctaaacagttaaycatatgattggaagtagacaaatcaacttagagcacctctgtcttatctaaacaagcattctttgtgagccatttaaattcatcaagatgcaacatagtgagtcaatttagaaatgcagatagaaaaaacagaattgtttttatttacatatcctttattgsttccctttttatacctaggcttctctaccctttttgcaggaaatgcaattggtgccaakggtgtagtgagatgactgaattaagtttgtgtatcactttagaaattctctttacctctcaatctttacgtggctgtgc

SEQ ID NO: 77752 - DNA, 600 bp, Chicken  19866894366507_4
tctcgtgcctcgttttttgttagtatctgtctaacttkgtgtgataaaagaaataatttttgtgctgttctgtgataacgcgagaaaaaaaacactgcatagctgggaattcacagttaaaactgctaaacagttaaycatatgattggaagtagacaaatcaacttagagcacctctgtcttatctaaacaagcattctttgtgagccatttaaattcatcaagatgcaacatagtgagtcaatttagaaatgcagatagaaaaaacagaattgtttttatttacatatcctttattgsttccctttttatacctaggcttctctaccctttttgcaggaaatgcaattggtgccaakggtgtagtgagatgactgaattaagtttgtgtatcactttagaaattctctttacctctcaatctttacgtggctgtgccacttcttgctcatctctttccctaagactaggtagaatatttacaccttgaaagtgagttttaagctagtcttcttcctgcttcttttgcctcacctcagcctaggtttatttctttggtttcatacttagatacatcttcctatcctctttttattcagt

SEQ ID NO: 77753 - DNA, 600 bp, Chicken  19866894366507_5
ttgtgctgttctgtgataacgcgagaaaaaaaacactgcatagctgggaattcacagttaaaactgctaaacagttaaycatatgattggaagtagacaaatcaacttagagcacctctgtcttatctaaacaagcattctttgtgagccatttaaattcatcaagatgcaacatagtgagtcaatttagaaatgcagatagaaaaaacagaattgtttttatttacatatcctttattgsttccctttttatacctaggcttctctaccctttttgcaggaaatgcaattggtgccaakggtgtagtgagatgactgaattaagtttgtgtatcactttagaaattctctttacctctcaatctttacgtggctgtgccacttcttgctcatctctttccctaagactaggtagaatatttacaccttgaaagtgagttttaagctagtcttcttcctgcttcttttgcctcacctcagcctaggtttatttctttggtttcatacttagatacatcttcctatcctctttttattcagtgaacattacaagagctaagtaaagcacttgagtgtgaggactttgggttttaatgaaac

SEQ ID NO: 77754 - DNA, 600 bp, Chicken  19866894366525_1
actaatgcatgaccttaaccaattgaagtaatttctctctacagcttatttcctgctatttgcaactagtaaatagtgtgaacgctttgtgttgcattatcatagaatcacagaataatttaggttggagaaaacctagagatttccacgtcctaccatcagcttgatctaccaagatccatgactaatccatgtcccttaatgccatgcccacacgtcttaaatacctccaggaatggcaactccaccactgcccagggcagcctcttccaatgcctgaccacccactctgagaaaaarttcctcctgaaatccagcctaaacctcccctggcagaacttgagactgtttcctcatgtcctgtctcttcttgtcacrgtgtgcatagtggcttgcacagagggtggccttaactggggactgggtgttgcactaatgatagcagccagacaaataagtatcctgctgggctttctatgatgtgtgctactataacaccagcccagcacatgcatgaatggatgcatgatgtcaatatccttctagaagtaaaataaacaaacaaacaaagtaagaaagaaacaggaaagaaaaaaaaaa

SEQ ID NO: 77755 - DNA, 586 bp, Chicken  19866894366525_2
tgaacgctttgtgttgcattatcatagaatcacagaataatttaggttggagaaaacctagagatttccacgtcctaccatcagcttgatctaccaagatccatgactaatccatgtcccttaatgccatgcccacacgtcttaaatacctccaggaatggcaactccaccactgcccagggcagcctcttccaatgcctgaccacccactctgagaaaaarttcctcctgaaatccagcctaaacctcccctggcagaacttgagactgtttcctcatgtcctgtctcttcttgtcacrgtgtgcatagtggcttgcacagagggtggccttaactggggactgggtgttgcactaatgatagcagccagacaaataagtatcctgctgggctttctatgatgtgtgctactataacaccagcccagcacatgcatgaatggatgcatgatgtcaatatccttctagaagtaaaataaacaaacaaacaaagtaagaaagaaacaggaaagaaaaaaaaaactgcagaaaaactgaaagccatattactctgctgatttgggatacatcactgattatagataat

SEQ ID NO: 77756 - DNA, 600 bp, Chicken  19866894366526_1
agagatcttcagtcattgtcttcgcagcccttaactacgttgggactactcagccctgacaggatcaggctctgtgtaaatctcgtggcgttacaaaaactgtttacttctacatagtacagactcacacttgtgtttccaatggttttgttttaaatcttctatgttttgtaccacacaaaagggtaagtggtcccatccaaggaaagaaggaaatagatcgtgcaacagacatcagcatgtaactcggtgtgctctagtttttgcattctctcttttgccagcgcctgcagccagtakcagaggaggctgccttcctgtcagcagcacatttggagcacagagggagacatgacacgaactatgccagagcttgggagcctccctttgccaccttgccctaccccaaraacaccagtgacttaatggacaaattaattgagaaaggtgctcacagtttgactctcatgggctactttcccagtccaacttgcaggagggcaaatacatgatgtggctcagtgaagccacagcaagtattcctgtttttatcttaacccaaagcgcgggtcaggtaattcagcccagtcccattctatc

SEQ ID NO: 77757 - DNA, 600 bp, Chicken  19866894366526_2
tacatagtacagactcacacttgtgtttccaatggttttgttttaaatcttctatgttttgtaccacacaaaagggtaagtggtcccatccaaggaaagaaggaaatagatcgtgcaacagacatcagcatgtaactcggtgtgctctagtttttgcattctctcttttgccagcgcctgcagccagtakcagaggaggctgccttcctgtcagcagcacatttggagcacagagggagacatgacacgaactatgccagagcttgggagcctccctttgccaccttgccctaccccaaraacaccagtgacttaatggacaaattaattgagaaaggtgctcacagtttgactctcatgggctactttcccagtccaacttgcaggagggcaaatacatgatgtggctcagtgaagccacagcaagtattcctgtttttatcttaacccaaagcgcgggtcaggtaattcagcccagtcccattctatcaaacaggttcttccctgcaggaattcaagtctctctgaatgggagagactaccattttgattgcacagtattttggctccactttccaaagctcacctttggcatatgag

SEQ ID NO: 77758 - DNA, 600 bp, Chicken  19866894366526_3
agtagactatctgacaatagcctctgcacttatctgacctatttctcaagagaggtttttataaggcttttccagttatttctcactgtcatttcatgtgggcacaatttttcatgatgtttcaagaagcacggtcacacgcacaagtgccagcacctccaagaaaggtgtaacatgggcgtttggtgagacataccagttgaggcaggtggtccatgatgctattaattcccagacacactgttcacgagagagatgagaaaccatgctggagtgtcccttctgccccacctagtgatmgctgtacatcgctgccttgcatcccatggtggctcagctgcccagaaagctccattttatccccagttttctctggagtgcatgcagtactgatgtttccaagtctttaaaaagcttttcagctcaggccgctggcaccctacctactttgggagtgatacagatgcagtctaacaaatgcatcccctaaatactgtgcaaaactagagtgaaatagtagctaggagttgtgtgaagtgtgaagatcagcgcacaggcacacacaccatctgtgagcaggtcagcagtgaccacccaacc

SEQ ID NO: 77759 - DNA, 599 bp, Chicken  19866894366528_1
  misc_feature (1)..(42): n is any nucleotide
nnnnnnnnnnnnnnnnnnnnnnnnnnnnnnnnnnnnnnnnnnctactgtaaggtaaaaatctgtctgtaaaatcctcactatgatcagcaatattgtgtggtgcagcatttgatgaaagattccacaggcgtgtaagaaaatgatgtgacaataattgtgcctctttaaaacatcttctattttagtttgcaaatatcaaaggcacacagctggtgacagctgagaggttcagagtttcatcactctgaaacattctgagcgcagtggagatcactggtcccagccaaggcttgcttcasgtcacagaggtgatatggcaacaagtgcacaggtggaaggccctgactcctarcagatgtacctgatagcttttcaggactgcatcactcacctgcatcccctgtgtatatgtacatgggatattgggatggaagggcatccggctcactgagcctcactaatgyattgcagtaagatgtttgctgacaagacaaaacagagctgcctccttcagcacggctccccaggcacacaagcaggacatgctttacaccggaaggaaccagactgaattttcagagtgaactttctcacctga

SEQ ID NO: 77760 - DNA, 600 bp, Chicken  19866894366528_2
taaaaatctgtctgtaaaatcctcactatgatcagcaatattgtgtggtgcagcatttgatgaaagattccacaggcgtgtaagaaaatgatgtgacaataattgtgcctctttaaaacatcttctattttagtttgcaaatatcaaaggcacacagctggtgacagctgagaggttcagagtttcatcactctgaaacattctgagcgcagtggagatcactggtcccagccaaggcttgcttcasgtcacagaggtgatatggcaacaagtgcacaggtggaaggccctgactcctarcagatgtacctgatagcttttcaggactgcatcactcacctgcatcccctgtgtatatgtacatgggatattgggatggaagggcatccggctcactgagcctcactaatgyattgcagtaagatgtttgctgacaagacaaaacagagctgcctccttcagcacggctccccaggcacacaagcaggacatgctttacaccggaaggaaccagactgaattttcagagtgaactttctcacctgacattaagggacttgcagttacccctgcaagatctccaaaacatacargcaaact

SEQ ID NO: 77761 - DNA, 600 bp, Chicken  19866894366528_3
ttaaaacatcttctattttagtttgcaaatatcaaaggcacacagctggtgacagctgagaggttcagagtttcatcactctgaaacattctgagcgcagtggagatcactggtcccagccaaggcttgcttcasgtcacagaggtgatatggcaacaagtgcacaggtggaaggccctgactcctarcagatgtacctgatagcttttcaggactgcatcactcacctgcatcccctgtgtatatgtacatgggatattgggatggaagggcatccggctcactgagcctcactaatgyattgcagtaagatgtttgctgacaagacaaaacagagctgcctccttcagcacggctccccaggcacacaagcaggacatgctttacaccggaaggaaccagactgaattttcagagtgaactttctcacctgacattaagggacttgcagttacccctgcaagatctccaaaacatacargcaaactgccttctcycttgtgaagactgaaggttcaaaagtattgttttcattcatagaatcacagaattgttaaggttggaaaagtcctctaagatcaccttgtccaactgccagcc

SEQ ID NO: 77762 - DNA, 596 bp, Chicken  19866894366528_4
ctcctarcagatgtacctgatagcttttcaggactgcatcactcacctgcatcccctgtgtatatgtacatgggatattgggatggaagggcatccggctcactgagcctcactaatgyattgcagtaagatgtttgctgacaagacaaaacagagctgcctccttcagcacggctccccaggcacacaagcaggacatgctttacaccggaaggaaccagactgaattttcagagtgaactttctcacctgacattaagggacttgcagttacccctgcaagatctccaaaacatacargcaaactgccttctcycttgtgaagactgaaggttcaaaagtattgttttcattcatagaatcacagaattgttaaggttggaaaagtcctctaagatcaccttgtccaactgccagcccagccccaccaatgcccactgaccatgtccctcagtgccacatccacacggctcttaaacacctccaggaacagtgactgcaccacctccctgggcagctgtgccactgcctcactgctcttttgtgagaagaaattcttcctaatacccacctgaacctccccctggtgcaacttg

SEQ ID NO: 77763 - DNA, 580 bp, Chicken  19866894366528_5
ctgatagcttttcaggactgcatcactcacctgcatcccctgtgtatatgtacatgggatattgggatggaagggcatccggctcactgagcctcactaatgyattgcagtaagatgtttgctgacaagacaaaacagagctgcctccttcagcacggctccccaggcacacaagcaggacatgctttacaccggaaggaaccagactgaattttcagagtgaactttctcacctgacattaagggacttgcagttacccctgcaagatctccaaaacatacargcaaactgccttctcycttgtgaagactgaaggttcaaaagtattgttttcattcatagaatcacagaattgttaaggttggaaaagtcctctaagatcaccttgtccaactgccagcccagccccaccaatgcccactgaccatgtccctcagtgccacatccacacggctcttaaacacctccaggaacagtgactgcaccacctccctgggcagctgtgccactgcctcactgctcttttgtgagaagaaattcttcctaatacccacctgaacctccccctggtgcaacttg

SEQ ID NO: 77764 - DNA, 599 bp, Chicken  19866894366532_1
  misc_feature (1)..(207): n is any nucleotide
nnnnnnnnnnnnnnnnnnnnnnnnnnnnnnnnnnnnnnnnnnnnnnnnnnnnnnnnnnnnnnnnnnnnnnnnnnnnnnnnnnnnnnnnnnnnnnnnnnnnnnnnnnnnnnnnnnnnnnnnnnnnnnnnnnnnnnnnnnnnnnnnnnnnnnnnnnnnnnnnnnnnnnnnnnnnnnnnnnnnnnnnnnnnnnnnnnnnnnnnnnnnnnnaatgactttccttcctacattcataaaaacccttctgacaccaatgtgatgacaattcatggctctcatggtgtaacatgtcacatttattgyttcctccctaatgaaccaaccccagcactgccatgacaggactcactgatcacctactctccaatgtttctccaaagcccaaactcttcccttgctttcatcactgaaaccacggaaattggtgtaatgtgtgcaaaaaattcatasaaatctctttttaatcccygaagacccacctgcaaaatggcagtggcagcacactgcttcaggcacaggtttatgacagctgtggtgctggaggcataggcagaatggcagtacctgacactgatcattatcctttcaagctgattgcaatt

SEQ ID NO: 77765 - DNA, 599 bp, Chicken  19866894366532_2
  misc_feature (1)..(60): n is any nucleotide
nnnnnnnnnnnnnnnnnnnnnnnnnnnnnnnnnnnnnnnnnnnnnnnnnnnnnnnnnnnnaatgactttccttcctacattcataaaaacccttctgacaccaatgtgatgacaattcatggctctcatggtgtaacatgtcacatttattgyttcctccctaatgaaccaaccccagcactgccatgacaggactcactgatcacctactctccaatgtttctccaaagcccaaactcttcccttgctttcatcactgaaaccacggaaattggtgtaatgtgtgcaaaaaattcatasaaatctctttttaatcccygaagacccacctgcaaaatggcagtggcagcacactgcttcaggcacaggtttatgacagctgtggtgctggaggcataggcagaatggcagtacctgacactgatcattatcctttcaagctgattgcaattaccctaatcaaggcttctttgatactgaactttggtgtttaaaggtacaaactttccaaaatcagtagttaaaatttaggaggagctgaaggaaaatggaaaagagagaaccactctgractgaggttagcttgttctagcaaagag

SEQ ID NO: 77766 - DNA, 599 bp, Chicken  19866894366532_3
  misc_feature (1)..(41): n is any nucleotide
nnnnnnnnnnnnnnnnnnnnnnnnnnnnnnnnnnnnnnnnnaatgactttccttcctacattcataaaaacccttctgacaccaatgtgatgacaattcatggctctcatggtgtaacatgtcacatttattgyttcctccctaatgaaccaaccccagcactgccatgacaggactcactgatcacctactctccaatgtttctccaaagcccaaactcttcccttgctttcatcactgaaaccacggaaattggtgtaatgtgtgcaaaaaattcatasaaatctctttttaatcccygaagacccacctgcaaaatggcagtggcagcacactgcttcaggcacaggtttatgacagctgtggtgctggaggcataggcagaatggcagtacctgacactgatcattatcctttcaagctgattgcaattaccctaatcaaggcttctttgatactgaactttggtgtttaaaggtacaaactttccaaaatcagtagttaaaatttaggaggagctgaaggaaaatggaaaagagagaaccactctgractgaggttagcttgttctagcaaagaggaagaattttcaggttgaa

SEQ ID NO: 77767 - DNA, 600 bp, Chicken  19866894366532_4
ttggtgtaatgtgtgcaaaaaattcatasaaatctctttttaatcccygaagacccacctgcaaaatggcagtggcagcacactgcttcaggcacaggtttatgacagctgtggtgctggaggcataggcagaatggcagtacctgacactgatcattatcctttcaagctgattgcaattaccctaatcaaggcttctttgatactgaactttggtgtttaaaggtacaaactttccaaaatcagtagttaaaatttaggaggagctgaaggaaaatggaaaagagagaaccactctgractgaggttagcttgttctagcaaagaggaagaattttcaggttgaaaatggatgtttcagggtctcctcccacgctgctcaaatgccctgggagtggggcactgccagtgtgaaggatgcagtgggaacctggggtgggactcagtcctcttagtccagatctgtggtcttctctgctccaatcctctgagcctgggggacccatctctgagcaaagccacgttgatgacccaacactgccctgactattccagcctcctctccccatcccccatatctccctgtatcaccttctgcat

SEQ ID NO: 77768 - DNA, 600 bp, Chicken  19866894366532_5
tgctccaatcctctgagcctgggggacccatctctgagcaaagccacgttgatgacccaacactgccctgactattccagcctcctctccccatcccccatatctccctgtatcaccttctgcatgccccggcagagctcctcgtggctccaggggatgatgagtgggacaggccctgaacactggattcccaaaatgctaccagccaacattttagcagtttcttaaagggcattaaaagattgctacacatctcttgccaaacagacaagtccttccaaggaaagctgttttagatgygttcactggaaagcactgtgcttctgggatggtttgtgactgaagggtttccctgctctcctcacagctccttaacccctggctccaggtaattctggctactcaattggcaaatgggaatctttttgctttccccaaacagaagatcacagagcatttgctgcaaaaaccacatgacatggcacagctgcccagggaggtggtggggtcaccgtccctggaggtgttcaagarttgtgaggatgtggcactgaagaacgtggtcagtgggcatggtgggatgggttaaggttggacttg

SEQ ID NO: 77769 - DNA, 421 bp, Chicken  19866894366532_6
ttaaaagattgctacacatctcttgccaaacagacaagtccttccaaggaaagctgttttagatgygttcactggaaagcactgtgcttctgggatggtttgtgactgaagggtttccctgctctcctcacagctccttaacccctggctccaggtaattctggctactcaattggcaaatgggaatctttttgctttccccaaacagaagatcacagagcatttgctgcaaaaaccacatgacatggcacagctgcccagggaggtggtggggtcaccgtccctggaggtgttcaagarttgtgaggatgtggcactgaagaacgtggtcagtgggcatggtgggatgggttaaggttggacttggtgaccttagaggtccttccaacctcaacagttctataattctatggcaaagcag

SEQ ID NO: 77770 - DNA, 600 bp, Chicken  19866894366537_1
gtttgtaactcaacacaattgaatgatatacaaaaaaaaaaaaagtaaaatctcttcaagtcaagtagacacgtgacttaaatacttgcagatgccaacatgcaagtggggttaaaagaaatggacaaaacataaccaaactaagcatgtcttaaaatattaagtattaaaggaagacttactatgtctttttcatttgtcagtattttttgagtcaaatgctgttttagggttttctaatgacaattaatacatgttcattgatttaccaattaacaacgtaaacatataattattttktattagattttccaaatgtcagggaggaattaatatctttttatttagtttcacaagaagctgaatgtacaccacaattaggctcagttagaaatcccatttttttatacatagagacttgtaaagtctagaaacagacatatattagttataaaaaaaagaactttttcaaaataagggaaataaaagaaaacctttatgagggagggtatgtcaaattttgaaatggtgtggggtcttttacatacagtataaacatctaaaaatacttaaagtaacattttgaactcagcaacacat

SEQ ID NO: 77771 - DNA, 600 bp, Chicken  19866894366538_1
cacccctctgtgcccctggaagggtgagcagcaggagatgctgatggctgccagcaccctctggggttttttgggtggccgggtgatgctcacctgccagtccatgccagctcttccccaatttcatgcacttcaggcatctccccatcatcactgcctcctccgccgctcccagcgcctgccccgccggctgtgccgttcatttgccccacttcgttcaaagagaaaactgatttcctgtgggaattattattattgcagaggttacacacggggatgaggatgcgcaaagcagctgcyctcctccagcacctccaaaacgagagagatggggacaaccacagggctggggccaaccccacgtctcccgctcacctcttctcagctgagggcacttttttgggtggctcgattctaatgttggggtcccactcgccaggtggcaggacaatgacttcatccagaaattcatctatgccagcaatcagatcttctctatctcgggctttgtaagcaacatcgctgaagagctgagggtcaagagagctgtcagcgtggggacagtgcccatatgtccctctcacgtcatttacgggtgtt

SEQ ID NO: 77772 - DNA, 600 bp, Chicken  19866894366540_1
attcccgcagagcttggtgtgagatataaagcattcctccaagtctgggcacctctaaccagaagaaatctatcctctcccacctttccattaaaatctgtttgtgaggtctccgtacaagtgctcctactgacatctacaccaagcctttccttgagctgaagcaggaaggatcacactcctaacaaagccaagagcccttcctgaagtcagtgatggagcagtgtaactgtcagctttgttacccccatgccacccagcagacaggcagctgcactttttaggagctatggatctgcraatgtcttgaatgggcagacttcataagctttagctcaaggctctagagatcagcagattttatttgaaggtgccacatgttgttyttcaacccctccatgaaacaaaggtatataagccatccagagaagcatgttgtacccatatgccgttatgcaattacagaggtggtatcagttacaatctgagaagccacagccaaccaagccaacagctctagaaggactagattaggtagatcaaggcactagattcaagactctttgccctaccaccttccttcacgtctactatcaagtc

SEQ ID NO: 77773 - DNA, 600 bp, Chicken  19866894366540_2
tccattaaaatctgtttgtgaggtctccgtacaagtgctcctactgacatctacaccaagcctttccttgagctgaagcaggaaggatcacactcctaacaaagccaagagcccttcctgaagtcagtgatggagcagtgtaactgtcagctttgttacccccatgccacccagcagacaggcagctgcactttttaggagctatggatctgcraatgtcttgaatgggcagacttcataagctttagctcaaggctctagagatcagcagattttatttgaaggtgccacatgttgttyttcaacccctccatgaaacaaaggtatataagccatccagagaagcatgttgtacccatatgccgttatgcaattacagaggtggtatcagttacaatctgagaagccacagccaaccaagccaacagctctagaaggactagattaggtagatcaaggcactagattcaagactctttgccctaccaccttccttcacgtctactatcaagtcatgccacatttactgctatctctctaagataatgtttccatgaaaggagaatcctagtgccctctatttgagaatatttacaagca

SEQ ID NO: 77774 - DNA, 600 bp, Chicken  19866894366540_3
tctgagaagccacagccaaccaagccaacagctctagaaggactagattaggtagatcaaggcactagattcaagactctttgccctaccaccttccttcacgtctactatcaagtcatgccacatttactgctatctctctaagataatgtttccatgaaaggagaatcctagtgccctctatttgagaatatttacaagcaggccttagtgttagcagtttaatacaagaaagtgtttatctaagtttccctatgaagaaggatgaattaagatatccttggctaatccatgtttacmcatgtcaagtgagaaacctgaataattcacattttcttaaagtcagcctaagggccacagaaactttggccttttcccttcctccaggtaaaagttctcttcactgagrgatgagctttccttgctcttgtccaaagataaaatttcactaaggcaccacataaaatattctctgtaaaagcatctacaactggtagaagaactacagcaggtataagccatacagaagcagtctgaggtttttcagttcagccttggtaattcattttaactattgcttctggctaattctggtacaag

SEQ ID NO: 77775 - DNA, 600 bp, Chicken  19866894366540_4
atcaagtcatgccacatttactgctatctctctaagataatgtttccatgaaaggagaatcctagtgccctctatttgagaatatttacaagcaggccttagtgttagcagtttaatacaagaaagtgtttatctaagtttccctatgaagaaggatgaattaagatatccttggctaatccatgtttacmcatgtcaagtgagaaacctgaataattcacattttcttaaagtcagcctaagggccacagaaactttggccttttcccttcctccaggtaaaagttctcttcactgagrgatgagctttccttgctcttgtccaaagataaaatttcactaaggcaccacataaaatattctctgtaaaagcatctacaactggtagaagaactacagcaggtataagccatacagaagcagtctgaggtttttcagttcagccttggtaattcattttaactattgcttctggctaattctggtacaagtatatttatgacagcttcttcatttaatcctcttttcagaaggcttttggattggccataaaaatggattctctgttcaattttttctgcagtaataaaaaaaataaaa

SEQ ID NO: 77776 - DNA, 600 bp, Chicken  19866894366546_1
cagtccagctcctggcttcacacaggaccgctcaaaattcaaaccacatttctgagagccgtgttcaaatgcttgaactccagaaggttggtgccatgacaactgccccttggagcctgtttgagtacccaagcacactcctggtgaagaattttcctaatatcaagtcagaattttccctgatgcaggaaatggaagacttaaaagacaactcatttttcagtacagttcataatagttctactgaaacagttgttaactttaacttggacttaatcagagtgcttcaataacagtcayattatgtattaactcttctggaaacaagcatactgaattgcgcattgagcaatgcaaatcatgtctatcaggcatttatttttgcctatactatacaaaagagtaatacttaagaacaagttaaagtaaggcttacttgttagtttatcaaagcaaataccattaaatattgtgtgtgcctgcacgtgcctcttcagtgctggttaaaatacgaaaaggaagtgaatagaatggatagaaaaatgatgacaataaaaaaaagagaaaaagaaaaaaaaaagaaaatggaaatcattctga

SEQ ID NO: 77777 - DNA, 600 bp, Chicken  19866894366547_1
tctgcaaataaggcagcagatacgctgcaccaaagccttaatgctccaggagaccccggcttttttgatgccatacgtttttcttgttctttgaacaattgttttggaaagcaaagcgagagaaatctgcagcccttacaatgcctcccagtggcctccactctgtaaactgcaccagcttgggcattctggggctgtgtcagaacaacacatgcttactgtcccaatgtaggacatgctctaaggtgaaaagggacggcatccacatgacttctgcttttttctcttccaaggcacccrgtggataacagaacagagggggaagaaaaggaagaaaaggcagaacaaagtgctttaaaaaaatttcattcatctactggcctgacaagtctaaatgtagtgctgcayacacattgctgcccgctgaatttgcaggaaggaagaacaattagaaccgctgggcaggaaaaggcctgttagcactgctacctttaacttaatctttaatctccttctatgcctccaacttgtcaccgcagacattaatcacctcccaggtcttatagctgtctgaggctcatttatattatttcttttaat

SEQ ID NO: 77778 - DNA, 600 bp, Chicken  19866894366547_2
aagcaaagcgagagaaatctgcagcccttacaatgcctcccagtggcctccactctgtaaactgcaccagcttgggcattctggggctgtgtcagaacaacacatgcttactgtcccaatgtaggacatgctctaaggtgaaaagggacggcatccacatgacttctgcttttttctcttccaaggcacccrgtggataacagaacagagggggaagaaaaggaagaaaaggcagaacaaagtgctttaaaaaaatttcattcatctactggcctgacaagtctaaatgtagtgctgcayacacattgctgcccgctgaatttgcaggaaggaagaacaattagaaccgctgggcaggaaaaggcctgttagcactgctacctttaacttaatctttaatctccttctatgcctccaacttgtcaccgcagacattaatcacctcccaggtcttatagctgtctgaggctcatttatattatttcttttaatgggctctcttatgtcactggttttctgcggtacacagtgctgcccttacatcctgtttactgttttgttctaccaagtgatgtggtttatttttacgcaggtttccta

SEQ ID NO: 77779 - DNA, 579 bp, Chicken  19866894366548_1
tttcaaaatctgtgctcataccagcattgttcagtttaattattacagtcagtcagatactgatgacagaagttgtttggttaaggaaccaaggggttgctgttctcactgccccacgagccctgctccctgttcccaggcctcctgcagcctgtcaggccctcagcaccagcaacactcctggatgataaaagtgttgcctttacttcatggagagcagagcccagcaatttgtttgtcatatactaatacaaatgaatattttaattggttggaaatttacagactccatagaaatgyattcttgtttggcttttccttattattactygctgtagtctggcaygctragatgatgaattagatcctttyraataatgcagaccttctaattcattattcaatcaaacctacggccaacaaaatagctgttctgcaagttggtaaactgggaagccacagagaatcagaacctattctatttacaggaaggatgactgcctaagggtacttcatcccaataataacaacattcaagtaatagtgcccaggtcatgacaagctgtgaccctcccgtag

SEQ ID NO: 77780 - DNA, 548 bp, Chicken  19866894366548_2
cagtttaattattacagtcagtcagatactgatgacagaagttgtttggttaaggaaccaaggggttgctgttctcactgccccacgagccctgctccctgttcccaggcctcctgcagcctgtcaggccctcagcaccagcaacactcctggatgataaaagtgttgcctttacttcatggagagcagagcccagcaatttgtttgtcatatactaatacaaatgaatattttaattggttggaaatttacagactccatagaaatgyattcttgtttggcttttccttattattactygctgtagtctggcaygctragatgatgaattagatcctttyraataatgcagaccttctaattcattattcaatcaaacctacggccaacaaaatagctgttctgcaagttggtaaactgggaagccacagagaatcagaacctattctatttacaggaaggatgactgcctaagggtacttcatcccaataataacaacattcaagtaatagtgcccaggtcatgacaagctgtgaccctcccgtag

SEQ ID NO: 77781 - DNA, 533 bp, Chicken  19866894366548_3
agtcagtcagatactgatgacagaagttgtttggttaaggaaccaaggggttgctgttctcactgccccacgagccctgctccctgttcccaggcctcctgcagcctgtcaggccctcagcaccagcaacactcctggatgataaaagtgttgcctttacttcatggagagcagagcccagcaatttgtttgtcatatactaatacaaatgaatattttaattggttggaaatttacagactccatagaaatgyattcttgtttggcttttccttattattactygctgtagtctggcaygctragatgatgaattagatcctttyraataatgcagaccttctaattcattattcaatcaaacctacggccaacaaaatagctgttctgcaagttggtaaactgggaagccacagagaatcagaacctattctatttacaggaaggatgactgcctaagggtacttcatcccaataataacaacattcaagtaatagtgcccaggtcatgacaagctgtgaccctcccgtag

SEQ ID NO: 77782 - DNA, 529 bp, Chicken  19866894366548_4
agtcagatactgatgacagaagttgtttggttaaggaaccaaggggttgctgttctcactgccccacgagccctgctccctgttcccaggcctcctgcagcctgtcaggccctcagcaccagcaacactcctggatgataaaagtgttgcctttacttcatggagagcagagcccagcaatttgtttgtcatatactaatacaaatgaatattttaattggttggaaatttacagactccatagaaatgyattcttgtttggcttttccttattattactygctgtagtctggcaygctragatgatgaattagatcctttyraataatgcagaccttctaattcattattcaatcaaacctacggccaacaaaatagctgttctgcaagttggtaaactgggaagccacagagaatcagaacctattctatttacaggaaggatgactgcctaagggtacttcatcccaataataacaacattcaagtaatagtgcccaggtcatgacaagctgtgaccctcccgtag

SEQ ID NO: 77783 - DNA, 507 bp, Chicken  19866894366548_5
ttgtttggttaaggaaccaaggggttgctgttctcactgccccacgagccctgctccctgttcccaggcctcctgcagcctgtcaggccctcagcaccagcaacactcctggatgataaaagtgttgcctttacttcatggagagcagagcccagcaatttgtttgtcatatactaatacaaatgaatattttaattggttggaaatttacagactccatagaaatgyattcttgtttggcttttccttattattactygctgtagtctggcaygctragatgatgaattagatcctttyraataatgcagaccttctaattcattattcaatcaaacctacggccaacaaaatagctgttctgcaagttggtaaactgggaagccacagagaatcagaacctattctatttacaggaaggatgactgcctaagggtacttcatcccaataataacaacattcaagtaatagtgcccaggtcatgacaagctgtgaccctcccgtag

SEQ ID NO: 77784 - DNA, 506 bp, Chicken  19866894366548_6
tgtttggttaaggaaccaaggggttgctgttctcactgccccacgagccctgctccctgttcccaggcctcctgcagcctgtcaggccctcagcaccagcaacactcctggatgataaaagtgttgcctttacttcatggagagcagagcccagcaatttgtttgtcatatactaatacaaatgaatattttaattggttggaaatttacagactccatagaaatgyattcttgtttggcttttccttattattactygctgtagtctggcaygctragatgatgaattagatcctttyraataatgcagaccttctaattcattattcaatcaaacctacggccaacaaaatagctgttctgcaagttggtaaactgggaagccacagagaatcagaacctattctatttacaggaaggatgactgcctaagggtacttcatcccaataataacaacattcaagtaatagtgcccaggtcatgacaagctgtgaccctcccgtag

SEQ ID NO: 77785 - DNA, 599 bp, Chicken  19866894366565_1
  misc_feature (1)..(269): n is any nucleotide
nnnnnnnnnnnnnnnnnnnnnnnnnnnnnnnnnnnnnnnnnnnnnnnnnnnnnnnnnnnnnnnnnnnnnnnnnnnnnnnnnnnnnnnnnnnnnnnnnnnnnnnnnnnnnnnnnnnnnnnnnnnnnnnnnnnnnnnnnnnnnnnnnnnnnnnnnnnnnnnnnnnnnnnnnnnnnnnnnnnnnnnnnnnnnnnnnnnnnnnnnnnnnnnnnnnnnnnnnnnnnnnnnnnnnnnnnnnnnnnnnnnnnnnnnnnnnnnnnnnnnnnnnnnnntggtgcatcataaacaacacattcctctgaygttttttctctcttctctttatatctttctctggaagaaatttatcactatgtcaagttgtgagtgccaagtagatgttcatatgaatcagaccataccagttagcaaggacatctaagacataagtaatgagtaaaacctcctttttttggtggggtgttttccctagccacatttctttcagtacaatattaaatattcattcctggctaacagacactaggaaaaccaatcctgtcttgcaagcagcatgacctttcatctcctgctcttttgtggagctcataaaacctcagcaa

SEQ ID NO: 77786 - DNA, 600 bp, Chicken  19866894366565_2
tctctcttctctttatatctttctctggaagaaatttatcactatgtcaagttgtgagtgccaagtagatgttcatatgaatcagaccataccagttagcaaggacatctaagacataagtaatgagtaaaacctcctttttttggtggggtgttttccctagccacatttctttcagtacaatattaaatattcattcctggctaacagacactaggaaaaccaatcctgtcttgcaagcagcatgacctttcatctcctgctcttttgtggagctcataaaacctcagcaatctctgytgttattgttctgactcatctttcacactacgaaggacaatttgcagtaaagaaacatctgtaaataaaaataaaarcattagataaaggaaaattagagggagaatagtatgattcttcctttgtttgctgaggaatgctgtaattagggggtggtgggtttctaaattattaagcggtgattagggggcctttcaggtaacacaggaaatccccagagcaatgacaattacacttcccattctaaatcccagggaagataatgacatctaaattgctaaacaaacattcattagcact

SEQ ID NO: 77787 - DNA, 600 bp, Chicken  19866894366565_3
tgaatcagaccataccagttagcaaggacatctaagacataagtaatgagtaaaacctcctttttttggtggggtgttttccctagccacatttctttcagtacaatattaaatattcattcctggctaacagacactaggaaaaccaatcctgtcttgcaagcagcatgacctttcatctcctgctcttttgtggagctcataaaacctcagcaatctctgytgttattgttctgactcatctttcacactacgaaggacaatttgcagtaaagaaacatctgtaaataaaaataaaarcattagataaaggaaaattagagggagaatagtatgattcttcctttgtttgctgaggaatgctgtaattagggggtggtgggtttctaaattattaagcggtgattagggggcctttcaggtaacacaggaaatccccagagcaatgacaattacacttcccattctaaatcccagggaagataatgacatctaaattgctaaacaaacattcattagcactgtgcgtgcctaaaggawcccaattaaattctcattccacagactgaagggatatggagcccgggcagatgctgtgat

SEQ ID NO: 77788 - DNA, 424 bp, Chicken  19866894366565_4
atctttcacactacgaaggacaatttgcagtaaagaaacatctgtaaataaaaataaaarcattagataaaggaaaattagagggagaatagtatgattcttcctttgtttgctgaggaatgctgtaattagggggtggtgggtttctaaattattaagcggtgattagggggcctttcaggtaacacaggaaatccccagagcaatgacaattacacttcccattctaaatcccagggaagataatgacatctaaattgctaaacaaacattcattagcactgtgcgtgcctaaaggawcccaattaaattctcattccacagactgaagggatatggagcccgggcagatgctgtgatcacttaaccctgcacaccagggagtgctgctcacacaggagaccgatggacgaaggaaaaacag

SEQ ID NO: 77789 - DNA, 600 bp, Chicken  19866894366583_1
gactctcttatctaatcataattactgattatgaggaataattaactttgttaccctcttgattctgttcataggcaaaatgcagccttattattttcttcttcttatggaaggccagggcgcgtgttgacttcagatacctttacattcaagaaaaaaggttaatttggttttgtgcaaaacctcttaagttgaagcactggagtagttgcaattgcttgcaaaaaagaaaaggtacaataattacagtgagtttctttaagctgatgttttgtacagctcaatgtgaaaatgtgtttmgtttcatgaaaatgcagcattcggagcatgtaaagattggtaaatttaaaccatacgattgcatatttgtccttcctgaaacaataaaagtaattacataaatagcgtctctttgtaaaaatatttccatattaaacttagaattagtgtgatgtaaagaagtatggctcgtaattaaattacagggtttgaattcattgggtaagagtcattaaataaatttgagaacatcgaatggtacattacattttaggctggagggcaacgctaaatgtgcttctgtggaagatacatattttc

SEQ ID NO: 77790 - DNA, 599 bp, Chicken  19866894366584_1
  misc_feature (1)..(122): n is any nucleotide
nnnnnnnnnnnnnnnnnnnnnnnnnnnnnnnnnnnnnnnnnnnnnnnnnnnnnnnnnnnnnnnnnnnnnnnnnnnnnnnnnnnnnnnnnnnnnnnnnnnnnnnnnnnnnnnnnnnnnnnnnnaagctaacaaagcctaaaacaaactatgactgatatgcatatcaccctgttccactgtattgactgcaagaagctgatttttttttttaggcactcagcaatgaaccgtgagaagtaaaattatttggacagttatccaagacatacagcttggaaataacaaacatctgtcaaaatrtataaggagaacaaacctgctgtatgagaatatctctgagatataactcagtgtttctaagtgaaccaacacaatgtcttgtggctgtgtgtttcttccttgtttcttacaaagaaagaagtttcatttattaacacagatgaagatttaaaacacattatttatttattttaaccagcaattttttttttttttttttttttggggtgctaatattgcacagctggcataaacctctcctttgccttcttaaagtttgttttaagctcatattgactttataagcagtaaagattatt

SEQ ID NO: 77791 - DNA, 590 bp, Chicken  19866894366585_1
acttttattgtccagtcagtggctgccactggagctgctggggaagaacattataggaagtaatgataaaaatttccagtcatgtgtggccctgtgtcttctgtttgctttcaggcgccagggatgctatactctgtggtacgttctgaaaatgcatagcttctaaaccttcttgctctggacttgtgctcaagaaattaaccttgtgagatgttgtggctcggagggatagcactgtggttaatgatgcctggttgtgtcagcatgttaggaagatgatgcgctttcatagttcagaayatcagtatggttaaactgctgaagttttcaaatgggccaggtacccaacttttacttgccaaagttacctcccttttactcgcattttgccaggcatgacgtcaagcatcaggcccagctgctgctgggctgcggtgctgtttcactcagtttgtccttactgtcggaattgtcattctaatgcatgggaagctcctgtaaaaattcagcctgtttcagcagagccgtgggttcctaccagtggttctaaatcctgtgcctattaatgatttggcagccttgcccacaag

SEQ ID NO: 77792 - DNA, 599 bp, Chicken  19866894366588_1
  misc_feature (1)..(62): n is any nucleotide
nnnnnnnnnnnnnnnnnnnnnnnnnnnnnnnnnnnnnnnnnnnnnnnnnnnnnnnnnnnnnnccaataggaagtgaggccttgagctcacgtcagtcctcccctcctacccacttctctccttttacaaccagcactccaaacactctttatcccaaagctccagttgtatcaccaacacatcccatccgcatcccatgttcctatggttctcctccacttctgcacacatctcctaacagagccaccgcaggagcggctgctggaaggggctgagcacagccagccagggcaccttgcrggaacagaagcacatgttgagctactcaggaatacctgcaaaaccagagcttccatgcacacaaacgtactgcacacacacagagacaacaaatccacrgatgccaacccttcctttctgcttctcagaaatggaatcgaagtgggagggctgtaaggaaagagacagacttttaaacaacagctccaagcgtggcacacaccaatctgtttgccctccatagcgcagtatatgcttgtgtctgagctgggaagacactggtgacctaattatattgatccaccacatttattcacagc

SEQ ID NO: 77793 - DNA, 600 bp, Chicken  19866894366588_2
cccctcctacccacttctctccttttacaaccagcactccaaacactctttatcccaaagctccagttgtatcaccaacacatcccatccgcatcccatgttcctatggttctcctccacttctgcacacatctcctaacagagccaccgcaggagcggctgctggaaggggctgagcacagccagccagggcaccttgcrggaacagaagcacatgttgagctactcaggaatacctgcaaaaccagagcttccatgcacacaaacgtactgcacacacacagagacaacaaatccacrgatgccaacccttcctttctgcttctcagaaatggaatcgaagtgggagggctgtaaggaaagagacagacttttaaacaacagctccaagcgtggcacacaccaatctgtttgccctccatagcgcagtatatgcttgtgtctgagctgggaagacactggtgacctaattatattgatccaccacatttattcacagcatgaggactttctgaagagcaaatggttgtaacacacaaaaaaaataccttcggaagtgcataagggagagcatggaggggagggaagaagcgctgtgca

SEQ ID NO: 77794 - DNA, 463 bp, Chicken  19866894366589_1
gccagctggctccacctccatcccaagacagagctccaagtgtccccattgctttcacatgtattgggcaattctcacattcccagactgtcctcacaaacagtctgcatccagacatgacagttctcaggcacgtgagctgtcccatcacatctttgtgatcctagtgggactgtagtcttgcaataacatgcaaatttctaattccactgcctgtttcctgtactgcatgtgttaatgtgcaggcacaccagagagctgctcaggaatgatgtgtgggagcctcccacaccaagctgygctcttggtgttttctaatttgtgtacctgcacttgggataacccatcttctggacctaagaacaaccagaaagtatctggtcaacttcacctctgttaacactgcacatgtcctaataataatcaatgaagctgggggacattattctttctttcctttcag

SEQ ID NO: 77795 - DNA, 600 bp, Chicken  19866894366597_1
gccttctgccctgctctctgactatggttagttgtgcggtgggtctctatggtcctgctccttacctgcacgagctgggggtgggctctgccccagcacagccatcttcctcacagctgagcctgcctggagccatgcgtgtctccctcagaaggggggcagtgagggttgtccccgagggccaggggctgaccaggcactgtgctgcagcagtacaatgaaacgggcaggctgggagccctcctacctcttcccacgtgtgctgtgtttgtgccagctcgagaaacactcccagtcccragcaaaggaggggctggggctggagctgctgctgttccaaggaaccacatccctggtgctgcggccatctcctcctgcctcagcgctgcagccaggctggctccccacatatcccctacagctttgtgggrtgggagcatgtcctttgtcccctgcagctggggcagcccaccccacaacttgcaatatctcacactcctggatacgctggactctcactgcccaggagaggctgcttcacttcgggccgatgtgggagtcagagaggttgggatacagagtggacgctgccctctgccc

SEQ ID NO: 77796 - DNA, 600 bp, Chicken  19866894366597_2
gccatgcgtgtctccctcagaaggggggcagtgagggttgtccccgagggccaggggctgaccaggcactgtgctgcagcagtacaatgaaacgggcaggctgggagccctcctacctcttcccacgtgtgctgtgtttgtgccagctcgagaaacactcccagtcccragcaaaggaggggctggggctggagctgctgctgttccaaggaaccacatccctggtgctgcggccatctcctcctgcctcagcgctgcagccaggctggctccccacatatcccctacagctttgtgggrtgggagcatgtcctttgtcccctgcagctggggcagcccaccccacaacttgcaatatctcacactcctggatacgctggactctcactgcccaggagaggctgcttcacttcgggccgatgtgggagtcagagaggttgggatacagagtggacgctgccctctgcccttgctggggcatcactggccccacgcagcgccctggggctgctagttaatgctgactgcagacaggaacacggttgtgttgttgggaaacaacactgaaaaaaaaaaatgaaaggaaaaggcaattgtttc

SEQ ID NO: 77797 - DNA, 600 bp, Chicken  19866894366602_1
tcgtatttgctgtgagcacagtcactgggcacactgttaggctatttctgcaacatcatttccaaaactgcatccccccttttttaatgaactacctgaagggtaacatgagcgtgtcatattgcccgtccacatggctgccggctccttgtgctttcctcactaaactgatgtaattaagcagaattgttcccttgcctcccctgcagcgcttcagtcccgcaaagtttcttcaaagaaacccccagcctggaactggtgcggctctgcagagggaaacgccgcactgtacttcaaagmggagaaaatctgcagctgccgggagcccgcctgccccaggaggtgtcactgttgggactggcagggtgagctcgggagctgctgtttgttttctaaagcctgctttgaccgtgaggtaggaattgacctgtgctacacctcccctccccaccccagccagcctggggaaaggggatcgcaggtaaaacgagctggtggcttctgtggaggtatggctatgtatgtaagcgagataagatactcagcattcaatttttttttttgttttaagaaataccagttaatccaggctggttacaa

SEQ ID NO: 77798 - DNA, 600 bp, Chicken  19866894366609_1
ccttgatgctgcagattgggcatctgagccgctgtggccatcacatcccattggagggaaagaagagcacgtgccatttaaattactgacatcctgttccaaactcttgaaagcatctgtctgaagggagaaaaaaaaaagaatgaattaaggtgccacagtccactgctcttaaaagggtgagggatgaggcaagggctggggctgacatttaaccaggccgtagctcactgatccttgtgcaccagcacacagcactcgctgccatggctcacgctcaattaatacttggttgaacayttcccctaactcctttggaaaggtaacgggggaacaaaggggttcccagmrggggttgaacagttcagctgggatccagtaacacccaggcatttgtaccccaaaaaaagagatgaaaatatctcatatctctcaaatatgagagcagcgtgaggctgaagcagagctggcagagaagcaatggcacttaccaatgcctctttttgagcaaatctctcagcagccctactggtaagaaaacaaggcttccttagagtggcaaaatgtcagcgttgcaaagcctgttgtccttctgctggg

SEQ ID NO: 77799 - DNA, 600 bp, Chicken  19866894366609_2
ttggagggaaagaagagcacgtgccatttaaattactgacatcctgttccaaactcttgaaagcatctgtctgaagggagaaaaaaaaaagaatgaattaaggtgccacagtccactgctcttaaaagggtgagggatgaggcaagggctggggctgacatttaaccaggccgtagctcactgatccttgtgcaccagcacacagcactcgctgccatggctcacgctcaattaatacttggttgaacayttcccctaactcctttggaaaggtaacgggggaacaaaggggttcccagmrggggttgaacagttcagctgggatccagtaacacccaggcatttgtaccccaaaaaaagagatgaaaatatctcatatctctcaaatatgagagcagcgtgaggctgaagcagagctggcagagaagcaatggcacttaccaatgcctctttttgagcaaatctctcagcagccctactggtaagaaaacaaggcttccttagagtggcaaaatgtcagcgttgcaaagcctgttgtccttctgctggggtaagaagcggagtcctatcagcattcttcgaaagcacaagagggaaagc

SEQ ID NO: 77800 - DNA, 600 bp, Chicken  19866894366609_3
tggagggaaagaagagcacgtgccatttaaattactgacatcctgttccaaactcttgaaagcatctgtctgaagggagaaaaaaaaaagaatgaattaaggtgccacagtccactgctcttaaaagggtgagggatgaggcaagggctggggctgacatttaaccaggccgtagctcactgatccttgtgcaccagcacacagcactcgctgccatggctcacgctcaattaatacttggttgaacayttcccctaactcctttggaaaggtaacgggggaacaaaggggttcccagmrggggttgaacagttcagctgggatccagtaacacccaggcatttgtaccccaaaaaaagagatgaaaatatctcatatctctcaaatatgagagcagcgtgaggctgaagcagagctggcagagaagcaatggcacttaccaatgcctctttttgagcaaatctctcagcagccctactggtaagaaaacaaggcttccttagagtggcaaaatgtcagcgttgcaaagcctgttgtccttctgctggggtaagaagcggagtcctatcagcattcttcgaaagcacaagagggaaagca

SEQ ID NO: 77801 - DNA, 600 bp, Chicken  19866894366615_1
cactgacctttatagaaagccattcacagaggaaatgtgagcagataagcaccgttctggatattatttatgtattatttatgtgctcaacctacaatatacttgctgagatagactagtgatgccactaaaggaactcaggccctatcagcaattgcaagtgacctgaactcttcagggaaatgtctggtaaaatgtctgcgcagtctctcacgttctactttggtgctaataaactgttaaccagaatgattttatactgcatctctgaactctgtaaataccacctgcatatttgtyagtaacttttatgcctagcttgtttttgcatatttttatattaaaggttgtgcttatctctcccagagtgttcttttgtgacccctctgcccaatcaagaccagaagcaataaagcactagttttctgttagctgtcaaaaccacccacataggggtacactggtatgcttccaatcatttgtaaaatagtttatttactgtaaatagttattcattacatttaagaaactcttagaaggcagacaaagcattgtaggcacatcaaggccactgcttctttgtccactgtttgtaaataa

SEQ ID NO: 77802 - DNA, 599 bp, Chicken  19866894366618_1
  misc_feature (1)..(161): n is any nucleotide
nnnnnnnnnnnnnnnnnnnnnnnnnnnnnnnnnnnnnnnnnnnnnnnnnnnnnnnnnnnnnnnnnnnnnnnnnnnnnnnnnnnnnnnnnnnnnnnnnnnnnnnnnnnnnnnnnnnnnnnnnnnnnnnnnnnnnnnnnnnnnnnnnnnnnnnnnnnnnnnnngcacggccatacagccatcagtttccaccaacacaaacagcactgcaccgatcccttgaagcaacagctttattttagaacctcatcatccaccagaaaacaccgacttgcctcagatggcacaaatcagagcctcccmgaggccaggcacagcagcacgatgctccgggagaggcacggaggctccaggaggcgagcgaaggragtggtatgatgcaaccctggtgtagtgaaatagccggatagtaggaagcgcttgccgtcggcctgattcacaacaccagctgcagcaacaatacccggccatcctgcggcgtcacaggggctgcaggcagacgaggaacgctctgtgcctgttgtggccattacacatgtcaaaccaaccttaatccggtaggtggagaacagctcagcgctccacaggtggattcttttaaa

SEQ ID NO: 77803 - DNA, 599 bp, Chicken  19866894366618_2
  misc_feature (1)..(96): n is any nucleotide
nnnnnnnnnnnnnnnnnnnnnnnnnnnnnnnnnnnnnnnnnnnnnnnnnnnnnnnnnnnnnnnnnnnnnnnnnnnnnnnnnnnnnnnnnnnnnnnngcacggccatacagccatcagtttccaccaacacaaacagcactgcaccgatcccttgaagcaacagctttattttagaacctcatcatccaccagaaaacaccgacttgcctcagatggcacaaatcagagcctcccmgaggccaggcacagcagcacgatgctccgggagaggcacggaggctccaggaggcgagcgaaggragtggtatgatgcaaccctggtgtagtgaaatagccggatagtaggaagcgcttgccgtcggcctgattcacaacaccagctgcagcaacaatacccggccatcctgcggcgtcacaggggctgcaggcagacgaggaacgctctgtgcctgttgtggccattacacatgtcaaaccaaccttaatccggtaggtggagaacagctcagcgctccacaggtggattcttttaaaggctgtcaaagcagagatccctgcaggcctttagggaagctttaasagccccatttccctcctcr

SEQ ID NO: 77804 - DNA, 559 bp, Chicken  19866894366618_3
tccaggaggcgagcgaaggragtggtatgatgcaaccctggtgtagtgaaatagccggatagtaggaagcgcttgccgtcggcctgattcacaacaccagctgcagcaacaatacccggccatcctgcggcgtcacaggggctgcaggcagacgaggaacgctctgtgcctgttgtggccattacacatgtcaaaccaaccttaatccggtaggtggagaacagctcagcgctccacaggtggattcttttaaaggctgtcaaagcagagatccctgcaggcctttagggaagctttaasagccccatttccctcctcrgagggagcccagcaccccagcacggtgctgccctgagtgggactgggacggagccctcacctgcaggaawggaacctgcaaagagaagagagatggttatcaccgctcccaccttgctgcaccccgtctcccccatctgacctccatcccacaaaggacagatgccagcmcacagacagagctgcagggttgcaggcaaagcgctgtggttcactgaagcctggggctgctggggacaga

SEQ ID NO: 77805 - DNA, 540 bp, Chicken  19866894366618_4
ragtggtatgatgcaaccctggtgtagtgaaatagccggatagtaggaagcgcttgccgtcggcctgattcacaacaccagctgcagcaacaatacccggccatcctgcggcgtcacaggggctgcaggcagacgaggaacgctctgtgcctgttgtggccattacacatgtcaaaccaaccttaatccggtaggtggagaacagctcagcgctccacaggtggattcttttaaaggctgtcaaagcagagatccctgcaggcctttagggaagctttaasagccccatttccctcctcrgagggagcccagcaccccagcacggtgctgccctgagtgggactgggacggagccctcacctgcaggaawggaacctgcaaagagaagagagatggttatcaccgctcccaccttgctgcaccccgtctcccccatctgacctccatcccacaaaggacagatgccagcmcacagacagagctgcagggttgcaggcaaagcgctgtggttcactgaagcctggggctgctggggacaga

SEQ ID NO: 77806 - DNA, 470 bp, Chicken  19866894366618_5
cacaacaccagctgcagcaacaatacccggccatcctgcggcgtcacaggggctgcaggcagacgaggaacgctctgtgcctgttgtggccattacacatgtcaaaccaaccttaatccggtaggtggagaacagctcagcgctccacaggtggattcttttaaaggctgtcaaagcagagatccctgcaggcctttagggaagctttaasagccccatttccctcctcrgagggagcccagcaccccagcacggtgctgccctgagtgggactgggacggagccctcacctgcaggaawggaacctgcaaagagaagagagatggttatcaccgctcccaccttgctgcaccccgtctcccccatctgacctccatcccacaaaggacagatgccagcmcacagacagagctgcagggttgcaggcaaagcgctgtggttcactgaagcctggggctgctggggacaga

SEQ ID NO: 77807 - DNA, 370 bp, Chicken  19866894366618_6
gtcaaaccaaccttaatccggtaggtggagaacagctcagcgctccacaggtggattcttttaaaggctgtcaaagcagagatccctgcaggcctttagggaagctttaasagccccatttccctcctcrgagggagcccagcaccccagcacggtgctgccctgagtgggactgggacggagccctcacctgcaggaawggaacctgcaaagagaagagagatggttatcaccgctcccaccttgctgcaccccgtctcccccatctgacctccatcccacaaaggacagatgccagcmcacagacagagctgcagggttgcaggcaaagcgctgtggttcactgaagcctggggctgctggggacaga

SEQ ID NO: 77808 - DNA, 600 bp, Chicken  19866894366624_1
tgttatcataggattgtcatagaatatgataattggagccggctggaccaggctctgagcaacctgatggagctgtagatatccctgtttgttgcagtaggtttggactagatggcctttaaaggtcctttccaactcaaacgattctatgactctgtgaacatcccaggttgggagatacccaccaggatcattgagtccagctgttgtaggtttctgtctttgggtggacctgaacagctgcagagaagcatcgatgttacaccaccaaaacccactgtacttaaatgtaggcctcgstgaggtcagtggtgagaagggagaggctcttcccctgcccagagcaacagggcaatgtgttccgtggccactggcacttytcttggtgggatgaagggttatcgccaactgagtcatttccgtgcctctttcaggagggtgtctckatgtgggtgagtgtggctgttgggacactagggctgcccatgtttkgaggaaatttgtgtgtaattgttggatgtagagcccctcagacacaccctgtcgtctaattcaacggcattacctatgcattctgcagcgagacccatcattaattag

SEQ ID NO: 77809 - DNA, 600 bp, Chicken  19866894366624_2
atccctgtttgttgcagtaggtttggactagatggcctttaaaggtcctttccaactcaaacgattctatgactctgtgaacatcccaggttgggagatacccaccaggatcattgagtccagctgttgtaggtttctgtctttgggtggacctgaacagctgcagagaagcatcgatgttacaccaccaaaacccactgtacttaaatgtaggcctcgstgaggtcagtggtgagaagggagaggctcttcccctgcccagagcaacagggcaatgtgttccgtggccactggcacttytcttggtgggatgaagggttatcgccaactgagtcatttccgtgcctctttcaggagggtgtctckatgtgggtgagtgtggctgttgggacactagggctgcccatgtttkgaggaaatttgtgtgtaattgttggatgtagagcccctcagacacaccctgtcgtctaattcaacggcattacctatgcattctgcagcgagacccatcattaattaggagtcttatattttaaycgcagcatgttagaaaccagtttgtctctctttgtggagctcagagcagtgctgaaggtgaga

SEQ ID NO: 77810 - DNA, 600 bp, Chicken  19866894366624_3
ctatgactctgtgaacatcccaggttgggagatacccaccaggatcattgagtccagctgttgtaggtttctgtctttgggtggacctgaacagctgcagagaagcatcgatgttacaccaccaaaacccactgtacttaaatgtaggcctcgstgaggtcagtggtgagaagggagaggctcttcccctgcccagagcaacagggcaatgtgttccgtggccactggcacttytcttggtgggatgaagggttatcgccaactgagtcatttccgtgcctctttcaggagggtgtctckatgtgggtgagtgtggctgttgggacactagggctgcccatgtttkgaggaaatttgtgtgtaattgttggatgtagagcccctcagacacaccctgtcgtctaattcaacggcattacctatgcattctgcagcgagacccatcattaattaggagtcttatattttaaycgcagcatgttagaaaccagtttgtctctctttgtggagctcagagcagtgctgaaggtgagaagaggtggctgcaaaactcccggccccccatcacagctgcgggagggggcctggggccataagggg

SEQ ID NO: 77811 - DNA, 600 bp, Chicken  19866894366624_4
attgagtccagctgttgtaggtttctgtctttgggtggacctgaacagctgcagagaagcatcgatgttacaccaccaaaacccactgtacttaaatgtaggcctcgstgaggtcagtggtgagaagggagaggctcttcccctgcccagagcaacagggcaatgtgttccgtggccactggcacttytcttggtgggatgaagggttatcgccaactgagtcatttccgtgcctctttcaggagggtgtctckatgtgggtgagtgtggctgttgggacactagggctgcccatgtttkgaggaaatttgtgtgtaattgttggatgtagagcccctcagacacaccctgtcgtctaattcaacggcattacctatgcattctgcagcgagacccatcattaattaggagtcttatattttaaycgcagcatgttagaaaccagtttgtctctctttgtggagctcagagcagtgctgaaggtgagaagaggtggctgcaaaactcccggccccccatcacagctgcgggagggggcctggggccataaggggcccgtaaggggcttggatggggcccagcactgagcacctcttgccc

SEQ ID NO: 77812 - DNA, 595 bp, Chicken  19866894366624_5
agggagaggctcttcccctgcccagagcaacagggcaatgtgttccgtggccactggcacttytcttggtgggatgaagggttatcgccaactgagtcatttccgtgcctctttcaggagggtgtctckatgtgggtgagtgtggctgttgggacactagggctgcccatgtttkgaggaaatttgtgtgtaattgttggatgtagagcccctcagacacaccctgtcgtctaattcaacggcattacctatgcattctgcagcgagacccatcattaattaggagtcttatattttaaycgcagcatgttagaaaccagtttgtctctctttgtggagctcagagcagtgctgaaggtgagaagaggtggctgcaaaactcccggccccccatcacagctgcgggagggggcctggggccataaggggcccgtaaggggcttggatggggcccagcactgagcacctcttgcccaggacagcaccagtggggcactgagcagccgatggcagcaacagagcacgggggccatgtgttgtctgggcagccaatgggcagctttgtgcaattttcttccaaagatggctgctaagg

SEQ ID NO: 77813 - DNA, 599 bp, Chicken  19866894366625_1
  misc_feature (1)..(153): n is any nucleotide
nnnnnnnnnnnnnnnnnnnnnnnnnnnnnnnnnnnnnnnnnnnnnnnnnnnnnnnnnnnnnnnnnnnnnnnnnnnnnnnnnnnnnnnnnnnnnnnnnnnnnnnnnnnnnnnnnnnnnnnnnnnnnnnnnnnnnnnnnnnnnnnnnnnnnnnnnaaaaaaagatgtcgtcgtcttctttaggaaagaaacatcactcagtcatcactatcaacaatttcaagcgtggttcagtaaatgcgtgtcagtggtctatattcctctgtataacatgtaggcagagttggacttcttttgctctaycgagataaaaggacaacctgaactggaggttcttcatgttttatattggtggtgcactgactccaagtatgacagcatgattcactcaggctttggctatcaagattctcctggatggctgggcagctggtggagtctggttsaattaaaaataaagactgtgctggcattttggagggacacccatcactcctaggagattagtagatgagctactgtcagctatgctactggaatacaggcgtgatgcctttctctggaaagaaaacatatagcaaataccctggatacaggttttt

SEQ ID NO: 77814 - DNA, 599 bp, Chicken  19866894366625_2
  misc_feature (1)..(10): n is any nucleotide
nnnnnnnnnnaaaaaaagatgtcgtcgtcttctttaggaaagaaacatcactcagtcatcactatcaacaatttcaagcgtggttcagtaaatgcgtgtcagtggtctatattcctctgtataacatgtaggcagagttggacttcttttgctctaycgagataaaaggacaacctgaactggaggttcttcatgttttatattggtggtgcactgactccaagtatgacagcatgattcactcaggctttggctatcaagattctcctggatggctgggcagctggtggagtctggttsaattaaaaataaagactgtgctggcattttggagggacacccatcactcctaggagattagtagatgagctactgtcagctatgctactggaatacaggcgtgatgcctttctctggaaagaaaacatatagcaaataccctggatacaggttttttttctctttccttccaactctgtcagcgtgtgagtgccaaatccgtgccaattcaggtcactgcacacagcagcacagaaaagaaatggaacaaaaaccctggggaattcatcacgatggagcagtccaggcttcagtagctg

SEQ ID NO: 77815 - DNA, 600 bp, Chicken  19866894366625_3
gctgcagcagcaggtgggcagcgttaacggggcttggctgtcttcagctgttttgaacatttgctactagaaagagatgttcagaggtcatgtctgtgttaggagggagcactgtttctggtctgggatattagtcattaattaagagcaggtgttggttgtctagacaactatgtgggatagccggaaagaagtggattttcaggtgattactagcaaagggttgggaattaaccacttaacaatcttcattctattctattttgttttaatttactatgtttaaccacgaaatatcasttttttttttctcaggaagtcaattattttataaatacagaacatcctctgcaggatatgccatttcatttcatcatgaaatgcaaatcaggccaggaccttgtaagatctcactctgtttgtgttttcagagagaaatgtcccctgtccatcaatatcaataatttcaagtgtggctcagttgacgcagtctggataagtacatacaaatgtgcatatgccctgggatattctgagtttgcaactcttagagaggaggagacttcgtggcttaataagtagtattgggggtatgttagg

SEQ ID NO: 77816 - DNA, 600 bp, Chicken  19866894366628_1
taaagattggtaaatcatagctagctgcatttgttcaatctggaaatctcatgttttggagcatttcactgagctgattctgttaacttttattttacctggtaaaattatagtcatatctgtgggaaaagcggtcttaagtgtctttcctccttcactgcttttgtccagctatcatgagcaaattaaatcctttctgaagcattttgttagaaaattgtgaaattacccatgatcaaatggattgtgtaatgttatcattaataggacaatggtatttttaggaataggacataaggstataaaataattttactctctcaaattatgccctggagtccgaaatatcaaatatactaaagtgaggtattgtacagaatttgtagggtgaaaccattttccctagtttttcaaaatcataggctctgagtttgaagtgcagaactttagtgctttgatactgctttataatgcttgagtgtatacgtacacgtttgcatacatgtaaattatgttctagccacaactttttatgaaattatgggtttttttactctctggtggcttggtgcaactggaattttgaagcaaatacttgaa

SEQ ID NO: 77817 - DNA, 458 bp, Chicken  19866894366635_1
ctatttggttcagatcagtcaaattaacccttcattttatgaaaaagtgcttcatcaatatctttttcttcatgaaaatgattatctcaacagttttaattgatgaacactgtgaaaagtcacgaaatgggctaagtacaagaggtgacttcttcctgtggaagtagaatatctggtgcctatggaaaagcctttcctgtgagaacttcatatggtatctgcctatttccactgagtcatccaaccctttacagttcccaactgcgctccaccctttttactgtacttgcagagcagccytgcaagtgaacagtatgtcactaacaactctttcctctatatcttggacaaaaaagatttgtggattaaaactctccattttctatcccacacagacagggagggtttcagtgctactgataaaatttgttcattcatagtagaaataagaggaaaaa

SEQ ID NO: 77818 - DNA, 600 bp, Chicken  19866894366639_1
cccgtcaaagttattccatagtatcatagagtggtttgggttggaaatggcctttaagatcatctagttccagtcccctgctataggcagggacacctccctctagaccaggttgttcaaaaccccatctagcctggccttgaaagcttccagggaggtggcatccacagtcttgctgggcaacttgttccagtgtctcaccaccctcacagtaaagaatttcttcctgttatctagtctaaatctaccctcttccagtttaaagtcatttctcctcaacatgtgcttataaaaactccmtccctagctttcctgtaagtcctcttcaggtactggatggctgctataaggttcmcctggagccttctcttttccaggctgaagagccccttctctctcagcctttccccgtaaggaaaggtatatttttaagaaatgaaaattacttttttcttcacctttttctcagcagatgggtaggtaacattttcccactttcaagtcaaacatttccataaatacaggaatgaatkatttatttatttatttatttattttggtgaattcactcagtttttaagaactgtgaagtggtgattt

SEQ ID NO: 77819 - DNA, 600 bp, Chicken  19866894366639_2
aagatcatctagttccagtcccctgctataggcagggacacctccctctagaccaggttgttcaaaaccccatctagcctggccttgaaagcttccagggaggtggcatccacagtcttgctgggcaacttgttccagtgtctcaccaccctcacagtaaagaatttcttcctgttatctagtctaaatctaccctcttccagtttaaagtcatttctcctcaacatgtgcttataaaaactccmtccctagctttcctgtaagtcctcttcaggtactggatggctgctataaggttcmcctggagccttctcttttccaggctgaagagccccttctctctcagcctttccccgtaaggaaaggtatatttttaagaaatgaaaattacttttttcttcacctttttctcagcagatgggtaggtaacattttcccactttcaagtcaaacatttccataaatacaggaatgaatkatttatttatttatttatttattttggtgaattcactcagtttttaagaactgtgaagtggtgatttaaaaaaaaaaattaatcatattctcttttttccaattaggaaatcttattcataa

SEQ ID NO: 77820 - DNA, 600 bp, Chicken  19866894366639_3
ctagtctaaatctaccctcttccagtttaaagtcatttctcctcaacatgtgcttataaaaactccmtccctagctttcctgtaagtcctcttcaggtactggatggctgctataaggttcmcctggagccttctcttttccaggctgaagagccccttctctctcagcctttccccgtaaggaaaggtatatttttaagaaatgaaaattacttttttcttcacctttttctcagcagatgggtaggtaacattttcccactttcaagtcaaacatttccataaatacaggaatgaatkatttatttatttatttatttattttggtgaattcactcagtttttaagaactgtgaagtggtgatttaaaaaaaaaaattaatcatattctcttttttccaattaggaaatcttattcataaaaaaaaaaaaattctgatcatggcagatttctagtaaatatgttgaaaggctattaccccatttttatttggagaatggagtcttagctgggcaatattaaggtgttttataccatatattctgctgttcagatctgttttacaggtgtagactctacagtcgtgtgggcattgtgag

SEQ ID NO: 77821 - DNA, 599 bp, Chicken  19866894366654_1
  misc_feature (1)..(10): n is any nucleotide
nnnnnnnnnncttcatccaagtgtttgaggggggggggcctaaaaacgcttggggactgtgtgggttttcaatagaaccattgtacagaaaattgaaatgccacaatttctctagctgccagctgaagatgaagtcttgcttcaaaagttaagagaagaatctagagcagtctttctgcaaagaaagagtagagagctgctggataatgaagagcttcaggtaagaaaaaattttctgtatggctttcagtgatttctgacaaacttcttttctccgtgaagtttgagcgtctcctgttrgtccacagaatcttgtctgattggtgaggtgctttgtatttacacaggttgacttgttgtgaagcgctagctaaagccatggtgctgaatagtctagggctggtaatgtgagtgtaaagcttccttgttatgatgtacctgaggaataaatcaatggcttctggttttcccacgtgttctgacaattttctagtgggctcagaagaagtgataagttctgtttatgtatcactgagagagactccaaggactgttgagctaactacagtgtgaagacaaagagatgtggccctagaaat

SEQ ID NO: 77822 - DNA, 600 bp, Chicken  19866894366664_1
aggatggaggtgtccacgaactgatggggactggggtgaaagcagcatccttgtctggagcaaggagcagggtctggggcagggatggggctgtggctcctacctgtggtccagggaagccttccagtccagggcggccatccataccaggcacaccggcatccccctgtaagagcatcaggatggtgtgagccacaggcacagcaccttgacacatgtcacccaccccatccctcccagcatcccactcctacctttgggcctggcgggccaggctgcccaaggctgcccacctcgccyttgatccctggtagtcctggcacaccctgcggaagccacaaggatgaggggacatgagcacacagcggccatgtggtacacacymggtgagggcaggagggaggaatggagtgcaacagcagctacctgtggtccactggggccgcgtggtccaggggagccggtagcaagtggcagcccagagccttccatgtcaccctgcgaaagaaggggctgagctgtacctgtccccctcaccccgcaagcactgccaccatctccatgaatgctcccagcacttacaaatccagcctcataccc

SEQ ID NO: 77823 - DNA, 600 bp, Chicken  19866894366664_2
atggggctgtggctcctacctgtggtccagggaagccttccagtccagggcggccatccataccaggcacaccggcatccccctgtaagagcatcaggatggtgtgagccacaggcacagcaccttgacacatgtcacccaccccatccctcccagcatcccactcctacctttgggcctggcgggccaggctgcccaaggctgcccacctcgccyttgatccctggtagtcctggcacaccctgcggaagccacaaggatgaggggacatgagcacacagcggccatgtggtacacacymggtgagggcaggagggaggaatggagtgcaacagcagctacctgtggtccactggggccgcgtggtccaggggagccggtagcaagtggcagcccagagccttccatgtcaccctgcgaaagaaggggctgagctgtacctgtccccctcaccccgcaagcactgccaccatctccatgaatgctcccagcacttacaaatccagcctcataccccggccctggtggacctgggggccccgggggccccgggggccctcggggtccaactggcccggggaggccagccaagccagtctc

SEQ ID NO: 77824 - DNA, 600 bp, Chicken  19866894366664_3
tggggctgtggctcctacctgtggtccagggaagccttccagtccagggcggccatccataccaggcacaccggcatccccctgtaagagcatcaggatggtgtgagccacaggcacagcaccttgacacatgtcacccaccccatccctcccagcatcccactcctacctttgggcctggcgggccaggctgcccaaggctgcccacctcgccyttgatccctggtagtcctggcacaccctgcggaagccacaaggatgaggggacatgagcacacagcggccatgtggtacacacymggtgagggcaggagggaggaatggagtgcaacagcagctacctgtggtccactggggccgcgtggtccaggggagccggtagcaagtggcagcccagagccttccatgtcaccctgcgaaagaaggggctgagctgtacctgtccccctcaccccgcaagcactgccaccatctccatgaatgctcccagcacttacaaatccagcctcataccccggccctggtggacctgggggccccgggggccccgggggccctcggggtccaactggcccggggaggccagccaagccagtctct

SEQ ID NO: 77825 - DNA, 599 bp, Chicken  19866894366670_1
  misc_feature (1)..(34): n is any nucleotide
nnnnnnnnnnnnnnnnnnnnnnnnnnnnnnnnnnaaataaattttctagaggcatatcagtggcagaaattgcatgtttcgtgttgcctagacatcatactggtttctaaattactctacttaagtactgaaccaccatgcctgactttattacaaactacacaatgggatcactgtcctgcccaccagaggctaagaatgaattacaacttttccttacactgttctgtaatggtggtcatgaggccttataaacactccaaaacactgttcaatacaagaagtttgaagacatctttkttagttggttagtgtcctatagatcgtgtatgttaagatacttgggtttcacaattgctacctctaacactgttacactgatatagaagagagactattgttaaatcactattgaattcactatttggaattaaatttatttggagagaatgttgaccagaagaaattaggatgactgactggtaatagaaccaccacacaatactttttacatctcatcctcattgaagaaaagatgtagtcatgtggaagtaatgtatggcattaataataatgccgatttgtaaaagggaagatgc

SEQ ID NO: 77826 - DNA, 600 bp, Chicken  19866894366672_1
gggaaagcaaatgggaggtgtttcccagaaactcagagcctctctctcacagggcgaaggatctgtgcttcagctgagactcagcacttgcagagagctgacaaacgcccatcaagaaagtttagagcaagctgaggtgacatctgacaggttaaatattgctaatgagcatcaggtgtttgcaggggaaaacgctcctcatctcagatatggtaattactgtaaagatctatttagcatttagattgctgaggggaaaaggagcttggagcagctgattcccttggaaagtgctccagygctaagtggggctccttgagcactgctttcatctgcagagacagaaagcagacgtgatgcttcagctcaggataacgagaaggwctttgacatcatttggwtgtccttgtcaacagcattattgcctgcagcctctagctaaaaaaacacgcaaagcaaacctcacacgacagcatttaagagagttagaaccccaaaagatgggcctcactgctgcgaaaccttgagaggagccatgggagaaccatctcaagcatccgcatcataccctcacccgaggaatagagccctttgctgtgc

SEQ ID NO: 77827 - DNA, 600 bp, Chicken  19866894366672_2
cacttgcagagagctgacaaacgcccatcaagaaagtttagagcaagctgaggtgacatctgacaggttaaatattgctaatgagcatcaggtgtttgcaggggaaaacgctcctcatctcagatatggtaattactgtaaagatctatttagcatttagattgctgaggggaaaaggagcttggagcagctgattcccttggaaagtgctccagygctaagtggggctccttgagcactgctttcatctgcagagacagaaagcagacgtgatgcttcagctcaggataacgagaaggwctttgacatcatttggwtgtccttgtcaacagcattattgcctgcagcctctagctaaaaaaacacgcaaagcaaacctcacacgacagcatttaagagagttagaaccccaaaagatgggcctcactgctgcgaaaccttgagaggagccatgggagaaccatctcaagcatccgcatcataccctcacccgaggaatagagccctttgctgtgcttgcagactcagccacatcacagtgcacattcttcccagtgtgtatctatggctgcagcactctgtgggtgcagaggggccctt

SEQ ID NO: 77828 - DNA, 600 bp, Chicken  19866894366672_3
caaacgcccatcaagaaagtttagagcaagctgaggtgacatctgacaggttaaatattgctaatgagcatcaggtgtttgcaggggaaaacgctcctcatctcagatatggtaattactgtaaagatctatttagcatttagattgctgaggggaaaaggagcttggagcagctgattcccttggaaagtgctccagygctaagtggggctccttgagcactgctttcatctgcagagacagaaagcagacgtgatgcttcagctcaggataacgagaaggwctttgacatcatttggwtgtccttgtcaacagcattattgcctgcagcctctagctaaaaaaacacgcaaagcaaacctcacacgacagcatttaagagagttagaaccccaaaagatgggcctcactgctgcgaaaccttgagaggagccatgggagaaccatctcaagcatccgcatcataccctcacccgaggaatagagccctttgctgtgcttgcagactcagccacatcacagtgcacattcttcccagtgtgtatctatggctgcagcactctgtgggtgcagaggggcccttggggttggcaaccctac

SEQ ID NO: 77829 - DNA, 599 bp, Chicken  19866894366673_1
  misc_feature (1)..(56): n is any nucleotide
nnnnnnnnnnnnnnnnnnnnnnnnnnnnnnnnnnnnnnnnnnnnnnnnnnnnnnnnaagtaggctcaaaagagacaggagctttctgtagttcaactgtagaactcttacagttttaaaggctgcagtagatttaaaaggcagaacatttggaaaattatgattgtcaaatatgtacgtcaaatactctttgtcaaaacattcttaagcagaaacgttcaactcacaggcagtaatgggtaggttttgtcctcaaacagttggttagcacttttcagcaagtaagtgtttctaggtttgytgatggcagacaggagttctttgaagccggagtggatgttttcagtttcctcatactcaagacccttggaaagaggcaccaattagtatkgaaatatttttggctgaagcattayactttctatggttatttaaaatccccaggtcattttaatttaaaaagtgtgtgcagggatggagctcttcttcgggtatctggtacttttgcagcactgtgtgtaactggatacattgttttatgtctgtggggttatgatttgattctgcggagctgcttacacctttgaggacatcagctgt

SEQ ID NO: 77830 - DNA, 600 bp, Chicken  19866894366673_2
ttcaactgtagaactcttacagttttaaaggctgcagtagatttaaaaggcagaacatttggaaaattatgattgtcaaatatgtacgtcaaatactctttgtcaaaacattcttaagcagaaacgttcaactcacaggcagtaatgggtaggttttgtcctcaaacagttggttagcacttttcagcaagtaagtgtttctaggtttgytgatggcagacaggagttctttgaagccggagtggatgttttcagtttcctcatactcaagacccttggaaagaggcaccaattagtatkgaaatatttttggctgaagcattayactttctatggttatttaaaatccccaggtcattttaatttaaaaagtgtgtgcagggatggagctcttcttcgggtatctggtacttttgcagcactgtgtgtaactggatacattgttttatgtctgtggggttatgatttgattctgcggagctgcttacacctttgaggacatcagctgtcctcagatggtgcacccaggatgttgggtcatctcattccagtcacagtcaagcctaattttgattatcacaaaaatcattaaggcaacat

SEQ ID NO: 77831 - DNA, 600 bp, Chicken  19866894366673_3
taaaggctgcagtagatttaaaaggcagaacatttggaaaattatgattgtcaaatatgtacgtcaaatactctttgtcaaaacattcttaagcagaaacgttcaactcacaggcagtaatgggtaggttttgtcctcaaacagttggttagcacttttcagcaagtaagtgtttctaggtttgytgatggcagacaggagttctttgaagccggagtggatgttttcagtttcctcatactcaagacccttggaaagaggcaccaattagtatkgaaatatttttggctgaagcattayactttctatggttatttaaaatccccaggtcattttaatttaaaaagtgtgtgcagggatggagctcttcttcgggtatctggtacttttgcagcactgtgtgtaactggatacattgttttatgtctgtggggttatgatttgattctgcggagctgcttacacctttgaggacatcagctgtcctcagatggtgcacccaggatgttgggtcatctcattccagtcacagtcaagcctaattttgattatcacaaaaatcattaaggcaacattgcagcttttgaggagctactctgt

SEQ ID NO: 77832 - DNA, 600 bp, Chicken  19866894366677_1
aggattactatctgctccaggtctttctagctgggtcatatgagtctgtgactaggaaacttaaaaatatcaagacggacttgacatcgcttgggaatatgcttgagggatcagatgtgctgtgttctactcaatccttccaactggaggctggaatctgggcagagggagaacaaaccctgttgatggaataactacatggatggtgtcacactcaaggctttgttttctatggttgaggaaacatttttgattaattgagaaagttgacgtaggatgggacacatctgagcaggagcragaatacattaggctgcaagctgatggggctcatcatcagggctttcaactagatttgatagaggaaggggatgtgttgctgtggtacagagaagaacactgagaacaccctcactttaggaaacagcaagggaaaaccttggattgatcccagagattctagaactatcattttagaatagaaaactttctccttcccatcagtgaaatatattggcatccttacttacgaacgaacatctgtaattttgaaggcttggatacatttcttctatttaccagttatcataaaatgaacaa

SEQ ID NO: 77833 - DNA, 599 bp, Chicken  19866894366678_1
  misc_feature (1)..(101): n is any nucleotide
nnnnnnnnnnnnnnnnnnnnnnnnnnnnnnnnnnnnnnnnnnnnnnnnnnnnnnnnnnnnnnnnnnnnnnnnnnnnnnnnnnnnnnnnnnnnnnnnnnnnngaggggtttaatgtgttcaagtcttgctttaactgtttcactgtgggtttcagcagtcgccctctttgtgcttctggtcttgcaggtgctgtttccctttgctctgtgggcatttcaaaaggagtgctctgaagggggaggggaaaggattttctctcataagtcaggaaggaagagggctggagaaggtctctaacamaagccctatggtgaatcaggcaaaggcaccattgctttagggatgttgctttgtgtgtgtgtgtgtgtcctctagtaaaggctcttgttcagtggcaaaacaaaatagcttttctgtcctttgtctgactttgatcctgcagtttsagaccacaaagaagagtatttgcccccactacatgctatgtcagcatggraatggttaagctgggwgggagctaggtatcaggaaatctttattcttctcttcccagtctctagcctgggagaaatggtttccttcccaaaaacagatttccc

SEQ ID NO: 77834 - DNA, 599 bp, Chicken  19866894366678_2
  misc_feature (1)..(49): n is any nucleotide
nnnnnnnnnnnnnnnnnnnnnnnnnnnnnnnnnnnnnnnnnnnnnnnnngaggggtttaatgtgttcaagtcttgctttaactgtttcactgtgggtttcagcagtcgccctctttgtgcttctggtcttgcaggtgctgtttccctttgctctgtgggcatttcaaaaggagtgctctgaagggggaggggaaaggattttctctcataagtcaggaaggaagagggctggagaaggtctctaacamaagccctatggtgaatcaggcaaaggcaccattgctttagggatgttgcttmgtgtgtgtgtgtgtgtcctctagtaaaggctcttgttcagtggcaaaacaaaatagcttttctgtcctttgtctgactttgatcctgcagtttsagaccacaaagaagagtatttgcccccactacatgctatgtcagcatggraatggttaagctgggwgggagctaggtatcaggaaatctttattcttctcttcccagtctctagcctgggagaaatggtttccttcccaaaaacagatttccctattttcaaatggggaaaagcatgtgctggcaggaagcrttaacatttgcgc

SEQ ID NO: 77835 - DNA, 599 bp, Chicken  19866894366678_3
  misc_feature (1)..(48): n is any nucleotide
nnnnnnnnnnnnnnnnnnnnnnnnnnnnnnnnnnnnnnnnnnnnnnnngaggggtttaatgtgttcaagtcttgctttaactgtttcactgtgggtttcagcagtcgccctctttgtgcttctggtcttgcaggtgctgtttccctttgctctgtgggcatttcaaaaggagtgctctgaagggggaggggaaaggattttctctcataagtcaggaaggaagagggctggagaaggtctctaacamaagccctatggtgaatcaggcaaaggcaccattgctttagggatgttgctttmtgtgtgtgtgtgtgtcctctagtaaaggctcttgttcagtggcaaaacaaaatagcttttctgtcctttgtctgactttgatcctgcagtttsagaccacaaagaagagtatttgcccccactacatgctatgtcagcatggraatggttaagctgggwgggagctaggtatcaggaaatctttattcttctcttcccagtctctagcctgggagaaatggtttccttcccaaaaacagatttccctattttcaaatggggaaaagcatgtgctggcaggaagcrttaacatttgcgca

SEQ ID NO: 77836 - DNA, 600 bp, Chicken  19866894366678_4
ggtttcagcagtcgccctctttgtgcttctggtcttgcaggtgctgtttccctttgctctgtgggcatttcaaaaggagtgctctgaagggggaggggaaaggattttctctcataagtcaggaaggaagagggctggagaaggtctctaacamaagccctatggtgaatcaggcaaaggcaccattgctttagggatgttgctttgtgtgtgtgtgtgtgtcctctagtaaaggctcttgttcagtggcaaaacaaaatagcttttctgtcctttgtctgactttgatcctgcagtttsagaccacaaagaagagtatttgcccccactacatgctatgtcagcatggraatggttaagctgggwgggagctaggtatcaggaaatctttattcttctcttcccagtctctagcctgggagaaatggtttccttcccaaaaacagatttccctattttcaaatggggaaaagcatgtgctggcaggaagcrttaacatttgcgcagcactcagagatagaaagctgcctgcaaacacctaccagctcaccgttaattggagagcaccccaggttgggctggaagcctggctgcatgcct

SEQ ID NO: 77837 - DNA, 600 bp, Chicken  19866894366678_5
cctttgctctgtgggcatttcaaaaggagtgctctgaagggggaggggaaaggattttctctcataagtcaggaaggaagagggctggagaaggtctctaacamaagccctatggtgaatcaggcaaaggcaccattgctttagggatgttgctttgtgtgtgtgtgtgtgtcctctagtaaaggctcttgttcagtggcaaaacaaaatagcttttctgtcctttgtctgactttgatcctgcagtttsagaccacaaagaagagtatttgcccccactacatgctatgtcagcatggraatggttaagctgggwgggagctaggtatcaggaaatctttattcttctcttcccagtctctagcctgggagaaatggtttccttcccaaaaacagatttccctattttcaaatggggaaaagcatgtgctggcaggaagcrttaacatttgcgcagcactcagagatagaaagctgcctgcaaacacctaccagctcaccgttaattggagagcaccccaggttgggctggaagcctggctgcatgcctgccagcccggactgacacagccccttctgccaggcctcactcactgcagc

SEQ ID NO: 77838 - DNA, 600 bp, Chicken  19866894366678_6
atttcaaaaggagtgctctgaagggggaggggaaaggattttctctcataagtcaggaaggaagagggctggagaaggtctctaacamaagccctatggtgaatcaggcaaaggcaccattgctttagggatgttgctttgtgtgtgtgtgtgtgtcctctagtaaaggctcttgttcagtggcaaaacaaaatagcttttctgtcctttgtctgactttgatcctgcagtttsagaccacaaagaagagtatttgcccccactacatgctatgtcagcatggraatggttaagctgggwgggagctaggtatcaggaaatctttattcttctcttcccagtctctagcctgggagaaatggtttccttcccaaaaacagatttccctattttcaaatggggaaaagcatgtgctggcaggaagcrttaacatttgcgcagcactcagagatagaaagctgcctgcaaacacctaccagctcaccgttaattggagagcaccccaggttgggctggaagcctggctgcatgcctgccagcccggactgacacagccccttctgccaggcctcactcactgcagctgtgcacatccagaca

SEQ ID NO: 77839 - DNA, 600 bp, Chicken  19866894366678_7
agggatgttgctttgtgtgtgtgtgtgtgtcctctagtaaaggctcttgttcagtggcaaaacaaaatagcttttctgtcctttgtctgactttgatcctgcagtttsagaccacaaagaagagtatttgcccccactacatgctatgtcagcatggraatggttaagctgggwgggagctaggtatcaggaaatctttattcttctcttcccagtctctagcctgggagaaatggtttccttcccaaaaacagatttccctattttcaaatggggaaaagcatgtgctggcaggaagcrttaacatttgcgcagcactcagagatagaaagctgcctgcaaacacctaccagctcaccgttaattggagagcaccccaggttgggctggaagcctggctgcatgcctgccagcccggactgacacagccccttctgccaggcctcactcactgcagctgtgcacatccagacagaagcaggctggaggaagagcaggggaagcccaggtgagttcctgtgcagtgagctacggccagcttgccaggccagatttttggctccctgcctgaatttctcaacgtggtggctggaagccatg

SEQ ID NO: 77840 - DNA, 600 bp, Chicken  19866894366679_1
cctgtgacctcttgacttgaaatagttatcttgctgtgggaagaacgtacctttccatctttcttactgcctcattcaacctcactggagtcattgatacaaacaggcatagaaacgtcaaattgccataattgggtcaggccataggtctggtggtggccagagattattgcttagagaaagaacagaagaagcacacagagaagggcccttcccctggtggatctgcccagctgcccacaggttaaaggccagcatggagctggagccagcatccatcaccttaggatgcaagtaccraaatactaaataccagagaatgccaaaaccttgagttttttaaactcatacacatacttcttttgttaaacaagacaaaaatatatctgcaattgtatatggtatagactcttatatgtgagttacaatgtcaacatgcttctgtacctacaagaaaatacaaggattggcactttctgaccgtatagaagacagaaagtatttttttycctaccaataggatttcttcaattctttttaaagatgttttcacttcattctttcccccttcaccatactctgtgcatgttatgaggagct

SEQ ID NO: 77841 - DNA, 600 bp, Chicken  19866894366679_2
ccttcccctggtggatctgcccagctgcccacaggttaaaggccagcatggagctggagccagcatccatcaccttaggatgcaagtaccraaatactaaataccagagaatgccaaaaccttgagttttttaaactcatacacatacttcttttgttaaacaagacaaaaatatatctgcaattgtatatggtatagactcttatatgtgagttacaatgtcaacatgcttctgtacctacaagaaaatacaaggattggcactttctgaccgtatagaagacagaaagtatttttttycctaccaataggatttcttcaattctttttaaagatgttttcacttcattctttcccccttcaccatactctgtgcatgttatgaggagcttcacaatctctgtgatccacccttctagttcccagccccattactgacaaaggtgttacactccatacctacatatgtcactctccataccttaaggattgatttgcacaagcatgctcgcagcccagcgggctcttcaacaccaagagttcaagtcaaactcatttgaaaccaccatcttttaaaggtcctggaggttttgaccaatt

SEQ ID NO: 77842 - DNA, 599 bp, Chicken  19866894366680_1
  misc_feature (1)..(92): n is any nucleotide
nnnnnnnnnnnnnnnnnnnnnnnnnnnnnnnnnnnnnnnnnnnnnnnnnnnnnnnnnnnnnnnnnnnnnnnnnnnnnnnnnnnnnnnnnnnnttgctttgccctcatgccttcataaatgttactcagagcatggaaggaaaggctccttgaggtccaggcactgaagtgggagctaggtccagtttctaaccactgcagatactctgagttaaggtaaaattgctccattttctctgcaactcatttttccatttataaatagaactaataaacctcctttccttagttttttgattcrttttgtctgtgtgaagccacgaggcctcttaatatgtgaagccatcctttgctatctaatataccacttagtaaaaacagcgtgccagtattccgtggaatactgtgaaaggaaagtgagcagaatagtttcaaagcgtttaagccataattcagtcctgctttgaagtactttaaaggcatttaaagtttctgctgactctctgcgtatggatgatttcacccaagatggatagatatttctttgagtctgagatagtggacaggatctattgtttgtgagttcacaggatgatcagg

SEQ ID NO: 77843 - DNA, 600 bp, Chicken  19866894366688_1
tgtcattgacagtgacacattcttgcaaaatatccagatcttgattgaaaaatattgtcatacactatcaacttttaacttttaataagttgccctcaacttcaccctttagttcttatcatctggtttggagattgggactttggacaatggtattcaccttgaaaagaacactagtaacttttctgtggtcttcaggaaaattatttatttatcctgtgtttcagattcttatgtttaaaatacaacttatgttaatcactacttgctcaagtatactaattagaagatccaactgamgagttgtcccagatttcaaatctaaaagatctgatgacactattcaaagatatgcatacagataaagaaataaacagttaaaatcagcatttcaccttcagtaactgctccagtccaatcaccgatgactgaaaattgttcccatgtgtaggctgagcagtataatttttgggtggtcttagcctttcttaatgaagagatgtctacatcattaaaagaccctttagcaattaacaacaactggcaccagtagtaccattggaaaataacctgagctgtgagactttcccctagctttat

SEQ ID NO: 77844 - DNA, 600 bp, Chicken  19866894366694_1
ctagggatttattttagaactcagaaaagagcaaaaatgtaaaattagctactaatactgcacacaggaaaaaataacaatgctgttctctaagcgtgatagaggtaccagccattttacactaggcagatccttgtagatagagacatttctttattcatgtatctcagtgagtggtaaatgaggcatgctcacagaagttatttgggatggaaatgagtctaattagtctatccaatttaggaataacactgtgaggcaagtctgcagaaatgggagttagcaacagaaagagcaatrgagaaacagagctatgcactttctacatttaagcagtatatatattcgaggtttcatttggcagaataaacaatagataaggggacagctcacgcaggcaaacaattctaaggaactagtttgaaaacattttaatttcagggtctacaagcagtttcctgcgtaaccctacttcagttttcattgtcatcttttgcagtacagtgaacagtaaaaactgctcagttattcaaagttttctgagtggggcagggacagaggcgctccaaacttacgtgacactactgaaaactggtagct

SEQ ID NO: 77845 - DNA, 600 bp, Chicken  19866894366695_1
tgcatttttctcctcctcaaggagcaggaccacactttccacccccctgtgctgcagcaacaacacacgttgtaactccacaccttgctgctgcacccacagaggcaaaccaacggaggaagggactaatgggcagaggtgacaacaggcagcagtgcaatgggcccctcctagataaggaataaaaatggaacatcctgagggaaaaggtctattttgtgttttctttctgatcttctgttgagcaccactgctgccggaggagcttggtgtgcaagtgatgctcattcacatgcagasaatttgagagatcctcccattaaaacaaagaggaattactgtgcaaccttgggggttagcagagccctcagaattatttacagttcctaaatgagggaaactgcatcaattgggtaagtcagggacagggagccgagatgtgggagggggactgctgcaggaaccactgggaacatcgggaagggctgyyggagttggcacaaggtatgaggggtcttcatccaccaaaagcagcagcactgggacccttgcagtgctgtcaccccccaragctgcccacgtaccaccaccagctgcctc

SEQ ID NO: 77846 - DNA, 600 bp, Chicken  19866894366695_2
ggaacatcctgagggaaaaggtctattttgtgttttctttctgatcttctgttgagcaccactgctgccggaggagcttggtgtgcaagtgatgctcattcacatgcagasaatttgagagatcctcccattaaaacaaagaggaattactgtgcaaccttgggggttagcagagccctcagaattatttacagttcctaaatgagggaaactgcatcaattgggtaagtcagggacagggagccgagatgtgggagggggactgctgcaggaaccactgggaacatcgggaagggctgyyggagttggcacaaggtatgaggggtcttcatccaccaaaagcagcagcactgggacccttgcagtgctgtcaccccccaragctgcccacgtaccaccaccagctgcctccgccccttgcactgcagtcggcrttgagtcaaactccatttccaaactaagacatctcgcgcgctattctccctcccctccagactaatagctgacaatgtatgccttccacattaatgataagggttcaaggggaaagagactgctctcccgtttcgctgacattacactctcctatgtacccaccaa

SEQ ID NO: 77847 - DNA, 600 bp, Chicken  19866894366695_3
gaacatcctgagggaaaaggtctattttgtgttttctttctgatcttctgttgagcaccactgctgccggaggagcttggtgtgcaagtgatgctcattcacatgcagasaatttgagagatcctcccattaaaacaaagaggaattactgtgcaaccttgggggttagcagagccctcagaattatttacagttcctaaatgagggaaactgcatcaattgggtaagtcagggacagggagccgagatgtgggagggggactgctgcaggaaccactgggaacatcgggaagggctgyyggagttggcacaaggtatgaggggtcttcatccaccaaaagcagcagcactgggacccttgcagtgctgtcaccccccaragctgcccacgtaccaccaccagctgcctccgccccttgcactgcagtcggcrttgagtcaaactccatttccaaactaagacatctcgcgcgctattctccctcccctccagactaatagctgacaatgtatgccttccacattaatgataagggttcaaggggaaagagactgctctcccgtttcgctgacattacactctcctatgtacccaccaac

SEQ ID NO: 77848 - DNA, 600 bp, Chicken  19866894366695_4
tgtgcaagtgatgctcattcacatgcagasaatttgagagatcctcccattaaaacaaagaggaattactgtgcaaccttgggggttagcagagccctcagaattatttacagttcctaaatgagggaaactgcatcaattgggtaagtcagggacagggagccgagatgtgggagggggactgctgcaggaaccactgggaacatcgggaagggctgyyggagttggcacaaggtatgaggggtcttcatccaccaaaagcagcagcactgggacccttgcagtgctgtcaccccccaragctgcccacgtaccaccaccagctgcctccgccccttgcactgcagtcggcrttgagtcaaactccatttccaaactaagacatctcgcgcgctattctccctcccctccagactaatagctgacaatgtatgccttccacattaatgataagggttcaaggggaaagagactgctctcccgtttcgctgacattacactctcctatgtacccaccaacataccctaaggcaacagaactagtaataggttcctctaactgcctcctgcatcaaatttgacaccgggtgctttcttctc

SEQ ID NO: 77849 - DNA, 600 bp, Chicken  19866894366695_5
aacaaagaggaattactgtgcaaccttgggggttagcagagccctcagaattatttacagttcctaaatgagggaaactgcatcaattgggtaagtcagggacagggagccgagatgtgggagggggactgctgcaggaaccactgggaacatcgggaagggctgyyggagttggcacaaggtatgaggggtcttcatccaccaaaagcagcagcactgggacccttgcagtgctgtcaccccccaragctgcccacgtaccaccaccagctgcctccgccccttgcactgcagtcggcrttgagtcaaactccatttccaaactaagacatctcgcgcgctattctccctcccctccagactaatagctgacaatgtatgccttccacattaatgataagggttcaaggggaaagagactgctctcccgtttcgctgacattacactctcctatgtacccaccaacataccctaaggcaacagaactagtaataggttcctctaactgcctcctgcatcaaatttgacaccgggtgctttcttctcctttcccatcgctcaccttataactctgtcatcatcattgattttgacttaag

SEQ ID NO: 77850 - DNA, 599 bp, Chicken  19866894366702_1
  misc_feature (1)..(16): n is any nucleotide
nnnnnnnnnnnnnnnncaactcccaacccccagcaatctcaaacaaacagaattcctagatcgcagatgagattttgaaacacccagccaagacatacagattgctatctatgtaggtggcagtgtgactttaaaggagaaatataaataccatagagctatgaggagcttacagcacaagacagtatctgaatgtataatatgaggaatagaagtcataatcagacacatttttctatgaagttttatcagagttgagatttttaaatgtgcctgtgtggaataaaagtatagaattawttccctttcagtggtacacgtgctgtgaagtcactttggtggttttcgaataaacttcacctgatgcaatctgccaactgtttggaaagggaaaggaagttgctgttgctcctgaagtgcttgcataccatccaaatgggaaatgtgttcattttgtatgttttgtgcatcagtatgagtttacaaatagacttaagggattcagcccccttaagggtttactgaaagtaactaatatgtgctcagtgacactgagacaatttttacttcactgcttcactgatatcttttccatatag

SEQ ID NO: 77851 - DNA, 600 bp, Chicken  19866894366704_1
gtcatttctgcagcatggaaggaagacgttaacatgtctcctctaacttgccttgctgagagccggtccagtttgttcccagctatgaaatcatagtttctcagacagcagggctaactggaaggagacaaaagaacataagtgccttttgaaattaaggagcccttatgctgctaatgtgttttcaaactgtttttgctgcatgcaggcattgtcattcagctttgaatgtgaggaatcagcaaacaggttgaaatagtagagttttacaatagtttttcagtgctgctctcagtgccrggtgttacagatggtacatcttggatcaactgggtagcaggaacaagctgagattttgaaaaatgctgttctgcttggatgggaaaagctgttttccaacactgtcttgaaatgtattattataagaattataccatttaggattgtctaccgttttggaaatcatagctcawgttctccaaaacattcaagtatgaattgaaattctagccatacttttcagtaatccccaagaaatacctgactttagtcacagtaaatacgtacacctggaatcagaaaatcctcagacaaggctat

SEQ ID NO: 77852 - DNA, 600 bp, Chicken  19866894366704_2
ctaatgtgttttcaaactgtttttgctgcatgcaggcattgtcattcagctttgaatgtgaggaatcagcaaacaggttgaaatagtagagttttacaatagtttttcagtgctgctctcagtgccrggtgttacagatggtacatcttggatcaactgggtagcaggaacaagctgagattttgaaaaatgctgttctgcttggatgggaaaagctgttttccaacactgtcttgaaatgtattattataagaattataccatttaggattgtctaccgttttggaaatcatagctcawgttctccaaaacattcaagtatgaattgaaattctagccatacttttcagtaatccccaagaaatacctgactttagtcacagtaaatacgtacacctggaatcagaaaatcctcagacaaggctatagctccatgggcatgtatgtgtgcacctggttgtctagatgaatgtgtttgcttttaaacagctcttgccaattacagaagctctgaaatgaaagtacaagactctaggggtatcaaatgcccatgatacattatcaaattaatgacgtgcaattaatgatgatgggagaaag

SEQ ID NO: 77853 - DNA, 600 bp, Chicken  19866894366713_1
gtcctcccgcctgtttctgtacatagagggatcgctgccgtctatttgctaaacatctgaacagaaaggaagaataaataaataaataaaatacacctttgtttggataacaaagggacaatgcggtagtagacaagttttggctttgcaaataattctctcttaaatgactaagtatttaaatcagtgaaggtgctcacaaggtaactaaatataaatttggaagatcgattatcattaactcatacgatttacttttttttttttaattttgattacttatttcttatactaatttaytttttcttttcaggaaacatattttgaaagtaaataatttccacagatatttttagtagtatgaaagaagaaataagtctggatttcaaatgttgtagaaatatgaattgcaatttaatttttttatgacatgtcaaaataattattaattaatggagcaatgaaacaccagttgttattctaattcaccgtgacttgataacacacagtctcttttccccagagaagctcatttctgagtacgtcagtactggtataatgggaaaagttggaacactgttctgtaactcaacccaattt

SEQ ID NO: 77854 - DNA, 599 bp, Chicken  19866894366714_1
  misc_feature (1)..(132): n is any nucleotide
nnnnnnnnnnnnnnnnnnnnnnnnnnnnnnnnnnnnnnnnnnnnnnnnnnnnnnnnnnnnnnnnnnnnnnnnnnnnnnnnnnnnnnnnnnnnnnnnnnnnnnnnnnnnnnnnnnnnnnnnnnnnnnnnnnnnctatgacagcgggtatcaccctatagccaccggcaacacgaggcataatcccaactacagagcaataaagggtgtttggcttctaccatccaggagaaaaaaagaacaggaaaagatattgtactgttctttccaaagatatgtgccacaaaagcctcagcctccagyggggaaggctgggaaggtttgcagtaggcagccgcgggtaagaatagaaactgttgtgtgatttttgctgtagcggttgtgagcagcggggcagcaatagtgcatcaaaagaaatgactgtaaaggaagcgagctcattaaaaacggagagagcggatgaaatgtgastgctcaacaatagctgagctctgagctccctccagccagcccagtgccgcagcaatctgctgtccagcagcagaggaaggagtggctctgygctgcaagcagccctggggccagaggtcagggagaacatc

SEQ ID NO: 77855 - DNA, 600 bp, Chicken  19866894366714_2
cacgaggcataatcccaactacagagcaataaagggtgtttggcttctaccatccaggagaaaaaaagaacaggaaaagatattgtactgttctttccaaagatatgtgccacaaaagcctcagcctccagyggggaaggctgggaaggtttgcagtaggcagccgcgggtaagaatagaaactgttgtgtgatttttgctgtagcggttgtgagcagcggggcagcaatagtgcatcaaaagaaatgactgtaaaggaagcgagctcattaaaaacggagagagcggatgaaatgtgastgctcaacaatagctgagctctgagctccctccagccagcccagtgccgcagcaatctgctgtccagcagcagaggaaggagtggctctgygctgcaagcagccctggggccagaggtcagggagaacatccttgcctgaattaggacaaagcgcaggtggacacgccgcctaccatagctttcacaaatgagctccttgtacttcctgccagcgtctgcgatgagctgaagcagctttacagactcccttttgtcctcttcgttcaggtggttcagccctagtatttccaggagcatca

SEQ ID NO: 77856 - DNA, 600 bp, Chicken  19866894366714_3
tctttccaaagatatgtgccacaaaagcctcagcctccagyggggaaggctgggaaggtttgcagtaggcagccgcgggtaagaatagaaactgttgtgtgatttttgctgtagcggttgtgagcagcggggcagcaatagtgcatcaaaagaaatgactgtaaaggaagcgagctcattaaaaacggagagagcggatgaaatgtgastgctcaacaatagctgagctctgagctccctccagccagcccagtgccgcagcaatctgctgtccagcagcagaggaaggagtggctctgygctgcaagcagccctggggccagaggtcagggagaacatccttgcctgaattaggacaaagcgcaggtggacacgccgcctaccatagctttcacaaatgagctccttgtacttcctgccagcgtctgcgatgagctgaagcagctttacagactcccttttgtcctcttcgttcaggtggttcagccctagtatttccaggagcatcaagacgcctcccatctccagaaattcaataatgtatctgcggctgcacggatggagggacaaagccaaaaacgtcacctgctttggagcaca

SEQ ID NO: 77857 - DNA, 600 bp, Chicken  19866894366717_1
gataactcactgtcacatctctctccactggctctaaagggagcacagatctttaggtaaaagggagaatagatctttaggtagctaaaaataaatgagaagatcccatacaaagtattactctcccctaactggaactgagcctgttttttgtgagaaatgaaaagtgctgaggggcagctgagatgtaagatctggaagtttcatgtctcattactgtcattcatatctcaaactgtgacaaatctgtatgtgctgccagtagtattccaagataaacagaaatattttctcccccargcctattaagtaagacattccatgcagcttctcttccctcggacacaaccaggatctctctggactcagactagataccaaggaggccacacagcctttgctcagtgctttctatatgcaacttagagttcagcttcattttaaccccccttttttttttttaaaccatattctgagctgacacaagtctggcaccaactccacgttgctcaaggactgaagtaggtcaggtaggactgacctaaggcaaaggggaagaagaacaaaacttgggcccaaagcatccttaggtcttctgat

SEQ ID NO: 77858 - DNA, 600 bp, Chicken  19866894366717_2
tgtgagaaatgaaaagtgctgaggggcagctgagatgtaagatctggaagtttcatgtctcattactgtcattcatatctcaaactgtgacaaatctgtatgtgctgccagtagtattccaagataaacagaaatattttctcccccargcctattaagtaagacattccatgcagcttctcttccctcggacacaaccaggatctctctggactcagactagataccaaggaggccacacagcctttgctcagtgctttctatatgcaacttagagttcagcttcattttaaccccccrtttttttttttaaaccatattctgagctgacacaagtctggcaccaactccacgttgctcaaggactgaagtaggtcaggtaggactgacctaaggcaaaggggaagaagaacaaaacttgggcccaaagcatccttaggtcttctgatactccacctctcctgcatttgctcatctttagagacctgcccatgtgctggagggcattattctcggaactgacctgtcctgaggaggtaactgtcccaggatgggctctgcggtttgaggcagaatccttcatatcctgacaatgtctct

SEQ ID NO: 77859 - DNA, 600 bp, Chicken  19866894366720_1
tttactgcaagccaacgtccgtcaggtacatgaaattttctgattactaaaactatcaagcaaacgccatctgtttcactagccaccacaaaatgccacagatgagtactagagttgtgggagaagctgttcttccacttctcctagccagcagctggaacatctggcagagaagaatgatttggtagagggaaaaggtcactgaagtctgtcaagatgaccaaagtgcacattgcctggccagcaagggtttctcatgttgccactggtatcgctactttgctgttatgtatgtgtcaygtaataatccaaaagaatgaaaaaaattagagaagagttgtaatctattgaaggacttcttatgggactataaatggacatacagtaccaaaggatgcataatcccattttttcttcacatttaagagcagaaatttaagcaatagaagaaagttttaaaaatattatcctagttattcatagcaagtgagaagctgaagtatatatatagaaaacttactgtttttgctatctctgtttcattcttcttttgtttacttcttacacataatttagtccttatatgcgacagtccaattc

SEQ ID NO: 77860 - DNA, 600 bp, Chicken  19866894366722_1
ccatttgtttctttctagtcacaagtaaaaatgacagtctttcacacgctggaaataagaactggataaatttaggtgtccaagctatgatctcttttcctttctcttcaattatgtttagttttaaattaaaatataaactaattgaatatgtcttgcaacttctacatggaattcctcctctctgtattcattgtagacaatgctcaatacatcattttcatttaatttgttgttcctagacctatctcagaggacagttttattcttgtgggctgagacaccacaaaccctttgacrctggctcttttgtgttccagtggccagcagcagcaactccttcacaatcaaaacacattatagtgcttacatgaagactaccacatacctttctccacagtaaagatgtgaatctgaattaactcctccacttttagcctcactctttttgacatccccttccatttttataacccagactcaaattcattttgcatactgtctacataatgcatccttttctccctacccagtcaactacagctttattgttgtaacttcagctgttattgtgttatggatcagtcactgtatccatcc

SEQ ID NO: 77861 - DNA, 600 bp, Chicken  19866894366728_1
ggagtgtgaacaaagcctttgtcctctttgacttcatttcctttcttgcatgatgctcagtacagctttgaatgaggctctggtatcagcctacagggattttgcaggctctgtagcacagcgtctgagtcatgctctaaaaatagccaggaaaatgtcagcctagccaaagtcattggctgattaacaacaaagcttcatgattccaggtacacacctgatatcaactattacatttgagctgtttaaaagacatgtgttggtgctttagagatatacatataactacatattagaaaygatagaactagctgtttctgcattattacaaagcagttctaattaatgctattgtgctgcttctttttgkcaaatcctgggtcttttcaatatatgaagcaataaaactatcacatttcttggatatgttttcccattctgcagatgcagaagaagagacacggaggtgaactgacttgcatttgttgcacagaacattggctgcagatttcctgactcagatttccccgttccttctgggtctatccagcagcacgtgcagcaaaggctattactgtggccttatggtagagtgaaatt

SEQ ID NO: 77862 - DNA, 554 bp, Chicken  19866894366728_2
aatgaggctctggtatcagcctacagggattttgcaggctctgtagcacagcgtctgagtcatgctctaaaaatagccaggaaaatgtcagcctagccaaagtcattggctgattaacaacaaagcttcatgattccaggtacacacctgatatcaactattacatttgagctgtttaaaagacatgtgttggtgctttagagatatacatataactacatattagaaaygatagaactagctgtttctgcattattacaaagcagttctaattaatgctattgtgctgcttctttttgkcaaatcctgggtcttttcaatatatgaagcaataaaactatcacatttcttggatatgttttcccattctgcagatgcagaagaagagacacggaggtgaactgacttgcatttgttgcacagaacattggctgcagatttcctgactcagatttccccgttccttctgggtctatccagcagcacgtgcagcaaaggctattactgtggccttatggtagagtgaaattaacggttatttattggttagtctg

SEQ ID NO: 77863 - DNA, 600 bp, Chicken  19866894366735_1
attttttatttctacaacttaaggacattgttaagatccatgtgcatttttaagatcttttccatcatttaaaattcaactagagctagtgtgccaaaaacattcatctttattagctttcagtgctctggagaagttaaaaaggggactgtttattacccatatttttctttagagtagtagcaagaagtgaagactgactttgtttcttttgttggcatagagattttttgttctgagacaaatgggagtatttcaagagtgatgttaaccttgcaaagaaacgacatcttcaatctwtagctaaatagttatttgtatactttctttttcttctttttcctttcttcctctctttttctccccctaacaggtgacatgtatgcagtggttgcaaggggaccatacaatgctggatatgattgagaaaaaacgttgcctctgcaaagaaataaaagctcgacagaaatcagagaaaggactctgcaaacaggacagcatgcctattttgccgagttggaaaaagaacaccgggaccaagaaatatagccctcctccttattccaaacaacaaactgttttctgggacactgcaatctg

SEQ ID NO: 77864 - DNA, 599 bp, Chicken  19866894366744_1
  misc_feature (1)..(16): n is any nucleotide
nnnnnnnnnnnnnnnnaaccctacaaactttgccctaaagtctcagtgtctacatggaagttttctcagtgtcaaatgaagtcttcttgtgaacgctctcgctgctgtttaacaactgcactcaccaccaggcccctggtttcacactctgaaggtcacactgactaaaggcatgccaggaaaagtgactgtttcttctcaacattcactcactgatgcctactgcatagaaagctggcttctgctttcaccgaagccctctgaagttccagctgactcacgtgggaattgcacctagakcagaacagccagagatgagctcagagcagccctggagctggggcccttasraagtgctsatcccaaaggtgtacaygttaaagctcctgcaacctggtgctcctctagcttggttgacccttcagaggggctgtccctgctgcttcccctggggcaaggccagccggcctctccatagaagcatgtgatctgcctgtccgtccatatgtcagggcctgctgggaatgtgacaaaaggcaacgcgtcacgcagcagggccctctgaggattgccaccattcaggggctctccccactctg

SEQ ID NO: 77865 - DNA, 600 bp, Chicken  19866894366744_2
tacatggaagttttctcagtgtcaaatgaagtcttcttgtgaacgctctcgctgctgtttaacaactgcactcaccaccaggcccctggtttcacactctgaaggtcacactgactaaaggcatgccaggaaaagtgactgtttcttctcaacattcactcactgatgcctactgcatagaaagctggcttctgctttcaccgaagccctctgaagttccagctgactcacgtgggaattgcacctagakcagaacagccagagatgagctcagagcagccctggagctggggcccttasraagtgctsatcccaaaggtgtacaygttaaagctcctgcaacctggtgctcctctagcttggttgacccttcagaggggctgtccctgctgcttcccctggggcaaggccagccggcctctccatagaagcatgtgatctgcctgtccgtccatatgtcagggcctgctgggaatgtgacaaaaggcaacgcgtcacgcagcagggccctctgaggattgccaccattcaggggctctccccactctggagaccatgaaatccccttcacgaagaagaggaacctaactggggctcgcc

SEQ ID NO: 77866 - DNA, 600 bp, Chicken  19866894366744_3
acatggaagttttctcagtgtcaaatgaagtcttcttgtgaacgctctcgctgctgtttaacaactgcactcaccaccaggcccctggtttcacactctgaaggtcacactgactaaaggcatgccaggaaaagtgactgtttcttctcaacattcactcactgatgcctactgcatagaaagctggcttctgctttcaccgaagccctctgaagttccagctgactcacgtgggaattgcacctagakcagaacagccagagatgagctcagagcagccctggagctggggcccttasraagtgctsatcccaaaggtgtacaygttaaagctcctgcaacctggtgctcctctagcttggttgacccttcagaggggctgtccctgctgcttcccctggggcaaggccagccggcctctccatagaagcatgtgatctgcctgtccgtccatatgtcagggcctgctgggaatgtgacaaaaggcaacgcgtcacgcagcagggccctctgaggattgccaccattcaggggctctccccactctggagaccatgaaatccccttcacgaagaagaggaacctaactggggctcgcct

SEQ ID NO: 77867 - DNA, 600 bp, Chicken  19866894366744_4
gttttctcagtgtcaaatgaagtcttcttgtgaacgctctcgctgctgtttaacaactgcactcaccaccaggcccctggtttcacactctgaaggtcacactgactaaaggcatgccaggaaaagtgactgtttcttctcaacattcactcactgatgcctactgcatagaaagctggcttctgctttcaccgaagccctctgaagttccagctgactcacgtgggaattgcacctagakcagaacagccagagatgagctcagagcagccctggagctggggcccttasraagtgctsatcccaaaggtgtacaygttaaagctcctgcaacctggtgctcctctagcttggttgacccttcagaggggctgtccctgctgcttcccctggggcaaggccagccggcctctccatagaagcatgtgatctgcctgtccgtccatatgtcagggcctgctgggaatgtgacaaaaggcaacgcgtcacgcagcagggccctctgaggattgccaccattcaggggctctccccactctggagaccatgaaatccccttcacgaagaagaggaacctaactggggctcgccttgctcccg

SEQ ID NO: 77868 - DNA, 600 bp, Chicken  19866894366744_5
tgaagtcttcttgtgaacgctctcgctgctgtttaacaactgcactcaccaccaggcccctggtttcacactctgaaggtcacactgactaaaggcatgccaggaaaagtgactgtttcttctcaacattcactcactgatgcctactgcatagaaagctggcttctgctttcaccgaagccctctgaagttccagctgactcacgtgggaattgcacctagakcagaacagccagagatgagctcagagcagccctggagctggggcccttasraagtgctsatcccaaaggtgtacaygttaaagctcctgcaacctggtgctcctctagcttggttgacccttcagaggggctgtccctgctgcttcccctggggcaaggccagccggcctctccatagaagcatgtgatctgcctgtccgtccatatgtcagggcctgctgggaatgtgacaaaaggcaacgcgtcacgcagcagggccctctgaggattgccaccattcaggggctctccccactctggagaccatgaaatccccttcacgaagaagaggaacctaactggggctcgccttgctcccgctcactgagagtgccat

SEQ ID NO: 77869 - DNA, 600 bp, Chicken  19866894366745_1
tggccctttttagtccccaaatcggccattttagtcccaaagtcatcttttctgaccccagaatggccctttttagacccaaaatcgccttctctgaccccaaaatcaccttttctgaccccgaaatcgctccttctgacccccaaattgccctttttagtcccaaaatcatgctggactccaaaagcgtcactttttgcccccaaaatcgtcacttctggcccccaaagcgctcttcgtagtccccaaatcaccttttgtgaccccaaaataccactttttatccccaaatcggaaacrcatcacttccggtgcgttgctagggtggcggtatttcacttccggcccgttgctaaggagagccagcctcacttccggccctggcgcgttcttaggcaggtgccacttcgtttccggtctggccgaagcgttgctatggagaagtcatctcacttccggtttttctgcgcgttgctgtgggccgccgttcctcacttccgtcgcgtcgctatggagatgtcgttctacttccagtcaagcctcctggagcgttgctagggcgacgcagcctcacttccggcctgtcgccgcctcacttcc

SEQ ID NO: 77870 - DNA, 600 bp, Chicken  19866894366746_1
ggaaatgtttacatccagtagatttttcagcaaggccagcagcaatttcatcccagtattttcctgttctgctaggtacgcttttttaagggtaagatggaatttcacctactgctacaaagacttctgtcgtcttctagatgctcaaaagaagggaagaagaaaaagcaaagcagggtttttaatgaaataaaagcaaaatgtccagacattagttattattttatatttctactattttctttcagaaagctaacaatatatctaaaactatttttaaaaatattctaaatgctttaraatactttatatatatatatataatatatctttatggtacttagctgtcacctctgagtactgaagttgaaaaagcactctgttgctgaatttttgagaaaggaggctggcactgacagctaaacacttgtgactaatgtgtttgtggatcctttcctagtcaggatcgtcttcagataaaacatgacatttcaaatgggaaaacagaaggtagaaaaaacttggatggagaataagtcaaaacaaaatggaactacggagatatgtctgacttgtgtttctaattaaatttggagtaca

SEQ ID NO: 77871 - DNA, 600 bp, Chicken  19866894366746_2
tcagataaaacatgacatttcaaatgggaaaacagaaggtagaaaaaacttggatggagaataagtcaaaacaaaatggaactacggagatatgtctgacttgtgtttctaattaaatttggagtacatatttatgaattcaagtgatttttagaaaaatgattcaaggccaagaaaaatgcactcattgcttacaagacagtgccttatggttgcaatttgttcttttgatctgggttttactgatttaatgtttgtttgtacctcttaaaacaagaaaatacaaatcactgtggtcartcacacaagagtttcaaaaagcatttgmagtgttacttgtgcatgtgtgcactgagcgaggcagcatgataaatacattcatcagctgccatactgtatttgaaatgcttttccagaggaatctgtcagtattggatttctgaaagtaaatgggtagtttaattaggtagttttgtaagtcattggcttcaaaaaatggtaacccataggagtgtatatgtgaagtattagtttgtasttaagttattttatttcctaatgctatttttaaacttatgcatttaaaagcttgtatttggg

SEQ ID NO: 77872 - DNA, 600 bp, Chicken  19866894366746_3
aaaacagaaggtagaaaaaacttggatggagaataagtcaaaacaaaatggaactacggagatatgtctgacttgtgtttctaattaaatttggagtacatatttatgaattcaagtgatttttagaaaaatgattcaaggccaagaaaaatgcactcattgcttacaagacagtgccttatggttgcaatttgttcttttgatctgggttttactgatttaatgtttgtttgtacctcttaaaacaagaaaatacaaatcactgtggtcartcacacaagagtttcaaaaagcatttgmagtgttacttgtgcatgtgtgcactgagcgaggcagcatgataaatacattcatcagctgccatactgtatttgaaatgcttttccagaggaatctgtcagtattggatttctgaaagtaaatgggtagtttaattaggtagttttgtaagtcattggcttcaaaaaatggtaacccataggagtgtatatgtgaagtattagtttgtasttaagttattttatttcctaatgctatttttaaacttatgcatttaaaagcttgtatttgggtaggcaaatttgtgtgctcattctctct

SEQ ID NO: 77873 - DNA, 600 bp, Chicken  19866894366746_4
tttactgatttaatgtttgtttgtacctcttaaaacaagaaaatacaaatcactgtggtcartcacacaagagtttcaaaaagcatttgmagtgttacttgtgcatgtgtgcactgagcgaggcagcatgataaatacattcatcagctgccatactgtatttgaaatgcttttccagaggaatctgtcagtattggatttctgaaagtaaatgggtagtttaattaggtagttttgtaagtcattggcttcaaaaaatggtaacccataggagtgtatatgtgaagtattagtttgtasttaagttattttatttcctaatgctatttttaaacttatgcatttaaaagcttgtatttgggtaggcaaatttgtgtgctcattctctctcaagtctaatggtaacgaataatgttattgatttaagagatattgtaatgtttagttatttttctaccatccccccccctgttaaattataactgacagaatgtcaaatttgcttttctagtttatatactctttagcaagagagggaaagtgtttaccaggtagtaccgtgtagaacatatgatcatatgctctgtaagtagaagtagg

SEQ ID NO: 77874 - DNA, 600 bp, Chicken  19866894366746_5
agagaatagattgtcccccttctcaggaattttctgtctgtagttatgttttgaataaaccattacttatggtaacagaaaacaaggtgccagacatgtctcagcagtatggatattcactgtcacttcccgtttttttcactgcaatgtacttgcttttccctgtgatactcagtatatggattttatggcagaaacacatagcatattttgctattatggcagagatcaatatgaaagacaaaaaagtttttaatttagaggctttgtgtcgtatccatgcatacatttattgtgcaygcatagactatcagaagcattctagatgtttaggtggctataaacatgacctgcacataaacagtgtacaagtctgtcaaggattttcggtagagcagttttgaacctactgtctcagtgaggtctcagacatctggatatcatgggcaaatacccaaagcagttaaaactcctggtttcctcctgttcgtaatttccaggcaggaaaaccgtagttgtttaaggaatcatgattaatgacagagaagcactcctaggggacgccaatacagcatattttttggtcaagcatcctcaaga

SEQ ID NO: 77875 - DNA, 600 bp, Chicken  19866894366746_6
gtacaagtctgtcaaggattttcggtagagcagttttgaacctactgtctcagtgaggtctcagacatctggatatcatgggcaaatacccaaagcagttaaaactcctggtttcctcctgttcgtaatttccaggcaggaaaaccgtagttgtttaaggaatcatgattaatgacagagaagcactcctaggggacgccaatacagcatattttttggtcaagcatcctcaagaacttgcttataagattctgcatgcagaacaactgtttagttaagtatcagtggctgatatttaawaaatttatttttgcaattcaatgggcacaagaacagtaggcataatatataaaaattatgaactgctaaacaaaagtttatcaaaatttttttgtacttcgttggattttcatatatttatggttttaaagattccttaatttacattatatggttcataaacgtatccactgtttcttaatactaaaaactgattaaaacatggattactagatggaatcactttgtaataaaaacatcatcctggtgttattcaacagctgactgataagtaggttacrgagttggcagtgtatcaag

SEQ ID NO: 77876 - DNA, 600 bp, Chicken  19866894366746_7
tcagtggctgatatttaawaaatttatttttgcaattcaatgggcacaagaacagtaggcataatatataaaaattatgaactgctaaacaaaagtttatcaaaatttttttgtacttcgttggattttcatatatttatggttttaaagattccttaatttacattatatggttcataaacgtatccactgtttcttaatactaaaaactgattaaaacatggattactagatggaatcactttgtaataaaaacatcatcctggtgttattcaacagctgactgataagtaggttacrgagttggcagtgtatcaaggattctttaggaagctgctaacttaataattccatgaagacagcagaaaagtaaaagatcagaaccagtgaaaggaaagaaggtacagaaggaaactaaaataactgtttaaaatgccattattttacttacaagatgtgtamttggacttgtgagtgtttaccattatgtcagaaaaggagggagtaagctaagttcctctcttaagtcttcattgtgcaaagtatttggagtttcacatgcatcatcaaaggtataatctggctgtcggagtatgtatt

SEQ ID NO: 77877 - DNA, 460 bp, Chicken  19866894366746_8
acattatatggttcataaacgtatccactgtttcttaatactaaaaactgattaaaacatggattactagatggaatcactttgtaataaaaacatcatcctggtgttattcaacagctgactgataagtaggttacrgagttggcagtgtatcaaggattctttaggaagctgctaacttaataattccatgaagacagcagaaaagtaaaagatcagaaccagtgaaaggaaagaaggtacagaaggaaactaaaataactgtttaaaatgccattattttacttacaagatgtgtamttggacttgtgagtgtttaccattatgtcagaaaaggagggagtaagctaagttcctctcttaagtcttcattgtgcaaagtatttggagtttcacatgcatcatcaaaggtataatctggctgtcggagtatgtattactggtatcacagcacaagaag

SEQ ID NO: 77878 - DNA, 600 bp, Chicken  19866894366747_1
ccaaagcttggggatactgaggtatggggacaccactggttgggggcaccaaagcgtggggacaccaagatttggggaaatggaagtttaggacatcagggcttggggacaccaaaacctggcgacagtgatgcttgcgagcatcgaagtttgggaacaccaaagtctaagtacactgaggtttaggaatgtggagacattgtgcccggggtcatcaaggtttggggtcatcaagatttggggtcatcaagatctggggacaccatggcttggggacacagtctgaccctgcaggtgggmtgtgaccccatgtctcccctcyccatgtccatgtcccacggctggtgtggtgccagggcctcaccccacaggaggtgctgctgactcatgggcagacgtgcctggccccgtgagcgcccataggcgtatgggtcctggagggggcagagtcttttggggtgtcccagcactggcacagggagtttccagccctgaacccaaatttttgcctgaaygggttctttcaccccaaaattgtgtccccttgggatccccttggggtcccactgctggaagccccagggtggcattttggggact

SEQ ID NO: 77879 - DNA, 591 bp, Chicken  19866894366747_2
tatggggacaccactggttgggggcaccaaagcgtggggacaccaagatttggggaaatggaagtttaggacatcagggcttggggacaccaaaacctggcgacagtgatgcttgcgagcatcgaagtttgggaacaccaaagtctaagtacactgaggtttaggaatgtggagacattgtgcccggggtcatcaaggtttggggtcatcaagatttggggtcatcaagatctggggacaccatggcttggggacacagtctgaccctgcaggtgggmtgtgaccccatgtctcccctcyccatgtccatgtcccacggctggtgtggtgccagggcctcaccccacaggaggtgctgctgactcatgggcagacgtgcctggccccgtgagcgcccataggcgtatgggtcctggagggggcagagtcttttggggtgtcccagcactggcacagggagtttccagccctgaacccaaatttttgcctgaaygggttctttcaccccaaaattgtgtccccttgggatccccttggggtcccactgctggaagccccagggtggcattttggggactgcaacactgcacc

SEQ ID NO: 77880 - DNA, 398 bp, Chicken  19866894366747_3
caaggtttggggtcatcaagatttggggtcatcaagatctggggacaccatggcttggggacacagtctgaccctgcaggtgggmtgtgaccccatgtctcccctcyccatgtccatgtcccacggctggtgtggtgccagggcctcaccccacaggaggtgctgctgactcatgggcagacgtgcctggccccgtgagcgcccataggcgtatgggtcctggagggggcagagtcttttggggtgtcccagcactggcacagggagtttccagccctgaacccaaatttttgcctgaaygggttctttcaccccaaaattgtgtccccttgggatccccttggggtcccactgctggaagccccagggtggcattttggggactgcaacactgcacc

SEQ ID NO: 77881 - DNA, 599 bp, Chicken  19866894366754_1
  misc_feature (1)..(93): n is any nucleotide
nnnnnnnnnnnnnnnnnnnnnnnnnnnnnnnnnnnnnnnnnnnnnnnnnnnnnnnnnnnnnnnnnnnnnnnnnnnnnnnnnnnnnnnnnnnnnggaacggcgccctgcggcctctgcgtgcccccgggagcctcggctgttggcaggagcgggcggcgctttgccggtccggtcagtccgggaaatgcgggcaccggttcccagagcaacagcgtgaggtagtgctgcgtcgccttccggtgttgcacagcgggcttacagcacagctgttagcccttattgctttggcaaccctattgsttcttggagagggctgaggtgaagagcggcttctgtcgtctgtctcagcgtgcagcaaagcgagagccccaagtgctccgtgatattctgttccgtctctgaaattgctggctgtttctgaatccacgtggagcagttccgcagatgcttgcaggtacccggcagctctgcagctgctgtctaggccgtgggacaaaaaaatcagggtatgtttcagaagagctgccggtcttttgagatatgccccgattgcagcgccgtgtaagcgcagtagtacttaacactgcttgactccgggt

SEQ ID NO: 77882 - DNA, 600 bp, Chicken  19866894366759_1
aggtggttcctctgctctgagtatctgcttcttccacactcaaccaccaggctttgtacctcttctggaaagtgtttttcttgggatatttgagtccccagttactgctggttcacaacaccttattctcttaaattatgatttttttacttgcgtagatttgttatgggttattttaattcaggacctaaaatgtgatggagcacaagcacgtgctttacaattaaaaacctgcttacaagcaggcacatcgctttgcagagtggcaggtaacaaatgaacataaatcctgcccagatkctcctgcccagaggattttttttctcaacaaatttggacctaaaagcactattaaatgggtaaactgtatcctgccctgtttatttattgcttaagcattgctgcacttgaaatggtagtaggggcaaatccatgaagatcaaaaaccagcagtatattggaaattctgtgattttcttgttccaaacactagttggggtagttttgtgtgttaattttatcttgcatgttgactttattgcaacttgacacttgaatggtattgttcagaaataacaatttcagaagattctggtaaga

SEQ ID NO: 77883 - DNA, 600 bp, Chicken  19866894366769_1
gatcctgtgaatttattctaacatagaagataaggttgtattcctagaaaaaagtgaccattatcttatttcttatcaaggacatgtgcattcaggaaatgacttctgaatggtgtactttaaatctcactgacttcaaacacgcttaaatatgtgcccataactaataaaataattgatgaatagaaaattaagcatatacattttacattctgagtaattatgtatttgtgaactgatcttgtcgtctataaaaatgatgacctttatgtggggagttttccaatatgtagctaacaraacttgtaattttttttaactttaagctttaatacttttcaaagcaaaatattttccctttatgttctgttaccagtacataagagcaaaggctgatcttgtttatgaaaaaaatttcttttcagtctgtgagatggacgttgtgccatattctgtgcctctttgcatgggtttttttgcttcaacatgctacctaacttactagaaactatagttcactttaagtaacgccactaagttgcattgcacactttcattgactttccagctgcatttgtggaaatmttaagcagaaatcat

SEQ ID NO: 77884 - DNA, 600 bp, Chicken  19866894366769_2
atatgtagctaacaraacttgtaattttttttaactttaagctttaatacttttcaaagcaaaatattttccctttatgttctgttaccagtacataagagcaaaggctgatcttgtttatgaaaaaaatttcttttcagtctgtgagatggacgttgtgccatattctgtgcctctttgcatgggtttttttgcttcaacatgctacctaacttactagaaactatagttcactttaagtaacgccactaagttgcattgcacactttcattgactttccagctgcatttgtggaaatmttaagcagaaatcatagttgacagcatttaaaaaataaattctgcggcttccaaatcaaagcttaaaagatatagacttcagcttctctgattcttgctgtcatctgaaatctaaatgaacttcccagtagtaatgtactttgctctctgtcgaagaaatgctacaaaaggaaactgtatgtagaggttttctctttcgtttttgttaaatgactgatgaatcttttaaacctcccagcaaaaatgctatttgtaaaggtattttagtgatgtggatgtgattctgttaccaacaattca

SEQ ID NO: 77885 - DNA, 600 bp, Chicken  19866894366780_1
aagttaaagttctggccattctcaggaacatgacctctgtcaattctcaacaagtcagaaactttgcacatacagatatctatactcaatctgctgaaacagaaacgctgaaacacgcctcaactgcctggctttgaaactaaaacagggcagatgaaatgctagatccagaagcagatctgctgaataccagaatacaaagaccctatatgaaaatgttctatgcatacaacagacttctttcagggaggcagacaactgacagtaatgttcacctgagggaatttatccacactaatwgaaggacataaagtatacctctgagacaacatgcatatttggctaattgttagcatttatgttgaagccaaaagccagattaaaagacacaccatttatattttgctttttcttaatttttatattttctatttgatttgcataatgcttatatttttgtattgttgcgtctgtgtgaccactgtgttcacacaccaatatttttctctgaataaatatattactgtttatctttaaaacactaaactggaaagacttgctccttcctgcatattttactcctaataatgtgcagtatgc

SEQ ID NO: 77886 - DNA, 599 bp, Chicken  19866894366784_1
  misc_feature (1)..(13): n is any nucleotide
nnnnnnnnnnnnnacgtgcaaataatttatagtttctgttatgcagagatcttactgctgcttcaggcaagaagaatctgcattaaaatgtatctgcaaatctgtatttcaaaacaatgtatttggaaagtgcagaaagtgaacactacactgcattagtctgcatctttacataagacagccctgaggcatatccctggaacagtcaattaaagcttgttagaccaaaatttgaatgaatctgaaacgaaccaaaatttccctaacagatcaaaggatgaagaaagtgtccttatgtcrtaaagggaagggtaagggaaattactttcattcttacacgccttatatgattacactaaaacaagtacttgtggataataccagctatgtcgattccttgggcagtctctggtgcctcatcagatatttatctgatcactggaaagcatgttaaattccctaccagcattatacagagaagcaatttttctttcttcttccatgtaggtaagtcaatcttggcagcactactttcacgccactgatgcattaagagcttcactgcacttacagatccagcaagtcagtttaagtcyact

SEQ ID NO: 77887 - DNA, 600 bp, Chicken  19866894366784_2
gtcrtaaagggaagggtaagggaaattactttcattcttacacgccttatatgattacactaaaacaagtacttgtggataataccagctatgtcgattccttgggcagtctctggtgcctcatcagatatttatctgatcactggaaagcatgttaaattccctaccagcattatacagagaagcaatttttctttcttcttccatgtaggtaagtcaatcttggcagcactactttcacgccactgatgcattaagagcttcactgcacttacagatccagcaagtcagtttaagtcyactwactgtactcattatctkcatattctgtccttttcttgagatgcagattatgtaaatctcctgatctacaccaaacaagttgaactgttaccttttagaagtctgtgacaacaatcagcacaccacaattccaagctcccccaattgatgctaacagtcctgtagcagaacagacacatggcaagggcagcattcttcctctcagaaattttccttaacaaaatttctacaaataaatcattttctactggcagttacatatattgtacaaattttatgacctcctttatcacactg

SEQ ID NO: 77888 - DNA, 600 bp, Chicken  19866894366784_3
taaagggaagggtaagggaaattactttcattcttacacgccttatatgattacactaaaacaagtacttgtggataataccagctatgtcgattccttgggcagtctctggtgcctcatcagatatttatctgatcactggaaagcatgttaaattccctaccagcattatacagagaagcaatttttctttcttcttccatgtaggtaagtcaatcttggcagcactactttcacgccactgatgcattaagagcttcactgcacttacagatccagcaagtcagtttaagtcyactwactgtactcattatctkcatattctgtccttttcttgagatgcagattatgtaaatctcctgatctacaccaaacaagttgaactgttaccttttagaagtctgtgacaacaatcagcacaccacaattccaagctcccccaattgatgctaacagtcctgtagcagaacagacacatggcaagggcagcattcttcctctcagaaattttccttaacaaaatttctacaaataaatcattttctactggcagttacatatattgtacaaattttatgacctcctttatcacactgaatg

SEQ ID NO: 77889 - DNA, 600 bp, Chicken  19866894366784_4
gaaattactttcattcttacacgccttatatgattacactaaaacaagtacttgtggataataccagctatgtcgattccttgggcagtctctggtgcctcatcagatatttatctgatcactggaaagcatgttaaattccctaccagcattatacagagaagcaatttttctttcttcttccatgtaggtaagtcaatcttggcagcactactttcacgccactgatgcattaagagcttcactgcacttacagatccagcaagtcagtttaagtcyactwactgtactcattatctkcatattctgtccttttcttgagatgcagattatgtaaatctcctgatctacaccaaacaagttgaactgttaccttttagaagtctgtgacaacaatcagcacaccacaattccaagctcccccaattgatgctaacagtcctgtagcagaacagacacatggcaagggcagcattcttcctctcagaaattttccttaacaaaatttctacaaataaatcattttctactggcagttacatatattgtacaaattttatgacctcctttatcacactgaatggatgttgctgtagaaat

SEQ ID NO: 77890 - DNA, 600 bp, Chicken  19866894366784_5
attaaaatatggcgtaacataataatgatgtaaggattctttgactgcagcataccccatgtacatgctcattcctctgtccattttcagcactcccatgccaccatacatctcactcaaacctctgacttacaagtggatcagaacttattagttccaatccaagacggaaacctgcatagcttggatgttacgtgaaatcagttaacaagttttactgagaactgaacaccaaactgcacacagcacaattagtcaagttacgtggactcactgtaggaaatacaatcagggtttaarccagaccgtaaagaacccggcatagactttctggcgttatttatcagcaaaatcactctgataccataattatatttataagccatcatggctatggtacacagcacgaagaatacaggctttatccctatcctacttgtctgtaagttatctgtggaatctaacatctggtatgtggactgtcaacaaaaatactctctcacttgaggattaattttaagaattgcaataacactgtggcaaatggatgctagaagagtaggaaatgttacataaagcccatagagagaagaaaacccc

SEQ ID NO: 77891 - DNA, 600 bp, Chicken  19866894366790_1
acctgcggagaggatgtgtttatctccattccgagggcagaggaagacaaaacactcctggaactaccacgaaggagtagaggcagtccagtggtgataaaaaggcgtgaagtttaggaaaatattccccttctttccatctggattttttttttaaggtcgcgtttcacaaacatagtccgtattttctccagcagcacaagactgccttttaatttaggggcttgaagaaaggttttattgtagatcagacaaataattcaatgtttctctgtataattttcaagtaattaataagarcgggaacacgtaagtgctaaagctttgctttttctattccacaggtatttacataatctaaaccatgtcggtccatcggctctctgctttaattgaagtgttgcctctgaagctgggaacaaatcccgggagagcccaaagccacccagagatcacaggggtccgtatctgggcagcacggcgcacttctcagccaccccacccgcagcagcccgtaattgctcacgcagaaaggaagctgctgccctaatcctctaaagcactctctgaaattgagatgtgtttggtcaggatttcctc

SEQ ID NO: 77892 - DNA, 600 bp, Chicken  19866894366790_2
taggaggcatcttcttgttctgtgcagctaaagcgcagaatcaccgaactcagaggagggctgggtgcataatcaaaccaagcttatgataatgattatgaaaaatttcttatagccaatcgtatcaacatctcatttttacactgtcgcattttagaactagaactggatttacgtgctcttcagtgcatgatctataggggaatgctatttttgtcctggatgagaacgatggccatgacagacaccaccacatcatcaacgtgtcttcagacaggtttccagtccagccaagccccrcaccacaaggccagcccaacccaaatggcagccaccagccccacggtacccagccgcctcgcatcgctgcgtttccatgctacaccaatggccatgcccaaacagctgatgcggtgctgctgcaggtaattaacaagataagacaagtataaataattgagtggctatgaagtgctctttgggcatctatctattgtcaaggaagatggcaaatgcaacagaatccaaatttggggaactctagccaccctgcaaaatgatctgctggagacctcagctgaaaagtgtcggagccacagt

SEQ ID NO: 77893 - DNA, 600 bp, Chicken  19866894366790_3
ccacgtaatgagagatgggactgaccatcgtcacacgcggagtcacaggttctggttttcagagaatgacatttcaagagctggtgtcatcggtgacgtttactacatcaataactgcaacgttactcaagatgcttgcactgaaggcaaattttagaagagtttttatttatggatattcctgggataccttcctgacattttcttttcaggcaaacacacagacgttagcactctttttccttgttttgaccccgtaattgtttttcttccttcccaacaagagagcatttatgcccrtacagtatttttgtgaagcccaaccgtgggagccaaacaaagaaaagcccctgaatgccacagggaaatgcgacgggctgggaacacaactcagcctaacaaatagaactcaaccacacagcacccagaaactgagaagaaacacccttactaccaccccttctgcaaaacccaagttgttcttcagaaaaaatagaaaccctcttttttttttttttttttttgctaattttttaccaatattttaaatcagtaacagaatgacacrtttaaaggcacagacttgagtaacagctgctg

SEQ ID NO: 77894 - DNA, 600 bp, Chicken  19866894366790_4
cttccttcccaacaagagagcatttatgcccrtacagtatttttgtgaagcccaaccgtgggagccaaacaaagaaaagcccctgaatgccacagggaaatgcgacgggctgggaacacaactcagcctaacaaatagaactcaaccacacagcacccagaaactgagaagaaacacccttactaccaccccttctgcaaaacccaagttgttcttcagaaaaaatagaaaccctcttttttttttttttttttttgctaattttttaccaatattttaaatcagtaacagaatgacacrtttaaaggcacagacttgagtaacagctgctgggttgtggggactcaagcacagggtgaccaraggctgttggtggctctctcctcctgcgttaatgtgttgtgttcgttctgttcacagaaactgaagtgrgaaatggttcttctagaaaatgctgcttaccttttgtgcccgttttataacaagtgaagtatgtgtgataggcaaacgtggtttttctaaccgtgtatggcctaaaattagagcaattgccgcattattagctatccaattggtctagcaacattctgtacgcattgt

SEQ ID NO: 77895 - DNA, 600 bp, Chicken  19866894366790_5
gccaaacaaagaaaagcccctgaatgccacagggaaatgcgacgggctgggaacacaactcagcctaacaaatagaactcaaccacacagcacccagaaactgagaagaaacacccttactaccaccccttctgcaaaacccaagttgttcttcagaaaaaatagaaaccctcttttttttttttttttttttgctaattttttaccaatattttaaatcagtaacagaatgacacrtttaaaggcacagacttgagtaacagctgctgggttgtggggactcaagcacagggtgaccaraggctgttggtggctctctcctcctgcgttaatgtgttgtgttcgttctgttcacagaaactgaagtgrgaaatggttcttctagaaaatgctgcttaccttttgtgcccgttttataacaagtgaagtatgtgtgataggcaaacgtggtttttctaaccgtgtatggcctaaaattagagcaattgccgcattattagctatccaattggtctagcaacattctgtacgcattgtcaagttacacgttgctaatttcctaacaagcacagtttgttttcggatgccccaaggccagtt

SEQ ID NO: 77896 - DNA, 600 bp, Chicken  19866894366790_6
aaatagaactcaaccacacagcacccagaaactgagaagaaacacccttactaccaccccttctgcaaaacccaagttgttcttcagaaaaaatagaaaccctcttttttttttttttttttttgctaattttttaccaatattttaaatcagtaacagaatgacacrtttaaaggcacagacttgagtaacagctgctgggttgtggggactcaagcacagggtgaccaraggctgttggtggctctctcctcctgcgttaatgtgttgtgttcgttctgttcacagaaactgaagtgrgaaatggttcttctagaaaatgctgcttaccttttgtgcccgttttataacaagtgaagtatgtgtgataggcaaacgtggtttttctaaccgtgtatggcctaaaattagagcaattgccgcattattagctatccaattggtctagcaacattctgtacgcattgtcaagttacacgttgctaatttcctaacaagcacagtttgttttcggatgccccaaggccagtttactaagaccaaacgcaagctctgaaaactaaaggaaaaaaagtaattaaaaaatcctacgaaacgaga

SEQ ID NO: 77897 - DNA, 600 bp, Chicken  19866894366791_1
agttctccctattcctttgcatctgacctggtgcaagtgtggttatatcttcatgaaataaccttagtacagtaaaattccagttttgcaattaactttaagcacaagttgctattccagctccctaaaagttgcttacagtctgaaagttaagcaaaagcttagtcaaatgctttggggtgagtccaggttcaacagcttagttaggaaaagtcagtgctgacagttctgcgaaattttagcatgcacaagcagtgccactgaactcgcacaatcccttccagattttgcctgttcttyttagaagggagcctacctgcagcaaaaagaatgacggttgtccagatgttggaagctatgttgggatattaacaaagaaggagtcagcagagatgtgctgttttacttcccccagtgtttatttttaacttggctgtttaccttttggttcctcccacacatttgtaattcctttcacttggctacagcacaatttgttgagaccaagagatcagataaagaacactgaagagtatcatgtaacatgtgaargtggtattactaaacaattgctcctccctagcaaccatggcaagcttc

SEQ ID NO: 77898 - DNA, 600 bp, Chicken  19866894366791_2
cagtgccactgaactcgcacaatcccttccagattttgcctgttcttyttagaagggagcctacctgcagcaaaaagaatgacggttgtccagatgttggaagctatgttgggatattaacaaagaaggagtcagcagagatgtgctgttttacttcccccagtgtttatttttaacttggctgtttaccttttggttcctcccacacatttgtaattcctttcacttggctacagcacaatttgttgagaccaagagatcagataaagaacactgaagagtatcatgtaacatgtgaargtggtattactaaacaattgctcctccctagcaaccatggcaagcttcttaatggcatttgacaggtttaccctgtgaaaaagccatacagtcatagctggctcatcaggtgtacatcactaacgttcatctgaagttctatgggtctgtgaagttatttatcctaattgaatgtaaaaaaactagatggagcagtttccacaaatactgttgagagtgtttccccttttctatatgaatccctggatcgttatagtccccccattatagccaaaaacaaagacasasccaggactatcc

SEQ ID NO: 77899 - DNA, 600 bp, Chicken  19866894366791_3
tgtaacatgtgaargtggtattactaaacaattgctcctccctagcaaccatggcaagcttcttaatggcatttgacaggtttaccctgtgaaaaagccatacagtcatagctggctcatcaggtgtacatcactaacgttcatctgaagttctatgggtctgtgaagttatttatcctaattgaatgtaaaaaaactagatggagcagtttccacaaatactgttgagagtgtttccccttttctatatgaatccctggatcgttatagtccccccattatagccaaaaacaaagacasasccaggactatcccagagaggaatctatggttggaacaaatgaatagtagcatgtcttctagtgtatgttttgagtagaaatgccctcctccctcaccacgttgccctgcagattactattctgcaaattcacagatgtgtaactttaaccgaggaagttctatcagctttgctgtgtctgtgtacatgcgcacagtaaattagctttgtagcgtacagattaatcacttgggaactaattgcactgatgtgaactaacatgcttcctttttgcaatagagtgtgttcagtcaaaaaaa

SEQ ID NO: 77900 - DNA, 600 bp, Chicken  19866894366791_4
taacatgtgaargtggtattactaaacaattgctcctccctagcaaccatggcaagcttcttaatggcatttgacaggtttaccctgtgaaaaagccatacagtcatagctggctcatcaggtgtacatcactaacgttcatctgaagttctatgggtctgtgaagttatttatcctaattgaatgtaaaaaaactagatggagcagtttccacaaatactgttgagagtgtttccccttttctatatgaatccctggatcgttatagtccccccattatagccaaaaacaaagacasasccaggactatcccagagaggaatctatggttggaacaaatgaatagtagcatgtcttctagtgtatgttttgagtagaaatgccctcctccctcaccacgttgccctgcagattactattctgcaaattcacagatgtgtaactttaaccgaggaagttctatcagctttgctgtgtctgtgtacatgcgcacagtaaattagctttgtagcgtacagattaatcacttgggaactaattgcactgatgtgaactaacatgcttcctttttgcaatagagtgtgttcagtcaaaaaaatg

SEQ ID NO: 77901 - DNA, 479 bp, Chicken  19866894366791_5
cctgcagattactattctgcaaattcacagatgtgtaactttaaccgaggaagttctatcagctttgctgtgtctgtgtacatgcgcacagtaaattagctttgtagcgtacagattaatcacttgggaactaattgcactgatgtgaactaacatgcttcctttttgcaatagagtgtgttcagtcaaaaaaatggtcagttgctgtaggtgacctggcttattttgtttccttattgtgccactgactaccctgtaattcaagattagagatcaaaattaatttcctgtgatgtggarcagagtcttcactgctagaagatcacttactttatttttgttcttgttttaaacacaacttcacaggtaatatttacataggatgagatttgcaatagttgaatatctggaaggcccagacatattttgcagctctgggtttcagaagtagagcataaaatattttctctgccttctac

SEQ ID NO: 77902 - DNA, 599 bp, Chicken  19866894366793_1
  misc_feature (1)..(201): n is any nucleotide
nnnnnnnnnnnnnnnnnnnnnnnnnnnnnnnnnnnnnnnnnnnnnnnnnnnnnnnnnnnnnnnnnnnnnnnnnnnnnnnnnnnnnnnnnnnnnnnnnnnnnnnnnnnnnnnnnnnnnnnnnnnnnnnnnnnnnnnnnnnnnnnnnnnnnnnnnnnnnnnnnnnnnnnnnnnnnnnnnnnnnnnnnnnnnnnnnnnnnnnnnaaaaaaaacatgttcttctttgaggaagattggccgagtaaataagggacaatttagaaacagtttttggtttttatttttttattattattattattwttttattttcacctaggaatcagagcataactcctattaactgatggartggcatcaggtattataaagttattaaatactttccttaacaccattattatgccttactgatttttgatgttagtgacaagtaagccaactttttcaaaattatagcaggaagatatttagagagaatagaacaatgtcattctgtttcttaacaacgtgcttagaaactggtaagcaatgtacggtgtgatatgagtgtacraagasagtgtcagctttgtgccagagggaaattggcatcttgttta

SEQ ID NO: 77903 - DNA, 599 bp, Chicken  19866894366793_2
  misc_feature (1)..(152): n is any nucleotide
nnnnnnnnnnnnnnnnnnnnnnnnnnnnnnnnnnnnnnnnnnnnnnnnnnnnnnnnnnnnnnnnnnnnnnnnnnnnnnnnnnnnnnnnnnnnnnnnnnnnnnnnnnnnnnnnnnnnnnnnnnnnnnnnnnnnnnnnnnnnnnnnnnnnnnnnaaaaaaaacatgttcttctttgaggaagattggccgagtaaataagggacaatttagaaacagtttttggtttttatttttttattattattattattwttttattttcacctaggaatcagagcataactcctattaactgatggartggcatcaggtattataaagttattaaatactttccttaacaccattattatgccttactgatttttgatgttagtgacaagtaagccaactttttcaaaattatagcaggaagatatttagagagaatagaacaatgtcattctgtttcttaacaacgtgcttagaaactggtaagcaatgtacggtgtgatatgagtgtacraagasagtgtcagctttgtgccagagggaaattggcatcttgtttaaccctgtaaaagccaaagaaaatcacaaagggcctcatgcagaaagatg

SEQ ID NO: 77904 - DNA, 600 bp, Chicken  19866894366793_3
tttagaaacagtttttggtttttatttttttattattattattattwttttattttcacctaggaatcagagcataactcctattaactgatggartggcatcaggtattataaagttattaaatactttccttaacaccattattatgccttactgatttttgatgttagtgacaagtaagccaactttttcaaaattatagcaggaagatatttagagagaatagaacaatgtcattctgtttcttaacaacgtgcttagaaactggtaagcaatgtacggtgtgatatgagtgtacraagasagtgtcagctttgtgccagagggaaattggcatcttgtttaaccctgtaaaagccaaagaaaatcacaaagggcctcatgcagaaagatggtttaaataggctgcaaagagaatatcctatagcacatacaatttaacagtatcttctacaaatttgggaagtaatggctgtgacttgtccctgattcacaacctcagtttccagagaatattttacatataaacagtgcatatcatccactctttcctcctccccttcttactaagattactttattcaacatcaaatgaaaaa

SEQ ID NO: 77905 - DNA, 598 bp, Chicken  19866894366793_4
aaacagtttttggtttttatttttttattattattattattwttttattttcacctaggaatcagagcataactcctattaactgatggartggcatcaggtattataaagttattaaatactttccttaacaccattattatgccttactgatttttgatgttagtgacaagtaagccaactttttcaaaattatagcaggaagatatttagagagaatagaacaatgtcattctgtttcttaacaacgtgcttagaaactggtaagcaatgtacggtgtgatatgagtgtacraagasagtgtcagctttgtgccagagggaaattggcatcttgtttaaccctgtaaaagccaaagaaaatcacaaagggcctcatgcagaaagatggtttaaataggctgcaaagagaatatcctatagcacatacaatttaacagtatcttctacaaatttgggaagtaatggctgtgacttgtccctgattcacaacctcagtttccagagaatattttacatataaacagtgcatatcatccactctttcctcctccccttcttactaagattactttattcaacatcaaatgaaaaataa

SEQ ID NO: 77906 - DNA, 576 bp, Chicken  19866894366797_1
taagaactcaaacttgatttactttcaaaattgacccattacggttgaaacactccattcatgtattagcctaaaatttgtatttcgtaaaggctaagaaaggctttgaagtttgtttagttatttgattttgcattttgatatagagattgcattttcttattcaaacaacactacagctaagtcataaactgaatatcacctctaaacaatcctttccagatggaagcacataataagttggctttgacttgcctgagctgtgagcatgtgaaatctgactttggagcgtttgcagcrgagttgctttctttctttctttattttgctgaggtcactattgtgcagcaaggaaaggttgccctttaagtgcatgggtatctgagttagctttgcagtgagctggctggccagccaaggtcaaggttaaggtgagcacttatgactgagggagatcgttcatttgcacttcctgagcagatagagggaaaaatcctttcctgctgcccgtagagaaacgggctatataggtaacacgtggttatgcattttccaataggaataatgggttttaaa

SEQ ID NO: 77907 - DNA, 600 bp, Chicken  19866894366798_1
cagaacttgcacagtaaggctgagcagtcacagcagctacagctaactaagggaaaactgagagggaaaacccttgcacctggctgattggtgggtcagagcacactgaggctcaaagccgggagtaaggctgcttacagcctggcccacgtcccatcagtggtgacaggccaggtgaaatgaattcttcatattctcccctgctgtgctacctcatgccttaccttctccacacacctgaaatacagcttgtcttggatgtgagaacatctctctgccagcagaaagcagtgagatcayagaatggcttaggctggaagggacatttaagatcacctggttccaagccccctgctataggcagggatgcctccctctagaccaggttgctcatggccccatccagcctgcccttgaatgcttccaaggagggggaattcacagtctcactggacaacctgttccagtgcctcatcatcctcacaataaagaatttcttcctaatatctagtctaaatctaccctcttccagtttaaagccatttccccttgttctgttgctgtacgccccttatagaaagtcccctccctcatagttca

SEQ ID NO: 77908 - DNA, 600 bp, Chicken  19866894366806_1
tcccggttgtttcagagccaggggctgacgtttgcctttgtgcttgtgctctgatgtctgttttgttttctgatacagtcatttattttaaatcgggctgaatacatgttacatcttgagagagaattaggattcagcacagacaagtcaacttaaccatgtaatctggtccaagtgtttttatgtataacttgcacatttatgggattttctgtcagaacctatgggggggaaaaaaagcaacaacaggccagttcaacattatgtagtgatcacagagataaatattctaagcttctragaaagcaatagcagtgctgcatccgtcatgcagttgctgcataggagcatttcttactgattggaatgaacctgttcagatgcagtggctgcaaaatcagatcctgaatgtggcatgataatgactggattcggtttaattagaaagatcaaaagcttaatttgttatcacrgggaaaaaatgatgtctataagcacgagaatagcaggaccaatttcttcactgtaagtgctacacttctgtatgatttgttatctgtcagtaaaaaaaaaaacaccattagtgcagaatgtgaaggg

SEQ ID NO: 77909 - DNA, 600 bp, Chicken  19866894366806_2
agtgtttttatgtataacttgcacatttatgggattttctgtcagaacctatgggggggaaaaaaagcaacaacaggccagttcaacattatgtagtgatcacagagataaatattctaagcttctragaaagcaatagcagtgctgcatccgtcatgcagttgctgcataggagcatttcttactgattggaatgaacctgttcagatgcagtggctgcaaaatcagatcctgaatgtggcatgataatgactggattcggtttaattagaaagatcaaaagcttaatttgttatcacrgggaaaaaatgatgtctataagcacgagaatagcaggaccaatttcttcactgtaagtgctacacttctgtatgatttgttatctgtcagtaaaaaaaaaaacaccattagtgcagaatgtgaagggtagaaactgagagaaatacagaggaaggtccaatatattcctactataacaatacaccaagactgactggattcctgaatgtcactgttttaaagaaatattcaaacaatccatctgattttcattactgtgatatttttgatcctttggttttttaacagaatgcatgtttt

SEQ ID NO: 77910 - DNA, 533 bp, Chicken  19866894366806_3
actggattcctgaatgtcactgttttaaagaaatattcaaacaatccatctgattttcattactgtgatatttttgatcctttggttttttaacagaatgcatgttttctgtgccttctttaggttttaatctctatcttcacagacataatcaaggtcagattttttactgagacacattgactgtgtttattcaaaactattttattgcaaaatttggttatgttttcatctttacaggtgatcaaatgtagcagggcaggaatggaacagatgtgctttacatggcatgtagatttrgtgtaatttctgtccttaatatactgtttggttgtctagtttttgcagattgccctgcctgctctcagccccgagcaaggagctcagcactgcttgttcccatgctctggtagcttatggctgaagaacaccatgtaaatatcccaccaattccactgtctgatgtagcacagtatctgtaatgccatcagcatctgcattacagcctgaacagcataagctttgcccttagt

SEQ ID NO: 77911 - DNA, 600 bp, Chicken  19866894366808_1
cgatttctgcttcatctctcaaaatgcaggtgggtaaaatgggggcgcaccaggcctcgaggagcagagagcccagatggcacgagactgccgtccctggtgggcacccagcaccctgctctgggatgggagctccacaagtagccacagggctacaagagctccttgcagggctacaagagctccttcctgcatgcgtgcagtctcagggatgctgggaaggggagagcactggagatctgtccacctcctctattctttggaaggtccctgactttcctaccctgctcagcaaaggcygatcctgacacgtgattgtgatccctttgccccgtgagccctctgtcctcctgactgcactgtccatccccttgcaacaggacaaggagatccgggctgtcttcctccgcttgtttgcacagctgctgcagggctatcgttggtgtctgcacatcatccgcatccatcctgagcccgtcatccgcttccacaaggtatggcctggaatggccctggtgggcaygggcctggccctrctcccagcattggtgctgggagggagccagcacggagcaggatcacactcctactcttcacact

SEQ ID NO: 77912 - DNA, 600 bp, Chicken  19866894366808_2
ggagagcactggagatctgtccacctcctctattctttggaaggtccctgactttcctaccctgctcagcaaaggcygatcctgacacgtgattgtgatccctttgccccgtgagccctctgtcctcctgactgcactgtccatccccttgcaacaggacaaggagatccgggctgtcttcctccgcttgtttgcacagctgctgcagggctatcgttggtgtctgcacatcatccgcatccatcctgagcccgtcatccgcttccacaaggtatggcctggaatggccctggtgggcaygggcctggccctrctcccagcattggtgctgggagggagccagcacggagcaggatcacactcctactcttcacactgccccgcgtggccgtgggatgactctttttgaagtgggttgcattgaggtcagggagagagaatgcatggaaagggtcacataaatatagctgtgtctggaagtaaagtcctgtgcttccagcaggtgatttctgcaccactgccagctccacctgcatcccttgtttgtcctcgagtgtcccaaggtcctgtgggtcagatgccatttccctgtttatgccc

SEQ ID NO: 77913 - DNA, 600 bp, Chicken  19866894366808_3
gatctgtccacctcctctattctttggaaggtccctgactttcctaccctgctcagcaaaggcygatcctgacacgtgattgtgatccctttgccccgtgagccctctgtcctcctgactgcactgtccatccccttgcaacaggacaaggagatccgggctgtcttcctccgcttgtttgcacagctgctgcagggctatcgttggtgtctgcacatcatccgcatccatcctgagcccgtcatccgcttccacaaggtatggcctggaatggccctggtgggcaygggcctggccctrctcccagcattggtgctgggagggagccagcacggagcaggatcacactcctactcttcacactgccccgcgtggccgtgggatgactctttttgaagtgggttgcattgaggtcagggagagagaatgcatggaaagggtcacataaatatagctgtgtctggaagtaaagtcctgtgcttccagcaggtgatttctgcaccactgccagctccacctgcatcccttgtttgtcctcgagtgtcccaaggtcctgtgggtcagatgccatttccctgtttatgcccgagcgcagtgcag

SEQ ID NO: 77914 - DNA, 563 bp, Chicken  19866894366809_1
catgagggcgagccaaatagatagagatcaagaatagaggagaaagctctgagtcagcagcactggaaggaaaccaagtgcatttctctctaatggtctggggtctttttatatcacttctctgcagtgctggcagcagcagcatttgctgtagcagatgtggatttaattaatgtgcagcttatttctttatccgggtcactctgaaacctcaaatggagggcaaaagtgcatgtggtgaactacttgcaagttcaggtggggtaagaggtgacagtagggttgctcctggaagtcacrgtgtgagggaaggagtgatcactgtccctcaccctcatctctaggctgaatttgaggtcaagggcatgagtgagacatggcagttatttctgaaattggagttctgggcactgtgaccagtacagtcttcagggaacttttacagcagctcattaaactccagactttggcatggccgtgtaggtcactgtgaaatttgttttctgctcagttgccctttcctgagaacccaatgaaacacacttttttttaggaagtgtttc

SEQ ID NO: 77915 - DNA, 600 bp, Chicken  19866894366810_1
gtcaacatttgtgcaagtgaggcctcgcttgagaagggaaaatgccagagctgctatatgaacattcttttttttttgtttgtttaaagtattcttcaacgaagtgcattttgaaggaaaaaaaaaagccaaaatgcttacatccttgagtttaatggctgagaactgttaaggatgcccttttatacgtcaaattccttacagtcagcaagtgctcatccccctgaacagtctgcatgggctggtgggcagaccggagctcagtgcaatttatctgcagtttgtctagctgggctcctwactgtcttgtttagcaatgacttgtgtatttgttcttaaaatcagagtgcatttacggyttttttaggatttcagtcccagctcctttcatctggcagaaactgcaggctgaaggcaccagggccttcatggaggagccatgggcaggctgccctgacaggctgcgcagcgcccaggggagttgcagggctggcaggcctcatggcttcgctgtggtacagatgtgggcagccgcatttgcagctattgaaccccatcattctttgcggcacagctaatcaaatcattggtgatcagcaa

SEQ ID NO: 77916 - DNA, 600 bp, Chicken  19866894366810_2
gaacattcttttttttttgtttgtttaaagtattcttcaacgaagtgcattttgaaggaaaaaaaaaagccaaaatgcttacatccttgagtttaatggctgagaactgttaaggatgcccttttatacgtcaaattccttacagtcagcaagtgctcatccccctgaacagtctgcatgggctggtgggcagaccggagctcagtgcaatttatctgcagtttgtctagctgggctcctwactgtcttgtttagcaatgacttgtgtatttgttcttaaaatcagagtgcatttacggyttttttaggatttcagtcccagctcctttcatctggcagaaactgcaggctgaaggcaccagggccttcatggaggagccatgggcaggctgccctgacaggctgcgcagcgcccaggggagttgcagggctggcaggcctcatggcttcgctgtggtacagatgtgggcagccgcatttgcagctattgaaccccatcattctttgcggcacagctaatcaaatcattggtgatcagcaatcagcctgcctgaggtgaactgaggacgcgccctggcctgacccagttacatgagtgcc

SEQ ID NO: 77917 - DNA, 600 bp, Chicken  19866894366811_1
ataaaccagcttataactggtgatggttaagaggaaactagccttttgttctatttcaaaatgcttttctaagctgtattttgcagctttctttggggcatttgctattgccagtggtaggtggctagtttgcctagacctcagacaggaaattttctgtcttcctgtttgaacagttcactttatttatatgctaactgaagaaatatgcagatttgacaaatggtcagtttcctcccagagctaaacttctgtcagccacattaacaagtgctttatccattgacctaaaatatattycttctctaactactctgtggcagggataagcatgcatttccccgtatttgctcttttgtatgctttcaagctttttccatccctactggtttttcttccacaatagtaccatctgataaatcaagctgaggaatgtccaaacagaatattgtggcctttattgtcttcttcgatcaatctggcctgtgaatatgctataacacgtacatacaagacctcagaactcatttccagtgagcaacacagtgctatagaccaaaggaaagacactgagggggatgcacaagcaaagcacatact

SEQ ID NO: 77918 - DNA, 600 bp, Chicken  19866894366816_1
acttctagggattttggttgattcattctggatgctataatagtccacatctttcctaggacagatcatttcatgtaaggctttacttgcgaatgctttcagctccaattcaggctaatagtgttgcatacattgtgtctgctagaaagcaaagtgtttgctttctgtcccagcatgagatcactagcaatggtctgtggtcttctgcatggatcctgacttgatcattctcagaaggtattttctgtagaaacctcatgtactgtttagggctgaagaatgtgctgtttggtgacctgrgttgttaatgctgaatgtttgctttcagaacacttgacagaatggtgtgttttatgaaatggttcattggtcattacaaactgtctataataacatattacttattttagaaggggctgtaggttattcagcggatgtccctacatcagatcgaccccacagtgagacagccacctatgttaatattcctgtcagtcctacttccaaaaaacaacttcattacatggaactggaacttcaagaagccagcacaagcataagaggtaaagaagcctagaagactatataaacagcaataag

SEQ ID NO: 77919 - DNA, 599 bp, Chicken  19866894366819_1
  misc_feature (1)..(31): n is any nucleotide
nnnnnnnnnnnnnnnnnnnnnnnnnnnnnnnttaaagatgttttgatatatcaagtgtaaaataataagtctgtgaagaaagctttccccagaggtttttctcagtttgagaaaacacaaacctgaaccattacctgtccttggaaaagaaagtgtaccaaaccctttggaatgtttaaaaaagtctcagataaagctctgtatactaaagttctcagcctttgcttccattcttgtagataccgacttacttttgattagctggacatcccctgttgtgattaaaagcacgctttgtaygagaggttgtacagaagtctactggaatttccctttgacctagcttataactttatttgttactattttgttccacttccatgctcttcataaacccgtgattttgccccacttagagagatttctctgctcccgttccactttgctttacatttaaagagcattagcaccttctcataatgtattctacaaattttactaaggagttaattgttgctttcaggctaacacatactgagttggatttcttaactggattcctgctaagatcaagggctaagcatgtttatcaatgaggc

SEQ ID NO: 77920 - DNA, 600 bp, Chicken  19866894366827_1
gtctgtgcacattgaaacatccacttgcaagagacaatgataagttcaaaatccaaagaagaatgacagtcttcaacatcattgtgttagtaattttgcatcacacattcatatcactaatggccacactgctgctggacttcctgaatactctaatcttacacagcaaaaacttcaggattgattcttgaccctgccatggccttctagtagcaaatcagaccaaccacttattttctctatgattcaattccctttatgaaaaactcctgttatgaaaaatgatgataatattacttycatgatttgcatgccatgttgagactaaatgaaagaatggtagcacatacatacactaataaaatatgaaggaaattgcttagtttaaggataytgggtctaatttcactttttgattaagggaaaacttacagcaaaactacataatgcaatattacttctaaaaatttatgaatttcttacttcaagcaagacttaatggttttcaatgaaataaaaccttacgaatcccaattaaatctctgcaattgctactgattctatccaagcattktctataaaacttcagcygtataaaat

SEQ ID NO: 77921 - DNA, 600 bp, Chicken  19866894366827_2
tttgcatcacacattcatatcactaatggccacactgctgctggacttcctgaatactctaatcttacacagcaaaaacttcaggattgattcttgaccctgccatggccttctagtagcaaatcagaccaaccacttattttctctatgattcaattccctttatgaaaaactcctgttatgaaaaatgatgataatattacttycatgatttgcatgccatgttgagactaaatgaaagaatggtagcacatacatacactaataaaatatgaaggaaattgcttagtttaaggataytgggtctaatttcactttttgattaagggaaaacttacagcaaaactacataatgcaatattacttctaaaaatttatgaatttcttacttcaagcaagacttaatggttttcaatgaaataaaaccttacgaatcccaattaaatctctgcaattgctactgattctatccaagcattktctataaaacttcagcygtataaaatacatttatctaaaaaaccattatttggtgagaaacatctcaaatatgtgctttctttctagcaggaaaatacattacaaaatgatgtattttta

SEQ ID NO: 77922 - DNA, 600 bp, Chicken  19866894366827_3
atgaaaaatgatgataatattacttycatgatttgcatgccatgttgagactaaatgaaagaatggtagcacatacatacactaataaaatatgaaggaaattgcttagtttaaggataytgggtctaatttcactttttgattaagggaaaacttacagcaaaactacataatgcaatattacttctaaaaatttatgaatttcttacttcaagcaagacttaatggttttcaatgaaataaaaccttacgaatcccaattaaatctctgcaattgctactgattctatccaagcattktctataaaacttcagcygtataaaatacatttatctaaaaaaccattatttggtgagaaacatctcaaatatgtgctttctttctagcaggaaaatacattacaaaatgatgtatttttagcatgaactgcatgcttagcatagtagaatagcagtaatgctgacatgtcacatgctttgtgacaaagaatgcctgcagtgtatctcatagaatcatagaagccttagagttggaagggacctctgaaggccatctagtccaattcccctgcaatgaacagaggcaccacagatagatca

SEQ ID NO: 77923 - DNA, 600 bp, Chicken  19866894366827_4
tattacttycatgatttgcatgccatgttgagactaaatgaaagaatggtagcacatacatacactaataaaatatgaaggaaattgcttagtttaaggataytgggtctaatttcactttttgattaagggaaaacttacagcaaaactacataatgcaatattacttctaaaaatttatgaatttcttacttcaagcaagacttaatggttttcaatgaaataaaaccttacgaatcccaattaaatctctgcaattgctactgattctatccaagcattktctataaaacttcagcygtataaaatacatttatctaaaaaaccattatttggtgagaaacatctcaaatatgtgctttctttctagcaggaaaatacattacaaaatgatgtatttttagcatgaactgcatgcttagcatagtagaatagcagtaatgctgacatgtcacatgctttgtgacaaagaatgcctgcagtgtatctcatagaatcatagaagccttagagttggaagggacctctgaaggccatctagtccaattcccctgcaatgaacagaggcaccacagatagatcattttgcccagggcctta

SEQ ID NO: 77924 - DNA, 600 bp, Chicken  19866894366828_1
tgaaactaaataaaaagtaaaatggaagcttacagaaataagctgtcagtaaggttagttttaaggggatgtggttaaagatagatatctaactgcgcatagcagagctatgttaatgaattgcagtctttacagtgacagaatgagagtccttacacgagtcagattgtagatgtgggaggtgtgatgctcttgccatataactgaaaggtttcggtcttctagactgaaaaactgttgtcttggatgtgtataaaattgagtttttggcttggacagctgtgtctctcccagggaagygcctgaaacagcaagagaagagtggatgtgcttacaagtgcaaggattcatgaccacgtgtatcctctgtcaatgggagagacaaacgtatcagtacaagcagaattactgcttcagactccttagtgggatttgtttctggaaccctttgggaccctgtcgttgcacagcctgtgtgctgcaggctgaattcgttcgagagtgcacttagtatttaaagacattaataatttagaactgtctgccacatcttcgttcggtgtgactggagctcctgacctcttcaggctccaattccca

SEQ ID NO: 77925 - DNA, 600 bp, Chicken  19866894366829_1
ctattaattatttccaatttgatttgtcttgcttgattacccaacaaggtcagagcacattgtggctttgtgagagggcaaagaaccagcttctcaaagaaatgcaagtctgcagcacccgaacattccacaatcaccataacgttgttctttatagaaataaactgacagactttgctagagtaattacagaaaatgcgcagtgaaaatgaaacaaagggaaaatcttctcttgctttccctcactcttgtattgactgatcccatctctgccttcatcttccaaactaattcaggacygcacaattccatgagcaggtaattggatggaaaaaaaattgaaacccaagagtaaaacagaacaaagtaaacagctgttgccagtcaagtctggagaagagaatcagaattaacatggaacttgtaaatttagcaaagctattctgagaatccgggatgatgaatcacccctcccagcctctctaacttccaatacgccttgaaagaaagttcatttcctttaaccatgaccctccatcatctttcaaaagatatctcacaagcactatttctctaaaggggagacactgtactacaggt

SEQ ID NO: 77926 - DNA, 600 bp, Chicken  19866894366830_1
actgttttataaaaaatactatgctgctagatggttctgctcgctccaaattagcatgtagtatttgataaattagtatttagaacttgttctctctctttttcttccagatgagaacttttccagtgacagtgtcttctttccttctattttttaatgaaaaatattagaaaaaatacaaagctgcgactaaattattatcattttcttccttaacgtatgtgtaacagggagacaatttcattcccgtcctctgagcaacctgtgatgtgaagtgcccatcaggaatcttctaacaargagtcccrtagcagcgtgcacaacccaccagagctgttgagtcagctgctgattactgtttattcggagtgaacttacatcggtttaatattaatattaatgtatgatttggattttgtccaaggctgccactcagtgtacaaacctaatcagcagcacaccaggcagccctcctgcaaagctgcatgtgcagtaacagtttgcaacggcaartatttgcatcaacagagatggtttatccattgaaaaacacacgttaagttytcgttacacagcacktaaacgctgtgatggatgaac

SEQ ID NO: 77927 - DNA, 600 bp, Chicken  19866894366830_2
ataaaaaatactatgctgctagatggttctgctcgctccaaattagcatgtagtatttgataaattagtatttagaacttgttctctctctttttcttccagatgagaacttttccagtgacagtgtcttctttccttctattttttaatgaaaaatattagaaaaaatacaaagctgcgactaaattattatcattttcttccttaacgtatgtgtaacagggagacaatttcattcccgtcctctgagcaacctgtgatgtgaagtgcccatcaggaatcttctaacaargagtcccrtagcagcgtgcacaacccaccagagctgttgagtcagctgctgattactgtttattcggagtgaacttacatcggtttaatattaatattaatgtatgatttggattttgtccaaggctgccactcagtgtacaaacctaatcagcagcacaccaggcagccctcctgcaaagctgcatgtgcagtaacagtttgcaacggcaartatttgcatcaacagagatggtttatccattgaaaaacacacgttaagttytcgttacacagcacktaaacgctgtgatggatgaacaaatcctt

SEQ ID NO: 77928 - DNA, 600 bp, Chicken  19866894366830_3
taacgtatgtgtaacagggagacaatttcattcccgtcctctgagcaacctgtgatgtgaagtgcccatcaggaatcttctaacaargagtcccrtagcagcgtgcacaacccaccagagctgttgagtcagctgctgattactgtttattcggagtgaacttacatcggtttaatattaatattaatgtatgatttggattttgtccaaggctgccactcagtgtacaaacctaatcagcagcacaccaggcagccctcctgcaaagctgcatgtgcagtaacagtttgcaacggcaartatttgcatcaacagagatggtttatccattgaaaaacacacgttaagttytcgttacacagcacktaaacgctgtgatggatgaacaaatccttgccttgtgcaggacggatggcagcagggaactgagccccctcaccatgtgcctgtgctggtgctcggggtcctgcagtgtgtaagccactgccgtaaggaatgcatgtttgatttctgcttcagttaaagggaggtaaaaacgcccagacccttccagaatttttagcagccctgtatgatcaaatgtaaggaatgtgagtgtta

SEQ ID NO: 77929 - DNA, 600 bp, Chicken  19866894366830_4
gtgatgtgaagtgcccatcaggaatcttctaacaargagtcccrtagcagcgtgcacaacccaccagagctgttgagtcagctgctgattactgtttattcggagtgaacttacatcggtttaatattaatattaatgtatgatttggattttgtccaaggctgccactcagtgtacaaacctaatcagcagcacaccaggcagccctcctgcaaagctgcatgtgcagtaacagtttgcaacggcaartatttgcatcaacagagatggtttatccattgaaaaacacacgttaagttytcgttacacagcacktaaacgctgtgatggatgaacaaatccttgccttgtgcaggacggatggcagcagggaactgagccccctcaccatgtgcctgtgctggtgctcggggtcctgcagtgtgtaagccactgccgtaaggaatgcatgtttgatttctgcttcagttaaagggaggtaaaaacgcccagacccttccagaatttttagcagccctgtatgatcaaatgtaaggaatgtgagtgttatttcagcagtcccagcagaaacagtgtcattgcctacacaggactgcagat

SEQ ID NO: 77930 - DNA, 594 bp, Chicken  19866894366830_5
catcaggaatcttctaacaargagtcccrtagcagcgtgcacaacccaccagagctgttgagtcagctgctgattactgtttattcggagtgaacttacatcggtttaatattaatattaatgtatgatttggattttgtccaaggctgccactcagtgtacaaacctaatcagcagcacaccaggcagccctcctgcaaagctgcatgtgcagtaacagtttgcaacggcaartatttgcatcaacagagatggtttatccattgaaaaacacacgttaagttytcgttacacagcacktaaacgctgtgatggatgaacaaatccttgccttgtgcaggacggatggcagcagggaactgagccccctcaccatgtgcctgtgctggtgctcggggtcctgcagtgtgtaagccactgccgtaaggaatgcatgtttgatttctgcttcagttaaagggaggtaaaaacgcccagacccttccagaatttttagcagccctgtatgatcaaatgtaaggaatgtgagtgttatttcagcagtcccagcagaaacagtgtcattgcctacacaggactgcagataagagagca

SEQ ID NO: 77931 - DNA, 559 bp, Chicken  19866894366832_1
ttatcccaacagcattcctataaggagctgtgcaccgcaaagcaagctgatgggactgccccaggttaagtcactgaaacaggggcaagtgggcacaatgagtccctgcagcccaacagcacagaggtggaaaaggagccccaaggacaactgtgagcacaccacaagggcagaaagcagagcacagggccggtcagaagcaggaaggcagagaagccttcagcagcttcaacagccccagcactcagagcacaagtggtccttcagtccaacccaaggtgcaaacatttcacagctccratgtttaactgttcccctacctcccccccagagtgtgccaaaaggaaaaaaatacttacaggcaccaaaatctgtttgcagccaatgtctaacaccatgtcctgtaacattttgtctgaaatgccactgaacagtatatgtcctggaggaagactggctaaatgaaggttaaacaaccgtttaagctcactcagggtgagcacaaattggttcttaaatgttgaggacacaaaggccttcagttcttgggctacccgat

SEQ ID NO: 77932 - DNA, 600 bp, Chicken  19866894366833_1
taataaaactccagttctgttcatctttttccattctactgaatgttcatcaagctcatcttttgtcatgtagatgtgggagttcttgatcaactgttgttcttttgaacataaagagggcaaccattttccagctgcagtgtgttcactgtggagggaccaggaataaaaggaagctcagttctgtagcgtctgttttgacttgcagatttccttcattttagtgtctaagtggtcattctatgtgtttgccctggagtaagagcagagtggtgtggtatgtagcttgctactcaacaratgtatggattctgcagcaaagcagctgtctgtatgcctgatagcaggatgttggaaattgttcagttttggagctgttgggccatggtgcagtctggagctttatatgaattaaatgaaggatgacgtactattgcttagtaaggaagtccaaacatgagagcacaagtaacaaaaaaacagctttctgtacacactaaagagctaatgacagcagccttgtgtttcttaggcaatagatattcctgaattgtgttgaaagaaacccaaagctgagcattcaatagggttgttgtacag

SEQ ID NO: 77933 - DNA, 600 bp, Chicken  19866894366835_1
agatcagcacacgatgcctagaattgctgaatccaggagtggtgaaccacttttttttttgctgtgtttgtatatgtctgtctctctttctccattttctaccttttcactttgtcttcttttattctttcactcttcgtagtagccattgcctaacactgtcttacctgtaactcttattaataataattagtaaattaaccaattttacctgcaagtagagtattagctgttgttaagaaaactctcaataagttgatgagtactattcttttgagtcttggatgacaccattactgytgggayctctgctgactaggagaggtgtgactcaagaattaaaaaaaaaaaaaaaaaattctcctcccttgaaactttatgaatgagacaacaacaaatatcaaatagctagtttaattcaagtgttgttgttgttattgttkttgttttttttatgacaaccttctcctacaattgtctgtctcttccctaaaaatgaatgctgttattcactgctagcttttgtacaaaacaacaacaacaacaacaaacacaatatgtatatacattttccgttttttacagcagaagtgcatattt

SEQ ID NO: 77934 - DNA, 600 bp, Chicken  19866894366835_2
gcacacgatgcctagaattgctgaatccaggagtggtgaaccacttttttttttgctgtgtttgtatatgtctgtctctctttctccattttctaccttttcactttgtcttcttttattctttcactcttcgtagtagccattgcctaacactgtcttacctgtaactcttattaataataattagtaaattaaccaattttacctgcaagtagagtattagctgttgttaagaaaactctcaataagttgatgagtactattcttttgagtcttggatgacaccattactgytgggayctctgctgactaggagaggtgtgactcaagaattaaaaaaaaaaaaaaaaaattctcctcccttgaaactttatgaatgagacaacaacaaatatcaaatagctagtttaattcaagtgttgttgttgttattgttkttgttttttttatgacaaccttctcctacaattgtctgtctcttccctaaaaatgaatgctgttattcactgctagcttttgtacaaaacaacaacaacaacaacaaacacaatatgtatatacattttccgttttttacagcagaagtgcatatttccagtt

SEQ ID NO: 77935 - DNA, 600 bp, Chicken  19866894366835_3
agccattgcctaacactgtcttacctgtaactcttattaataataattagtaaattaaccaattttacctgcaagtagagtattagctgttgttaagaaaactctcaataagttgatgagtactattcttttgagtcttggatgacaccattactgytgggayctctgctgactaggagaggtgtgactcaagaattaaaaaaaaaaaaaaaaaattctcctcccttgaaactttatgaatgagacaacaacaaatatcaaatagctagtttaattcaagtgttgttgttgttattgttkttgttttttttatgacaaccttctcctacaattgtctgtctcttccctaaaaatgaatgctgttattcactgctagcttttgtacaaaacaacaacaacaacaacaaacacaatatgtatatacattttccgttttttacagcagaagtgcatatttccagttgaaaactattaaatgattttgtactcagtggctaaaactgtggagttcaatgaaacaaacaaacaaatgaggaaataaacatataggtactcaaatcataatatgctttctcctgaaaaaattgtatccaattgagt

SEQ ID NO: 77936 - DNA, 600 bp, Chicken  19866894366841_1
acctggatgctgcagtagcacacaaactgttggcaaaggataaagtctgctctgctctgtgctgagacagagtgatgttttaccatatttggagcagggaaatcaaagtctctttgaatcattcataatagttccccttcaggctggggacatgacagctctgttaggtcataatattcctgctttaatgatcatcccaaggtcctgcaaagagtcaaaggcaaacatattataggaaagagtggaggtcttcatcatgctgcatagcttaagaaatctggtttgtcagtgaagagtaargctgctaaactagtcatcatacttttctcctttaaacagacctggtgctaggaggggagcagagtttgcagttcatagtataaaggttttcaaaacaccacttgtggaagtggcagtgacagtccctagatgtggcaaagcaatcctcagcacatgcagcagagttgtgcgaagaaaaatcagaaggttttgttgagaggattccaaaacagtggggtgtggggatagtgagggaatatgtggaaaatataaggattgtagttatcctaacaatgaattatttacagcattgcagccttt

SEQ ID NO: 77937 - DNA, 600 bp, Chicken  19866894366845_1
caagtctgaccctatggtgcaggtgagtgtgcggggaaatcccagtcctgctcacactcggaagtctgcactgtggtgcctttggttacgaatgcaccaggagagcaggcagaagtggtttgagttggttattagttccaatcctcccagagtgggaaggaatagagccttcctccttggggcttgtgctgactcatccccagagcagcagaaagagcttctaaaacagttcctatgagtcaagccagaaaatcagagaccatcgggcaaatgccagtgtttcatgtgcaaggactttcrttgcattacagccagaagtctcacctgctgtattaacgtttggttttcttagtgcatcattgaggagtccggagagcacatcattgctggtgcaggggagctgcacttggaaatctgcctgaaggatctggaggaggaccacgcttgcattcctatcaaggtacagctgctgcatgcagcctggcgggctgaggggctgcgaagcagtgcggtttgatggcactgacacagcctgagcagcaggggctgctggtgaacctgtagcactgacagctctgtgctggcagcctttcacctcag

SEQ ID NO: 77938 - DNA, 600 bp, Chicken  19866894366852_1
aaaagctactcacaaattcatctcacagctctgggtgtctgctgccatacaaatgcctctctttcttgactctgtctttgtaggtctcacagaaaatgtatcatcaggaggatatatggtgacatttttgcaatactatcctctgcagcatattgcagagcatccttcaatggatttccttcacgtgcagctcctgccattagtgttgtgagctcttcccagagagatgtacttagaggtaatgggttcaaaacacatgcgagttatgaagtggagtgagaggttatacagtactcttaraggatttcagtggagagagtttgaaagcaccacaagtcttggtctgtggggaaacagccctagaactgaggctctactctttttccatgctatgtcatctgatcactgtcagttgctttgaaaacaaatcacattgaaagaaaggactggacaggatctttgcctatattacatgtttaattttttctttcagatgagatgaagtaagacaggtaggaaatctgctgggagtattatagggaaatcatgcacacatggaaaggaacattgagacaaaccccttgattggtgtagaagcac

SEQ ID NO: 77939 - DNA, 600 bp, Chicken  19866894366860_1
gaggatttggaagtggtgactactgccttttacaggattatgtaaacaaaacagatcacactgaagatttctatgcattctttgttggaatgttcataaacattgataaatgcttcagtagaccttattattcttctccatcagtccttttgtgtttttgctattcatgtaagtgaccacagtttcttcatagtataccatgtagtgatggaagatcttgcaagggaatggagaataattggattacagcttatcatatccaggtctatttattttattgtaagtatttacttgaaataratcttatcttgttcttttacagcttcaacctacataatttgagctttgattttcactgtcttaatattctgtaaattatgtgtggctaaacaattgtgtatgcattggcaatgcataaatagtgctctttttagcatgatagaaggaataagacttcagttgctgtactcttcacctcttttattgttggcagattaatctgtactatgtcccatgataagtaggctttttctgaactgaaatcacatgagaagatacagctatgatagaagcaagacataataatttcccactgaaaaa

SEQ ID NO: 77940 - DNA, 600 bp, Chicken  19866894366865_1
gtattgctgtgcttctgtcaggggctccattgcctcctgtggcagttgtcctgtgaagtaagtgtgaagcactggcctaaaatattccttcttgctctgttagatagactgtcatcaattccaccttcttgtaaggaaatgtgcagtgacagcagataagctactttgacccccatgctagcagataagcttctgtgacctaaatatggtttcttcttgagaagaaagaagatatgaaaaatactctgggcacattaactatgaagaaggcttagaaggtcagtattttgcttcagcacygacattctacttatagttaatgcaatcagggtttgtgaaagacccaaacaaacagaaaggtgcataccgtgatggaatgtctgccgggctttgagtgtgctttggtgctagagcccatgtgaacctaatgaggttcaacaaagccatgtgcaaggtattgcacctggtttgggccaatcttagatatttgtacaggctggaagaagaactcctcgagagcagccctgccgagaaatacttgggggtcctggtagatgaaaaacttaacataagcccagaagtctgtacttgcagcctgga

SEQ ID NO: 77941 - DNA, 600 bp, Chicken  19866894366866_1
gtagggtgtcctaccccactgccatgtcctcctgaacagaactaccatctcatgggactttgcaaagcaacgcatctgtacacactctcccccagatctaacataaggcaccctcaccccttccccacctccagctgcaccacggagaggcacgagaggagtttctacaagtaggtcaggtatgacttctcatcctctgaatgctaataaaagccactgatgtgaaacctataacgttatgtgtataaataatttagctcagttgtgtaaacattgatactgggttaaaaaaaaaaaaayacagaaagaaagaaataatttcatcagctctttcccctgcatgaatatagtgttaggtatgacataacaggggcaaaggataactggggagtttggaaatggatggatggaaaatggtggcctyggggaccctccgtgtgcaggggtggtcaccacacagacagtgcctgcgtgttggaggtgctccagcaagggacagccatccgggagacgtcccaagaacaccccatctgcagcagtgctgccctgcagcatctctggaggcagcaggcaaagcgagcggggacagaatgaggacaa

SEQ ID NO: 77942 - DNA, 600 bp, Chicken  19866894366866_2
tagggtgtcctaccccactgccatgtcctcctgaacagaactaccatctcatgggactttgcaaagcaacgcatctgtacacactctcccccagatctaacataaggcaccctcaccccttccccacctccagctgcaccacggagaggcacgagaggagtttctacaagtaggtcaggtatgacttctcatcctctgaatgctaataaaagccactgatgtgaaacctataacgttatgtgtataaataatttagctcagttgtgtaaacattgatactgggttaaaaaaaaaaaaaaycagaaagaaagaaataatttcatcagctctttcccctgcatgaatatagtgttaggtatgacataacaggggcaaaggataactggggagtttggaaatggatggatggaaaatggtggcctyggggaccctccgtgtgcaggggtggtcaccacacagacagtgcctgcgtgttggaggtgctccagcaagggacagccatccgggagacgtcccaagaacaccccatctgcagcagtgctgccctgcagcatctctggaggcagcaggcaaagcgagcggggacagaatgaggacaag

SEQ ID NO: 77943 - DNA, 600 bp, Chicken  19866894366866_3
ccacctccagctgcaccacggagaggcacgagaggagtttctacaagtaggtcaggtatgacttctcatcctctgaatgctaataaaagccactgatgtgaaacctataacgttatgtgtataaataatttagctcagttgtgtaaacattgatactgggttaaaaaaaaaaaaaaacagaaagaaagaaataatttcatcagctctttcccctgcatgaatatagtgttaggtatgacataacaggggcaaaggataactggggagtttggaaatggatggatggaaaatggtggcctyggggaccctccgtgtgcaggggtggtcaccacacagacagtgcctgcgtgttggaggtgctccagcaagggacagccatccgggagacgtcccaagaacaccccatctgcagcagtgctgccctgcagcatctctggaggcagcaggcaaagcgagcggggacagaatgaggacaaggggggctttgcacttccacttgcctctcggctgtgcaaagtccccatcccagtcagcagagggatctgggctggcaccagcgcgtggctgttgctgttcccgcagtttagaggaagcaaagat

SEQ ID NO: 77944 - DNA, 600 bp, Chicken  19866894366875_1
tatgccaacccatagagaacatctgtgtgactcgggttccatgtgcagagtttgggtcagcaggaattccagctccaggacccaattctgtctgcactagagctgcagctaaagatgagggtgttgctggggaagaccatagacccattaagttaggaaaagacctcgaagatcaccaggtccaacctcaacccacccccccatgcctactatatcgctaagtgccacatctccgtggttcttgaacacctcctgggatggtgactctaccacctctctgggcagcagttccaaggcctrtccactctttcagagcataakttttttgctaatatccaaactgaacaacccctgaagggaggaatcactgcctcctggagcacggctcagtcctgaaacccaagcagcagaaaatgcwtgggcacactcaggtcagaaagtacccagatgttcggctcagccaccaggtccaaaattcactttgytccagtgctgttgaaataaagtgaaagaaaakgattaattttccattaaaataatcttataaagaaatatggttcattaagcagaggcaaagaaatccaacacaatcctgcgagg

SEQ ID NO: 77945 - DNA, 600 bp, Chicken  19866894366875_2
tctgtgtgactcgggttccatgtgcagagtttgggtcagcaggaattccagctccaggacccaattctgtctgcactagagctgcagctaaagatgagggtgttgctggggaagaccatagacccattaagttaggaaaagacctcgaagatcaccaggtccaacctcaacccacccccccatgcctactatatcgctaagtgccacatctccgtggttcttgaacacctcctgggatggtgactctaccacctctctgggcagcagttccaaggcctrtccactctttcagagcataakttttttgctaatatccaaactgaacaacccctgaagggaggaatcactgcctcctggagcacggctcagtcctgaaacccaagcagcagaaaatgcwtgggcacactcaggtcagaaagtacccagatgttcggctcagccaccaggtccaaaattcactttgytccagtgctgttgaaataaagtgaaagaaaakgattaattttccattaaaataatcttataaagaaatatggttcattaagcagaggcaaagaaatccaacacaatcctgcgaggctcaaatccggggctgggaat

SEQ ID NO: 77946 - DNA, 600 bp, Chicken  19866894366875_3
gggtgttgctggggaagaccatagacccattaagttaggaaaagacctcgaagatcaccaggtccaacctcaacccacccccccatgcctactatatcgctaagtgccacatctccgtggttcttgaacacctcctgggatggtgactctaccacctctctgggcagcagttccaaggcctrtccactctttcagagcataakttttttgctaatatccaaactgaacaacccctgaagggaggaatcactgcctcctggagcacggctcagtcctgaaacccaagcagcagaaaatgcwtgggcacactcaggtcagaaagtacccagatgttcggctcagccaccaggtccaaaattcactttgytccagtgctgttgaaataaagtgaaagaaaakgattaattttccattaaaataatcttataaagaaatatggttcattaagcagaggcaaagaaatccaacacaatcctgcgaggctcaaatccggggctgggaattcctccaggcttaggctgagcctggaccacaatcccagagcatctcctaccctggtccttccttttccaggtgagatctctgcctaaagcctccttc

SEQ ID NO: 77947 - DNA, 600 bp, Chicken  19866894366875_4
cctcaacccacccccccatgcctactatatcgctaagtgccacatctccgtggttcttgaacacctcctgggatggtgactctaccacctctctgggcagcagttccaaggcctrtccactctttcagagcataakttttttgctaatatccaaactgaacaacccctgaagggaggaatcactgcctcctggagcacggctcagtcctgaaacccaagcagcagaaaatgcwtgggcacactcaggtcagaaagtacccagatgttcggctcagccaccaggtccaaaattcactttgytccagtgctgttgaaataaagtgaaagaaaakgattaattttccattaaaataatcttataaagaaatatggttcattaagcagaggcaaagaaatccaacacaatcctgcgaggctcaaatccggggctgggaattcctccaggcttaggctgagcctggaccacaatcccagagcatctcctaccctggtccttccttttccaggtgagatctctgcctaaagcctccttctccctcctggtgccattgaccacatcacaggaaacaacttgcttctggatataatgtggattgtgaa

SEQ ID NO: 77948 - DNA, 600 bp, Chicken  19866894366875_5
ctaagtgccacatctccgtggttcttgaacacctcctgggatggtgactctaccacctctctgggcagcagttccaaggcctrtccactctttcagagcataakttttttgctaatatccaaactgaacaacccctgaagggaggaatcactgcctcctggagcacggctcagtcctgaaacccaagcagcagaaaatgcwtgggcacactcaggtcagaaagtacccagatgttcggctcagccaccaggtccaaaattcactttgytccagtgctgttgaaataaagtgaaagaaaakgattaattttccattaaaataatcttataaagaaatatggttcattaagcagaggcaaagaaatccaacacaatcctgcgaggctcaaatccggggctgggaattcctccaggcttaggctgagcctggaccacaatcccagagcatctcctaccctggtccttccttttccaggtgagatctctgcctaaagcctccttctccctcctggtgccattgaccacatcacaggaaacaacttgcttctggatataatgtggattgtgaagccatctggctgcaaggaatgagtgttcacag

SEQ ID NO: 77949 - DNA, 600 bp, Chicken  19866894366886_1
agatggattctgatgcaaatttaaaactacaaaacagataaactgagtttccttactgcagtctgtacaccaatgtattaaaaccccaaatttacttacctgactgcagaattttgtgtaagatcacgcagcatcggaacgggagactctactgtcctggtaagagaaaaggctctgttaaaacatcacaaacttctcagcatctactctgctttctttctctgtggctgtcaattaagtttgtgtcaaataaaagatttcaaaattagcttgtcttttctctacaccaaattgctgtayaagcagtggaattackgaattctcatttcttaatgaccttacttttgcagctgatcattcatgtgcattctcactaaggtccaacagaggatttgcatattttccactgtccaagtgtttaagagttaagaatgttctgcatctcagaaacctctccacatcattttgattattacaagccaacaggttctgagagggcaggagaagagcagagcaacagacacacacagacgccgcatgaacacaaactgacttctcagggaaaaaaaggctctaaagaaataaatatttttagcagct

SEQ ID NO: 77950 - DNA, 600 bp, Chicken  19866894366886_2
aaatttaaaactacaaaacagataaactgagtttccttactgcagtctgtacaccaatgtattaaaaccccaaatttacttacctgactgcagaattttgtgtaagatcacgcagcatcggaacgggagactctactgtcctggtaagagaaaaggctctgttaaaacatcacaaacttctcagcatctactctgctttctttctctgtggctgtcaattaagtttgtgtcaaataaaagatttcaaaattagcttgtcttttctctacaccaaattgctgtayaagcagtggaattackgaattctcatttcttaatgaccttacttttgcagctgatcattcatgtgcattctcactaaggtccaacagaggatttgcatattttccactgtccaagtgtttaagagttaagaatgttctgcatctcagaaacctctccacatcattttgattattacaagccaacaggttctgagagggcaggagaagagcagagcaacagacacacacagacgccgcatgaacacaaactgacttctcagggaaaaaaaggctctaaagaaataaatatttttagcagctgttttacaaagtactt

SEQ ID NO: 77951 - DNA, 600 bp, Chicken  19866894366900_1
tgccttgtgatttcagtgtcaatgacttaatgaagacctaatgaggaaagatgttacataaatttggggtaggaagggtgttcttttattttcgcagcagagatagcaattaacgtatgccttgcgtagaggcatagcttcatttaactcatctcgatctgcccactccttcactgaaacaaataaatcctgcttctcactcgatgtgtcccgttgtgttaaatgtgccacagagatttaaaactggcagattctgtaggcgtacagagttgttatcagacactgcatgctcgtgagacrttcctccgcacagtaccattagttkgaagcagcacataaaatggtctcagttgccctttcaaaagtgttttccaagccgtttccttgcaaataaaccattgaaaatgcaattttccctcgttccttgttcttgttattttttttctgtagggcactgttttactgacggtgtggtcacagctaatcagggaataactgccatctgtagggactgtttataaatagctgggaaacattgctcaggatcacttcatgacattaatttttgaagtcatagtgatttttttttttccaaaggtt

SEQ ID NO: 77952 - DNA, 600 bp, Chicken  19866894366900_2
cttaatgaagacctaatgaggaaagatgttacataaatttggggtaggaagggtgttcttttattttcgcagcagagatagcaattaacgtatgccttgcgtagaggcatagcttcatttaactcatctcgatctgcccactccttcactgaaacaaataaatcctgcttctcactcgatgtgtcccgttgtgttaaatgtgccacagagatttaaaactggcagattctgtaggcgtacagagttgttatcagacactgcatgctcgtgagacrttcctccgcacagtaccattagttkgaagcagcacataaaatggtctcagttgccctttcaaaagtgttttccaagccgtttccttgcaaataaaccattgaaaatgcaattttccctcgttccttgttcttgttattttttttctgtagggcactgttttactgacggtgtggtcacagctaatcagggaataactgccatctgtagggactgtttataaatagctgggaaacattgctcaggatcacttcatgacattaatttttgaagtcatagtgatttttttttttccaaaggttctcccctaaaactgtgttggggttt

SEQ ID NO: 77953 - DNA, 600 bp, Chicken  19866894366904_1
tgctcccattggcttctcctgcactacagctggtcggcagcgttaaccagaagcacactgcctgctcagctggctctgtgtaagacgtttccttccttcccaaattagtgcacaaagccaaggctggttatgtgggggtaacacctcgggggctgtggctgttcctttggccctatttcctgtcccatgagacaaactcttgcattgtgtgtttctgaaggacatctcccctgctgaggagcaggttttcccagagcactcctctgagttcccagctgcgaccttctcctgatggagctrgaaggaacaatgaggagagaaagatgataaagcctattcaatccaggacaaaaggattgtcgattsacttaaatattwtgctccccacccacagacattaagcaggatgatacagacaaaccccaaaaggaaataaacagataaacagcagacagtttccttttcttcctttcatagccataagcaccatcagattccagggctgacttccaactagaaaatgaaggatttgggccatgtctctggatggctgctggggtgaaggaaggaaaagtgttatctcaagccatctctgttggc

SEQ ID NO: 77954 - DNA, 600 bp, Chicken  19866894366904_2
cagctggctctgtgtaagacgtttccttccttcccaaattagtgcacaaagccaaggctggttatgtgggggtaacacctcgggggctgtggctgttcctttggccctatttcctgtcccatgagacaaactcttgcattgtgtgtttctgaaggacatctcccctgctgaggagcaggttttcccagagcactcctctgagttcccagctgcgaccttctcctgatggagctrgaaggaacaatgaggagagaaagatgataaagcctattcaatccaggacaaaaggattgtcgattsacttaaatattwtgctccccacccacagacattaagcaggatgatacagacaaaccccaaaaggaaataaacagataaacagcagacagtttccttttcttcctttcatagccataagcaccatcagattccagggctgacttccaactagaaaatgaaggatttgggccatgtctctggatggctgctggggtgaaggaaggaaaagtgttatctcaagccatctctgttggctgctgtgttaccacaattctgcatgaaggtatgagctgcagctccagtcgtggtgatccaccgggt

SEQ ID NO: 77955 - DNA, 600 bp, Chicken  19866894366904_3
tgtaagacgtttccttccttcccaaattagtgcacaaagccaaggctggttatgtgggggtaacacctcgggggctgtggctgttcctttggccctatttcctgtcccatgagacaaactcttgcattgtgtgtttctgaaggacatctcccctgctgaggagcaggttttcccagagcactcctctgagttcccagctgcgaccttctcctgatggagctrgaaggaacaatgaggagagaaagatgataaagcctattcaatccaggacaaaaggattgtcgattsacttaaatattwtgctccccacccacagacattaagcaggatgatacagacaaaccccaaaaggaaataaacagataaacagcagacagtttccttttcttcctttcatagccataagcaccatcagattccagggctgacttccaactagaaaatgaaggatttgggccatgtctctggatggctgctggggtgaaggaaggaaaagtgttatctcaagccatctctgttggctgctgtgttaccacaattctgcatgaaggtatgagctgcagctccagtcgtggtgatccaccgggtagcttcctaact

SEQ ID NO: 77956 - DNA, 600 bp, Chicken  19866894366905_1
ctcagttttaaaacagaaaaaaatgaatacagagaattttatacctgataagaaataatattgatcaataaaaagatatatgctatcaaataagtaatatttctttccatctctgtagtagaacctgtgtgaaacggtgattcagataatttgagtatttgagtaaacactcatgattgcatcactctgtaaaccaactggatctctgtgcataacaatgtcttatattgtttcaagtgtagcccatatccctctgaaaatctctgaacttctttttgttcgaattttatattcacttcrtaattgtatattctgtaattacaggttatttactttattgcttgtttttatttgtttgtttgttttcctagtagaggtaatatagaggtaattcttggaactgaacctgttctactcttctgaaaaaatatacattagtttcaaggtagcttgatagtaacttcaactatttgagatattttttggcctaaccttgggccagttctttgccaattagtcattccttctccatttaactgggctatgggttggagttgcaattgttactaaaagtcattttaaatgacagtgataacattt

SEQ ID NO: 77957 - DNA, 563 bp, Chicken  19866894366905_2
aaaaaatatacattagtttcaaggtagcttgatagtaacttcaactatttgagatattttttggcctaaccttgggccagttctttgccaattagtcattccttctccatttaactgggctatgggttggagttgcaattgttactaaaagtcattttaaatgacagtgataacattttattgtcaagacaagtatttaaagatgactgcatttgattgacagggaactaataaatattttgaaagaaatcaggcaaaggatgtgttgaactgaagtagaataacaatatgggaagtttkttwacacagttctttgtaaatcttttctcccactgcttacctcagtcaatcagtaattcttctttgtgtcttatatgactagaattcataatgtaaggatgctttttccaccatatattttccagaagataaatgccttgtctgctggtgaaagaagaaaaaaaaaattatgcattagactgcaaagtgaccagggagttgaaacgctaaagctgttagaaatggactgagaactatgcttaagggatactgaggagcgtgta

SEQ ID NO: 77958 - DNA, 560 bp, Chicken  19866894366905_3
aaatatacattagtttcaaggtagcttgatagtaacttcaactatttgagatattttttggcctaaccttgggccagttctttgccaattagtcattccttctccatttaactgggctatgggttggagttgcaattgttactaaaagtcattttaaatgacagtgataacattttattgtcaagacaagtatttaaagatgactgcatttgattgacagggaactaataaatattttgaaagaaatcaggcaaaggatgtgttgaactgaagtagaataacaatatgggaagtttkttwacacagttctttgtaaatcttttctcccactgcttacctcagtcaatcagtaattcttctttgtgtcttatatgactagaattcataatgtaaggatgctttttccaccatatattttccagaagataaatgccttgtctgctggtgaaagaagaaaaaaaaaattatgcattagactgcaaagtgaccagggagttgaaacgctaaagctgttagaaatggactgagaactatgcttaagggatactgaggagcgtgta

SEQ ID NO: 77959 - DNA, 600 bp, Chicken  19866894366907_1
aaggtgcaaagtgaaagtaaaaccctggaagttgaagcagagcatgtatgctggaaagttgtgtgtgagaggtgacagaaaaatcatgagcatagacagtaggataaggccagcaagctggagggggagagaagcagatgggaatgtaaggcagaaagctgcttgtaggaggtacattgtaacaactgggatctggtgtcctaataaagtttttacttgtaaattgacagttttcccctgaatatgtatcataggattaatacaatctattcagtatttgtttttattcttgttggttcstgagtgaccragggaggtcatcctcctttgcttcgtaaacaaaatgtggtttgaatatagatggttttattatgaattttacaatgtcacaaattttaatttgttagtgtttcctatgtgtaaatttgactttacaaaatgtgttcagataggcatatattactattactctttctttatatacagaggcctaatatgtgccttcygattcaagatatttcagagaaaattattggaatgctcagatttgcctttttatgattacatcaaatttcatttttaatttactttgcacctaca

SEQ ID NO: 77960 - DNA, 600 bp, Chicken  19866894366907_2
gtgaaagtaaaaccctggaagttgaagcagagcatgtatgctggaaagttgtgtgtgagaggtgacagaaaaatcatgagcatagacagtaggataaggccagcaagctggagggggagagaagcagatgggaatgtaaggcagaaagctgcttgtaggaggtacattgtaacaactgggatctggtgtcctaataaagtttttacttgtaaattgacagttttcccctgaatatgtatcataggattaatacaatctattcagtatttgtttttattcttgttggttcstgagtgaccragggaggtcatcctcctttgcttcgtaaacaaaatgtggtttgaatatagatggttttattatgaattttacaatgtcacaaattttaatttgttagtgtttcctatgtgtaaatttgactttacaaaatgtgttcagataggcatatattactattactctttctttatatacagaggcctaatatgtgccttcygattcaagatatttcagagaaaattattggaatgctcagatttgcctttttatgattacatcaaatttcatttttaatttactttgcacctacaagttggacac

SEQ ID NO: 77961 - DNA, 600 bp, Chicken  19866894366907_3
aagtttttacttgtaaattgacagttttcccctgaatatgtatcataggattaatacaatctattcagtatttgtttttattcttgttggttcstgagtgaccragggaggtcatcctcctttgcttcgtaaacaaaatgtggtttgaatatagatggttttattatgaattttacaatgtcacaaattttaatttgttagtgtttcctatgtgtaaatttgactttacaaaatgtgttcagataggcatatattactattactctttctttatatacagaggcctaatatgtgccttcygattcaagatatttcagagaaaattattggaatgctcagatttgcctttttatgattacatcaaatttcatttttaatttactttgcacctacaagttggacaccagaatctcaggatagctgcttagaaaatcagttgtatcattgattaacagttgaaaaacacttgagctaaagtgggtcgtgatacatctcacaggaactttgcagtttgtgcaggtacagaacccgttttggcagtttagcattataatgcctttattggaatactgttcccgaggttccatgcttttgttgagg

SEQ ID NO: 77962 - DNA, 600 bp, Chicken  19866894366915_1
gaactcctgaagactttcgcccttttgctgaagtgtctcagttttgccccctgggttagatgggtcttcatcctgatcgcgaagaccagtttccacatgcctatcaaagtttcaaacactgtctaatggattatttattgactgtggtcctttgcaacaagactgaatttaagcacagatcttaaggccactattgtggttgtagagaaccaggctatagaagccgttggaccattccattttaaagaaaatcaaagttgctgtaccaggagcatagaaccccttaagcacagagcatakaagcaaccaaaaaaaaaattgtccagtgacatgaagacatctgtggagcaaaagagtagaacatagaagttaatctgaggactgcactgcatacctggtgttgcctgattcaggaataaagcagtaagtcccaatttgtaaatgctatcaccttctgctgaagtgctcacagaggcctcccaccwctcacagctgtctacagcttaccygccctcttatccacactgatactttgatatgcagtgtgtaggccaaggagarctggctgcccttagctttgtagacaagtagctcactagg

SEQ ID NO: 77963 - DNA, 600 bp, Chicken  19866894366915_2
ggccactattgtggttgtagagaaccaggctatagaagccgttggaccattccattttaaagaaaatcaaagttgctgtaccaggagcatagaaccccttaagcacagagcatakaagcaaccaaaaaaaaaattgtccagtgacatgaagacatctgtggagcaaaagagtagaacatagaagttaatctgaggactgcactgcatacctggtgttgcctgattcaggaataaagcagtaagtcccaatttgtaaatgctatcaccttctgctgaagtgctcacagaggcctcccaccwctcacagctgtctacagcttaccygccctcttatccacactgatactttgatatgcagtgtgtaggccaaggagarctggctgcccttagctttgtagacaagtagctcactagggaactatctggttgatgtagtcttcaatgtggaatgctatacatgaattttcattttttctctaaatcacttatggagttctatattttttattctggggagagatgccrttttgggttttttgagggaggggagttgtgtttgtgactagtcaaattcatttcagatttgaaatatcagccatt

SEQ ID NO: 77964 - DNA, 600 bp, Chicken  19866894366915_3
ccaggctatagaagccgttggaccattccattttaaagaaaatcaaagttgctgtaccaggagcatagaaccccttaagcacagagcatakaagcaaccaaaaaaaaaattgtccagtgacatgaagacatctgtggagcaaaagagtagaacatagaagttaatctgaggactgcactgcatacctggtgttgcctgattcaggaataaagcagtaagtcccaatttgtaaatgctatcaccttctgctgaagtgctcacagaggcctcccaccwctcacagctgtctacagcttaccygccctcttatccacactgatactttgatatgcagtgtgtaggccaaggagarctggctgcccttagctttgtagacaagtagctcactagggaactatctggttgatgtagtcttcaatgtggaatgctatacatgaattttcattttttctctaaatcacttatggagttctatattttttattctggggagagatgccrttttgggttttttgagggaggggagttgtgtttgtgactagtcaaattcatttcagatttgaaatatcagccatttcagattgtttgtaactgccagcc

SEQ ID NO: 77965 - DNA, 600 bp, Chicken  19866894366915_4
tgtaccaggagcatagaaccccttaagcacagagcatakaagcaaccaaaaaaaaaattgtccagtgacatgaagacatctgtggagcaaaagagtagaacatagaagttaatctgaggactgcactgcatacctggtgttgcctgattcaggaataaagcagtaagtcccaatttgtaaatgctatcaccttctgctgaagtgctcacagaggcctcccaccwctcacagctgtctacagcttaccygccctcttatccacactgatactttgatatgcagtgtgtaggccaaggagarctggctgcccttagctttgtagacaagtagctcactagggaactatctggttgatgtagtcttcaatgtggaatgctatacatgaattttcattttttctctaaatcacttatggagttctatattttttattctggggagagatgccrttttgggttttttgagggaggggagttgtgtttgtgactagtcaaattcatttcagatttgaaatatcagccatttcagattgtttgtaactgccagccaagtgctggttctgtgagctgaaattaaatggatmtacttatttcaacttta

SEQ ID NO: 77966 - DNA, 600 bp, Chicken  19866894366915_5
caggaataaagcagtaagtcccaatttgtaaatgctatcaccttctgctgaagtgctcacagaggcctcccaccwctcacagctgtctacagcttaccygccctcttatccacactgatactttgatatgcagtgtgtaggccaaggagarctggctgcccttagctttgtagacaagtagctcactagggaactatctggttgatgtagtcttcaatgtggaatgctatacatgaattttcattttttctctaaatcacttatggagttctatattttttattctggggagagatgccrttttgggttttttgagggaggggagttgtgtttgtgactagtcaaattcatttcagatttgaaatatcagccatttcagattgtttgtaactgccagccaagtgctggttctgtgagctgaaattaaatggatmtacttatttcaactttactgagggaaacttgtcatatccttctggggacgtcagatgctcgtaagaaagcaccactgattccacaagtgctacagctatcagtttcttcctttagggctgcttatctgtggactacaatgtagagggatcctacagtttgaaccac

SEQ ID NO: 77967 - DNA, 600 bp, Chicken  19866894366915_6
gtgtaggccaaggagarctggctgcccttagctttgtagacaagtagctcactagggaactatctggttgatgtagtcttcaatgtggaatgctatacatgaattttcattttttctctaaatcacttatggagttctatattttttattctggggagagatgccrttttgggttttttgagggaggggagttgtgtttgtgactagtcaaattcatttcagatttgaaatatcagccatttcagattgtttgtaactgccagccaagtgctggttctgtgagctgaaattaaatggatmtacttatttcaactttactgagggaaacttgtcatatccttctggggacgtcagatgctcgtaagaaagcaccactgattccacaagtgctacagctatcagtttcttcctttagggctgcttatctgtggactacaatgtagagggatcctacagtttgaaccactctgtgagcacatatgattactgtgaaagaagaataggaagagatataatgagaaggaaagtggttattgattttcatggaacctccttgagaggaaaaaaaatggtttaaaaggcagattaatgggggaaggg

SEQ ID NO: 77968 - DNA, 599 bp, Chicken  19866894366920_1
  misc_feature (1)..(146): n is any nucleotide
nnnnnnnnnnnnnnnnnnnnnnnnnnnnnnnnnnnnnnnnnnnnnnnnnnnnnnnnnnnnnnnnnnnnnnnnnnnnnnnnnnnnnnnnnnnnnnnnnnnnnnnnnnnnnnnnnnnnnnnnnnnnnnnnnnnnnnnnnnnnnnnnnngctgctctctaactgaggcctgttgccttccagtaataacgcccagcccagcgatgcctgtggggtggttgggctggctttcagcgggccccagatccagagtgccacggttttgttagaccaggacgtcgctgatgagaggacagcagaagcygccatgcagcgtctgaaagcagcaaacatcccccgagtgtaacaccattggcttcatgttcgcgtgtgttggccgaggatatcggcactataaaaccaaacggaatatggaagcagatgcctttaggaagttttttccaagtgttcccctatttggctttttcggacacggggaaataggatgtgatcggatagttactgggaatttcgtattaagagaatgtaatgatgtaaaggatgacctgcttcatggttacactactgttatgactctcattcatctcggttcaactaaagcaa

SEQ ID NO: 77969 - DNA, 600 bp, Chicken  19866894366920_2
ttacactactgttatgactctcattcatctcggttcaactaaagcaaaccaggcgtgagtgtgtttgcaatgcatcagtgagctgcttcgtcccgaagagcggacatcctgcagtcagagcacttcccaaagcataagcaccattttcgtaacattatcaaatcctgtagttggaacagttgaatgtaatagctgtgaggaagccttgcctttcgtgtaaccccctgcacgtgctgaaattgcagggaaatgatattgaatggagttctgcgatcgaagaaagcctcttttctttctaawatgagaacagtttgcacaagtggcagtcagaggccaagcaatcaccgtgtagaaataatactttgatgcgctctatttatgtatgcraaacagtgcagaagagctaccaacgtgtgctgaaatgctggtgcaggaaatccaccagtttgtgggtttaagagtgatgcgcagcctgcccagggttgggccctgttcacagacctgagtcgtttactgggtaaaactcaaggaaatctttaggaaaaaataaccaagaaagtgctcattaaataaagacaacattatgtaaatgcacctggc

SEQ ID NO: 77970 - DNA, 600 bp, Chicken  19866894366920_3
tcgtcccgaagagcggacatcctgcagtcagagcacttcccaaagcataagcaccattttcgtaacattatcaaatcctgtagttggaacagttgaatgtaatagctgtgaggaagccttgcctttcgtgtaaccccctgcacgtgctgaaattgcagggaaatgatattgaatggagttctgcgatcgaagaaagcctcttttctttctaawatgagaacagtttgcacaagtggcagtcagaggccaagcaatcaccgtgtagaaataatactttgatgcgctctatttatgtatgcraaacagtgcagaagagctaccaacgtgtgctgaaatgctggtgcaggaaatccaccagtttgtgggtttaagagtgatgcgcagcctgcccagggttgggccctgttcacagacctgagtcgtttactgggtaaaactcaaggaaatctttaggaaaaaataaccaagaaagtgctcattaaataaagacaacattatgtaaatgcacctggccttctgttcttagagaaaaaagctctgatcttgtgaggtgctctcagctttgaagctcagctcaattcactatcttgaactacattt

SEQ ID NO: 77971 - DNA, 600 bp, Chicken  19866894366921_1
aagccaatgaaaatatgctagcttcaacttcaactcttgtggaaattttttattggctttgtttcatgaatcaaagcaataaagccaaacaaagaaaatactccggttttatcagcagagatggtcaggctctctactaccccagacgctatacaatatagtcttaacacaggcagcccaaaactttctttagcactgttcagtgctgttaagcctagaatagttatccacagcttcagtttaaataactggttaaggagcacttatgctcctttattaaagcttaaaaatcaaagtaarcatcccagtctaggagacaggttaattcctgagtgcttcttgatctgtctgagtgcaaagcacagctagatggaagaggaaaacatggtacagatacactaaaaacaagaacaacaacaataataaaagaaacaaccaaatttctgagagtaagtctcaaatcccaggaaaaagaaaacaaaaacgcataatcaagacaactagcaagtctggctgcacaagaacatcgtcactcagctccctgaaggaacaaggaggtttttctttaactatgtttagacatttgcttgctttgtttga

SEQ ID NO: 77972 - DNA, 600 bp, Chicken  19866894366922_1
tattctgtcaggaaatatttaatcaagtgtttggaacatttggatttgtcacagcgttctgtaatctacttcatttaattatgctcataagaaacacaagctgtggatagagttaggttttttgttgattaggatagaagaaaggcattcttggctttcccatgaaggggacctgcaataaggtttcagactgaaagctgcctggacatctgaaaacggccatagcattgagaactgtgaacagtccagagagcaagagttggattaggcagtgattactactgcatcttactgggaggyaattctgattattccttatcaggaagctaaaggagtggagagctttttttgccggaggaaactgtctttgatgaagtttgtatggacagtgactaaagctgcatyttgctcctgaaataaaggtactttcatcaattaactttcaatagcaatatttctgtgacaagatttgggttattatgatggccatgcctatgccaataggagttgcaaaattgtttttgttatgctacctccataatacagatttgcatttcaaatattcaatgaaagtaacagtagatatgcaaataaaatgtg

SEQ ID NO: 77973 - DNA, 600 bp, Chicken  19866894366922_2
gatagagttaggttttttgttgattaggatagaagaaaggcattcttggctttcccatgaaggggacctgcaataaggtttcagactgaaagctgcctggacatctgaaaacggccatagcattgagaactgtgaacagtccagagagcaagagttggattaggcagtgattactactgcatcttactgggaggyaattctgattattccttatcaggaagctaaaggagtggagagctttttttgccggaggaaactgtctttgatgaagtttgtatggacagtgactaaagctgcatyttgctcctgaaataaaggtactttcatcaattaactttcaatagcaatatttctgtgacaagatttgggttattatgatggccatgcctatgccaataggagttgcaaaattgtttttgttatgctacctccataatacagatttgcatttcaaatattcaatgaaagtaacagtagatatgcaaataaaatgtgagtattcaaaaactaacttagtgctaaaaggttgttctcacagtaatagcaaattcaaatttatttgtatcaacgtgcaatatagaagcatcttactttttgcaa

SEQ ID NO: 77974 - DNA, 600 bp, Chicken  19866894366938_1
atatattctatctacatttcaaagatgagttctctactgtctacacaatccatgtgtttaaaacaacataatacaaattacaagtttgcattctcaaaacatgatcttgctgagtacatttaggcagcaccttccattagatacagtctggagtgtcaaatcatgtttttcttctcagttcccacagggttgctaaaagtttgatcttttccttactcttttcacactctatgtcaatctgagtggaaacctgtgtctcacaagactttgatcaacagcaggcaatactttgaggatggragaaaacagcagtacaggattatggatttctgtgcagcagtagttcaatatcagaagcatgccactttttttcctctttaatttggatgacataacacagttctagttactggactgacagcaagttgtccaggaaggcatggaaggttagttgtttataacttcttattcaaatgaacagcaacatttaaaaagtactggtgagaggatctataaatatcaccaactgtagcactgtaaagatggaaagaattgcatccaaacttcacaaaacacccatgaaagtgtactccgattctt

SEQ ID NO: 77975 - DNA, 599 bp, Chicken  19866894366961_1
  misc_feature (1)..(52): n is any nucleotide
nnnnnnnnnnnnnnnnnnnnnnnnnnnnnnnnnnnnnnnnnnnnnnnnnnnncagaggacagaatagccccagtgggagaaagctgagtagaaacggagtgtttaactttctcttcgaggtgtctgccttcaagggaatgactacagaagtacaaatgatgtcagtaaagagaatttcagctgcaagtcctgctcctaggaaagagcatgggctggcctagggcagggtaggaagtggcagaagcccattttgggttggcatcagggaagaaagagggctgcttttctctgtaggaaaaygaaagatttttttctaccttttccctttggagaccaagactctgcccccacatagcacatggttctctcccaccgacatcacggctcctccaaggctacgcaagcacccagccccaggtgatcctcacctgatgtgaatctcttctccttctggctgtagaagctgttgtaggaagagatcactacaggaacaatgggaacctgtggggaagcagtctacagtgagtgaatctacaaattgccctgtaccacctgcaggctactggatgggtgctcagtccaaagggaagtgagggacc

SEQ ID NO: 77976 - DNA, 600 bp, Chicken  19866894366961_2
tgactccaccacatactcttctgggactgatctgtctgctcccgactatgcagaggcattcacttcctccacctcaagcactttctgggcccaaagcacagctaacccaccagaggttctgctcagtgcagagtccaaagaactaaatcaccttccagccacatcaaggttaacatttcccagcgcctcccgctctccacaagaagtctttcccactcacattatctttgcgcatggtgtgtgccatctctgtcaggacagcgatggactcttccctcttcttgcggtcaatgaatacgrtgcccgaaaaccagcatgcgaggccaaaggggcccatgtacagtatttccttctttccaatgggcacacagcgatttggtatcatctgcataatcactggaagagaaggacaaggacagaaaatgttttcatctacacaaggttccctccagccctgtgctttggggaacatcatgcttgcagcccccacccaacgacaagatgttggaaaagggatttggggcatctgcagaccaacctcccactcagagcttttgccaacactgaataacctgaataaccgtgacaccactgtggtct

SEQ ID NO: 77977 - DNA, 600 bp, Chicken  19866894366966_1
atctgtcctggtgggaagtcagagtttgttttgaatgctgatagtcattcttttgttacaagtatcttcgttaaggtatccaaagccatgggctatttgttctctctttcatcagctccatttcccataccagcccttgtgggctgcatggcaggagcactagccccagtttctcccagcagacgcttatgaggcaggctcctattctggcacacttgttggattcttttggattcattgtcttctgctctgcagataatcatcaatattcagttggggaaaagaagcaaactggcctcrctgccgtgttcctgattcttgggacttgtgcaggaggagcagcactgctgtccatgtattattacaagaggcggacccagaaacgtcaaggtacagtgtgacaaaacatcatgttcctgtgggtarcaggccttcacaagcagccttgggggtggagaaggaagcatctcaggttttatgtctggatctcattttcaaaataattgtttatgaagttgacaaatgatgttcatcatgaaggggatgcttggccagccagtggcatgaaaataggtaataaaaggggaaaaacaactgcag

SEQ ID NO: 77978 - DNA, 600 bp, Chicken  19866894366966_2
ataccagcccttgtgggctgcatggcaggagcactagccccagtttctcccagcagacgcttatgaggcaggctcctattctggcacacttgttggattcttttggattcattgtcttctgctctgcagataatcatcaatattcagttggggaaaagaagcaaactggcctcrctgccgtgttcctgattcttgggacttgtgcaggaggagcagcactgctgtccatgtattattacaagaggcggacccagaaacgtcaaggtacagtgtgacaaaacatcatgttcctgtgggtarcaggccttcacaagcagccttgggggtggagaaggaagcatctcaggttttatgtctggatctcattttcaaaataattgtttatgaagttgacaaatgatgttcatcatgaaggggatgcttggccagccagtggcatgaaaataggtaataaaaggggaaaaacaactgcaggcctgttagttttaattctaagtacatctttgctaatgctgggacttaattactgttgttttcctaggacctatcgtactggttcagcagactcttccaggtaagccctggctttctttggtttaa

SEQ ID NO: 77979 - DNA, 600 bp, Chicken  19866894366971_1
ggtgtggtcactgcatgggtccggtcctgggctgccccagctccccacgccttccttggagagatgcttgccccaggtccttgggagggtgggaggaaggttgtaatgatcagcatttgctaatgaccccttataaaagtggtcctctgggagctcttgcattaactcagaacttagacatgtttttgttgggttgatttgtcctggtggtttgctttggacaggcgtgccctcaggtttcagcagtgcgataacaaaacaatcatcacaaaatatctgaaacacaggcagggttaattrttattaattggaaacggattaatttttattttgatatttagggttggaacgtaatactgaagtttaaatttagggttgataagctgttctggcacctctaaataaaagcagcagtggcatcagtgagacctctacaaactgcagtgatgtgctgagctgggcggacagcaaaggtgaatcatgtgattgttccagcaaacaggttgtataaacgtgtcagtgtcccaggctgcattcattatctgctgcttactgcagagaaaatgctggtctttacatttttccaaagggactactttc

SEQ ID NO: 77980 - DNA, 600 bp, Chicken  19866894366974_1
cagacaaacccatgttactctgcgtccacaaaggtaccaaatccaaataaaggtgaatgtgtggataactttgaagtttccatattttcaaaaatatcacagagataagctggtagtatctctgccaagatgcttagggccaatgtgagggctgagtgttagagatatttcctctctggtacacataagctgaagcaagaaccagaagagttatttattgctcctgctttgagcaagtccaaacagaactaccaatctgttgattaaagtgtagaaagtgaaactgaagtgtaggcctgkgcttactctaatgaaatacttattgttttccctgtatttccttataccaacatcagttctagaaattgagccaatgtagaacagagcaacacttgtgtcttggcctgcagttctctggccaacataaagcagaaagttttggtagccttccaggatataaaacacaatacagtacttaatatttgtgggctaatacacaaaaaccgcttagaaactcacataaccacaggcagcaataacagtcttccagagctgcacactcagggttgatgtgctaggtgtaagcactgaacgtgwaca

SEQ ID NO: 77981 - DNA, 600 bp, Chicken  19866894366974_2
tgkgcttactctaatgaaatacttattgttttccctgtatttccttataccaacatcagttctagaaattgagccaatgtagaacagagcaacacttgtgtcttggcctgcagttctctggccaacataaagcagaaagttttggtagccttccaggatataaaacacaatacagtacttaatatttgtgggctaatacacaaaaaccgcttagaaactcacataaccacaggcagcaataacagtcttccagagctgcacactcagggttgatgtgctaggtgtaagcactgaacgtgwacacctgggtgcaaygtccagtcttcctggagagcaggaacacactaaccacagggttagcatagcacatttgcactaacccwcattaaaagacagaagtgctacatgccagtgacaaaagctgatgacaaccatatatacctttgtatgatcagaatgctgtgctctattttgtacagaacaagcaacaagatggaaaaaaagaagggaagctgttctctgctgcagattaaggggcacagtcttctttatttcttcacttagtggaattttacatttcaacatgagacacatgcagct

SEQ ID NO: 77982 - DNA, 600 bp, Chicken  19866894366974_3
gaaatacttattgttttccctgtatttccttataccaacatcagttctagaaattgagccaatgtagaacagagcaacacttgtgtcttggcctgcagttctctggccaacataaagcagaaagttttggtagccttccaggatataaaacacaatacagtacttaatatttgtgggctaatacacaaaaaccgcttagaaactcacataaccacaggcagcaataacagtcttccagagctgcacactcagggttgatgtgctaggtgtaagcactgaacgtgwacacctgggtgcaaygtccagtcttcctggagagcaggaacacactaaccacagggttagcatagcacatttgcactaacccwcattaaaagacagaagtgctacatgccagtgacaaaagctgatgacaaccatatatacctttgtatgatcagaatgctgtgctctattttgtacagaacaagcaacaagatggaaaaaaagaagggaagctgttctctgctgcagattaaggggcacagtcttctttatttcttcacttagtggaattttacatttcaacatgagacacatgcagcttgagttgcacaaggg

SEQ ID NO: 77983 - DNA, 600 bp, Chicken  19866894366974_4
acagagcaacacttgtgtcttggcctgcagttctctggccaacataaagcagaaagttttggtagccttccaggatataaaacacaatacagtacttaatatttgtgggctaatacacaaaaaccgcttagaaactcacataaccacaggcagcaataacagtcttccagagctgcacactcagggttgatgtgctaggtgtaagcactgaacgtgwacacctgggtgcaaygtccagtcttcctggagagcaggaacacactaaccacagggttagcatagcacatttgcactaacccwcattaaaagacagaagtgctacatgccagtgacaaaagctgatgacaaccatatatacctttgtatgatcagaatgctgtgctctattttgtacagaacaagcaacaagatggaaaaaaagaagggaagctgttctctgctgcagattaaggggcacagtcttctttatttcttcacttagtggaattttacatttcaacatgagacacatgcagcttgagttgcacaagggagctgtcagagcaatgcaattgtcgactcacctgcaggcgaatgagcagcaatgatagctggtaattt

SEQ ID NO: 77984 - DNA, 599 bp, Chicken  19866894366981_1
  misc_feature (1)..(83): n is any nucleotide
nnnnnnnnnnnnnnnnnnnnnnnnnnnnnnnnnnnnnnnnnnnnnnnnnnnnnnnnnnnnnnnnnnnnnnnnnnnnnnnnnnngcttctttcttctgggaagtgcatttcacgtgaacttcacgatagctcctttagctgctgactgctgaagagctgaatttttcttccagcttatctgttggtggcaaaatcactgagccaaactaagataagagcactctggttgtcatttggagtctctgggttactgtgacaaacttggtcagtatttgagttctgaacctttgtgttaaacttsataaagaatatggcaatttttaatgggttacccatacattttatcacccaaatagtggcactttccctgaaatacttctacataattgtcctgtgtgttcggagtgtaacatctgttgcatgatatcatgcaatggaatgtggtatggcttaatttaagttgatttgaaatgttaccattggactatagtagtgcctcagagggtgagaggttttttggagtgtgtgatggatacatagttggttaggagtggaagataccaggaaagatgaatttgcatttggactgcaaagaattaa

SEQ ID NO: 77985 - DNA, 522 bp, Chicken  19866894366983_1
actcgggatgtattatctccattagagctagttccaaacagagcatatcagtgacctatacctctgtccctctgaatcaatacattattgatgtgaaagatgtgaaagcattcaaaaactctgtttcttcatatccttgttttgagaggaaagaagttacttgggttgctctcagtgtggagggatttgtgataaattcattcatctgtttttagtgtagtctcaaactccagtctagagacatagacacaaaatatttttatgttctttgaagacgtccgtctgacttcctgcctcacrgaaatggaatgggtatctgagaaaacatgctgacagtgtcagcccaaggcatgaattttctaagaggtttctcaggacctctgacttctggcaggagcagtcctagcctgaaccatgagctatatctttttaataagcttatataatttcagagtgaagtttttcgtgggttttttttttttttgaattacataagccagactgaactcaaagcatttataa

SEQ ID NO: 77986 - DNA, 600 bp, Chicken  19866894366986_1
agtatctctgtgatgcccttctgaaaatatcagaaaagtaaaagatagccaaaacctttccccccccccccccccagaaatgcttgttttctgtattaggatgatgcatcttctgactgtttggcatgatcatctttcagcaggaaatacttttgccatgggatcatatctcaaagcctgtggtcttaaattagccagggtctacacaggaatgaaacttactgctgtggttctacatctctctgttaaaaagctacaaaaaataccaggttacttcagattaacattatttcagtaatrctraatcttctttttctataagcagaacataagcatgacaggaatttctgcttatcagtatctgacttgggaaatgacagtactgaaatgaacacacatttcagacttttctggaatcagactaacttccatttcaaggacaaaacatccttgaaccatgccagttagtgagaaaatatgtctttctggtcatttgattcagagttaatcctgcatctgttattcatattcaaagcatttggaaggagactcaaacagggagcaaagactccagcagactttctgaggctttttgtgatg

SEQ ID NO: 77987 - DNA, 600 bp, Chicken  19866894366986_2
atctctgtgatgcccttctgaaaatatcagaaaagtaaaagatagccaaaacctttccccccccccccccccagaaatgcttgttttctgtattaggatgatgcatcttctgactgtttggcatgatcatctttcagcaggaaatacttttgccatgggatcatatctcaaagcctgtggtcttaaattagccagggtctacacaggaatgaaacttactgctgtggttctacatctctctgttaaaaagctacaaaaaataccaggttacttcagattaacattatttcagtaatrctraatcttctttttctataagcagaacataagcatgacaggaatttctgcttatcagtatctgacttgggaaatgacagtactgaaatgaacacacatttcagacttttctggaatcagactaacttccatttcaaggacaaaacatccttgaaccatgccagttagtgagaaaatatgtctttctggtcatttgattcagagttaatcctgcatctgttattcatattcaaagcatttggaaggagactcaaacagggagcaaagactccagcagactttctgaggctttttgtgatggtc

SEQ ID NO: 77988 - DNA, 600 bp, Chicken  19866894366986_3
ggaatttctgcttatcagtatctgacttgggaaatgacagtactgaaatgaacacacatttcagacttttctggaatcagactaacttccatttcaaggacaaaacatccttgaaccatgccagttagtgagaaaatatgtctttctggtcatttgattcagagttaatcctgcatctgttattcatattcaaagcatttggaaggagactcaaacagggagcaaagactccagcagactttctgaggctttttgtgatggtcattatagaccaagaaaaatttcaagagccagagagarttttttttttttttaattaaagttagttaaattaatcaattcaagtttgtaataaggtacattcacatacagtatcatgttactggcttaacttatctatcaagtaccttcattttgagggaaaaagcctagagactttcacctacaactaaaattcaatcaacacaattttaggctttgatgtttatttgttaaatgaggttcctcaaggccttgttcttagcagtttcacagacaggaatgaattctctgttactaaggaaatgtagaaaaggatgatcctatagggaaaaaccaagg

SEQ ID NO: 77989 - DNA, 600 bp, Chicken  19866894366986_4; identical to SEQ ID NO: 77988

SEQ ID NO: 77990 - DNA, 600 bp, Chicken  19866894366986_5; identical to SEQ ID NO: 77988

SEQ ID NO: 77991 - DNA, 600 bp, Chicken  19866894366987_1
ttgacatacggaaacactctgtgttttcgagaccatactgttcagccaaccaaatcaaaattaaactgcaaagtttaaactttatgacagttcatgtatatgcacaaatttgagatttatggaggagtcagagaagttaaaaggttggaaaactactaattcagaaatcatgttcttaacagctagctttgccacacaaataatctgtcacaagatcctgtaatgttacatgaaggaaaacgttaacaagaagttcatgatatagaagagggaaacaattagagggggaaaaaatgaagraaaaaagtattcacaggataagcacgtctcacagcagaacaagacacagctgaagaagaggctttgtggagcttgaggaaagaacttaagtgacaaagctgaagaatttatttcacaaccctgtgttttacccaggtgaggcttagcatgaaatacagccactcaaccaacaaacatatcaccatcactaaactcagaaattcaccatctacttttatcatggtgggktacaagggaaagcatggtagaattgcgtagatgcttttcatggattctcatcctcttcctaaattagcctat

SEQ ID NO: 77992 - DNA, 600 bp, Chicken  19866894366987_2
catgaaggaaaacgttaacaagaagttcatgatatagaagagggaaacaattagagggggaaaaaatgaagraaaaaagtattcacaggataagcacgtctcacagcagaacaagacacagctgaagaagaggctttgtggagcttgaggaaagaacttaagtgacaaagctgaagaatttatttcacaaccctgtgttttacccaggtgaggcttagcatgaaatacagccactcaaccaacaaacatatcaccatcactaaactcagaaattcaccatctacttttatcatggtgggktacaagggaaagcatggtagaattgcgtagatgcttttcatggattctcatcctcttcctaaattagcctatttcaaattagaagaaaaaaggactaaggactatccaacgggagcacaaaacccaagyttgcaagaatgaaagaagtaagaccaactccaagcttgtgaagtaatctgtctcagccctcactccctacccatgctctcatgtccatcttgtcctgctagcatgaaggaccagagcacatgacaggcatgcacactgctgcracccagcacaatggaagcttcagaggac

SEQ ID NO: 77993 - DNA, 600 bp, Chicken  19866894366987_3
gaggctttgtggagcttgaggaaagaacttaagtgacaaagctgaagaatttatttcacaaccctgtgttttacccaggtgaggcttagcatgaaatacagccactcaaccaacaaacatatcaccatcactaaactcagaaattcaccatctacttttatcatggtgggktacaagggaaagcatggtagaattgcgtagatgcttttcatggattctcatcctcttcctaaattagcctatttcaaattagaagaaaaaaggactaaggactatccaacgggagcacaaaacccaagyttgcaagaatgaaagaagtaagaccaactccaagcttgtgaagtaatctgtctcagccctcactccctacccatgctctcatgtccatcttgtcctgctagcatgaaggaccagagcacatgacaggcatgcacactgctgcracccagcacaatggaagcttcagaggacatctgaatcacccctgctttgaacaacactcccrgtcccagaactttctaaaagaggcaacaacaaaaacaacaaaaattgcccagcactaatttctgacatttcagaatggaaattttaggcctgctt

SEQ ID NO: 77994 - DNA, 600 bp, Chicken  19866894366987_4
ttcaccatctacttttatcatggtgggktacaagggaaagcatggtagaattgcgtagatgcttttcatggattctcatcctcttcctaaattagcctatttcaaattagaagaaaaaaggactaaggactatccaacgggagcacaaaacccaagyttgcaagaatgaaagaagtaagaccaactccaagcttgtgaagtaatctgtctcagccctcactccctacccatgctctcatgtccatcttgtcctgctagcatgaaggaccagagcacatgacaggcatgcacactgctgcracccagcacaatggaagcttcagaggacatctgaatcacccctgctttgaacaacactcccrgtcccagaactttctaaaagaggcaacaacaaaaacaacaaaaattgcccagcactaatttctgacatttcagaatggaaattttaggcctgcttaggacactggttaagataattataagatttggcaagtacctgtaaaatccagcactgggtaacataactgctgaaacacttcaagtcagtggcagctattccatcaggactgactgaggcattctccttacaaaacactgtct

SEQ ID NO: 77995 - DNA, 561 bp, Chicken  19866894366987_5
ttttcatggattctcatcctcttcctaaattagcctatttcaaattagaagaaaaaaggactaaggactatccaacgggagcacaaaacccaagyttgcaagaatgaaagaagtaagaccaactccaagcttgtgaagtaatctgtctcagccctcactccctacccatgctctcatgtccatcttgtcctgctagcatgaaggaccagagcacatgacaggcatgcacactgctgcracccagcacaatggaagcttcagaggacatctgaatcacccctgctttgaacaacactcccrgtcccagaactttctaaaagaggcaacaacaaaaacaacaaaaattgcccagcactaatttctgacatttcagaatggaaattttaggcctgcttaggacactggttaagataattataagatttggcaagtacctgtaaaatccagcactgggtaacataactgctgaaacacttcaagtcagtggcagctattccatcaggactgactgaggcattctccttacaaaacactgtctcatagagcaatgtaatactgcta

SEQ ID NO: 77996 - DNA, 600 bp, Chicken  19866894366990_1
actcctgattatcaggacaagtgctggagtagctaatgcacaagcaggctcaattaaccctaattagttcagagtcatgctacaaaagacttaatgagcagttactgggtacaactaagaaaagaggcataaataatgtttggttggaagctgtgtttaagaatctcatgactaaatgacactaaaaagaaggagaatgcaaataactgttcttttaatgggggggcaaagcagcagcagtgctgtaaatacctttctgactcctgggtacacccagggctgtcaaataccatctaccarcttattttggggatcctatttttcctgatttrcaccttctttcatgtccagctccatcctttgaacaatccatttatcacacaagcacagaagttgctttaatttggcttcttatgccagaacmctccatctgcatggcctgattgcacccactttcatatggctgctactcctcttagcatcaaagcacacctggatctcacgaggtgaaaactgatccttacagcaggaagctgtttttcactctgctcaactgagtcatattccttcccatcagtggttgcctggcttcttcagtca

SEQ ID NO: 77997 - DNA, 600 bp, Chicken  19866894366990_2
ctaatgcacaagcaggctcaattaaccctaattagttcagagtcatgctacaaaagacttaatgagcagttactgggtacaactaagaaaagaggcataaataatgtttggttggaagctgtgtttaagaatctcatgactaaatgacactaaaaagaaggagaatgcaaataactgttcttttaatgggggggcaaagcagcagcagtgctgtaaatacctttctgactcctgggtacacccagggctgtcaaataccatctaccarcttattttggggatcctatttttcctgatttrcaccttctttcatgtccagctccatcctttgaacaatccatttatcacacaagcacagaagttgctttaatttggcttcttatgccagaacmctccatctgcatggcctgattgcacccactttcatatggctgctactcctcttagcatcaaagcacacctggatctcacgaggtgaaaactgatccttacagcaggaagctgtttttcactctgctcaactgagtcatattccttcccatcagtggttgcctggcttcttcagtcaacccatctattctttccaaaatgcctccattt

SEQ ID NO: 77998 - DNA, 600 bp, Chicken  19866894366990_3
aggcataaataatgtttggttggaagctgtgtttaagaatctcatgactaaatgacactaaaaagaaggagaatgcaaataactgttcttttaatgggggggcaaagcagcagcagtgctgtaaatacctttctgactcctgggtacacccagggctgtcaaataccatctaccarcttattttggggatcctatttttcctgatttrcaccttctttcatgtccagctccatcctttgaacaatccatttatcacacaagcacagaagttgctttaatttggcttcttatgccagaacmctccatctgcatggcctgattgcacccactttcatatggctgctactcctcttagcatcaaagcacacctggatctcacgaggtgaaaactgatccttacagcaggaagctgtttttcactctgctcaactgagtcatattccttcccatcagtggttgcctggcttcttcagtcaacccatctattctttccaaaatgcctccattttttaagcagttgtaagagcagaggttttctctgttgttttctatctgtcagaattcaggcttttaatcttttccctcaaggttggacgggtg

SEQ ID NO: 77999 - DNA, 600 bp, Chicken  19866894366993_1
atgccctggattcttgggttgtcttgaataccatctccaagcctgacctgcttacattgctcaggtactgctggcctgttgcttacttggctcctacttttccactgaggagtagccttgcttttcctaccacatgacatggtctggcagcaggagtatgataatgagatttcagcatgtacgtgcattttcttccttttaaatcagcagggacacagactataaccctaaagagatcccaaataggaagtaacaagtctaaagacttaagaatgctacagtaagcaagcttcatgctartattaatgctgactcctattggacctgtccaaaaaaagaagcccaagtaaaactcctggcatagccaaccaaaggatgcagagaacacagtaatttttttgcatcctctgtgttacactcaggtgattctggtcaatccgccctgatgcgcacatctttggtgcctgaaatataagagaatgagtgtgagtgaaacaacctgttaaaaaataacctttccctttcacaacattcacagtaagtttagttatttcctgtactaataccttgcattagttagattatgtatttgaaaaatag

SEQ ID NO: 78000 - DNA, 600 bp, Chicken  19866894366996_1
tttgcagcagattcatttttcatcctttcagcagcagcagctgttgcctctgactcagcctatccaaaaagtactaatatggaagtttggccaaggcagatctagtaatggcatgcacacaggagactgctttgtgctatgtgttgttctactttaatctgtgtggaaacctaacaggaaagcccaaagccttaggtggctgaagttgctcaagttgctctctgcattaggtctagctttgctatggtgtggtgggtaaggagagcaattgtgaaacttcaaggtttttttgttgttgcygtttgtttgttttacatcaaggaacactggagaatactttttcattctgccaagccatttttcttctgacttttggctctgttcrggatcattgaacaaatcagaatctaatatctgggcagatctgtttatcctttaggaatgactcatctctgccaggggacttgtcagaacaggcactcaaatcattcaccactggctgggtagaactgtaaagagttattagtcctgtctcgctggaaagcctctcaaacacacttcatattttcactctagatgtggttaggttagctgtaaata

SEQ ID NO: 78001 - DNA, 600 bp, Chicken  19866894366996_2
tttggccaaggcagatctagtaatggcatgcacacaggagactgctttgtgctatgtgttgttctactttaatctgtgtggaaacctaacaggaaagcccaaagccttaggtggctgaagttgctcaagttgctctctgcattaggtctagctttgctatggtgtggtgggtaaggagagcaattgtgaaacttcaaggtttttttgttgttgcygtttgtttgttttacatcaaggaacactggagaatactttttcattctgccaagccatttttcttctgacttttggctctgttcrggatcattgaacaaatcagaatctaatatctgggcagatctgtttatcctttaggaatgactcatctctgccaggggacttgtcagaacaggcactcaaatcattcaccactggctgggtagaactgtaaagagttattagtcctgtctcgctggaaagcctctcaaacacacttcatattttcactctagatgtggttaggttagctgtaaatattaggtcatattttctacaggctttacaggagctcaatattgcaagcaagttctctgcgcagtctggcaggaaagcaaaaatagc

SEQ ID NO: 78002 - DNA, 600 bp, Chicken  19866894366997_1
gaatacacatagtaaatacttttcttctgaaacacacaatttactgtacagttttcaaatcaaaacaagcagtcacaggaattcctaatggaattgcaagaaccactggagagtaaaacatgcactgtcttgtattagtgaaaagggtcactcatccaaagatcttgaactctgcacagtgtgaaaatgccagccagaacaagtgtacagggacatattataatcccatctcagtcaggagcaaaactctcatggatttcagggggactaatacctggctagtctttttttaagatcttrcatgacataatgcaaattatgcyatatgtgtatagttattaaagtgatacaagtaaatttaatcattgcacattaatatatcgtcaaattgtcatttgagagaattcagtacagccagtttaactgaactggctactactagacaagtaaatctatctgcaaaaaaatatttatgaagaagtctgaaatctgaattccctatcgcctgtttttttacaaaattgtataaatgaggaaatagcaccaaakacctattagtaatagttatttcctaattgcagtgggaagcatcctgcatgt

SEQ ID NO: 78003 - DNA, 600 bp, Chicken  19866894366997_2
cttctgaaacacacaatttactgtacagttttcaaatcaaaacaagcagtcacaggaattcctaatggaattgcaagaaccactggagagtaaaacatgcactgtcttgtattagtgaaaagggtcactcatccaaagatcttgaactctgcacagtgtgaaaatgccagccagaacaagtgtacagggacatattataatcccatctcagtcaggagcaaaactctcatggatttcagggggactaatacctggctagtctttttttaagatcttrcatgacataatgcaaattatgcyatatgtgtatagttattaaagtgatacaagtaaatttaatcattgcacattaatatatcgtcaaattgtcatttgagagaattcagtacagccagtttaactgaactggctactactagacaagtaaatctatctgcaaaaaaatatttatgaagaagtctgaaatctgaattccctatcgcctgtttttttacaaaattgtataaatgaggaaatagcaccaaakacctattagtaatagttatttcctaattgcagtgggaagcatcctgcatgttcaaataaatattgttaactctg

SEQ ID NO: 78004 - DNA, 600 bp, Chicken  19866894366997_3
tcatggatttcagggggactaatacctggctagtctttttttaagatcttrcatgacataatgcaaattatgcyatatgtgtatagttattaaagtgatacaagtaaatttaatcattgcacattaatatatcgtcaaattgtcatttgagagaattcagtacagccagtttaactgaactggctactactagacaagtaaatctatctgcaaaaaaatatttatgaagaagtctgaaatctgaattccctatcgcctgtttttttacaaaattgtataaatgaggaaatagcaccaaakacctattagtaatagttatttcctaattgcagtgggaagcatcctgcatgttcaaataaatattgttaactctgacctcttggtttgccaggactgataaggcaattgtttgacctatatgaagcgtatacagtatgcatggaccgaaagcagcaggaaaacaggaaacaataaatcagaaattagagcactgattgttgtagctaattacatcagagttctgcttaatttctcactctgtcattctaacctgattttcttgccaacagactttgcaaattgctggtgtcccatacatac

SEQ ID NO: 78005 - DNA, 599 bp, Chicken  19866894367008_1
  misc_feature (1)..(46): n is any nucleotide
nnnnnnnnnnnnnnnnnnnnnnnnnnnnnnnnnnnnnnnnnnnnnnttttggatattagttcaacctggttatcctgttattaccatggcagttgcaagtgttatctttgggttccagagcatggatgaatacccatgaatgattttttagagctgccctatcactaatgaaatcccccactcataattagtttcatctaaagaatatgaagtttcctcgctagacatttacgttttttattcctgatttataacgcacttacagatgcaggagttaacagattagattgctgaatgccyggagtgatcacacagacaatggaaacaaagcatcttcttaatcaatcatcttgctagctatttagctggctttgctcctaagagatcactggacagaggccattactcaaaataggtggaaaaaaaaaatagaaagaaagaaagaaaataacagagaagaaagtgcattcattataattttctaactatgcactcatgcatagtccgggctgcttattcaacatgaatgacattatttgtatttcttgaagagtccctaatcaggttctgtactgctgaaagcctttgtttgagaggta

SEQ ID NO: 78006 - DNA, 600 bp, Chicken  19866894367032_1
caccaggcaaccagctgcctacattgcacttgcactgcaacttgcactttacagtccctcgaaacacctcttatgtccttctgacttcacatgaaattcttcgccatctgttttatggctggataccgtgcccttgtattcccctgctcacacaacctgctgtctgcaagggatatgaatgagtttccatttttctgaagcacttattcagcttctccttcagaaaacagtgtatatgatctagtcaatggtgtagcccataaatatactccccgagcctgggaaatcaagaggaattgyaagctgggctatggacttcatcaccccaaacctasttagactcttcatacttctcttggaggctgggaatgatagaacaaacattttattcaatattttgttaacctatgaatgatagctgaaggcaacagcatcactgctacataattctaatgactcctaccacttgattagtgctcaaatttgcagagatgacaactgcacgggcgcttgaagcaatggctttactaayagaaacacatttaccactcctttcaaaatgaaacaatcctaccctctgattccccaactataccctga

SEQ ID NO: 78007 - DNA, 600 bp, Chicken  19866894367032_2
tgcaacttgcactttacagtccctcgaaacacctcttatgtccttctgacttcacatgaaattcttcgccatctgttttatggctggataccgtgcccttgtattcccctgctcacacaacctgctgtctgcaagggatatgaatgagtttccatttttctgaagcacttattcagcttctccttcagaaaacagtgtatatgatctagtcaatggtgtagcccataaatatactccccgagcctgggaaatcaagaggaattgyaagctgggctatggacttcatcaccccaaacctasttagactcttcatacttctcttggaggctgggaatgatagaacaaacattttattcaatattttgttaacctatgaatgatagctgaaggcaacagcatcactgctacataattctaatgactcctaccacttgattagtgctcaaatttgcagagatgacaactgcacgggcgcttgaagcaatggctttactaayagaaacacatttaccactcctttcaaaatgaaacaatcctaccctctgattccccaactataccctgatatttcgaaagagaccgggattggcaatccagctg

SEQ ID NO: 78008 - DNA, 493 bp, Chicken  19866894367032_3
tatatgatctagtcaatggtgtagcccataaatatactccccgagcctgggaaatcaagaggaattgyaagctgggctatggacttcatcaccccaaacctasttagactcttcatacttctcttggaggctgggaatgatagaacaaacattttattcaatattttgttaacctatgaatgatagctgaaggcaacagcatcactgctacataattctaatgactcctaccacttgattagtgctcaaatttgcagagatgacaactgcacgggcgcttgaagcaatggctttactaayagaaacacatttaccactcctttcaaaatgaaacaatcctaccctctgattccccaactataccctgatatttcgaaagagaccgggattggcaatccagctgtaactacattcaagagaaatgccaactagatgagcatggaactataaagtaaaccaaatatagttactgacacaatttaagacattccat

SEQ ID NO: 78009 - DNA, 600 bp, Chicken  19866894367041_1
gtctctcagctaattagcatactacttcagttcaatgtaacttcctaaactgatctcacccatccagttttttccctttcagccccttcaggacctgatccgcttttctctcttcattaatggtgaatgacattccagattcagcttctctctactaagctacttcttccaatgctaaccattcacatacatgccctactgcttagagtacagactttcttagaccctatttccctttagaccttgcattgagctgatcatatgctctttctggaagcattaagtcttacatttacatamttcctctcctacttgcaaactaatattgaggaattttcatgtaacaagttttgtcaccaagccaattcctactccatgcaattatttttatttgttgaaaaacaaaccaacmccaccagaagttggggctccctttccatatctgccttatcatttaacttactatatgtggcagatcaaccatgccataaattctttactgaacctcaaatgttgggaagtatttttctatcactcctgaacaggccattgaacactgtgctgggtttttctatagccagaagacagctgaccatactg

SEQ ID NO: 78010 - DNA, 556 bp, Chicken  19866894367041_2
ttcattaatggtgaatgacattccagattcagcttctctctactaagctacttcttccaatgctaaccattcacatacatgccctactgcttagagtacagactttcttagaccctatttccctttagaccttgcattgagctgatcatatgctctttctggaagcattaagtcttacatttacatamttcctctcctacttgcaaactaatattgaggaattttcatgtaacaagttttgtcaccaagccaattcctactccatgcaattatttttatttgttgaaaaacaaaccaacmccaccagaagttggggctccctttccatatctgccttatcatttaacttactatatgtggcagatcaaccatgccataaattctttactgaacctcaaatgttgggaagtatttttctatcactcctgaacaggccattgaacactgtgctgggtttttctatagccagaagacagctgaccatactgtactgtgaacttgcagtgacttgttaaagtttttgtagcagacgaatgacaattttcattacaaacct

SEQ ID NO: 78011 - DNA, 600 bp, Chicken  19866894367045_1
cctgaagggagcttacaggcaggaggaggaccaattttttacacagttggacagtgatagggcaaaggggaatggctttaaactaacagaggggagatttaggttagatgttaggaaggaattttttactcagagggcagtgaagcatggaatgggatgcccagagctgtgggtgctgcatctctggaagtacttaagggccaggctgggtgggatcctgggaagcctgacctgtggttggcaaccctgccataggccttaggcagggctgttggaactggatgacccttcaaggtcccytccaaccaaagccattctatgactctgactgcttacacaaggttgcaaaactgattcccccagttccagcatcctgaacatcttcaagatgaaacrtgcttgtgtaaactcagacacttcagaaaagtgagcatgtccaaacccactccatttctctacgtacctcmagcctgctggaagatgacttcctaaacatttctccctctctttgcacctttaggccatcactactcccagcaacaacactacatgcgactttgcaccaacctgtcgcagttggagcctttcttgtcctcttct

SEQ ID NO: 78012 - DNA, 529 bp, Chicken  19866894367045_2
atttaggttagatgttaggaaggaattttttactcagagggcagtgaagcatggaatgggatgcccagagctgtgggtgctgcatctctggaagtacttaagggccaggctgggtgggatcctgggaagcctgacctgtggttggcaaccctgccataggccttaggcagggctgttggaactggatgacccttcaaggtcccytccaaccaaagccattctatgactctgactgcttacacaaggttgcaaaactgattcccccagttccagcatcctgaacatcttcaagatgaaacrtgcttgtgtaaactcagacacttcagaaaagtgagcatgtccaaacccactccatttctctacgtacctcmagcctgctggaagatgacttcctaaacatttctccctctctttgcacctttaggccatcactactcccagcaacaacactacatgcgactttgcaccaacctgtcgcagttggagcctttcttgtcctcttctccccagcttgcagcatccacaaaca

SEQ ID NO: 78013 - DNA, 458 bp, Chicken  19866894367045_3
tgtgggtgctgcatctctggaagtacttaagggccaggctgggtgggatcctgggaagcctgacctgtggttggcaaccctgccataggccttaggcagggctgttggaactggatgacccttcaaggtcccytccaaccaaagccattctatgactctgactgcttacacaaggttgcaaaactgattcccccagttccagcatcctgaacatcttcaagatgaaacrtgcttgtgtaaactcagacacttcagaaaagtgagcatgtccaaacccactccatttctctacgtacctcmagcctgctggaagatgacttcctaaacatttctccctctctttgcacctttaggccatcactactcccagcaacaacactacatgcgactttgcaccaacctgtcgcagttggagcctttcttgtcctcttctccccagcttgcagcatccacaaaca

SEQ ID NO: 78014 - DNA, 600 bp, Chicken  19866894367047_1
cttggctatttgaaggctatccacagccttggagagcctctgccctgtcccagtgtgattatagaattatagaatctcagaatggtttgggttgaagggaccttaaagatcacccagtcccaacttgctgtgatgggctggttgcccccccaccagatcaggctgcccaaggccccatccaacctggccttgagcacctccagggatgcggcatccacagcatctctgggcatcccaatgagcagtggctctactggctgccaacctccctatcaccatgcaaacccttagcccaagatraaaaaaaaaawggaaatgggagaaaaatgctccattacatccagggataattttgtcatctctgagtgttgctgcagtgctgagaggatttgtggcagatgctcacagccttccttcagtgaaaaccacttcattttctgctatttaaacatgtcgtccccaccaacacagagcaaaatgagcattcccaggatgcactgactgagaggcagccatttctgaacacaaactgcctctgtgtccatcagcctggagtttctgctgcactgtagtgtttagatttgaaataaagcctatagc

SEQ ID NO: 78015 - DNA, 600 bp, Chicken  19866894367047_2
gaaggctatccacagccttggagagcctctgccctgtcccagtgtgattatagaattatagaatctcagaatggtttgggttgaagggaccttaaagatcacccagtcccaacttgctgtgatgggctggttgcccccccaccagatcaggctgcccaaggccccatccaacctggccttgagcacctccagggatgcggcatccacagcatctctgggcatcccaatgagcagtggctctactggctgccaacctccctatcaccatgcaaacccttagcccaagatraaaaaaaaaawggaaatgggagaaaaatgctccattacatccagggataattttgtcatctctgagtgttgctgcagtgctgagaggatttgtggcagatgctcacagccttccttcagtgaaaaccacttcattttctgctatttaaacatgtcgtccccaccaacacagagcaaaatgagcattcccaggatgcactgactgagaggcagccatttctgaacacaaactgcctctgtgtccatcagcctggagtttctgctgcactgtagtgtttagatttgaaataaagcctatagccagtggtgact

SEQ ID NO: 78016 - DNA, 512 bp, Chicken  19866894367047_3
ctatttaaacatgtcgtccccaccaacacagagcaaaatgagcattcccaggatgcactgactgagaggcagccatttctgaacacaaactgcctctgtgtccatcagcctggagtttctgctgcactgtagtgtttagatttgaaataaagcctatagccagtggtgacttgaagcagatagagccttatggtttcagtgttagcttatcttcacataaaatgtgtaatttccacaactgctgtgaatattgcccttctacccaacagaatctgttctcagtagatgaaggccagctcycacttgaagcctccttgtggccagcctgcagtcaaggcccyttgtaaccctttcccagaccacacctgagcaagggctgaggttcccacagccacacaggggagcctggggcttgcagtaccctgggctccatggccgagttttgacccacaagtcagaccatgtgcttttttgtcttgcaaattcattttgatttcaggtgtcaccattta

SEQ ID NO: 78017 - DNA, 471 bp, Chicken  19866894367047_4
gcattcccaggatgcactgactgagaggcagccatttctgaacacaaactgcctctgtgtccatcagcctggagtttctgctgcactgtagtgtttagatttgaaataaagcctatagccagtggtgacttgaagcagatagagccttatggtttcagtgttagcttatcttcacataaaatgtgtaatttccacaactgctgtgaatattgcccttctacccaacagaatctgttctcagtagatgaaggccagctcycacttgaagcctccttgtggccagcctgcagtcaaggcccyttgtaaccctttcccagaccacacctgagcaagggctgaggttcccacagccacacaggggagcctggggcttgcagtaccctgggctccatggccgagttttgacccacaagtcagaccatgtgcttttttgtcttgcaaattcattttgatttcaggtgtcaccattta

SEQ ID NO: 78018 - DNA, 599 bp, Chicken  19866894367048_1
  misc_feature (1)..(141): n is any nucleotide
nnnnnnnnnnnnnnnnnnnnnnnnnnnnnnnnnnnnnnnnnnnnnnnnnnnnnnnnnnnnnnnnnnnnnnnnnnnnnnnnnnnnnnnnnnnnnnnnnnnnnnnnnnnnnnnnnnnnnnnnnnnnnnnnnnnnnnnnnnnnnaaaaagtggaatcacttgaaatgttgtactctcttctttttggatttaaagctggtttgtgacctgctggtttcctgtgaacacgtttattggctgaaagttttactcgatattttgatggaatatcagaactgtgagttcttctacctgatgactctytgtgttgcacaaatatcatgggttgtatggcaagatgcatttttttttctgattggatggataaaacatcttatataaggaaaaaaaaaacaaacccaaacaccactagtgaaagaggtgctcctggcacaaacacttggaggactactcattcattcttaaaactcatgccattttcccacacaagagttgtcgcatacttggcagcaatccaagtcctcgtaaataacataaaacataatctaggaataaaagcaactgagcacaggtcttttagctgcagaacctctacagatcag

SEQ ID NO: 78019 - DNA, 600 bp, Chicken  19866894367050_1
gtccacttaataccatgaactgtgaagggaacaggaaaactcatcaggcacttcaaaaacacaccaggaaacatcaaaagtcatcccaaaagaacagcagaaagcctttcctgctgatttcactcagagctgatagagcaacagcaatggttactggtttaccattctcttggtttcctatccatagacttaccaaatgcattcaaaatcccaaaagcaacagcagagtacttgtgcttcactgaagtgaaacaatgcattctaaggaacgctttggaatctcttctggtccttctctamgcagtgttaggggcaccctatgggcacaccctgtgtgtgcagtagggctcmatgaaggctttgccaggtgctggctgttggcagcactgttcccatggtgttccccttcctggcagtttaggcttgaaaagctttttttcagtgcctttgttatactccagaaaagcagattccttctgaaatctaaaatccctaaccacgaagcactgccaaaggtaagagaaccactgacttcacctctccattcacagatccctgcatagcaaagtcctcaaaccaatggcatggaatgctgccagc

SEQ ID NO: 78020 - DNA, 600 bp, Chicken  19866894367050_2
ttcaaaaacacaccaggaaacatcaaaagtcatcccaaaagaacagcagaaagcctttcctgctgatttcactcagagctgatagagcaacagcaatggttactggtttaccattctcttggtttcctatccatagacttaccaaatgcattcaaaatcccaaaagcaacagcagagtacttgtgcttcactgaagtgaaacaatgcattctaaggaacgctttggaatctcttctggtccttctctamgcagtgttaggggcaccctatgggcacaccctgtgtgtgcagtagggctcmatgaaggctttgccaggtgctggctgttggcagcactgttcccatggtgttccccttcctggcagtttaggcttgaaaagctttttttcagtgcctttgttatactccagaaaagcagattccttctgaaatctaaaatccctaaccacgaagcactgccaaaggtaagagaaccactgacttcacctctccattcacagatccctgcatagcaaagtcctcaaaccaatggcatggaatgctgccagcatgcagggccgatcgtcacctcacagccaggaagacctgcaggctctccat

SEQ ID NO: 78021 - DNA, 600 bp, Chicken  19866894367058_1
ctggtgtcgtttccgtggaaataaataggaggcattactttcggagagacccgtgcatttgtaccagccatgccatccgtcttctctgccgggccttttgggctcgtagtgattaatccatcactcgtagttctgaattagcagacagcaattaggcgttcattcctgcagaggataacgagcgatgcttaacctttgcctcgcgtcgcggcgttcccgtacaaagtgcttcccccgttagcattctgcccgtagactccgtgcaagtacttgcaaatggattcgcagacacctgcctgygtttcacrcgtttttcgctttaaaaagagatgaaaaaccgctgcccggcggagcggcccttcgcgatgaaccgccgccgcgccgcactcactcgaagcgccgcgccgccragtgccgytcgggaggtgcaatggcgcccccctgtggccgccggccgcacctgcagcggtgccgctccgcgctgcccttcgctcccggcgggcgctgcgttcgcggctttgatttttaagcgagaggctgaaaaagagaaagttggaaacacctttccattttaagcgttttctattcatttctacaaag

SEQ ID NO: 78022 - DNA, 600 bp, Chicken  19866894367058_2
gtttccgtggaaataaataggaggcattactttcggagagacccgtgcatttgtaccagccatgccatccgtcttctctgccgggccttttgggctcgtagtgattaatccatcactcgtagttctgaattagcagacagcaattaggcgttcattcctgcagaggataacgagcgatgcttaacctttgcctcgcgtcgcggcgttcccgtacaaagtgcttcccccgttagcattctgcccgtagactccgtgcaagtacttgcaaatggattcgcagacacctgcctgygtttcacrcgtttttcgctttaaaaagagatgaaaaaccgctgcccggcggagcggcccttcgcgatgaaccgccgccgcgccgcactcactcgaagcgccgcgccgccragtgccgytcgggaggtgcaatggcgcccccctgtggccgccggccgcacctgcagcggtgccgctccgcgctgcccttcgctcccggcgggcgctgcgttcgcggctttgatttttaagcgagaggctgaaaaagagaaagttggaaacacctttccattttaagcgttttctattcatttctacaaagaaaatgca

SEQ ID NO: 78023 - DNA, 584 bp, Chicken  19866894367058_3
gattaatccatcactcgtagttctgaattagcagacagcaattaggcgttcattcctgcagaggataacgagcgatgcttaacctttgcctcgcgtcgcggcgttcccgtacaaagtgcttcccccgttagcattctgcccgtagactccgtgcaagtacttgcaaatggattcgcagacacctgcctgygtttcacrcgtttttcgctttaaaaagagatgaaaaaccgctgcccggcggagcggcccttcgcgatgaaccgccgccgcgccgcactcactcgaagcgccgcgccgccragtgccgytcgggaggtgcaatggcgcccccctgtggccgccggccgcacctgcagcggtgccgctccgcgctgcccttcgctcccggcgggcgctgcgttcgcggctttgatttttaagcgagaggctgaaaaagagaaagttggaaacacctttccattttaagcgttttctattcatttctacaaagaaaatgcacggaacgccgagaatttacacattttagggcgcgaatgttttagacctacagcgacgaaaccaccacaaaggcagcagaaagcccg

SEQ ID NO: 78024 - DNA, 576 bp, Chicken  19866894367058_4
catcactcgtagttctgaattagcagacagcaattaggcgttcattcctgcagaggataacgagcgatgcttaacctttgcctcgcgtcgcggcgttcccgtacaaagtgcttcccccgttagcattctgcccgtagactccgtgcaagtacttgcaaatggattcgcagacacctgcctgygtttcacrcgtttttcgctttaaaaagagatgaaaaaccgctgcccggcggagcggcccttcgcgatgaaccgccgccgcgccgcactcactcgaagcgccgcgccgccragtgccgytcgggaggtgcaatggcgcccccctgtggccgccggccgcacctgcagcggtgccgctccgcgctgcccttcgctcccggcgggcgctgcgttcgcggctttgatttttaagcgagaggctgaaaaagagaaagttggaaacacctttccattttaagcgttttctattcatttctacaaagaaaatgcacggaacgccgagaatttacacattttagggcgcgaatgttttagacctacagcgacgaaaccaccacaaaggcagcagaaagcccg

SEQ ID NO: 78025 - DNA, 600 bp, Chicken  19866894367061_1
tccttgtaaattagcagtgcacctgaaaagatcctcagagaatcatttccaccagtcagtggtacggagccatcaaaatggctcctcagagaggtggcaacaacagctcacaccccctaggatccaggcaccgggtgctgcaaaggttgaccccgtgctggccagccaaatgaagagaggtgcctcaccaccccagggctgtcttgggaaggaggcatagttccacgggctgtggcctggtcctcttcctccttgaaacggcagctgagagctgctgtgtactgggatcaggcacaggcytaaaagctgggcgggtgatgtagtgggacatgggtgactgggaaaagcatgagctgactgtagaacacagctgctgaactctgtgtgcatatttgtatgtgtgtatgtgtatggagggaggtggaacaacaggtttgtgactgcagtgagatccttcatccctggccaatgccaggcgtcatgtaaaagcctcagctgttgatgttacttagacataaggctttgcccctgtttcagtttctcccacagactgctattcaaagttcagtttaaagaaacagatgaacaatatggcgtttg

SEQ ID NO: 78026 - DNA, 485 bp, Chicken  19866894367061_2
gaaaagcatgagctgactgtagaacacagctgctgaactctgtgtgcatatttgtatgtgtgtatgtgtatggagggaggtggaacaacaggtttgtgactgcagtgagatccttcatccctggccaatgccaggcgtcatgtaaaagcctcagctgttgatgttacttagacataaggctttgcccctgtttcagtttctcccacagactgctattcaaagttcagtttaaagaaacagatgaacaatatggcgtttgctctggtggagaataatttatttcccagatcccaacacatytctcctggtgcccgtagaacaaaacccacagcaaggtgctcgttgtgggcagtgtctcttagtgacagaaactcacttctgccacgtgattttcatgtcatgctgaataacattctacagagttgcaatgagtaacttctgcttacatcatgctgtgtggaggaaaagaaccaggttatatactg

SEQ ID NO: 78027 - DNA, 599 bp, Chicken  19866894367063_1
  misc_feature (1)..(151): n is any nucleotide
nnnnnnnnnnnnnnnnnnnnnnnnnnnnnnnnnnnnnnnnnnnnnnnnnnnnnnnnnnnnnnnnnnnnnnnnnnnnnnnnnnnnnnnnnnnnnnnnnnnnnnnnnnnnnnnnnnnnnnnnnnnnnnnnnnnnnnnnnnnnnnnnnnnnnnnatgcttttgtgccttctttgaggaatgagtttatttcaggctttatgtgaagcttttcatatttcatgaaagcaaaatatacccagtttggccagtgagccatttaatgcttctcagctattattcctggataatttttcctgagtttraaggagaataagctcctgattatgatcatgttattcaggacaatcttagtaaacttgtctaaaagcaggttagctttttctccaataagccttgcatttgtttccttgcctatctatctcctgcattacaggagatacagtarcatcaattgagtactgtaccattttccttctcattgcacagctgaaatgttgcataaggtcatctttctgttgatgtttcttgtggaggtcagagtagaaacatttgtattctttcagctgtagctctctctactgtgcagcctgatcttacgtga

SEQ ID NO: 78028 - DNA, 599 bp, Chicken  19866894367063_2
  misc_feature (1)..(8): n is any nucleotide
nnnnnnnnatgcttttgtgccttctttgaggaatgagtttatttcaggctttatgtgaagcttttcatatttcatgaaagcaaaatatacccagtttggccagtgagccatttaatgcttctcagctattattcctggataatttttcctgagtttraaggagaataagctcctgattatgatcatgttattcaggacaatcttagtaaacttgtctaaaagcaggttagctttttctccaataagccttgcatttgtttccttgcctatctatctcctgcattacaggagatacagtarcatcaattgagtactgtaccattttccttctcattgcacagctgaaatgttgcataaggtcatctttctgttgatgtttcttgtggaggtcagagtagaaacatttgtattctttcagctgtagctctctctactgtgcagcctgatcttacgtgatttgtaggttctagtcagtccagtgtcagaatcctgtgatgagtgtttcctcaacacagaaataatagacctatggctgtttctatctttgcagcctcatgaagacatcagtgtggtgtcttggaatcgacaggtgcaacata

SEQ ID NO: 78029 - DNA, 600 bp, Chicken  19866894367064_1
ctccagcatcaaagcacatctctctcttttttcctaactgcacaaacaagcctcttacctattcctgaagtacagagtgcccttgttttacatttgtgttcacatctcatttatgagaagcttcctgcattttaatcctagctgtcttcctcaatcaactttcaactagtcctccaacttctattggttagaagttttttggctgtacagagaaagcagaaattcttgcttctcatagtaaggtattgctagacttgctctatgtcaaacattctaggaaagttacttgcagaaagaagwggctcttggccatttgtgccattgccaggttgcattgctgaattttcatcttctgctgtttttgtcccgagatgcattgctcaggaatggcctggcacccagaagttgcaacccagctagttctttcctctgaggacgaccgcttgccagtgatccaaatatgggacttacgttttgctacctcacctttgagccagctggaaggacatactaggtgagggcctgcttgtcatgttgccttttcaaggatctccatctttctgatgccagcatctgtgagacttgctttggagtaatgag

SEQ ID NO: 78030 - DNA, 600 bp, Chicken  19866894367064_2
cagctagttctttcctctgaggacgaccgcttgccagtgatccaaatatgggacttacgttttgctacctcacctttgagccagctggaaggacatactaggtgagggcctgcttgtcatgttgccttttcaaggatctccatctttctgatgccagcatctgtgagacttgctttggagtaatgaggttatttattttagactgttttgtttcacagatgaatctggttgaagcagatatgaaaaccggagtttctgatcttaaaccaacatgcaccagcacttcttattgacagagtrggagagaggactgagtatgaagtgccactgatttctttctggtctgttttaggggagttctgtctgtttcctggtgccaggctgaccctgaattgctgttgagtagcgccaaagataaccgaatcttgtgctggaacccaagtacaggggaggtacttaacagctataagtacaccttatcttcttcaaacaaaactgtgtgctatattgtgtgtttgccccccaccttttttttttttttgtatttgtgtggactgccaatgtgttttcctccagtatgtcttctgcactattcttttt

SEQ ID NO: 78031 - DNA, 600 bp, Chicken  19866894367070_1
cttgctgcataattcaggaccttttgttcgtattaagaacacattaaggcttgcaattctaaactgctaacaggtctgtggtcacttgacagtgataaagagtgacaattaacatgttgtacagtttaaacatctcaccatttgacttccatttgtcatttccatttctcatgtgtcctttcaccctcatgccagtgacctgacattgggtccactcactgatagcctttcttctcaccagggctgttgtgagctaacccttgtcactttcccaagaaaaaccagacaggctcacatggycttttagwgcttgtagagattttctgcaacatccttgggcagttaacratagaaataataacgattcttatcagctgggtgaatcacaatggtcttcttgctggtatgaaaaacctattgaaaaaacatgttgctttgactagggcaactaaattatttattaatgcttggattttcatacacaaaatctaacacggcacctcatgccttatactttttccccctttttctggctggttcaaagaactaacatccttcctgatatttacctttcccataagtcagtaaggccttattctt

SEQ ID NO: 78032 - DNA, 600 bp, Chicken  19866894367070_2
ataattcaggaccttttgttcgtattaagaacacattaaggcttgcaattctaaactgctaacaggtctgtggtcacttgacagtgataaagagtgacaattaacatgttgtacagtttaaacatctcaccatttgacttccatttgtcatttccatttctcatgtgtcctttcaccctcatgccagtgacctgacattgggtccactcactgatagcctttcttctcaccagggctgttgtgagctaacccttgtcactttcccaagaaaaaccagacaggctcacatggycttttagwgcttgtagagattttctgcaacatccttgggcagttaacratagaaataataacgattcttatcagctgggtgaatcacaatggtcttcttgctggtatgaaaaacctattgaaaaaacatgttgctttgactagggcaactaaattatttattaatgcttggattttcatacacaaaatctaacacggcacctcatgccttatactttttccccctttttctggctggttcaaagaactaacatccttcctgatatttacctttcccataagtcagtaaggccttattcttcacaatga

SEQ ID NO: 78033 - DNA, 600 bp, Chicken  19866894367070_3
gcttgcaattctaaactgctaacaggtctgtggtcacttgacagtgataaagagtgacaattaacatgttgtacagtttaaacatctcaccatttgacttccatttgtcatttccatttctcatgtgtcctttcaccctcatgccagtgacctgacattgggtccactcactgatagcctttcttctcaccagggctgttgtgagctaacccttgtcactttcccaagaaaaaccagacaggctcacatggycttttagwgcttgtagagattttctgcaacatccttgggcagttaacratagaaataataacgattcttatcagctgggtgaatcacaatggtcttcttgctggtatgaaaaacctattgaaaaaacatgttgctttgactagggcaactaaattatttattaatgcttggattttcatacacaaaatctaacacggcacctcatgccttatactttttccccctttttctggctggttcaaagaactaacatccttcctgatatttacctttcccataagtcagtaaggccttattcttcacaatgagagaggatttggttatgtcctctaaatctcattttctaaa

SEQ ID NO: 78034 - DNA, 599 bp, Chicken  19866894367075_1
  misc_feature (1)..(163): n is any nucleotide
nnnnnnnnnnnnnnnnnnnnnnnnnnnnnnnnnnnnnnnnnnnnnnnnnnnnnnnnnnnnnnnnnnnnnnnnnnnnnnnnnnnnnnnnnnnnnnnnnnnnnnnnnnnnnnnnnnnnnnnnnnnnnnnnnnnnnnnnnnnnnnnnnnnnnnnnnnnnnnnnnnntccatccatccacccattcatccatccatccccaggccatccattcttccccatccatctgccctttcctacctacccttctccactcaccctttcccattcattgcttcctccccacccatctttctccacccacmaccttttggaccctccatctttgatttccccacatttctccctcataaaacatcccagaggagcactggggacgtgcgcagagccatgagggttggtgacaacctctgtacgtagcactgcctggacatgtgatggagggggacttggggtgggggtggctgctgtggtgggtgatctgcagtagtgtcagtgacacatcagacctggcaccccgggaccgtgccctaatgaccgtgccctaatgaccgtgccttcctgcagggtcctctctgaggctgttttccctgcaggggtactg

SEQ ID NO: 78035 - DNA, 600 bp, Chicken  19866894367078_1
ggttacagaccccagctgtagcctgagctgggctgagagccaaggcctggcagtcagaagtcactgcaattgagtgcaacacatatagctcgctggcaagagggctgaagcaaaggccccggggaaggaaggctggctatgacagggaagccttgtggtaaggtgtgcacgcactgcaggtgatgggaggaaaggtttgacgcccacctcacagggggctgctttgtgccaagcatacaggcagccacactcagagggccgaaggcagatgcagctctgcagctgcttgtgaaggaggcygctcgggcaaggcacacacagcaccggcttgtctgctgcttcatttttccctcagtttatcacaacaagaacctttagccatacaaagtgcactcaaagaagcaaacacatctgcccttgtaggctgataaactttcaccaaatagataagaggcacagcttcagataagtgtatgttaatgaatgtaaatgcattgcatgtggcgacacgaatcctgctacaacaaacacacagaaacatcagcaaaacacccctctggtgtataggcacactcaaacacgctgcttcttgttctactg

SEQ ID NO: 78036 - DNA, 600 bp, Chicken  19866894367081_1
ttcagaagtttaaatatggagtcatctgcctaaagttagaaagccactctggaaataccaactgtgcaattatgaaagcatgggtgctctgaaaacacattcttaatgtcctttttttttttcatattgagtggaattatttttgcactgaagcctggggatttaaaaacaaaaacaaacaaacaaaaaacacctttttgtttgtttgtttacctcctgagaatatatttaagcaccactgagtatcaaacactggaatttgcaagcacaatgcatatttctaacaaaggataggaaaasggaatggatatagtttatttgtaaattaaataaatatgtttcctccatgcccttgagagctagctgatttatcagttaataaaataatcatacaccacggacttgtgcttccaatttattttaaaaagaaataacattgcatttttgacatatatgaatacaaatgtaacactagaggaaactttgtgagtagcaatgtatatatatcaccaatcctgcatgaattaccttacttgctttttctttgctatttatgagattgattctttataaacacttacttcttcaacaattcctgac

SEQ ID NO: 78037 - DNA, 594 bp, Chicken  19866894367087_1
aattagaaggcaatataaaccttcaaggcattttatgacagcaaactattaagtgtctttagtcagaggtactcaactgtgaaacatctaagaaagaacattaaggcaaagtataccctatttggaaaacatgctacaaaatccgtatgttctccatacctttcccatttttgtaaagacaataggctaagccatggtgtatcatactaactcgtgcaccagtaatatgtatataaccttttcttgtggagtatctcaccttagaaatggccataactatcacattatagaaaacagcarattctaatgtatatgagttacagcaaatattaagtatattctacaaataaaaataaataaaaacacataacaataagtaaaaatgtaaatgtttcatgaaaagtgttcagtttttattaagtcattctgaaaatcctgcaacattttaagtgtacattttcatacaggatttcaacatctgatttgtcgtttattcattcaaagaaatacttgacaatgaatctgaatagttgtatgaaaaactactgaagtgttatagagacaaaaatttcagcattctttatccatttaacg

SEQ ID NO: 78038 - DNA, 600 bp, Chicken  19866894367088_1
cccaactgtgttagctgtctccccctcacccctgctggttccacagatggtgccgtctatgtgctggggggaatgggagcagacacctctccgcaggcgctggtccgcgtctatgagccagcgaaggaccactggcagccgctgccctccatgcccacaccatgctatggggcctctgccttcctgcagggcaacaagatctttgtcttgggtaggtaggcgagcccagaagtctgcccagatgggtgcattgccccagggccctggcacatcccagggctgcgccttgcagacccttckgctggktatcgctggtggtgctggctgcctctcaggtgccaccagccctcgcatctcatccacacgcagggggccggcaaggcaagctgcccgtcaccgcctttgaggcttttgacctggagacaaagagctggacgcgctaccccagcgtgcccagccgccgcgccttcgcctcctgcgccatggccgacagcatcttcttcagcctgggggggctgcagcagccagggccacacaacttctactcccgaccrcacttcgttaacaccgtggagatgttcgaccccgtgcagggtgagg

SEQ ID NO: 78039 - DNA, 600 bp, Chicken  19866894367088_2
tgtgttagctgtctccccctcacccctgctggttccacagatggtgccgtctatgtgctggggggaatgggagcagacacctctccgcaggcgctggtccgcgtctatgagccagcgaaggaccactggcagccgctgccctccatgcccacaccatgctatggggcctctgccttcctgcagggcaacaagatctttgtcttgggtaggtaggcgagcccagaagtctgcccagatgggtgcattgccccagggccctggcacatcccagggctgcgccttgcagacccttckgctggktatcgctggtggtgctggctgcctctcaggtgccaccagccctcgcatctcatccacacgcagggggccggcaaggcaagctgcccgtcaccgcctttgaggcttttgacctggagacaaagagctggacgcgctaccccagcgtgcccagccgccgcgccttcgcctcctgcgccatggccgacagcatcttcttcagcctgggggggctgcagcagccagggccacacaacttctactcccgaccrcacttcgttaacaccgtggagatgttcgaccccgtgcagggtgaggcccaga

SEQ ID NO: 78040 - DNA, 600 bp, Chicken  19866894367088_3
cccagggccctggcacatcccagggctgcgccttgcagacccttckgctggktatcgctggtggtgctggctgcctctcaggtgccaccagccctcgcatctcatccacacgcagggggccggcaaggcaagctgcccgtcaccgcctttgaggcttttgacctggagacaaagagctggacgcgctaccccagcgtgcccagccgccgcgccttcgcctcctgcgccatggccgacagcatcttcttcagcctgggggggctgcagcagccagggccacacaacttctactcccgaccrcacttcgttaacaccgtggagatgttcgaccccgtgcagggtgaggcccagatggggaaggagtgctgcctgtgtagtggagcgcgcagtgatgctgacagcttctccccggcaggtgcatggtgcaagcccagccgtgccatccgcatgagagagaagagagctgacttcgttgccggctgcctgggaggatacgtggtggccatgggtggccttggtaatgctgactggtgtggctgtggtggggaatgggctctcagtgcatgaaaacctgtccttcctgggctccatctacacaga

SEQ ID NO: 78041 - DNA, 600 bp, Chicken  19866894367088_4
agccgtgccatccgcatgagagagaagagagctgacttcgttgccggctgcctgggaggatacgtggtggccatgggtggccttggtaatgctgactggtgtggctgtggtggggaatgggctctcagtgcatgaaaacctgtccttcctgggctccatctacacagagctgcagcattgcatcctgctcccaggagagttggggaaaggtcagcactgctgctcagcagcaagaaagctgcagagagggccgcccagggcagctgcagcaccccagccttgtgggctctgggcacactygagatgccacagtgccmgccacaggcagaaccatggtgcagcattggtgccagcagccctctcccaggggatgctgttaatcctgctgagcccctgcataattacttcagtgcagcagagcccagggtgcacrgagagggctgaggccatgccatctcttgcagggaaccagtcgtgccccctggactcagtggaagggttcagcctcacgcggaggaggtgggagctgctgcctcccatgcccactggccgctgctcctgctccagctgcccagcccctgacctgctcttcgtcatcgg

SEQ ID NO: 78042 - DNA, 600 bp, Chicken  19866894367088_5
gagagagaagagagctgacttcgttgccggctgcctgggaggatacgtggtggccatgggtggccttggtaatgctgactggtgtggctgtggtggggaatgggctctcagtgcatgaaaacctgtccttcctgggctccatctacacagagctgcagcattgcatcctgctcccaggagagttggggaaaggtcagcactgctgctcagcagcaagaaagctgcagagagggccgcccagggcagctgcagcaccccagccttgtgggctctgggcacactygagatgccacagtgccmgccacaggcagaaccatggtgcagcattggtgccagcagccctctcccaggggatgctgttaatcctgctgagcccctgcataattacttcagtgcagcagagcccagggtgcacrgagagggctgaggccatgccatctcttgcagggaaccagtcgtgccccctggactcagtggaagggttcagcctcacgcggaggaggtgggagctgctgcctcccatgcccactggccgctgctcctgctccagctgcccagcccctgacctgctcttcgtcatcggtggggtggaccagggcc

SEQ ID NO: 78043 - DNA, 600 bp, Chicken  19866894367088_6
gaaaacctgtccttcctgggctccatctacacagagctgcagcattgcatcctgctcccaggagagttggggaaaggtcagcactgctgctcagcagcaagaaagctgcagagagggccgcccagggcagctgcagcaccccagccttgtgggctctgggcacactygagatgccacagtgccmgccacaggcagaaccatggtgcagcattggtgccagcagccctctcccaggggatgctgttaatcctgctgagcccctgcataattacttcagtgcagcagagcccagggtgcacrgagagggctgaggccatgccatctcttgcagggaaccagtcgtgccccctggactcagtggaagggttcagcctcacgcggaggaggtgggagctgctgcctcccatgcccactggccgctgctcctgctccagctgcccagcccctgacctgctcttcgtcatcggtggggtggaccagggccccagtgggagctgtcgaggctctctgcctgcgtgatgcaccctgacaatggctctacagcctggggagcagccccagcagagcatcaagtgcctgaagacggggacagggtgcgca

SEQ ID NO: 78044 - DNA, 600 bp, Chicken  19866894367097_1
tccttcctttttgattatgaaaccgtatgacagtttcaaaaatcagcaagctatgactcacagatcaccgctgagtaaatgcagatacagattcaaattcaattcagtgagtcaccattcatagtcagcataataacctatcactcaggtacaggaaagagaaaaagctggtccccactgtcagctaaagatgagcttaagctcttgttttcccagactgacagcatgtaggacagttataattagatttcttctttcagaggcctggattggaaaccttcttactaactgcacagtacrcaaaaccccgtggggtccygtgccacttcttgcatgtgactcaagtagtccaaaaataaaaataaaaataaatgtggcattaaatgcagaacgtgtgcttattctagccttgtggcttcatcctgtacagtaaygtagccccagtcttttctctkgcaagactgaaacttaaataaatgcaaggcaactggctcttttctatgcaagcttatttttttcagtgctggagaatgtaagagaaactaggaaatcagaataacaggccaacgctgaagagccctgtagagactggtaaaggac

SEQ ID NO: 78045 - DNA, 600 bp, Chicken  19866894367097_2
aaaccgtatgacagtttcaaaaatcagcaagctatgactcacagatcaccgctgagtaaatgcagatacagattcaaattcaattcagtgagtcaccattcatagtcagcataataacctatcactcaggtacaggaaagagaaaaagctggtccccactgtcagctaaagatgagcttaagctcttgttttcccagactgacagcatgtaggacagttataattagatttcttctttcagaggcctggattggaaaccttcttactaactgcacagtacrcaaaaccccgtggggtccygtgccacttcttgcatgtgactcaagtagtccaaaaataaaaataaaaataaatgtggcattaaatgcagaacgtgtgcttattctagccttgtggcttcatcctgtacagtaaygtagccccagtcttttctctkgcaagactgaaacttaaataaatgcaaggcaactggctcttttctatgcaagcttatttttttcagtgctggagaatgtaagagaaactaggaaatcagaataacaggccaacgctgaagagccctgtagagactggtaaaggacaatttcacagccgctagct

SEQ ID NO: 78046 - DNA, 600 bp, Chicken  19866894367097_3
aacctatcactcaggtacaggaaagagaaaaagctggtccccactgtcagctaaagatgagcttaagctcttgttttcccagactgacagcatgtaggacagttataattagatttcttctttcagaggcctggattggaaaccttcttactaactgcacagtacrcaaaaccccgtggggtccygtgccacttcttgcatgtgactcaagtagtccaaaaataaaaataaaaataaatgtggcattaaatgcagaacgtgtgcttattctagccttgtggcttcatcctgtacagtaaygtagccccagtcttttctctkgcaagactgaaacttaaataaatgcaaggcaactggctcttttctatgcaagcttatttttttcagtgctggagaatgtaagagaaactaggaaatcagaataacaggccaacgctgaagagccctgtagagactggtaaaggacaatttcacagccgctagctccactcaatgaagaaaacacttaaaaataaatgaccatcaactcccatatcattactgaatcatctacatgaaatttggtgcactatggataaaagtaagtatgggaacacacta

SEQ ID NO: 78047 - DNA, 600 bp, Chicken  19866894367097_4
aaagagaaaaagctggtccccactgtcagctaaagatgagcttaagctcttgttttcccagactgacagcatgtaggacagttataattagatttcttctttcagaggcctggattggaaaccttcttactaactgcacagtacrcaaaaccccgtggggtccygtgccacttcttgcatgtgactcaagtagtccaaaaataaaaataaaaataaatgtggcattaaatgcagaacgtgtgcttattctagccttgtggcttcatcctgtacagtaaygtagccccagtcttttctctkgcaagactgaaacttaaataaatgcaaggcaactggctcttttctatgcaagcttatttttttcagtgctggagaatgtaagagaaactaggaaatcagaataacaggccaacgctgaagagccctgtagagactggtaaaggacaatttcacagccgctagctccactcaatgaagaaaacacttaaaaataaatgaccatcaactcccatatcattactgaatcatctacatgaaatttggtgcactatggataaaagtaagtatgggaacacactatttcttccattaaaagttacc

SEQ ID NO: 78048 - DNA, 600 bp, Chicken  19866894367102_1
tggacactccacttccaacttaggtttcatttctgtctcagagaaggaaagcaataactaatgcacgtgaattagtattctgcagcattatggcacctgaagtgtatttataaacaggaaggtatcattaaaaaattagaatagctcccaagctcagactgagtacgtaattagggttgattatgaaactctgccaccatgctaaccttaccaggagagactgctgaaccgctacccagagctctcttctagtccttgggaagaaggggacaaacctgctgttcccttcccccaggcctytgaggacagagctcagactgcaaagggtcagaattaatttcatgtgggcccacagatctgttctgggattcaacctttgtcttcatctggtgaaaggtgccagctaatgagatctgcttcagggttaggcaggggagcacagaggggtttattaatatagcaggaagaacgtggcattgaatctgagctgcactgcttcctctacttactcgaagcayagcaggcactttgtgacagatttcactgttttctgggcactgagcactgccttcatttgatggagaattgtgattaaaaatg

SEQ ID NO: 78049 - DNA, 600 bp, Chicken  19866894367102_2
gactgctgaaccgctacccagagctctcttctagtccttgggaagaaggggacaaacctgctgttcccttcccccaggcctytgaggacagagctcagactgcaaagggtcagaattaatttcatgtgggcccacagatctgttctgggattcaacctttgtcttcatctggtgaaaggtgccagctaatgagatctgcttcagggttaggcaggggagcacagaggggtttattaatatagcaggaagaacgtggcattgaatctgagctgcactgcttcctctacttactcgaagcayagcaggcactttgtgacagatttcactgttttctgggcactgagcactgccttcatttgatggagaattgtgattaaaaatgataatattaccatttttgcaaaccatatgatttttaacattttttgccacataatgtttttatagaaaataaaatgactattaagaattgtaatagccataagaagcctccccagcttcaacaagggagaaatctttcttttttactagtatcactgtgaagtaaagctaaggctatgagagatgctagtgtcaggcatagtaaaaactgagcatact

SEQ ID NO: 78050 - DNA, 600 bp, Chicken  19866894367102_3
ggatacggggtcaaaacctctcctctggaaagaaagccttctacagtcaaaacatctggattgattattttacagttcattgctctacagtggtctgaattcacattaaaaccctttctggcattatttttttgctcccatacatgagcatgctttgctttggtaccctctgatgacagctctggaaatttacagctctgagcaacacttctaatgccctgactcagaagggccttcttgtcagcactctccttggtttacaaggacaaggtgaggacaaatctgctcttctgaatctgyttctccctgccacaactaaatgcaacactacagaacaagcgagtggaaacaattaaggaaccaattgcattaaggaagacaagcactgacttgattttatagaggagaactgcctttagatcatttttactaaccatttttaccattgaaaacagcacagacagcacatatacaaaaccagtgctgatcactgtacccccccccccaaacacgttgggaagaaaccaacaaatccccacgcagcctacagacttgttagagcaggaactatcctcagcacggcaagctgaagtcattggt

SEQ ID NO: 78051 - DNA, 600 bp, Chicken  19866894367106_1
tgattttctttgatttatggaattaaactttgggagccaaaccagaggttctttgtgcttaggcagtggtgcacagaactgggacagatcactctgctttgcaacatcacacccccactttccatcccacccttgaacaaaaaatgtgagctggattctgatctttctcagctgtttggatagtcttttcaagactgttgcagatgattggaagcaggagaattgcacaagttatgcttaagatatccagacttgttcttgtacacagcagtacaaactaacttccattttagatcagtsgagtgtagaaacgtgtcatgtcagtatttgtgtcttgtactttgcctgagactgtgaataggacttgcctacagcaaaggttttagtcttgtgctgaatttacatctgtactgaatattctgaattgcagtttactttggactgtgaattcttcaaagaggattccagaacaatacagctccctgtaacaaatcttttttcctttggtaagtgtatcgtgttacttttggaaaaaatatgaaacagatgtcactaacactaaaactaataattttttccccaaaattccaatggggattt

SEQ ID NO: 78052 - DNA, 600 bp, Chicken  19866894367106_2
acaaactaacttccattttagatcagtsgagtgtagaaacgtgtcatgtcagtatttgtgtcttgtactttgcctgagactgtgaataggacttgcctacagcaaaggttttagtcttgtgctgaatttacatctgtactgaatattctgaattgcagtttactttggactgtgaattcttcaaagaggattccagaacaatacagctccctgtaacaaatcttttttcctttggtaagtgtatcgtgttacttttggaaaaaatatgaaacagatgtcactaacactaaaactaataastttttccccaaaattccaatggggatttttgttagttgggttttttgttagttggttaatttgtttttttgggagaggaattgtttttatgaaagttaatgcagctcctgctagcaacaaacaaataagaaatgtgcttttttgactaagagatgtagaagcacgtaaatgtcttgggggaaaacggatctgaagatgtastgagttctcaaattattggtatctaatattttgaaataatatattctttacaggactttcttcaagcaaaattctattaaattcatctggcttatttta

SEQ ID NO: 78053 - DNA, 535 bp, Chicken  19866894367106_3
tacagctccctgtaacaaatcttttttcctttggtaagtgtatcgtgttacttttggaaaaaatatgaaacagatgtcactaacactaaaactaataattttttccccaaaattccaatggggatttttgttagttgggttttttgttagttggttaatttgtttttttgggagaggaattgtttttatgaaagttaatgcagctcctgctagcaacaaacaaataagaaatgtgcttttttgactaagagatgtagaagcacgtaaatgtcttgggggaaaacggatctgaagatgtastgagttctcaaattattggtatctaatattttgaaataatatattctttacaggactttcttcaagcaaaattctattaaattcatctggcttattttacaatgtacagcttcagcacttcaaccaagtaagaatagtacttactttttaagctaatataaccactgtttggagactaagttgtttttttttgatgttttaggtatatcaagctttcaaaatacatgtagagagc

SEQ ID NO: 78054 - DNA, 599 bp, Chicken  19866894367129_1
  misc_feature (1)..(88): n is any nucleotide
nnnnnnnnnnnnnnnnnnnnnnnnnnnnnnnnnnnnnnnnnnnnnnnnnnnnnnnnnnnnnnnnnnnnnnnnnnnnnnnnnnnnnnnngacattctgtacaaattttccttcggttggggtggggagaatcttgtgttcagcagcgagaacacatatgaacacttaattataatgtaagaaaatccactcaaaaaagtttccagaagacattgcataaactacgtgtaaaagccaagtgcaaggcaatggactcacactatttcactatggctcagcaaaattcttgactgaagaaatgygacccttccctactggttcagggatagcttctagtttgggtggaaaaagggaaatgagggatgggagagtgcttctttctctccycagaagcacacctaaaacatgactacatccggcacccagttctagaattatttccacagtacatcactgacatttatatatgccaagactgaacatgctcattatgactgtttattagacaaaaggctaccagtagaatgataattaatctgttggcaatgattgaaattcttgatgaaatgaagcatgagctgttgaaaaataattgaatata

SEQ ID NO: 78055 - DNA, 599 bp, Chicken  19866894367129_2
  misc_feature (1)..(3): n is any nucleotide
nnngacattctgtacaaattttccttcggttggggtggggagaatcttgtgttcagcagcgagaacacatatgaacacttaattataatgtaagaaaatccactcaaaaaagtttccagaagacattgcataaactacgtgtaaaagccaagtgcaaggcaatggactcacactatttcactatggctcagcaaaattcttgactgaagaaatgygacccttccctactggttcagggatagcttctagtttgggtggaaaaagggaaatgagggatgggagagtgcttctttctctccycagaagcacacctaaaacatgactacatccggcacccagttctagaattatttccacagtacatcactgacatttatatatgccaagactgaacatgctcattatgactgtttattagacaaaaggctaccagtagaatgataattaatctgttggcaatgattgaaattcttgatgaaatgaagcatgagctgttgaaaaataattgaatataatcaaaatccatgaatcatccatagaaagcacgtttattaaaacagaattcataactaagatattttgtctttttttttccttcc

SEQ ID NO: 78056 - DNA, 599 bp, Chicken  19866894367138_1
  misc_feature (1)..(90): n is any nucleotide
nnnnnnnnnnnnnnnnnnnnnnnnnnnnnnnnnnnnnnnnnnnnnnnnnnnnnnnnnnnnnnnnnnnnnnnnnnnnnnnnnnnnnnnnnnaaggaaggggcagggaacactgagagtgatggcatttgtcttccctaaaaaccattactcatgaggagagctgctttcctggaagtgggtgaacatctgcctgccgatggaagtaacaaatgaattccttgtttgctttgtttgtgcctgcagcttttgctctactagaaccctgtctttacttcaacccgtaagttctcacactattayctgtacaattctgtcctccatcctacctggggagagtgagtgaacaccagggtggtgccaagctggattaagccactaccaccagtgagtgctgttgggtacaatcactaggttaggtaagcctttggcattagacaatgcagctgtttttagtttcatcacagtgctcaggcctttggttgaattttcaggattaggagatatytgtagtaccacaaactgggaagcagtgtgctgagcattgcaatagaacaaaaagtgrtctctgctttgtagatggtatttgtacttttaagaag

SEQ ID NO: 78057 - DNA, 600 bp, Chicken  19866894367138_2
acaaatgaattccttgtttgctttgtttgtgcctgcagcttttgctctactagaaccctgtctttacttcaacccgtaagttctcacactattayctgtacaattctgtcctccatcctacctggggagagtgagtgaacaccagggtggtgccaagctggattaagccactaccaccagtgagtgctgttgggtacaatcactaggttaggtaagcctttggcattagacaatgcagctgtttttagtttcatcacagtgctcaggcctttggttgaattttcaggattaggagatatytgtagtaccacaaactgggaagcagtgtgctgagcattgcaatagaacaaaaagtgrtctctgctttgtagatggtatttgtacttttaagaagcagttaagaaacagcacttttacgtcagctctcagtttaatttattctaagactgaaatgaaatagaraawatatatttatgcttcctgttctgaaaatgctgcccagttatctttctgaatagcacagaataatttgcattcttttcttctttattgctttccaaaatgttgttcaactgcacacagtaaagatgagaaactgtg

SEQ ID NO: 78058 - DNA, 600 bp, Chicken  19866894367138_3
ctgtctttacttcaacccgtaagttctcacactattayctgtacaattctgtcctccatcctacctggggagagtgagtgaacaccagggtggtgccaagctggattaagccactaccaccagtgagtgctgttgggtacaatcactaggttaggtaagcctttggcattagacaatgcagctgtttttagtttcatcacagtgctcaggcctttggttgaattttcaggattaggagatatytgtagtaccacaaactgggaagcagtgtgctgagcattgcaatagaacaaaaagtgrtctctgctttgtagatggtatttgtacttttaagaagcagttaagaaacagcacttttacgtcagctctcagtttaatttattctaagactgaaatgaaatagaraawatatatttatgcttcctgttctgaaaatgctgcccagttatctttctgaatagcacagaataatttgcattcttttcttctttattgctttccaaaatgttgttcaactgcacacagtaaagatgagaaactgtggggtttgttttccctcttctgttccttctcagcagagaggtatttccactgtgatct

SEQ ID NO: 78059 - DNA, 600 bp, Chicken  19866894367138_4
ttaagccactaccaccagtgagtgctgttgggtacaatcactaggttaggtaagcctttggcattagacaatgcagctgtttttagtttcatcacagtgctcaggcctttggttgaattttcaggattaggagatatytgtagtaccacaaactgggaagcagtgtgctgagcattgcaatagaacaaaaagtgrtctctgctttgtagatggtatttgtacttttaagaagcagttaagaaacagcacttttacgtcagctctcagtttaatttattctaagactgaaatgaaatagaraawatatatttatgcttcctgttctgaaaatgctgcccagttatctttctgaatagcacagaataatttgcattcttttcttctttattgctttccaaaatgttgttcaactgcacacagtaaagatgagaaactgtggggtttgttttccctcttctgttccttctcagcagagaggtatttccactgtgatctgtctttacttagctaagttttttgtmtcccacctcactctcctggaacacacacagttttgttcattagaggtgacaagggacagaagtaggaccctgctggtat

SEQ ID NO: 78060 - DNA, 600 bp, Chicken  19866894367138_5
agccactaccaccagtgagtgctgttgggtacaatcactaggttaggtaagcctttggcattagacaatgcagctgtttttagtttcatcacagtgctcaggcctttggttgaattttcaggattaggagatatytgtagtaccacaaactgggaagcagtgtgctgagcattgcaatagaacaaaaagtgrtctctgctttgtagatggtatttgtacttttaagaagcagttaagaaacagcacttttacgtcagctctcagtttaatttattctaagactgaaatgaaatagaraawatatatttatgcttcctgttctgaaaatgctgcccagttatctttctgaatagcacagaataatttgcattcttttcttctttattgctttccaaaatgttgttcaactgcacacagtaaagatgagaaactgtggggtttgttttccctcttctgttccttctcagcagagaggtatttccactgtgatctgtctttacttagctaagttttttgtmtcccacctcactctcctggaacacacacagttttgttcattagaggtgacaagggacagaagtaggaccctgctggtattag

SEQ ID NO: 78061 - DNA, 600 bp, Chicken  19866894367138_6
cttttaagaagcagttaagaaacagcacttttacgtcagctctcagtttaatttattctaagactgaaatgaaatagaraawatatatttatgcttcctgttctgaaaatgctgcccagttatctttctgaatagcacagaataatttgcattcttttcttctttattgctttccaaaatgttgttcaactgcacacagtaaagatgagaaactgtggggtttgttttccctcttctgttccttctcagcagagaggtatttccactgtgatctgtctttacttagctaagttttttgtmtcccacctcactctcctggaacacacacagttttgttcattagaggtgacaagggacagaagtaggaccctgctggtattagctttggcagtagagggttcagttttgcagatacattaaaaatctctgaggagaactgcaaaagggatacaagcgtgactttatgaataactgaatttaggccaccctgaatgaacattgcctctaccatttggttactctttctaggattgcctaaaattctttgattaaaataaggaaaaaaaaatgccacatttcaatttctctgtgctgatttac

SEQ ID NO: 78062 - DNA, 600 bp, Chicken  19866894367140_1
cactggctgtcagacttctcatgcctctcacatacctgaacctttaggcaggggtctggggtgcaaaatctcttccagtgcaagagtggaacaagtcagagactgcctcatgaggctgaatgtgtacaagtctatggagccagacaacatgcgtcccagggtcatgaaggaactggctgatgtggtggccagcccactctccatcgtatttgaaaagtcatggctatcaggcagtctcctggtgattggaaatagtgaaacatcactcccattttcaagaaaggaagaaagacaaactcrcagaactacaggctggtgaacctcacctctgtgcctgggaagatcatggagcagatctggaaactaagttggtccacacgtgagatgaggaaatgatcgaggcaaccagctcagcttcaccacgtgcagatcatgcctgaccaatttcatggtcttctatgatggacaaaggaagggcaactgatgttgtccaacaggacttktgcaaggcctttaacatggtcccacaccacatccttatctctgaattggagatgcatggatttgaaggttggaatatttagtgaataaagactgggg

SEQ ID NO: 78063 - DNA, 600 bp, Chicken  19866894367140_2
tcgtatttgaaaagtcatggctatcaggcagtctcctggtgattggaaatagtgaaacatcactcccattttcaagaaaggaagaaagacaaactcrcagaactacaggctggtgaacctcacctctgtgcctgggaagatcatggagcagatctggaaactaagttggtccacacgtgagatgaggaaatgatcgaggcaaccagctcagcttcaccacgtgcagatcatgcctgaccaatttcatggtcttctatgatggacaaaggaagggcaactgatgttgtccaacaggacttktgcaaggcctttaacatggtcccacaccacatccttatctctgaattggagatgcatggatttgaaggttggaatatttagtgaataaagactggggggatggttgcagtcaaagagttgtggtcaatgggtctatgtccaggtggaggccagccatgggtggtgtcccccagggatctgtcttgggaatggtgttcttcagcatctttgtcagtgacatacacagtgggatcacttgcaccctcagcaagtttgctgatggttcagttgacacaatagaaggatgacacccagagggac

SEQ ID NO: 78064 - DNA, 600 bp, Chicken  19866894367143_1
acacaaacattatattatgtgcttgcctgaaatatcctggaaaccacagattccagggaaaagggatttctgatttgaagccattagcattggtcgctacaaatcttcatgcctggatttccccataacttcagaaataaatatttccttcttactttttcatgtgtattaatttagccatagataaactgatcatgatctatcctgaatactggtgcagccattacataaaacagctgattaagtgcctgtacagattaacttttagagataaaatttgcctcaggtacttttcatatwtatattgttagttttcatttgcacttcttttttgtagatgcatcaaatcagtcctaataaacagaaggggggctgccaaaagcatctactataaatcagatttgccattcttgtgtcatatacttctccatgtatgatgtaacattttctcggaactatcattacttctgttagatttttgttttacttttaaaaattctcagtaaacatgaatggtaatgaaaacaatttgtgatggttaacaacaaaaataacacaaattattctcccttgtatgaacgtcatgattttctaacatga

SEQ ID NO: 78065 - DNA, 474 bp, Chicken  19866894367148_1
gacctcttcaagaccactctggcatggctgtcacctcccttaccatcagatgagggccagcatcacaggtgtggtgtccacaggtcacctgtgcacaccaggacacccgctcacctggtgatgagggcacacagggaccctacagccacagcgtgctttgcgctgccccagccaacatagtcaaaagccactgggaaggggctggtggtgtccaggaggtggtagggcatcatcagggtgagggcagcagacactccaaagtatgccaggaagcagatgaggagggaaaggacgatgccsatggggatggatctctgtgggtccctcacttcttcccctggggaggacaaggtgaggctggggagtggatctgcagcatctgcatgggtgcagaagattcactaccatagtggaattcacatctccatctcccctggctcacctgtggtagcaatgcagtcaaacccaacaaaa

SEQ ID NO: 78066 - DNA, 600 bp, Chicken  19866894367164_1
ttctctactttaataagaaattgtgattcaatgacccagaaaatccctgatgtgaacttatatcaactagcaataaaagaaaagaaacatggaatcactttgttagattatctcaaacatttccacatatctaacaaagaagaaaaaatatgttggaaagaaaagaattaatcaaaatgtatcagtaaaggacagaatcttaggctaagatacttggtgacacacacctcaattttcctgaagcttcttgtagttacaagtttttcaagatcttaacaaacctgtagctgtcagcaagtsgataatgtgggaaacttaaaaagagtttatgatctgagatactttcatattattaacattttattaatatggttgtcgttacttcacrgtgagtaatatttactgagctgtatgtttatatagacactatcgttatctctgacatgcaagaaaaacagataaataaatatatattttttacagtgtataattaacaaacccgtagcagagcacaaaagaaaatcacttttcatattacttggtaggcgttgtacacrtgctttttgttgagtttgatccatcagtatgaaagtgtacaca

SEQ ID NO: 78067 - DNA, 600 bp, Chicken  19866894367164_2
atggaatcactttgttagattatctcaaacatttccacatatctaacaaagaagaaaaaatatgttggaaagaaaagaattaatcaaaatgtatcagtaaaggacagaatcttaggctaagatacttggtgacacacacctcaattttcctgaagcttcttgtagttacaagtttttcaagatcttaacaaacctgtagctgtcagcaagtagataatgtgggaaacttaaaaagagtttatgatctgagatactttcatattattaacattttattaatatggttgtcgttacttcacrgtgagtaatatttactgagctgtatgtttatatagacactatcgttatctctgacatgcaagaaaaacagataaataaatatatattttttacagtgtataattaacaaacccgtagcagagcacaaaagaaaatcacttttcatattacttggtaggcgttgtacacrtgctttttgttgagtttgatccatcagtatgaaagtgtacacattttaactgcctttatgccatgtaaatcttaaccaataaaacaaaacttcaggcttcaagaaaattgcagcatgtatcagatttaatc

SEQ ID NO: 78068 - DNA, 600 bp, Chicken  19866894367164_3
aagtttttcaagatcttaacaaacctgtagctgtcagcaagtagataatgtgggaaacttaaaaagagtttatgatctgagatactttcatattattaacattttattaatatggttgtcgttacttcacrgtgagtaatatttactgagctgtatgtttatatagacactatcgttatctctgacatgcaagaaaaacagataaataaatatatattttttacagtgtataattaacaaacccgtagcagagcacaaaagaaaatcacttttcatattacttggtaggcgttgtacacrtgctttttgttgagtttgatccatcagtatgaaagtgtacacattttaactgcctttatgccatgtaaatcttaaccaataaaacaaaacttcaggcttcaagaaaattgcagcatgtatcagatttaatctaccagaaaaataaatgcagaactatgctttgagttataaatgcaagaagtaatagtttctagtgttcaatagacagtggggatatatttatttttctatcctgattcttcatagtttagttccttctgcttggttagtactaacatcaactttgaaaacatgaacaaa

SEQ ID NO: 78069 - DNA, 600 bp, Chicken  19866894367166_1
aaaattcaagaattaatacagtttgtagcacgtgcgaaaaaaacatggctcttaactacctcaaacgtttgccgaggtttggcccaggctttacctgttgagcaatatgagagagctgagctgcctgcagtgctgtaccttgtacggccgagggctgggagggcggcacggagctgctgctgctcttgtgcacctcttccataatcagctacaagagaaggaacaagttaaatcgcttaacaataactcggaacaggaggtgggagcccgagcgatgcttcagaaactctcagcgcgtgstgcttttagcctcacttgcacctttttaattagttcaattagcacgccgcctccccaggcctcagarcagcacaaagcagtgtctgcgatggcyccaacgccgctgagttctgatcgctggccccgcctcaggcccagtgctgaactttgctgttaaatacatttaccgaatatcccgggttttggtgaaaatgcaccatyggaccatgagatgtacgaagaaaacccaaacaaagcagcttttaaataaaataatttccccaacgttccgccaagctcgcagccaaatccatcttccag

SEQ ID NO: 78070 - DNA, 600 bp, Chicken  19866894367166_2
tttgccgaggtttggcccaggctttacctgttgagcaatatgagagagctgagctgcctgcagtgctgtaccttgtacggccgagggctgggagggcggcacggagctgctgctgctcttgtgcacctcttccataatcagctacaagagaaggaacaagttaaatcgcttaacaataactcggaacaggaggtgggagcccgagcgatgcttcagaaactctcagcgcgtgstgcttttagcctcacttgcacctttttaattagttcaattagcacgccgcctccccaggcctcagarcagcacaaagcagtgtctgcgatggcyccaacgccgctgagttctgatcgctggccccgcctcaggcccagtgctgaactttgctgttaaatacatttaccgaatatcccgggttttggtgaaaatgcaccatyggaccatgagatgtacgaagaaaacccaaacaaagcagcttttaaataaaataatttccccaacgttccgccaagctcgcagccaaatccatcttccagcagctgaaggtacataaacagaaagcaggaattcaaagagcacagagctgagtttgaaaccccgcga

SEQ ID NO: 78071 - DNA, 600 bp, Chicken  19866894367166_3
ctgttgagcaatatgagagagctgagctgcctgcagtgctgtaccttgtacggccgagggctgggagggcggcacggagctgctgctgctcttgtgcacctcttccataatcagctacaagagaaggaacaagttaaatcgcttaacaataactcggaacaggaggtgggagcccgagcgatgcttcagaaactctcagcgcgtgstgcttttagcctcacttgcacctttttaattagttcaattagcacgccgcctccccaggcctcagarcagcacaaagcagtgtctgcgatggcyccaacgccgctgagttctgatcgctggccccgcctcaggcccagtgctgaactttgctgttaaatacatttaccgaatatcccgggttttggtgaaaatgcaccatyggaccatgagatgtacgaagaaaacccaaacaaagcagcttttaaataaaataatttccccaacgttccgccaagctcgcagccaaatccatcttccagcagctgaaggtacataaacagaaagcaggaattcaaagagcacagagctgagtttgaaaccccgcgagagtaaatcggtctccgtgtaaaaacg

SEQ ID NO: 78072 - DNA, 600 bp, Chicken  19866894367166_4
taatcagctacaagagaaggaacaagttaaatcgcttaacaataactcggaacaggaggtgggagcccgagcgatgcttcagaaactctcagcgcgtgstgcttttagcctcacttgcacctttttaattagttcaattagcacgccgcctccccaggcctcagarcagcacaaagcagtgtctgcgatggcyccaacgccgctgagttctgatcgctggccccgcctcaggcccagtgctgaactttgctgttaaatacatttaccgaatatcccgggttttggtgaaaatgcaccatyggaccatgagatgtacgaagaaaacccaaacaaagcagcttttaaataaaataatttccccaacgttccgccaagctcgcagccaaatccatcttccagcagctgaaggtacataaacagaaagcaggaattcaaagagcacagagctgagtttgaaaccccgcgagagtaaatcggtctccgtgtaaaaacgaagcaacacttctctcatctccaagattttatatttaactgttcaacacgacttgacagcgaagccctcccaatgttgggggatacggcgatgtaaaaacgcgtgct

SEQ ID NO: 78073 - DNA, 599 bp, Chicken  19866894367169_1
  misc_feature (1)..(1): n is any nucleotide
nggccttttgcatctagaagacctacaattttcacattgcttggtccaacctgtgcacaagcgactgtagtggaaactgactccaggctttgttttgggaaatcattcaacaccttcttctctctgcatctatgatctgtttagcttatccagctgggcactaagacccctgtcttcttgttgcagtcagctgcaggcacaagtgcaatgaaccctatcggaaagaggtggcaggctgccagtgtgacagtggctgcaaggagcgtcaaaactgctgctgggactatgaagatgcctgcrtggagccaagtatgttctcttagaggcaatgcttattggtttctatactgttttctttcactgtatagtactaactggaaaaagaccaattctcttatttgcacagggatatggaaagccatatgattaaaagctttgaggcttgcttgccacatgatgatttggggagggaggaagttagtggtrttgagtgaatgctgcattcagattgttagaggtccttagccttcgtgacaagaaatctttctggatctttttcagattatctcatctctttgctatggagatgcgtgcctttt

SEQ ID NO: 78074 - DNA, 600 bp, Chicken  19866894367169_2
tcagctgcaggcacaagtgcaatgaaccctatcggaaagaggtggcaggctgccagtgtgacagtggctgcaaggagcgtcaaaactgctgctgggactatgaagatgcctgcrtggagccaagtatgttctcttagaggcaatgcttattggtttctatactgttttctttcactgtatagtactaactggaaaaagaccaattctcttatttgcacagggatatggaaagccatatgattaaaagctttgaggcttgcttgccacatgatgatttggggagggaggaagttagtggtrttgagtgaatgctgcattcagattgttagaggtccttagccttcgtgacaagaaatctttctggatctttttcagattatctcatctctttgctatggagatgcgtgccttttaggcaaaaatatttcttcaagtaatttatatgggcttcacatatcacattagagcataacrcattgtagcagagagcacagcagtacagcacagccaactcccttagataaccagagcatttgcagtgtgtgtttccggtccagatgaagtcatggatgaatgaaaacacaggttttcttgactagg

SEQ ID NO: 78075 - DNA, 454 bp, Chicken  19866894367169_3
ctgtatagtactaactggaaaaagaccaattctcttatttgcacagggatatggaaagccatatgattaaaagctttgaggcttgcttgccacatgatgatttggggagggaggaagttagtggtrttgagtgaatgctgcattcagattgttagaggtccttagccttcgtgacaagaaatctttctggatctttttcagattatctcatctctttgctatggagatgcgtgccttttaggcaaaaatatttcttcaagtaatttatatgggcttcacatatcacattagagcataacrcattgtagcagagagcacagcagtacagcacagccaactcccttagataaccagagcatttgcagtgtgtgtttccggtccagatgaagtcatggatgaatgaaaacacaggttttcttgactagggactggaatgatgcttgtgtgccagcac

SEQ ID NO: 78076 - DNA, 575 bp, Chicken  19866894367173_1
gtaagttttactcaagtagtgttaaaatagatgatgccatatttgtgtctgcttgtacttgtgtcagtgcagtattgcttgatttcgctgcttgttgctaatggtgtattttctaattcagggagaaaaaatattttatctcatcaaaccagcctccgcaaatatttctctctatgaacgctggcaatcggcagcaaaccacagcgaaatgttttttgcagaccaggtagataaatgttacaaatgcacggttaaacaaggacagacactcttcattccttcaggtgagcgggccgttayaggtggggtttcctctttgttttacagctgctgaaagagcatggccagagtgctgcaggaatgtgatttgaccacctttctctgacaaagtatgaagtctaacttcacacgcttagaaaagagttgaaaatcagaagttttactctttcaatatttgagcagcagaatatttgtacttttatttaaaaaatacaactgttgcatacagtgttccactcttggtctagataggctcgctttgcaaagtcctctctatatatccaagtatgacattg

SEQ ID NO: 78077 - DNA, 600 bp, Chicken  19866894367180_1
tggtggtggaagtgacacccacacctgcaaccccagttaggtcggagatcccatttgtagggccccagtgtcagccatgggtggaactgtcacggcatccctgccctgtgatggggacacccaaccactcggagcccacaggtgccaaggggcggttccatgggaacctggtggaggcggtgctgaggggctgtgctgctgtcttggtcttcagcctgggcctctactttgtcctcgatgcccgcagcctctggacacggagagatgagagcacaggtgaggaaggacttcaatggtttscattccctatgcatcccctcaagtgtcctctgcttattctttgaccctcttcagatcctttatggtttcccagttgttcctcaaggcccacacataactcccacttttccccctcttctttttgatgcaggtgtcacccctgagatgcacaagtcagtgcaattccaggtaagtgtcggggtcagtggaacccaaaatcccagttcacttcttgggacccacacctcacatctccatggaaacccaaaccttccccatggggaccccaaatgacccccaacctcatatggcttaccctca

SEQ ID NO: 78078 - DNA, 599 bp, Chicken  19866894367181_1
  misc_feature (1)..(25): n is any nucleotide
nnnnnnnnnnnnnnnnnnnnnnnnntggcagctggcatctcggcgtaggtcagatcctcgctgtccctggagggcccctggagatagaggaggagaatggggtgctaccaagggggtccccaagatgagtgagctgagggtgggtctgtggtgtaggtatgtggggggtgtggccatgaggaggagtctgcatttgtgactgggcttagatttgtggtctgcatggcgaatgtttgggggtccagccgtggatttggggtgcccatagggtctcggggtgtttagggactggtggaacasagaggctcaattttggtgtccccatgggtcattgggtttccctgagggtgcatttagtgcccctctcgtccagttctcgttgcctatagggtctagagggggtttaaggcttggagggcacctttaggtctgggtatttaggggtatctgcgggctggggttccccacagtgcaggtttgtgtttccgaagggctggacatgggtggtgcacataaatgtgagggtaagccatatgaggctgggggtcaattggagtccccatggggaagatttgggtttccatggagatgcgaggtgt

SEQ ID NO: 78079 - DNA, 599 bp, Chicken  19866894367187_1
  misc_feature (1)..(159): n is any nucleotide
nnnnnnnnnnnnnnnnnnnnnnnnnnnnnnnnnnnnnnnnnnnnnnnnnnnnnnnnnnnnnnnnnnnnnnnnnnnnnnnnnnnnnnnnnnnnnnnnnnnnnnnnnnnnnnnnnnnnnnnnnnnnnnnnnnnnnnnnnnnnnnnnnnnnnnnnnnnnnnntgttttgtgttgcattatccttggggggattttattgttcacttgcgtgctaatttgcaggaccctgcatttcacaactcttctcttggtcggtgtggggaaggggtgaagttctgctgtaattaaggcagaatcattaaraaacaggcagaaaacctctgttgatgcagctttgtctgcgttcagctgcagtgtaaatatttttctcaaaaactaatgacactggtgacatttggaatttctgtttgtcrgatgagctttcccttttcagctctcgcagttcattttaaggatgcaagacgccttccactgcagagctgcaagtctggaagcttcttttgctgtaggctggagcttgtgatgtgtctcctgcgtcctctggcagaagtgatgcacccacagccgctggtgtgactggatgcacctgatcacccatagaa

SEQ ID NO: 78080 - DNA, 599 bp, Chicken  19866894367187_2
  misc_feature (1)..(49): n is any nucleotide
nnnnnnnnnnnnnnnnnnnnnnnnnnnnnnnnnnnnnnnnnnnnnnnnntgttttgtgttgcattatccttggggggattttattgttcacttgcgtgctaatttgcaggaccctgcatttcacaactcttctcttggtcggtgtggggaaggggtgaagttctgctgtaattaaggcagaatcattaaraaacaggcagaaaacctctgttgatgcagctttgtctgcgttcagctgcagtgtaaatatttttctcaaaaactaatgacactggtgacatttggaatttctgtttgtcrgatgagctttcccttttcagctctcgcagttcattttaaggatgcaagacgccttccactgcagagctgcaagtctggaagcttcttttgctgtaggctggagcttgtgatgtgtctcctgcgtcctctggcagaagtgatgcacccacagccgctggtgtgactggatgcacctgatcacccatagaagagccttgggaagcaggcagggtgcagagctctctctgagtttcaacagttcccgagtgcgggaggagtgaattgaaaaatgaaggctcctttgttgaagcctgctgctt

SEQ ID NO: 78081 - DNA, 599 bp, Chicken  19866894367191_1
  misc_feature (1)..(103): n is any nucleotide
nnnnnnnnnnnnnnnnnnnnnnnnnnnnnnnnnnnnnnnnnnnnnnnnnnnnnnnnnnnnnnnnnnnnnnnnnnnnnnnnnnnnnnnnnnnnnnnnnnnnnnnaagacccacattctctctgaccttcttttaatctctgatatacctgtagaattttttcttgttactcttcatgtccctagctagattaaattctgtctgaattttagctttcctgatgggatccctgcctgcttggacaacttctttgtagtcctcccgggtaacctgcttctgctccctatagactttctttttgygcttcagtaagtccagaagctctttgttgatccatctatgatgtctccttctcctgccttccctttaaccctaacctgtaagctctctgtcatatcctcatctatccccaggtggagctccatggacttcatctgttcattgatgtagagggcagccaccccctccccctcttttcctctgcctgtctttsctaaagagtttatacccatccattcctacattccagttgtgagagccattccaccacatttcagtgatgccaatgacattgtagccctgcagtcatgtacatgcctgc

SEQ ID NO: 78082 - DNA, 539 bp, Chicken  19866894367191_2
aattctgtctgaattttagctttcctgatgggatccctgcctgcttggacaacttctttgtagtcctcccgggtaacctgcttctgctccctatagactttctttttgygcttcagtaagtccagaagctctttgttgatccatctatgatgtctccttctcctgccttccctttaaccctaacctgtaagctctctgtcatatcctcatctatccccaggtggagctccatggacttcatctgttcattgatgtagagggcagccaccccctccccctcttttcctctgcctgtctttsctaaagagtttatacccatccattcctacattccagttgtgagagccattccaccacatttcagtgatgccaatgacattgtagccctgcagtcatgtacatgcctgcaactcttcttccttattctccgtgctccgtgtattggcatacagacagatcatcaaattattaaatgtttcgaaattaaggtgagtttttctgtgtatgttgaggatgcattaagttctctatttatttta

SEQ ID NO: 78083 - DNA, 599 bp, Chicken  19866894367195_1
  misc_feature (1)..(98): n is any nucleotide
nnnnnnnnnnnnnnnnnnnnnnnnnnnnnnnnnnnnnnnnnnnnnnnnnnnnnnnnnnnnnnnnnnnnnnnnnnnnnnnnnnnnnnnnnnnnnnnnnnccggggcggctcccggcttgtcgcttccttttcgtctcttggcgacgctcgcgcttgaatcgtctcgattctttcctaatattaccgattatccagttttcttcgtgcggttttaactaccttgatgttggggaaggcaaacagattaaaatggggaagtatgactggaaacttgtaaaagatttcgggaggacagaggaargattaaaaggtggctttgtgctgcatttgaaacgctgtgctttgaaagtttgcctctgagtgtgtgccttggagccacttccagccctggttcggagaacctgtgtccaaagccattcttagcaggtaggtcagcttccagttttagccatgcaactgtattataattatccttcctgtagagatgtgaaaataagactgtccagactgcctggagtgatcgttacgaagctgaagtcattatcaaggttaaactgtggccttcttggaaggaagtttctgtggagctgcagtggcttt

SEQ ID NO: 78084 - DNA, 570 bp, Chicken  19866894367203_1
ctcacgcatatgacattttcaacacattattctgctgtatttcttctctgactccatttctctccaagatcttaagaatgaaggtgcttataacactggatattacccatattatgattaggactctatcaacaggaaactccagacttcggtctttgctcccttctaaactcatcagatttctggagtatatatcaagacctgattctacccatacactgaagaactgctagtagaactagagatgttttgcttggactgacttaatgtgatttataatatataggggtagagcacatkgggaagagagaaaagtaacagcagacacatctcagaaaacttggggtggtcaggaggaacatgaaaagcaaacaacaaacctgaagctcttcttttcctcaactagaaaggacaaaaatgcaggttggtaagaggtgcataaaaatacctgagaactatgacaagggttcatcttcatgtcttttaaaaagacttgcaagaataccttccttgttgtgtaatgcgtgacctacagttaaggcctggagttttgaattcaattataactag

SEQ ID NO: 78085 - DNA, 599 bp, Chicken  19866894367207_1
  misc_feature (1)..(1): n is any nucleotide
ncctctggagcctgaacttgtcatttcagattggattggactctagagctgtcgatacctactgcgttaccaacttggttaaaaaaaaaaaagagtctttgaatttttccactgataagggatagaatgctaacaggttacggactgaagagcaatggctgatgtgcaaagagaaaattattttatgtacatgcatggatatacacacacctgcatatatctgtctataaaatacaatttcccttttcatttatgtgtgttgatgaaaatggagtatcgcttctgaagccttctgctagracttaatgcgtatgaaatcctgagaagttctaacatctaacagtgagatacaatgagaaatctgtttaacttgagaaaagatttgattagcaaacaaattgacagtcaaacatctcagtgtgcctttgtaagaaaaaygctagcatcattgctaggagatgagaaagcaaattactgagcagtctcttccaaaagctcctttttaatttctgtagagtgtgtgtgaggagggtaaagtttgtgaatatgcaatataaataagtctctgtgatataagccttttgattttaatggagact

SEQ ID NO: 78086 - DNA, 600 bp, Chicken  19866894367207_2
tacggactgaagagcaatggctgatgtgcaaagagaaaattattttatgtacatgcatggatatacacacacctgcatatatctgtctataaaatacaatttcccttttcatttatgtgtgttgatgaaaatggagtatcgcttctgaagccttctgctagracttaatgcgtatgaaatcctgagaagttctaacatctaacagtgagatacaatgagaaatctgtttaacttgagaaaagatttgattagcaaacaaattgacagtcaaacatctcagtgtgcctttgtaagaaaaaygctagcatcattgctaggagatgagaaagcaaattactgagcagtctcttccaaaagctcctttttaatttctgtagagtgtgtgtgaggagggtaaagtttgtgaatatgcaatataaataagtctctgtgatataagccttttgattttaatggagactttgaaaacttcagagacagctattttgtaaactaggcaagtaagcagaggaaaaacacatttaattatttttttttaaatatggaaatactcttttgaataagttatttaacatccagcttagtcagatgtatcctatt

SEQ ID NO: 78087 - DNA, 600 bp, Chicken  19866894367208_1
gtcaggatcctttgcagaggaggatttcatcatcttgtcaatgagcatgttctcactcggcacatctgagcatgtgtctgtagtatctgtgctgtttgttagggagggtttttttttaggatttggataagataattcacttctgtattcccctttaaagtgatatttccatacttgctaatttttatgcagcgttctcaagatagaatcactaggaatccaatgtttttcagccttgtaaataaaaactcaaaaatattgaaaagagaactagattttaaataatttcaaacaactaartgttcatttttaatgtggctgcctactgctgttgctaagtgttcccatcccagcacagcacttggtttcactttatgattctgctgtttctttgggctggggtgctggcagaagcctaactctgcagatttgcagcacatcttcgracacttcctgaaacagtgagagaactgagggccaagaacagcacaccttatagagtgagtgagcactggcagctcacccaccagccagaggcagggtcatggttagccttgagagcacgcagctgctgttgcaaggggttcgtatttcatttct

SEQ ID NO: 78088 - DNA, 579 bp, Chicken  19866894367208_2
attcccctttaaagtgatatttccatacttgctaatttttatgcagcgttctcaagatagaatcactaggaatccaatgtttttcagccttgtaaataaaaactcaaaaatattgaaaagagaactagattttaaataatttcaaacaactaartgttcatttttaatgtggctgcctactgctgttgctaagtgttcccatcccagcacagcacttggtttcactttatgattctgctgtttctttgggctggggtgctggcagaagcctaactctgcagatttgcagcacatcttcgracacttcctgaaacagtgagagaactgagggccaagaacagcacaccttatagagtgagtgagcactggcagctcacccaccagccagaggcagggtcatggttagccttgagagcacgcagctgctgttgcaaggggttcgtatttcatttctgatgtttaaaatcttctgcaaatagctaaaacacgattttgctttaaaaatcaaatctgaccttctctgctccttgcctgccaggacacaagctgtgccagtgtgcatggcatcaccaaccccct

SEQ ID NO: 78089 - DNA, 600 bp, Chicken  19866894367220_1
tggagctcatatgacatggctgcccaaaataggaggttgagcagactcagtaatgcaggaaatccatccaagttcaatgtgtctaaatgtttaagctctctggacttcataagactttaagaaaagctgaaatttatgtgccctttgagcatgctgcgtaagagctttaaaggttgcataatggttcgtttgccaagtgacatcacagacctgttacattaacagtggaaacagagctaaccaaggcttacgcatttatctgaagattatcttatagttggataggaaaatacttgttcktctcatatactccccatctatttcaagaggcaaagaaataccttcatttcctcaagtcactctgttcagtcttcagtgtccagcaagatgaaggctgtgccagaaaggtgtgacaccaacagacaggtcaagcccagagaatcaagcgttacagggtcagagtgagctgcccatcttcacaagtctgcatctattgagtgctgtgagttctgcattcctcctcactgatactttgcaataaaaacaaaagctactaacagtaacacctcagtccagtaactctgtgtggctttgacttca

SEQ ID NO: 78090 - DNA, 600 bp, Chicken  19866894367221_1
cttgactcggcatgcagaggaatctatgtgcagggcaggaagggttccattccacttccattccactctgctcaccaccagtgtggagctccaggaacgcctcatcgtcttctggcgagcagcagtctgggagtgttaataacaaagcacagagtctttagggattaaagactggaacagcatgttttactgagagggctcaagtgctcaatttgctttttggctttctgatgtaaaaaaagtagaaaccaatagcactttttaagtacaggagcaaaagaaatgggtaacgctgtctgygtagctgtggcaattgccatcrcaattcacctaayggttgggatcctgtgtactgtttatgtcattaatttcccactgccagcatgtgttattaaggcaaattggagctcacaaccttaaagactgcagtagagatttctctgaacaaatggcagggctgaggactgcagagcgggtcgtctcttccatgcgctgcattttggacctggcrcacatcaccctcttgtgtgtaatggctctgaagtgggagcagggcagcgtgacttggatttctctaatctgatggagtcctgatgttgt

SEQ ID NO: 78091 - DNA, 600 bp, Chicken  19866894367221_2
tctatgtgcagggcaggaagggttccattccacttccattccactctgctcaccaccagtgtggagctccaggaacgcctcatcgtcttctggcgagcagcagtctgggagtgttaataacaaagcacagagtctttagggattaaagactggaacagcatgttttactgagagggctcaagtgctcaatttgctttttggctttctgatgtaaaaaaagtagaaaccaatagcactttttaagtacaggagcaaaagaaatgggtaacgctgtctgygtagctgtggcaattgccatcrcaattcacctaayggttgggatcctgtgtactgtttatgtcattaatttcccactgccagcatgtgttattaaggcaaattggagctcacaaccttaaagactgcagtagagatttctctgaacaaatggcagggctgaggactgcagagcgggtcgtctcttccatgcgctgcattttggacctggcrcacatcaccctcttgtgtgtaatggctctgaagtgggagcagggcagcgtgacttggatttctctaatctgatggagtcctgatgttgtctcctgtgctgcagcacagcct

SEQ ID NO: 78092 - DNA, 600 bp, Chicken  19866894367221_3
caggaagggttccattccacttccattccactctgctcaccaccagtgtggagctccaggaacgcctcatcgtcttctggcgagcagcagtctgggagtgttaataacaaagcacagagtctttagggattaaagactggaacagcatgttttactgagagggctcaagtgctcaatttgctttttggctttctgatgtaaaaaaagtagaaaccaatagcactttttaagtacaggagcaaaagaaatgggtaacgctgtctgygtagctgtggcaattgccatcrcaattcacctaayggttgggatcctgtgtactgtttatgtcattaatttcccactgccagcatgtgttattaaggcaaattggagctcacaaccttaaagactgcagtagagatttctctgaacaaatggcagggctgaggactgcagagcgggtcgtctcttccatgcgctgcattttggacctggcrcacatcaccctcttgtgtgtaatggctctgaagtgggagcagggcagcgtgacttggatttctctaatctgatggagtcctgatgttgtctcctgtgctgcagcacagcctgagcccaggatct

SEQ ID NO: 78093 - DNA, 600 bp, Chicken  19866894367221_4
tttgctttttggctttctgatgtaaaaaaagtagaaaccaatagcactttttaagtacaggagcaaaagaaatgggtaacgctgtctgygtagctgtggcaattgccatcrcaattcacctaayggttgggatcctgtgtactgtttatgtcattaatttcccactgccagcatgtgttattaaggcaaattggagctcacaaccttaaagactgcagtagagatttctctgaacaaatggcagggctgaggactgcagagcgggtcgtctcttccatgcgctgcattttggacctggcrcacatcaccctcttgtgtgtaatggctctgaagtgggagcagggcagcgtgacttggatttctctaatctgatggagtcctgatgttgtctcctgtgctgcagcacagcctgagcccaggatctctgcagagagcggcagaaaggcattgtgactttgtgcctctttcctgcagggaggcgtaggtctcagtctctgtttctcccagtccacgttagattagtccttagtgttatcaggtgcattcaggcagcttagtgctgcaggaacaggagctcactccgagagcctccaggagggc

SEQ ID NO: 78094 - DNA, 600 bp, Chicken  19866894367221_5
tgaagtgggagcagggcagcgtgacttggatttctctaatctgatggagtcctgatgttgtctcctgtgctgcagcacagcctgagcccaggatctctgcagagagcggcagaaaggcattgtgactttgtgcctctttcctgcagggaggcgtaggtctcagtctctgtttctcccagtccacgttagattagtccttagtgttatcaggtgcattcaggcagcttagtgctgcaggaacaggagctcactccgagagcctccaggagggctgggagcagcagccttccgctgactggrgttggtggtgatgggaggtaataccgtgggctcagtgtgtttcttgggacagccagccctgcactgcagtggatcgcagcagtcttgtgtgggaacgaggagtgctgtcaggaagcctcgtttgagtggtaaagaatgtggatgaatgtcattcagcgtttatcttcaggcccctgtaggttagcattgagtcatctcagtagtacaaggctggaaaatccgtactgtggttttttttctgggcagaaaaagctttgaattctaaaagctgtcaagcacaaatagcaaaatgtatgtttg

SEQ ID NO: 78095 - DNA, 600 bp, Chicken  19866894367223_1
ggtgaagaatctgctgctttgttacttcagcaaaggggatccaggtgaagaagctgttggggggatatttcttggatttcagagtggtctttgggttgtagatgcaaaatttttctcattgtggcttcttctgctggatcaaatgactgatgaaacagtgcatttggaagatgtggccaagcccaaagtaaccactttttgcagctgggtggatgacaacagcttttgttgtagctgggtaaaattatttttaaatttttttttagaaatgcccagagctgtttacaaaggaagaaaatraaatcagcatcagataaattttagaaatggtccctttgttctgtcacaagcatgaaatgcagaagccatgtaatatcatatttgaggacccttgtgctcaaggggcctggtagtgcaagcataggaatacctcctatcacttctggaacctctcgtggaggtttctgagaagattgacagggtagattttaaagccatcacagtaatctaaaatattaatggtgaacatgtgttgtaactgcaattaattaactgtgtgataaaagaatctgagagtaaacaattacacattcccctgaa

SEQ ID NO: 78096 - DNA, 600 bp, Chicken  19866894367225_1
gcttcccaaagaggaaacaagcagatggagaggtctgagtaaatgaattgagtaacaaagcctgtagggactttaatttttttgccctggagtactgagaaatatgtgcaaagatcacacttctggttctggcagaggccaacagcaccacgttatccttttctttctttctctctgttcattttgcatctcactcatcccttcaaggcgaatctcaggttaccccaaatactcctagcaacgagctgaggggctgcaggcaatgaaatccaccccagctccctctgtgcaggttcacayggggctggtgttgagctgaggctccgagaggaggacagggctgagtctgtctgccccagcacacatcggtgaccggttccctgtgccctgctcctcacctattgagtcccctgaaatccgattactgatccaggccagccctgcattgagccaaacaattactttgcttttcctctgctgcaggtcrgtgcgttctgcagttaaggtttacgggaaaatggaattttaagacaaaaagagtggttgatgatattggtattacagagatggcttatggtactggatgttctgttgtgcatt

SEQ ID NO: 78097 - DNA, 600 bp, Chicken  19866894367225_2
atctcactcatcccttcaaggcgaatctcaggttaccccaaatactcctagcaacgagctgaggggctgcaggcaatgaaatccaccccagctccctctgtgcaggttcacayggggctggtgttgagctgaggctccgagaggaggacagggctgagtctgtctgccccagcacacatcggtgaccggttccctgtgccctgctcctcacctattgagtcccctgaaatccgattactgatccaggccagccctgcattgagccaaacaattactttgcttttcctctgctgcaggtcrgtgcgttctgcagttaaggtttacgggaaaatggaattttaagacaaaaagagtggttgatgatattggtattacagagatggcttatggtactggatgttctgttgtgcattggttaatggttccagttgagaccaaatgatttattatgttttactgagctatgataagagctggggaatgaaagcagtgggaggatggagagaagtggaggtgcactgggttacagctggaggatagaggtttgctgtgctctgtccaaggattgtggcacgtccaggccagggggtattcttcatg

SEQ ID NO: 78098 - DNA, 588 bp, Chicken  19866894367227_1
ggctgtgggacagggtcctggggggggcccgtggggatagcagcagctgcaccgctccccagtgcattggggtgtgggggagcatattgtgatgggtctattgatttatcagctgttcctcggggctggcaggaaggataatcctcattaacgcacccattattgctgcggctcctcgggaaagagttctgatttaattctggctgttgaaaagaaaagtgcttttgaattagtaatgtttatctaacacggaaaactccaggtcacctgagagagttcagaagtgatgtcttgtgtttrgagggaagaggaaaaatggttttcccagcagcccgctgctgtgccttaggagcaggcccattgcaaagggaggggtcctgctgcagcccaactcatctttgggttccagcagagggttctgcagctggaggcaggcccgcagcctggctgaacagggagaaaaggtgaaggatgaacccagctcccagcccagacagctgcaaatccaagggaaaatggtctctgagtacttggttaagcctgtaattaagagatcaccgcttgctatgaaatctgcacttcatctgg

SEQ ID NO: 78099 - DNA, 600 bp, Chicken  19866894367230_1
ttgatagtctttaaatctggacttcaatatccattcttgggcagaataagctcattgggttctcttaatatcagatctttgtcagcccagaccttaaacatttttttctagatgcagaaacattcaagatctacattcctccttggagtaattttctcttgtaacaggactcagagttctggtggggaaacaaagatctaaactgcaaaataaactaaactttaatgtactttatggtgataaggaagaaagatagttaagctcctctccactttggtatcttgagtatgtaagtgcacygcttagcgtgttcttgacagattgtgctgtatgggtatgaatctggctgatgaaaatctatgagatgctttttgcctccaatgtttgaacctaattttctatcattctccaagcagtagccttttagctgagacataacaatctggtcctttgtagccccctgttggaccttattcaggttttttgcaagtcagagcttctctaccaaaagcgtagtcagactaacactggagctaccacagtctactagagacatgccctgagaagtggggatttctggagtgtcttagaatcctctgg

SEQ ID NO: 78100 - DNA, 600 bp, Chicken  19866894367243_1
tgctgtattgctcacaccagcccttgctcaagaaagataccagagccatacgttggagccgtatgtctcagcggcactgcaaggctcgaggagaagcgattgccagaggcagaaataccctcatggatgcagccagtagaataggtggaaattttccaaatctctttttgcagagggaacttttttccccctgaaaaatgtggagggaatgaagggaagggttgataatggcttttctgacatgtcctttcccatttgtgacttgttctaattgtcttttctatctcacgatgcccttgyggaggtctgagyctcctgctgatgtcaaggcaggaggagygaggaaagaaatattgttgcccaagctgtggtgctgaaagcttcttcttgtcagmgctctgatacaaataactgtatagatagcagggcatgctcctacggtttctgctcttstgcaggagcccccccggcctctcaactgctgcagcagggcagtgcgcttgactttcccatgtctctgccaagcaaatctttgccctgttgatctctaatatartaaggagagagatctgtggtagtggrttgctgggccaatattgc

SEQ ID NO: 78101 - DNA, 600 bp, Chicken  19866894367243_2
cacaccagcccttgctcaagaaagataccagagccatacgttggagccgtatgtctcagcggcactgcaaggctcgaggagaagcgattgccagaggcagaaataccctcatggatgcagccagtagaataggtggaaattttccaaatctctttttgcagagggaacttttttccccctgaaaaatgtggagggaatgaagggaagggttgataatggcttttctgacatgtcctttcccatttgtgacttgttctaattgtcttttctatctcacgatgcccttgyggaggtctgagyctcctgctgatgtcaaggcaggaggagygaggaaagaaatattgttgcccaagctgtggtgctgaaagcttcttcttgtcagmgctctgatacaaataactgtatagatagcagggcatgctcctacggtttctgctcttstgcaggagcccccccggcctctcaactgctgcagcagggcagtgcgcttgactttcccatgtctctgccaagcaaatctttgccctgttgatctctaatatartaaggagagagatctgtggtagtggrttgctgggccaatattgcagagatcagccc

SEQ ID NO: 78102 - DNA, 600 bp, Chicken  19866894367243_3
cagagccatacgttggagccgtatgtctcagcggcactgcaaggctcgaggagaagcgattgccagaggcagaaataccctcatggatgcagccagtagaataggtggaaattttccaaatctctttttgcagagggaacttttttccccctgaaaaatgtggagggaatgaagggaagggttgataatggcttttctgacatgtcctttcccatttgtgacttgttctaattgtcttttctatctcacgatgcccttgyggaggtctgagyctcctgctgatgtcaaggcaggaggagygaggaaagaaatattgttgcccaagctgtggtgctgaaagcttcttcttgtcagmgctctgatacaaataactgtatagatagcagggcatgctcctacggtttctgctcttstgcaggagcccccccggcctctcaactgctgcagcagggcagtgcgcttgactttcccatgtctctgccaagcaaatctttgccctgttgatctctaatatartaaggagagagatctgtggtagtggrttgctgggccaatattgcagagatcagcccaggagcttggggtggagcgagcacctac

SEQ ID NO: 78103 - DNA, 600 bp, Chicken  19866894367243_4
gcgattgccagaggcagaaataccctcatggatgcagccagtagaataggtggaaattttccaaatctctttttgcagagggaacttttttccccctgaaaaatgtggagggaatgaagggaagggttgataatggcttttctgacatgtcctttcccatttgtgacttgttctaattgtcttttctatctcacgatgcccttgyggaggtctgagyctcctgctgatgtcaaggcaggaggagygaggaaagaaatattgttgcccaagctgtggtgctgaaagcttcttcttgtcagmgctctgatacaaataactgtatagatagcagggcatgctcctacggtttctgctcttstgcaggagcccccccggcctctcaactgctgcagcagggcagtgcgcttgactttcccatgtctctgccaagcaaatctttgccctgttgatctctaatatartaaggagagagatctgtggtagtggrttgctgggccaatattgcagagatcagcccaggagcttggggtggagcgagcacctacccaagtgagtgctcattcaggcaggtctaggaaggatgagctcctgcatgatctc

SEQ ID NO: 78104 - DNA, 600 bp, Chicken  19866894367243_5
ttccaaatctctttttgcagagggaacttttttccccctgaaaaatgtggagggaatgaagggaagggttgataatggcttttctgacatgtcctttcccatttgtgacttgttctaattgtcttttctatctcacgatgcccttgyggaggtctgagyctcctgctgatgtcaaggcaggaggagygaggaaagaaatattgttgcccaagctgtggtgctgaaagcttcttcttgtcagmgctctgatacaaataactgtatagatagcagggcatgctcctacggtttctgctcttstgcaggagcccccccggcctctcaactgctgcagcagggcagtgcgcttgactttcccatgtctctgccaagcaaatctttgccctgttgatctctaatatartaaggagagagatctgtggtagtggrttgctgggccaatattgcagagatcagcccaggagcttggggtggagcgagcacctacccaagtgagtgctcattcaggcaggtctaggaaggatgagctcctgcatgatctccaaagaccatccttgcagtatgcgttcacctctcctttagatatcaggatgtctgttt

SEQ ID NO: 78105 - DNA, 515 bp, Chicken  19866894367243_6
tgtgacttgttctaattgtcttttctatctcacgatgcccttgyggaggtctgagyctcctgctgatgtcaaggcaggaggagygaggaaagaaatattgttgcccaagctgtggtgctgaaagcttcttcttgtcagmgctctgatacaaataactgtatagatagcagggcatgctcctacggtttctgctcttstgcaggagcccccccggcctctcaactgctgcagcagggcagtgcgcttgactttcccatgtctctgccaagcaaatctttgccctgttgatctctaatatartaaggagagagatctgtggtagtggrttgctgggccaatattgcagagatcagcccaggagcttggggtggagcgagcacctacccaagtgagtgctcattcaggcaggtctaggaaggatgagctcctgcatgatctccaaagaccatccttgcagtatgcgttcacctctcctttagatatcaggatgtctgttttcatggaatcatagaatg

SEQ ID NO: 78106 - DNA, 489 bp, Chicken  19866894367243_7
atctcacgatgcccttgyggaggtctgagyctcctgctgatgtcaaggcaggaggagygaggaaagaaatattgttgcccaagctgtggtgctgaaagcttcttcttgtcagmgctctgatacaaataactgtatagatagcagggcatgctcctacggtttctgctcttstgcaggagcccccccggcctctcaactgctgcagcagggcagtgcgcttgactttcccatgtctctgccaagcaaatctttgccctgttgatctctaatatartaaggagagagatctgtggtagtggrttgctgggccaatattgcagagatcagcccaggagcttggggtggagcgagcacctacccaagtgagtgctcattcaggcaggtctaggaaggatgagctcctgcatgatctccaaagaccatccttgcagtatgcgttcacctctcctttagatatcaggatgtctgttttcatggaatcatagaatg

SEQ ID NO: 78107 - DNA, 600 bp, Chicken  19866894367246_1
attcctagatcctgtgttggcagagggacaccatatcctgtactgacacagcaataccttttcctaccctgagacctgtcctaactatgctgacaacgttcatcagcctgtaattgtgtggatgactgtgagctggagtgattgcctgacatctcctacctccctacctggtttaagagcttttcctttcctgatgatgggcaaaatgcagctcttgcatttcaccagttcagacgagagaagagattgtaaggggtacaatgagatattcagtagatctaaatatagtctttttttttycccccttttaaaaatagttttagtttcttcccattgtctcctgcatgaagaaatgcaggaatttcagtgatgcattatgatagtaaaattataatgaaattgtcgaattcatcacattttgtcttcatcacccagtgcagaatgtcctcataaagtacttagcagtgaatttaggtccaaggtgtacatggctgttgagtctgaatggttgcatttatgtgagtgtggtgactaagagccccaaccatcagccaggattcctatgagctacaaatgagtttgtgagctttttcagttcca

SEQ ID NO: 78108 - DNA, 599 bp, Chicken  19866894367260_1
  misc_feature (1)..(22): n is any nucleotide
nnnnnnnnnnnnnnnnnnnnnnttcctgtttttatttgtacatatgttgtttggggttgattgtttgggtttttttggtcataacagaaaaggttatttttagttgttgagctttgacaactgtgttctagattttaggatagtagatcattaattcattttttcttttgaatctagtacaaggcaaggtagtataatttcactgaactccatccaccagtccattgtaatatgagctaatgctagctgatgacgggtagtgatagtgcgtttaaaaaagaaaactatttaagctaatakatgtatatgtgtgtataatatatattaagatgctatatggaaattttactcttaacatatraatttataggaactaataaaagggttatgtttatttcggaagttaattgtatctttctgtgatgtttccatgacagttgatcattggaggtgatgggacatggtacatgagaattgccagtgctttacaaatgcctgacttgttctggaaagcgctttcaagagcaatctcatgtctgtagggcatcaatgtatgtttttttcagtaggacagctatattgatgctggttccagagta

SEQ ID NO: 78109 - DNA, 600 bp, Chicken  19866894367260_2
tgtttgggtttttttggtcataacagaaaaggttatttttagttgttgagctttgacaactgtgttctagattttaggatagtagatcattaattcattttttcttttgaatctagtacaaggcaaggtagtataatttcactgaactccatccaccagtccattgtaatatgagctaatgctagctgatgacgggtagtgatagtgcgtttaaaaaagaaaactatttaagctaatakatgtatatgtgtgtataatatatattaagatgctatatggaaattttactcttaacatatraatttataggaactaataaaagggttatgtttatttcggaagttaattgtatctttctgtgatgtttccatgacagttgatcattggaggtgatgggacatggtacatgagaattgccagtgctttacaaatgcctgacttgttctggaaagcgctttcaagagcaatctcatgtctgtagggcatcaatgtatgtttttttcagtaggacagctatattgatgctggttccagagtagtgtagtatagctgttgtctttcttctcaataactggaactttattacaaccacttgaggat

SEQ ID NO: 78110 - DNA, 600 bp, Chicken  19866894367261_1
gctgaaggagaagtaagcacagacctagaggttatttcagtgccttggagatctcttactgcttgtcagcatggatgtggctttgtgggcatccacaaagaaagacggggatgctgtgggtgccagaatgcctcatgatgagtttgtaaaacctcatatgcaatgacttgcatggtctgatagagatagaagaagggggggagagttttaaactgaaagaggagagattcaggttaggtattagtaaaaaatacttagtgagcagtgaggtcctggcactgcctgtccagagagctgtgsgtgccccatccagaaggtgcccaagaccaggctggatggggccctggacagccggagcttctgggggcaaccagtccatggtaggggttgggactgaatggactccaaggtccctttcaacccacaccattctgtgatgacttcaggccttggtatgctgtgttcaagaaccccagtgttgtgcttctggctcacatagtgtggaaatccactggttctaacactaaagctgtcagcaggggctgagtccctaagaatcccaaagtgcatggtgactggcaatactaaatgctgtgggac

SEQ ID NO: 78111 - DNA, 600 bp, Chicken  19866894367264_1
ctgaagactggtgtgtttctaacattaacttctgttcatgaggaggaggggaagagacttctttgataatcaagaatagtctttggtttggttggttaaaagctgtgttgtggctcatattcaccagctactagtggtttttgattattctgtgcacattgaaaattactagatcatcatgttactgaagttgcttcactgagttttgctctgtggaagagcacaactccctgcagtgatatagtttagttcactgatttcagtggcagtggtgcaagagttgattgtcttaactaattkctactcaagcttctagcaatcaggtactttttttttttttataacagattaaataacattatcatacaaatcatagacagtgttgacatatctcctgtggaggctagactgcaattcattgcagaacctaaaaatgtttcaaaaaaactttctggatttcatttacttttcccaggatactattctgttctacaaaggaaagttctgctcttgcagataattaagaatatgaatatttccagtggttttatgtctccatacctaatacgtgtctcatagaatttcttcttttttgttttt

SEQ ID NO: 78112 - DNA, 600 bp, Chicken  19866894367274_1
tgagtgggagaaagttggattattcgtacgatggaggaatccttcatttccaccaacacagtaacatggtgtcaagtttcatactgagttattttttcatttgagaagtggtggaaaataggaagaagagaatatgagttctgctctgtatttgatggagctgctgtttggagaactccaacaaaacttgatttccctgggagcacagagaaactgtcagtgaatgccctgccctgtttgtgcactggtatctcagtgtgctacactgcttgcagttgtgttatacaacttgaacataayrcacacacaagcacaattttggaaacgctaaactaatgtcagggtgacagatgaagaatcagtgcaacaagtcatagaccagccaccccagtcttgcttttattgaaaacaaagatatttggtgacagcattaaacaatagttgtagcatgcccttccttgctccaggactcaattctgcttggtgtctttcaccatgcaaggtgttgcaaaaagcccctccgtgtgtgyagcgtgatgacagcagtaacatttacatataaaaatgtcatgataggttttaaatagattgaataacagg

SEQ ID NO: 78113 - DNA, 600 bp, Chicken  19866894367274_2
gagtgggagaaagttggattattcgtacgatggaggaatccttcatttccaccaacacagtaacatggtgtcaagtttcatactgagttattttttcatttgagaagtggtggaaaataggaagaagagaatatgagttctgctctgtatttgatggagctgctgtttggagaactccaacaaaacttgatttccctgggagcacagagaaactgtcagtgaatgccctgccctgtttgtgcactggtatctcagtgtgctacactgcttgcagttgtgttatacaacttgaacataayrcacacacaagcacaattttggaaacgctaaactaatgtcagggtgacagatgaagaatcagtgcaacaagtcatagaccagccaccccagtcttgcttttattgaaaacaaagatatttggtgacagcattaaacaatagttgtagcatgcccttccttgctccaggactcaattctgcttggtgtctttcaccatgcaaggtgttgcaaaaagcccctccgtgtgtgyagcgtgatgacagcagtaacatttacatataaaaatgtcatgataggttttaaatagattgaataacagga

SEQ ID NO: 78114 - DNA, 600 bp, Chicken  19866894367274_3
gccctgtttgtgcactggtatctcagtgtgctacactgcttgcagttgtgttatacaacttgaacataayrcacacacaagcacaattttggaaacgctaaactaatgtcagggtgacagatgaagaatcagtgcaacaagtcatagaccagccaccccagtcttgcttttattgaaaacaaagatatttggtgacagcattaaacaatagttgtagcatgcccttccttgctccaggactcaattctgcttggtgtctttcaccatgcaaggtgttgcaaaaagcccctccgtgtgtgyagcgtgatgacagcagtaacatttacatataaaaatgtcatgataggttttaaatagattgaataacaggacttatatccttttcatagaatcagagaatcattaaagttggaaagagcattaagatgatctagtccaaccatcaacccatacctgtgaccactcaagaccatgtcactcaatgtgacatccacccttttcttgaaaacctccagggatgatgactgcaccacctccctgggcagcctattttctttatgcatacatagctggtattttctttgtataactaaaccctaa

SEQ ID NO: 78115 - DNA, 600 bp, Chicken  19866894367285_1
aataggagctaactttaaagttaagctctgtttcacctttcatattaagaaaccctgcctggagaaatcaagcaacagaagaggtgacctcatgccaaccttattggtagagcagagaaggacattgctggtgatggggctgtggatttggacctttgaaaacatttccagctgtaatcaggttggaaggttggaactgcggaagggatgacagcagtgggaatagcaggcttgtgctgatgggaaaaggaattctgagccaggaaacacaaccaagtgccgaaatcattttaatagtcraagcgtggattgagagatgtgagcttcagtttttgacaaatccaagaaaaataagctcatggaattatttaataactcccatcctgttgttctgaccagacatatatgccctattctgcaggaatgggcagttcggtgctctttgtgcttctcagtacctttccagtgcttgagtggatccattaaaacttctttatagtggatttgaggatgtagagcatcttctgcaagagaggtttgtacacaatgacagcactgagcacagcagagcaagcagtgtgtgcaatgggatcacagttc

SEQ ID NO: 78116 - DNA, 600 bp, Chicken  19866894367292_1
aatgagccccagaggcttttgctaatattggtactcgtcctctctatgtgctgtaagactctgtgcgtgccaactgtgcaaataacagagcctgcagctcttcacctgcagcttcccaaccaaccctgtcattttgtgcagaagcagcaaacaccagtgtggacatggatttcagagttctcctcaggctaagaaacattccactgccaggaggcaggaaaagtagcaaaggggaacagagtacaccaccctctggacagactagagagttggacagaaccaaatgaggtttaacaagascaagtgtagagtcttgcacctggggaggagtaactgcatctatcagtatgggttcagggatgacctgctggagaggagctctgcagagagggacctaggtgttctggtggacaacaggttggccatgagccagcagtgtgccctggtggccaagaaggccaatgggatcttggggtgcattaaaaacagcacagccagcagggcgagggagatcctccccctctacactgccctggtgagaccacatttagactactgtgtccagctctgggctcccgagttaaaaaaagacagggatct

SEQ ID NO: 78117 - DNA, 600 bp, Chicken  19866894367295_1
aattgacctattttcctgtatcttaaaaagcacttggttgtagaagagtttacccaagaaattactggaaacccaagccccctaaaatgatgacaacggaatgggagaagtgctagaaaatgtgttgtcctgggcatctcagcactggcagattcgaatactcaggtgtttacttagcaaatgtgctacaggccttactggggaggtttgacacaataatgagcgaaggatcaaatgatcactttctagccttaaacaatataaattagccctgtttctggactgctgaatatttaatarcatctctgttcaaacgtaaacaacttctctgaatgttaatacctttgttctagcagtgtgtctgttcaaatatgttaagtagcacaaatggcagtaagtagtgcaaagcattgcttatgcacattctcacttttaacatcaaagcctctatgaggaattttatcattcacaaagaggaaaaattaatctgcaaagaagctcaggcagtaataaggtgattgcatctgtacatataacttgatacctggcagatcttaattcctcctttaagactgggaaaaagaaaatcaacccaatagt

SEQ ID NO: 78118 - DNA, 600 bp, Chicken  19866894367308_1
ggactgatagcttgccagtctcgtgtaatagcactcataattacatccagacctttctaattcagaaagtgcagcttctagcagaatttctgaattgatccttatacacaaacaatttctaaggtcagatataatgctgtttctattatcaggtatcaatgtccttgaggtcatttgtttctctctgcatggctttccagtcttgttcgtaattgacaggactttttgatttcacttcattggtataaaccactaaacatatgtgtttactatcacactatcacacatcagtaccatctraatagctgactttgtttygtttttcagaaacaggaaaataaacagcaggtgttagtgtgtactatgaaagcacagaaaaaactggttatgaaagcagaaggaataaagccattgataggttaagtatgaatgcaaaagtatataacaacaaataattcattacatttgaaaaatatagactcctaaatcacaccttcctggaccactagtgaaagtaaagagtgtgctcatggatacaatacatgcagactggctagtgactgatcaggaaaactcaggggcaaaggaaataaggatcta

SEQ ID NO: 78119 - DNA, 600 bp, Chicken  19866894367308_2
tctcgtgtaatagcactcataattacatccagacctttctaattcagaaagtgcagcttctagcagaatttctgaattgatccttatacacaaacaatttctaaggtcagatataatgctgtttctattatcaggtatcaatgtccttgaggtcatttgtttctctctgcatggctttccagtcttgttcgtaattgacaggactttttgatttcacttcattggtataaaccactaaacatatgtgtttactatcacactatcacacatcagtaccatctraatagctgactttgtttygtttttcagaaacaggaaaataaacagcaggtgttagtgtgtactatgaaagcacagaaaaaactggttatgaaagcagaaggaataaagccattgataggttaagtatgaatgcaaaagtatataacaacaaataattcattacatttgaaaaatatagactcctaaatcacaccttcctggaccactagtgaaagtaaagagtgtgctcatggatacaatacatgcagactggctagtgactgatcaggaaaactcaggggcaaaggaaataaggatctaagagtattttacaggtga

SEQ ID NO: 78120 - DNA, 470 bp, Chicken  19866894367327_1
tctaagagctttagaaaagcaagttaacccagaaccatggctactgtatggagctgatgtcatctggctctgtgcataaaagcccccactttttcttcttttgtgtagtcccaggatgacatcagctcgaagcacaagaacgtacctttgtgctgcagcacttcccctgctggctcctgacacacatctcattcctcctgcttatggccctcctttgcccagaaatgctccctgacccccactgaatgccaaacagcactgtctagtcacaaagtgctctgggagcccgggagcgccagygctccatggcagcacagaagagctcctattcaagcaatgtatagcatgccctacacctcagcaacccacagtggggcctctgcagccgattacagctgctttacaatgctgtcaaagttgaatggtgtgaactgattagacagacagggtaaccgcggctatttaattat

SEQ ID NO: 78121 - DNA, 599 bp, Chicken  19866894367342_1
  misc_feature (1)..(47): n is any nucleotide
nnnnnnnnnnnnnnnnnnnnnnnnnnnnnnnnnnnnnnnnnnnnnnncgaggcataaggaaaggccttggtttgctgctgtcttgaaattgtgatgctcttcaaaaacacccccacagcaaaacatcttcaaatgatgaagccgcttgtacttacgcacaagcttaagaaatagggtgagcagcaagtgtaagaagctgtggaaataacccagtaactaagaggaacaattgcataccactccagtgtccaactactgaacaaaaccccaagcatacaaataggtgatgaatgttaagcrgaaggcagttgcattcatcactgatcatcagtgaagtctggacaacattttcttagcattgttttgcaatgtcatcaaataactccaaagaaaagtgaactgtatcttggaggtcatggaatataaacaaaaatctatatgttaaaacaattgctttatcagagagagaccacaacactttacgtccaaattgcaaactccccagctccctgaatygtaatccgcagttccccaagttacctgatccactgctgtgaaatcctgctgaaacagctactgatagaaatcagaatttagct

SEQ ID NO: 78122 - DNA, 600 bp, Chicken  19866894367342_2
ctaagaggaacaattgcataccactccagtgtccaactactgaacaaaaccccaagcatacaaataggtgatgaatgttaagcrgaaggcagttgcattcatcactgatcatcagtgaagtctggacaacattttcttagcattgttttgcaatgtcatcaaataactccaaagaaaagtgaactgtatcttggaggtcatggaatataaacaaaaatctatatgttaaaacaattgctttatcagagagagaccacaacactttacgtccaaattgcaaactccccagctccctgaatygtaatccgcagttccccaagttacctgatccactgctgtgaaatcctgctgaaacagctactgatagaaatcagaatttagctcttcagagccttctgctttcagtgtttattacaatgcaaaacgttggcagctgtgctaggagctggaagtaccctaaattttccataacctcaccgtgatgcaagcaggagcctatagtcatgaagtcatgaagatgttcttaatcctggacagggaaagaacctcagtgtagaagtataacaactgctctttgtttttctttttctaaaagaggct

SEQ ID NO: 78123 - DNA, 600 bp, Chicken  19866894367345_1
tcacgaaatttaactttaaggaggtttagccaatcatcaacaatctggttggatggtggtgcaccgtcatcaaagggccaatcctataagacaacacaaatacatatagagatagaacgtttaccactatgtgcattacaatgtataattttctaaaaaaaattaacactgaggaatatgttcctctcaacctgttttcattgaatgaaagagtttctctcatgattttttacccctaagagatctgtatagcttttgcttacatgagctgctagaatacgcttacagaattgaatcaargtggtgactatgtaacatatcaaaagctgtgcttaaaaaaagaacaactgaaaaaccaacccccaaaccactgcttctgcattactcaccaaaacctgaatgccttctttttccaccggagcagtatcataagtagcttcacacactcttaccactgtggtaacaccatatttcttaagttcctagggggtgaaaagaactgctttaatggaaatctgacttcacttatttattttctcaataggttaataagctaacttatttcamaagtttcagtacataaattaatataaatgcctg

SEQ ID NO: 78124 - DNA, 444 bp, Chicken  19866894367345_2
gctgctagaatacgcttacagaattgaatcaargtggtgactatgtaacatatcaaaagctgtgcttaaaaaaagaacaactgaaaaaccaacccccaaaccactgcttctgcattactcaccaaaacctgaatgccttctttttccaccggagcagtatcataagtagcttcacacactcttaccactgtggtaacaccatatttcttaagttcctagggggtgaaaagaactgctttaatggaaatctgacttcacttatttattttctcaataggttaataagctaacttatttcamaagtttcagtacataaattaatataaatgcctgccagcctgtaaagaacacaaagctaaaataactaaaataccttgcaaatagcagatacctttatgctctcttgcaaatagcagatacctttatgctcttctgaaaatgtat

SEQ ID NO: 78125 - DNA, 599 bp, Chicken  19866894367349_1
  misc_feature (1)..(73): n is any nucleotide
nnnnnnnnnnnnnnnnnnnnnnnnnnnnnnnnnnnnnnnnnnnnnnnnnnnnnnnnnnnnnnnnnnnnnnnnnattccctcataacttttgcttctctggatatcagagtgctctgcaactctttctttccacttaaaacaatggctgcccctctggggactcagggaaaaagcaaaacactgaaatttagaaacatgtttttctgtatcttggaataggaattatctaattcaaatgtgactttaggtctgcttattattagtttcaacacacttatttttctctctaatcatcaaacyccagcataatttaggaccctgatgcattctgaagtaagtgaaatgttctgtccaaatgcctactggtttcaatgctacagctctccatctgttacaagaatgtttgggttgctgtttatattatttttatttatttttcaaatacagccccagcagttgtgcttatggaaagacctagactctcacaaaattccctgtgaaacttcaggtattgcacaacaacttttatttgttttattttatttataatagttgtcttgctttctacattgtgactatattttcagaggactctgcta

SEQ ID NO: 78126 - DNA, 600 bp, Chicken  19866894367351_1
tccagccagaaatttcattttagtccatgttctttatgaagcacattacaatgattctgcagcacaagtttgttattttaacagaacctacaaaaaagacttcaaaagttctttgacctaaaaatgtcaactactagaaatgaatgttttccttttagtcaactatttcactggaaaaaataaaaataaaagaggaagtcttaaacagtatctgcatgaaattttgttcctcagataaacagtgccacggccctgtacttgaaacaaatcagagctggagtgttttttccactgaaaacrccctggcagtgagggggaacaggggatgccccaaaccacaccctcattttttacacatctctgattttgggtccaaaggtgacccattcctcacacacctctccccagctcggagggaaaacagcccatctagttttycctggtataaccagaaatacagtatcctcagaacatttaccacaccactcaccccttccctccacatgctgacaagcattttaggaactaactctgcctgaagtctcctcaagctgttatagctgttacagcaatagtttcaaacagaattggacgtggaaa

SEQ ID NO: 78127 - DNA, 529 bp, Chicken  19866894367351_2
aatgaatgttttccttttagtcaactatttcactggaaaaaataaaaataaaagaggaagtcttaaacagtatctgcatgaaattttgttcctcagataaacagtgccacggccctgtacttgaaacaaatcagagctggagtgttttttccactgaaaacrccctggcagtgagggggaacaggggatgccccaaaccacaccctcattttttacacatctctgattttgggtccaaaggtgacccattcctcacacacctctccccagctcggagggaaaacagcccatctagttttycctggtataaccagaaatacagtatcctcagaacatttaccacaccactcaccccttccctccacatgctgacaagcattttaggaactaactctgcctgaagtctcctcaagctgttatagctgttacagcaatagtttcaaacagaattggacgtggaaatagtgagactacgtcaaaccatgaagcaattccaggagggtcagtaactctcatttgcccattgaga

SEQ ID NO: 78128 - DNA, 600 bp, Chicken  19866894367353_1
ccaataatttaactcattactatgtctttaatttttttttttaagtttttcattgtctaatattgttgtattttggtatcagaaaaaggttgttttttttttttctttttttctttttttttccatcttgtcatcttttttttcattcagcaaagctccctctgtctgtggttcgggctcatgccctgcctgctactgcaagtgctgtcaatataataccatcaacactaggcattatctatgtctaacttaactgtctggtgaccagtaacatgcagtttgcaaaatgcaccatgcatycagaaagtgacttcattatccccaagcaggaacaaaccttacttctgttatgatgtacactatattcagacttwgggaagtgtttctttcctgttttagtttgaggtcagaagtttttggtcatgttcagaaaaacacacaaaaccaatcccacaggctgcaaggtgcataactcatttctttaaaacagttctctgcagcatccacagtctttgccaggtgtggaatcctagggcttgcctgcaaccttgttgcactgttgtctctgatgtgattccctgggtaactcacactgagaca

SEQ ID NO: 78129 - DNA, 600 bp, Chicken  19866894367353_2
ggtatcagaaaaaggttgttttttttttttctttttttctttttttttccatcttgtcatcttttttttcattcagcaaagctccctctgtctgtggttcgggctcatgccctgcctgctactgcaagtgctgtcaatataataccatcaacactaggcattatctatgtctaacttaactgtctggtgaccagtaacatgcagtttgcaaaatgcaccatgcatycagaaagtgacttcattatccccaagcaggaacaaaccttacttctgttatgatgtacactatattcagacttwgggaagtgtttctttcctgttttagtttgaggtcagaagtttttggtcatgttcagaaaaacacacaaaaccaatcccacaggctgcaaggtgcataactcatttctttaaaacagttctctgcagcatccacagtctttgccaggtgtggaatcctagggcttgcctgcaaccttgttgcactgttgtctctgatgtgattccctgggtaactcacactgagacagccatcctcttcatcccaataaaagactggcccgtggaaaaatccagtataaattttcaagttaacggacctga

SEQ ID NO: 78130 - DNA, 600 bp, Chicken  19866894367358_1
tttcttttagctacgttggagactcaggtcagatcctcatagaatatgcatctgattattgtctgcatagtcacactgtagaagttgaaggttagtccatagtagtcagtagcgctaatttaatgcttattttattattttcaataaaagcagtattgaagatcggaagaataggacttgaaggatctatagcttatttctaactctttataaatcttggacaggactttgcaacaattatctgcaccttacagtaaagaaattctagttaaaaagaagttatagtttcagagagaaaayattttttctacactctttctaaattagtttgatggacattgcatttctttatgtaagcactgagtaagttcttaccaccctgaagcttaccttttctctggaaattccacttgcttggaacagttcaagaccggtacccagattgtgaagtgctaattgtcacacctgatatttttgtccgtagatacaacactgatgttgtttcactccattccagaagggcaaggcaaccctgaggttaattcctttgtgactctcactagtttttagtaggtgcatgatcttggaggtcttttccaa

SEQ ID NO: 78131 - DNA, 600 bp, Chicken  19866894367360_1
gtttcctttgctttatctcctagtattttattttgtctagttttcagttttaggtgaagtttaccctgcatcacttcctttggaagaatatttcatagtttaatagtcctaactgagacccagtctcatttcaattagcattgcatgtgtttgtggtagaagtatctagttctacgtccagttatatacaatacacaaaggaaaaatgaatggaagtcagcaagagtgcggcatgtgaagacttaaaattccacgtgagtctaaaataaatgtttcagtacattcctgtctctttaacarcatatttcatgctgagaaataataraagataaaaaggaaatggccatattttctacttttgtccctatatatgagtcagtgttatgtgttcatgtggcatttaatctctctgcaagcaattccccaaactgtcctctgggttttcagcatgcattctttatgtttaaaaaaaaaaatgtactgggcctagtggtcctgctattccccagtatgttgtgataagtgaatgctgacataattagatcttcatggtcaggtaaaagtagttgaatgggtagttgaagtagtggaatatttgat

SEQ ID NO: 78132 - DNA, 600 bp, Chicken  19866894367360_2
ttttattttgtctagttttcagttttaggtgaagtttaccctgcatcacttcctttggaagaatatttcatagtttaatagtcctaactgagacccagtctcatttcaattagcattgcatgtgtttgtggtagaagtatctagttctacgtccagttatatacaatacacaaaggaaaaatgaatggaagtcagcaagagtgcggcatgtgaagacttaaaattccacgtgagtctaaaataaatgtttcagtacattcctgtctctttaacarcatatttcatgctgagaaataataraagataaaaaggaaatggccatattttctacttttgtccctatatatgagtcagtgttatgtgttcatgtggcatttaatctctctgcaagcaattccccaaactgtcctctgggttttcagcatgcattctttatgtttaaaaaaaaaaatgtactgggcctagtggtcctgctattccccagtatgttgtgataagtgaatgctgacataattagatcttcatggtcaggtaaaagtagttgaatgggtagttgaagtagtggaatatttgattttaattacacagaagtaccttaca

SEQ ID NO: 78133 - DNA, 464 bp, Chicken  19866894367360_3
tgggtagttgaagtagtggaatatttgattttaattacacagaagtaccttacatgtcacagtattagacataaacacagtttttctcagtttgccaagcgttttacttttcatttatttaatcttgagtaattatgatgggctatgatagaattaagagaggactgaaatcactgatcgcttttaaacacattcccaaatctggtatgaaagcactgaggctattcataccattctcaatgaattccagccactcttgctgacaataagagaaaatacaaagccattatcaacttgccwgaacagcagagtaatagccagtcggtgctactgggagctatggggctatttggaaacaaatggttatttcaccagggaagtaaaacaaattgcacagatttacctctgttccacctccctccccccccccaccccccctcatttttttcctcttctttctttgt

SEQ ID NO: 78134 - DNA, 600 bp, Chicken  19866894367372_1
gggagcaaatggagtagaaggtccatctgttctcctggcgtagtctcctgacctctgtcttctcattggttatgtcagaaaatagaaattatttttctaaacaggtataaaaaaatccagtgatcttttttagtacatacctgctctgaatcgtcaacagaagtcagggtttctggcagcccagcaatttgcctttcctgtttttttgctgcagagacccacatgtagcctgcagtcatacagagatgtaccagaggatctgccacaagtcaaatgtttgtaggcaactgtaaatacacrtcatttcttgatcragccttgtatagattttcttctctayrgataaatacataggctgagagacctggggctgttcagactggagaagagaaggctccaaggtgacctgatagtggcctttcactatctaaagggggctacagaaaataaagggacagagaggattgagcgcagccctgctgaaggttgtgctccagagagctggggctcttcagcctgaagatcagaaggctgctaggtgacccragggtggccttccagtaactaaaggggagcttcaggaaagaaggggacaggctc

SEQ ID NO: 78135 - DNA, 600 bp, Chicken  19866894367372_2
tagaaggtccatctgttctcctggcgtagtctcctgacctctgtcttctcattggttatgtcagaaaatagaaattatttttctaaacaggtataaaaaaatccagtgatcttttttagtacatacctgctctgaatcgtcaacagaagtcagggtttctggcagcccagcaatttgcctttcctgtttttttgctgcagagacccacatgtagcctgcagtcatacagagatgtaccagaggatctgccacaagtcaaatgtttgtaggcaactgtaaatacacrtcatttcttgatcragccttgtatagattttcttctctayrgataaatacataggctgagagacctggggctgttcagactggagaagagaaggctccaaggtgacctgatagtggcctttcactatctaaagggggctacagaaaataaagggacagagaggattgagcgcagccctgctgaaggttgtgctccagagagctggggctcttcagcctgaagatcagaaggctgctaggtgacccragggtggccttccagtaactaaaggggagcttcaggaaagaaggggacaggctctttagctgagacta

SEQ ID NO: 78136 - DNA, 600 bp, Chicken  19866894367372_3
tagtctcctgacctctgtcttctcattggttatgtcagaaaatagaaattatttttctaaacaggtataaaaaaatccagtgatcttttttagtacatacctgctctgaatcgtcaacagaagtcagggtttctggcagcccagcaatttgcctttcctgtttttttgctgcagagacccacatgtagcctgcagtcatacagagatgtaccagaggatctgccacaagtcaaatgtttgtaggcaactgtaaatacacrtcatttcttgatcragccttgtatagattttcttctctayrgataaatacataggctgagagacctggggctgttcagactggagaagagaaggctccaaggtgacctgatagtggcctttcactatctaaagggggctacagaaaataaagggacagagaggattgagcgcagccctgctgaaggttgtgctccagagagctggggctcttcagcctgaagatcagaaggctgctaggtgacccragggtggccttccagtaactaaaggggagcttcaggaaagaaggggacaggctctttagctgagactattgtgatagaaaggggaaatgttttc

SEQ ID NO: 78137 - DNA, 600 bp, Chicken  19866894367372_4
agtctcctgacctctgtcttctcattggttatgtcagaaaatagaaattatttttctaaacaggtataaaaaaatccagtgatcttttttagtacatacctgctctgaatcgtcaacagaagtcagggtttctggcagcccagcaatttgcctttcctgtttttttgctgcagagacccacatgtagcctgcagtcatacagagatgtaccagaggatctgccacaagtcaaatgtttgtaggcaactgtaaatacacrtcatttcttgatcragccttgtatagattttcttctctayrgataaatacataggctgagagacctggggctgttcagactggagaagagaaggctccaaggtgacctgatagtggcctttcactatctaaagggggctacagaaaataaagggacagagaggattgagcgcagccctgctgaaggttgtgctccagagagctggggctcttcagcctgaagatcagaaggctgctaggtgacccragggtggccttccagtaactaaaggggagcttcaggaaagaaggggacaggctctttagctgagactattgtgatagaaaggggaaatgttttca

SEQ ID NO: 78138 - DNA, 600 bp, Chicken  19866894367372_5
tgtaccagaggatctgccacaagtcaaatgtttgtaggcaactgtaaatacacrtcatttcttgatcragccttgtatagattttcttctctayrgataaatacataggctgagagacctggggctgttcagactggagaagagaaggctccaaggtgacctgatagtggcctttcactatctaaagggggctacagaaaataaagggacagagaggattgagcgcagccctgctgaaggttgtgctccagagagctggggctcttcagcctgaagatcagaaggctgctaggtgacccragggtggccttccagtaactaaaggggagcttcaggaaagaaggggacaggctctttagctgagactattgtgatagaaaggggaaatgttttcaaggttaaaaagggcagatttagattagatataaggaaaagatcttttacactgagggtgctgaggcactggaacaggctgcccagagatctggtggatgccccattcctggagactttcaaaatgaggctggatcaggccctggcaacataatctagctgtagtgtccctgttcattgcagggagctggaccagatggcctttaa

SEQ ID NO: 78139 - DNA, 599 bp, Chicken  19866894367379_1
  misc_feature (1)..(130): n is any nucleotide
nnnnnnnnnnnnnnnnnnnnnnnnnnnnnnnnnnnnnnnnnnnnnnnnnnnnnnnnnnnnnnnnnnnnnnnnnnnnnnnnnnnnnnnnnnnnnnnnnnnnnnnnnnnnnnnnnnnnnnnnnnnnnnnnnnttggaacacacttctggagataattagcccagcctccttgcagggccatttagagaatggctgcattcagttgaggtttgactataactgaggatagatgcaacactacttctctgagaaacatgatccagtacttaaccattttgacagcaaaaaagacttttttactyatattttaatggaatttcctctatttcagtttttgcccattgcccattttcttgtcactggtctgagaaggctcaagcaccttcttcttactgccttgtcatatgcacactgatgaaagatctccctgagtcttctcttctacaggctgaacattctcagctttcaatttgtccttgtatgtcagatactccaaccatttagtcatctttgtgatcgtttgatggatttgctatagaaagcccatttctgtctttcgctgaggagctgaggcatggactcagcactccagatatggcct

SEQ ID NO: 78140 - DNA, 600 bp, Chicken  19866894367379_2
actgatgaaagatctccctgagtcttctcttctacaggctgaacattctcagctttcaatttgtccttgtatgtcagatactccaaccatttagtcatctttgtgatcgtttgatggatttgctatagaaagcccatttctgtctttcgctgaggagctgaggcatggactcagcactccagatatggcctcagcagtgctgagcagaggggaagaatcctctcccttgacctactggcaacatcattcctaatacagcctgaactgctgctggcattctttgcctcaagggcacattgmtgactcatgactcatagtgaacttgctgtccatcaccatctcattccttgtccactgaggttctttccagctagtcaggtcatagtatttactggtacatgggtttattcctctcctcatatgggacttggcattcccctttgttgaacttcacggcattcctgctggcccatttctccagtctgttgaggtacctctgaatgatggcaccaatacctgttttctatctcctgcaaacttccagagggtatacactattcaggtcattaatgaagatgttaaacaaaactggttccagta

SEQ ID NO: 78141 - DNA, 600 bp, Chicken  19866894367383_1
actcacgccagcagttttggtatcactgacaatgccagcctatgtcagctttgctttgttctggactggattgagcacaaggctttctgagtttctgaaacacagcagtgctttcagtagcagttgcaagtgccccacagggttgtcttactaagtcagactgtggaactcatggagactggttctgtttgactgtttattataagcaaatggttacaaagaaattagatctcttgtgtaaaactctaaatcttttcattttgtttgtgaatttcctattcctaagtcactgaatgcctrttaggtatacggtttgaaagatcatggagtgaagccctaatcaaatgatcctcataacaattaattaacatacatacagggagatttctgtgaaaatcagcccctaggaagtatttccttttctaactcctatrtaatgtgccactgcccctacagtacaagttaacatgatttactttcaaagctttctctgctgctgcctgccttctaagtagttctggctttacttccagctctctccatcttgcatctctaatacttaagctttcctaattctttcctctgctattctgaccttcc

SEQ ID NO: 78142 - DNA, 600 bp, Chicken  19866894367383_2
ccacagggttgtcttactaagtcagactgtggaactcatggagactggttctgtttgactgtttattataagcaaatggttacaaagaaattagatctcttgtgtaaaactctaaatcttttcattttgtttgtgaatttcctattcctaagtcactgaatgcctrttaggtatacggtttgaaagatcatggagtgaagccctaatcaaatgatcctcataacaattaattaacatacatacagggagatttctgtgaaaatcagcccctaggaagtatttccttttctaactcctatrtaatgtgccactgcccctacagtacaagttaacatgatttactttcaaagctttctctgctgctgcctgccttctaagtagttctggctttacttccagctctctccatcttgcatctctaatacttaagctttcctaattctttcctctgctattctgaccttccctacattactcrtctgcataggagagaagctgtcccaaagcctcaggaatcataaagaataggcaatatcttaaagtgcagcttttactaaggaaccaacctcattgctatcaggcaggagagagggatttcct

SEQ ID NO: 78143 - DNA, 600 bp, Chicken  19866894367383_3
tttgaaagatcatggagtgaagccctaatcaaatgatcctcataacaattaattaacatacatacagggagatttctgtgaaaatcagcccctaggaagtatttccttttctaactcctatrtaatgtgccactgcccctacagtacaagttaacatgatttactttcaaagctttctctgctgctgcctgccttctaagtagttctggctttacttccagctctctccatcttgcatctctaatacttaagctttcctaattctttcctctgctattctgaccttccctacattactcrtctgcataggagagaagctgtcccaaagcctcaggaatcataaagaataggcaatatcttaaagtgcagcttttactaaggaaccaacctcattgctatcaggcaggagagagggatttccttcctcacattatcacaagcaaacatgattaaaaaactgaaagaatagaaaaaaacagaagsaccaaaatattttgaccataaactgtcagaagccaggtactgtgttacagtgccctaagaaaaatagattttctacagcgcaggatgggtcagtatttattttcttcttcagcttga

SEQ ID NO: 78144 - DNA, 600 bp, Chicken  19866894367383_4
gctgcctgccttctaagtagttctggctttacttccagctctctccatcttgcatctctaatacttaagctttcctaattctttcctctgctattctgaccttccctacattactcrtctgcataggagagaagctgtcccaaagcctcaggaatcataaagaataggcaatatcttaaagtgcagcttttactaaggaaccaacctcattgctatcaggcaggagagagggatttccttcctcacattatcacaagcaaacatgattaaaaaactgaaagaatagaaaaaaacagaagsaccaaaatattttgaccataaactgtcagaagccaggtactgtgttacagtgccctaagaaaaatagattttctacagcgcaggatgggtcagtatttattttcttcttcagcttgatcttttctagtagcaattaaatccttgtcacttgttctttttcttcagtacattctaactgctgaaattactgaaaaattaataccaaaaaatggtctccaattctgtctcacatgattttcaaatgcttcaacttagattctttcagtaacaatagttcataattatggagttatttcagcc

SEQ ID NO: 78145 - DNA, 599 bp, Chicken  19866894367388_1
  misc_feature (1)..(69): n is any nucleotide
nnnnnnnnnnnnnnnnnnnnnnnnnnnnnnnnnnnnnnnnnnnnnnnnnnnnnnnnnnnnnnnnnnnnntctattgagtctggaagttcctgaggtgaccacagttctgctcctgtggatacccaaaactgtctttgctaactctggtggcaatcaagaagtaaagagaacattatctaagtctatctaggttttcacaacttcctgatagacagaagctcttcttaggttaagggaaatgtgctgcaatactggtatctttacagaataagcctggggtacacacacaccacacagtcygattttcacaacagctctgcatggagtgcacaccaaagtggcatcagtaggatgctcagggggggcagagtccatagactggctcagtatgcttcaagaatatgtttatgtgcagcctaagaaaccacatcagccacatgtcctctgaacggcttcagacataacaagaagacaaggatcccttcttaacagtcataactacgtaatacatagtggtgcatttgccagtgctgcccctcggtaacttaatggttagaaggagcctctgtgcttcttccagctccaaaaggttgaaacaa

SEQ ID NO: 78146 - DNA, 600 bp, Chicken  19866894367391_1
taccaaccgaacttcacaggagttaaaaatatttcctttactatttgtccttcataaaatttatctggaaatgcatcagatgaaaatacagtgaaaatgggacactggacatttctgcttgcatgatacaccacaatgaaaaatggccctgagcagctattagtgtttctctagaaggcatatatatcagttaattagtgccagctaatttcctcaaatcctgtaatttacattaaaaattgaacagtttaaaccccatctgaagtgtttattcaagcatgctgggtaacatgtgtccawgtgtcttttagatcacttacagcattaatggagaagctcaagatgagctttgaaatcatctaagtctgctcgcagtactttgttgattctgtacttcagcaccatagtcattttaagtacccagccattctatttttgaaaaataaaatttataaatccactgcataaaacacagttaacatcttttattttaactgtttatccagatgtaggccaaagcagagcgtatcttgagaaaggagttgttcagctttccatcagcggttgttactgtttgtcattccctaaaaaatatgaaga

SEQ ID NO: 78147 - DNA, 599 bp, Chicken  19866894367393_1
  misc_feature (1)..(201): n is any nucleotide
nnnnnnnnnnnnnnnnnnnnnnnnnnnnnnnnnnnnnnnnnnnnnnnnnnnnnnnnnnnnnnnnnnnnnnnnnnnnnnnnnnnnnnnnnnnnnnnnnnnnnnnnnnnnnnnnnnnnnnnnnnnnnnnnnnnnnnnnnnnnnnnnnnnnnnnnnnnnnnnnnnnnnnnnnnnnnnnnnnnnnnnnnnnnnnnnnnnnnnnnnaaaagatctaatgaaatacgtagcaaataagctatctttctaagcaactgatgttccttagaatgtgtatattaagtgtagatgagtatagcaaacttyatttatgatctttatcaacttaattgaaggactgagaaggacttaggggtcctggttgatggaaaacttaatatgagcctgcattgtgtgcttgcaacccagaaaccaatggtatcctgggttccatcagaagaggggtgactagcagggcaagggaggtgattgtccccctctgctctgcccttgtgaggccacagctggagtatgacatccaagtctggggcccctgacacagggaagatgtggaacttttggatagtgtctagcagatggccacaaagatgatcaaagagctggaa

SEQ ID NO: 78148 - DNA, 600 bp, Chicken  19866894367395_1
gcgattaatggcattgtagctagcaactgctgtgccacctacttaagcttttcataactgatatggagagaaatatttcctgaaatgaaattacggatgattaataataataatgaaatgaaatagcaatgctgtctagcttcaattatttataagtgtaacattacttagatttgcctccagttttaaaataaggtggcactttatttatgttgctcataaactttttcctgaattacttactggatgcgtatatgtgtatgttcttagaattcttacagctatttctcttctttgctrtatctttcttctctgttgatttttgaatctgcaccctcttgtttcctcatcctatgtttagacatattgagtgcttttctgttgtctaattttgtctcctttaacttctttgtttttcacttaacactttcaagtgacctatcagcaactcttaaagtacatttagatcaggctgttttgaatatcatttacgcacagaaattgattttttttttttctgatttcaagttcttggctggaaattatgctaagaacactctgatatgtcctctcaggccactttcactagttcatcagcac

SEQ ID NO: 78149 - DNA, 599 bp, Chicken  19866894367399_1
  misc_feature (1)..(7): n is any nucleotide
nnnnnnntggagatcatcgaaacccaactagatgtgctcctggatggacctactaggtagagttggaccagctgacctccagaggtccctgataatttcacccatgctacagacctgcaaattcattcggagggccgtttctttaagtagacacacttcctctcgtgagcattacaggttgttgtgtctgatctttcctacttccgctatgctaagacagcgcttagattattttagcgagaccgggggaccaaagaaaacaaaccttcccatccaccctcagctttgagctgcttaagyctccgtagtctgctgacaagcactccattacacttagctgagtataagcagcattttttaataaattgtcatctctatattagttttactattacaaattaaggaactacagcgtcatagtgctacagctmagcagactaygttacacaaaatcattcatccttaattagataaatcaattagactaacctgtattacaagaatggatgagatgtggttttctgctagcttataggcraggtgcatcctgtaagccctttgaattttaattgcagaaacgtgatgatatgcagctgcta

SEQ ID NO: 78150 - DNA, 600 bp, Chicken  19866894367399_2
gggccgtttctttaagtagacacacttcctctcgtgagcattacaggttgttgtgtctgatctttcctacttccgctatgctaagacagcgcttagattattttagcgagaccgggggaccaaagaaaacaaaccttcccatccaccctcagctttgagctgcttaagyctccgtagtctgctgacaagcactccattacacttagctgagtataagcagcattttttaataaattgtcatctctatattagttttactattacaaattaaggaactacagcgtcatagtgctacagctmagcagactaygttacacaaaatcattcatccttaattagataaatcaattagactaacctgtattacaagaatggatgagatgtggttttctgctagcttataggcraggtgcatcctgtaagccctttgaattttaattgcagaaacgtgatgatatgcagctgctataaaataaagcagtctcttcttctgtttctgttctgaaaactgttggaagaaaacagatcgaagagtatcattaawtttcctacccagagacggctgatttatgcaaggaacrtagcacgcagcaatgcaag

SEQ ID NO: 78151 - DNA, 600 bp, Chicken  19866894367399_3
tttaagtagacacacttcctctcgtgagcattacaggttgttgtgtctgatctttcctacttccgctatgctaagacagcgcttagattattttagcgagaccgggggaccaaagaaaacaaaccttcccatccaccctcagctttgagctgcttaagyctccgtagtctgctgacaagcactccattacacttagctgagtataagcagcattttttaataaattgtcatctctatattagttttactattacaaattaaggaactacagcgtcatagtgctacagctmagcagactaygttacacaaaatcattcatccttaattagataaatcaattagactaacctgtattacaagaatggatgagatgtggttttctgctagcttataggcraggtgcatcctgtaagccctttgaattttaattgcagaaacgtgatgatatgcagctgctataaaataaagcagtctcttcttctgtttctgttctgaaaactgttggaagaaaacagatcgaagagtatcattaawtttcctacccagagacggctgatttatgcaaggaacrtagcacgcagcaatgcaagatggtgaaga

SEQ ID NO: 78152 - DNA, 600 bp, Chicken  19866894367399_4
gagaccgggggaccaaagaaaacaaaccttcccatccaccctcagctttgagctgcttaagyctccgtagtctgctgacaagcactccattacacttagctgagtataagcagcattttttaataaattgtcatctctatattagttttactattacaaattaaggaactacagcgtcatagtgctacagctmagcagactaygttacacaaaatcattcatccttaattagataaatcaattagactaacctgtattacaagaatggatgagatgtggttttctgctagcttataggcraggtgcatcctgtaagccctttgaattttaattgcagaaacgtgatgatatgcagctgctataaaataaagcagtctcttcttctgtttctgttctgaaaactgttggaagaaaacagatcgaagagtatcattaawtttcctacccagagacggctgatttatgcaaggaacrtagcacgcagcaatgcaagatggtgaagaatgacctccgaagtcattacctcagaactcaatatgctgctacctttcctcagtcctaggtctctaatctgaacgaagacatggcaaagttattgcc

SEQ ID NO: 78153 - DNA, 600 bp, Chicken  19866894367399_5
tatattagttttactattacaaattaaggaactacagcgtcatagtgctacagctmagcagactaygttacacaaaatcattcatccttaattagataaatcaattagactaacctgtattacaagaatggatgagatgtggttttctgctagcttataggcraggtgcatcctgtaagccctttgaattttaattgcagaaacgtgatgatatgcagctgctataaaataaagcagtctcttcttctgtttctgttctgaaaactgttggaagaaaacagatcgaagagtatcattaawtttcctacccagagacggctgatttatgcaaggaacrtagcacgcagcaatgcaagatggtgaagaatgacctccgaagtcattacctcagaactcaatatgctgctacctttcctcagtcctaggtctctaatctgaacgaagacatggcaaagttattgccgggacagtttcattctgggcaacaataatctgacctctgacccacagaattctcaaagcagtcaacaggaatagagtttaatgatctgagctcttttctggccagccaaagttaacgctaaaattgctctggagata

SEQ ID NO: 78154 - DNA, 600 bp, Chicken  19866894367399_6
cgtcatagtgctacagctmagcagactaygttacacaaaatcattcatccttaattagataaatcaattagactaacctgtattacaagaatggatgagatgtggttttctgctagcttataggcraggtgcatcctgtaagccctttgaattttaattgcagaaacgtgatgatatgcagctgctataaaataaagcagtctcttcttctgtttctgttctgaaaactgttggaagaaaacagatcgaagagtatcattaawtttcctacccagagacggctgatttatgcaaggaacrtagcacgcagcaatgcaagatggtgaagaatgacctccgaagtcattacctcagaactcaatatgctgctacctttcctcagtcctaggtctctaatctgaacgaagacatggcaaagttattgccgggacagtttcattctgggcaacaataatctgacctctgacccacagaattctcaaagcagtcaacaggaatagagtttaatgatctgagctcttttctggccagccaaagttaacgctaaaattgctctggagatacttcacatcaagtgtagttttaatgtgaagtatacta

SEQ ID NO: 78155 - DNA, 599 bp, Chicken  19866894367405_1
  misc_feature (1)..(180): n is any nucleotide
nnnnnnnnnnnnnnnnnnnnnnnnnnnnnnnnnnnnnnnnnnnnnnnnnnnnnnnnnnnnnnnnnnnnnnnnnnnnnnnnnnnnnnnnnnnnnnnnnnnnnnnnnnnnnnnnnnnnnnnnnnnnnnnnnnnnnnnnnnnnnnnnnnnnnnnnnnnnnnnnnnnnnnnnnnnnnnnnnnnnccctggcttgggcaggtacactctttgctgggaaaagaactggctggagggctgagcccagagagtggtggtgaatggagttaaatccagctggtaattgtcacgagtggttctcccctrgggttggtaatggggcctgtccatttaatacctttttattgatgacctggactaggggattgagtgcaccctcagtaagtttgcaggttaaagcaagttgggaggaagtgtctgtgtggaagtaacagacctggggatgttggttgacactcagctgaacacgagctggcagtgtgcccgggcggctaagaaggccaagrgcatcctggcttgtattagaaatagtgtggccagcaggagcaagaagatgatcatccctctgtactcagctctggtgaggctgcacctcaaatgctgtg

SEQ ID NO: 78156 - DNA, 600 bp, Chicken  19866894367405_2
ctctttgctgggaaaagaactggctggagggctgagcccagagagtggtggtgaatggagttaaatccagctggtaattgtcacgagtggttctcccctrgggttggtaatggggcctgtccatttaatacctttttattgatgacctggactaggggattgagtgcaccctcagtaagtttgcaggttaaagcaagttgggaggaagtgtctgtgtggaagtaacagacctggggatgttggttgacactcagctgaacacgagctggcagtgtgcccgggcggctaagaaggccaagrgcatcctggcttgtattagaaatagtgtggccagcaggagcaagaagatgatcatccctctgtactcagctctggtgaggctgcacctcaaatgctgtgttcagttttgggcccctcactacaagaaagacattgaggctctggagcatgtccagagaagggcaacaaagctgtgtgagatctggagcacaagtcttatgggaatttgtcccatacaccataaagttgaaattagcaactgatattaataattaacagagtgttttaaagcagtccttcctctccccgttctctgctatg

SEQ ID NO: 78157 - DNA, 600 bp, Chicken  19866894367413_1
aatgaatgggaagtgatgcagccctctttaaacatgaggccctaacagtgggagcccttcataatagatgttctttatgttgtactcacatgcgtagccatacacatctgcacacttatgtaatgcccagcaaataattaaaaaaaccaacacgtaaactccacgtagagaaatgagccattactcattttctttcagccctacacaagtgccactatgctgctctgaacgtgcaaactgccaagctgctcacaaaaataacaccaccactgcattcagggcacgtctgcaacccacackcagtatgaatgggcacagaatggagcccaacgccacccagctttgggcaaggccaacccatggaaccccaacgtgctgagaccggctgggaaggcgatgggaaaggagtccctttgggaccaaagtataacaagaagcagagattccctttccaggaaagctgcagtcccgcaccmggtgaagccagtggtggatgtgctgtcttctaaaggcttaaatatcacacagaagcttaaaccttaccccaagtgaacgcttcagagagggcaccctattcascacatgtacaccgccatccgc

SEQ ID NO: 78158 - DNA, 600 bp, Chicken  19866894367413_2
gccattactcattttctttcagccctacacaagtgccactatgctgctctgaacgtgcaaactgccaagctgctcacaaaaataacaccaccactgcattcagggcacgtctgcaacccacackcagtatgaatgggcacagaatggagcccaacgccacccagctttgggcaaggccaacccatggaaccccaacgtgctgagaccggctgggaaggcgatgggaaaggagtccctttgggaccaaagtataacaagaagcagagattccctttccaggaaagctgcagtcccgcaccmggtgaagccagtggtggatgtgctgtcttctaaaggcttaaatatcacacagaagcttaaaccttaccccaagtgaacgcttcagagagggcaccctattcascacatgtacaccgccatccgcatgcagaatgcacgcagctcgccgagcaccagcggccrttgggtgcaccaagcagtgaacrayggcgaccacaaggccgtggggttcaggatggggtgtggttccatcacagctcttcaaaaaccacctcagtgtcacagatgtgctccataccttccaaaatatgttagtacaca

SEQ ID NO: 78159 - DNA, 600 bp, Chicken  19866894367413_3
ggcacgtctgcaacccacackcagtatgaatgggcacagaatggagcccaacgccacccagctttgggcaaggccaacccatggaaccccaacgtgctgagaccggctgggaaggcgatgggaaaggagtccctttgggaccaaagtataacaagaagcagagattccctttccaggaaagctgcagtcccgcaccmggtgaagccagtggtggatgtgctgtcttctaaaggcttaaatatcacacagaagcttaaaccttaccccaagtgaacgcttcagagagggcaccctattcascacatgtacaccgccatccgcatgcagaatgcacgcagctcgccgagcaccagcggccrttgggtgcaccaagcagtgaacrayggcgaccacaaggccgtggggttcaggatggggtgtggttccatcacagctcttcaaaaaccacctcagtgtcacagatgtgctccataccttccaaaatatgttagtacacacggtgcatttccaaacacctctccgccgcgtcgcacaacagccacctccgagacccccgagcacccttcacaagttatttctggacgtgttgaatctcagaac

SEQ ID NO: 78160 - DNA, 600 bp, Chicken  19866894367413_4
agctttgggcaaggccaacccatggaaccccaacgtgctgagaccggctgggaaggcgatgggaaaggagtccctttgggaccaaagtataacaagaagcagagattccctttccaggaaagctgcagtcccgcaccmggtgaagccagtggtggatgtgctgtcttctaaaggcttaaatatcacacagaagcttaaaccttaccccaagtgaacgcttcagagagggcaccctattcascacatgtacaccgccatccgcatgcagaatgcacgcagctcgccgagcaccagcggccrttgggtgcaccaagcagtgaacrayggcgaccacaaggccgtggggttcaggatggggtgtggttccatcacagctcttcaaaaaccacctcagtgtcacagatgtgctccataccttccaaaatatgttagtacacacggtgcatttccaaacacctctccgccgcgtcgcacaacagccacctccgagacccccgagcacccttcacaagttatttctggacgtgttgaatctcagaacagcaataaaaggaaaacagtgccccagccaaaataaatgtctgtttggaacgcgtttaa

SEQ ID NO: 78161 - DNA, 600 bp, Chicken  19866894367413_5
ggaaccccaacgtgctgagaccggctgggaaggcgatgggaaaggagtccctttgggaccaaagtataacaagaagcagagattccctttccaggaaagctgcagtcccgcaccmggtgaagccagtggtggatgtgctgtcttctaaaggcttaaatatcacacagaagcttaaaccttaccccaagtgaacgcttcagagagggcaccctattcascacatgtacaccgccatccgcatgcagaatgcacgcagctcgccgagcaccagcggccrttgggtgcaccaagcagtgaacrayggcgaccacaaggccgtggggttcaggatggggtgtggttccatcacagctcttcaaaaaccacctcagtgtcacagatgtgctccataccttccaaaatatgttagtacacacggtgcatttccaaacacctctccgccgcgtcgcacaacagccacctccgagacccccgagcacccttcacaagttatttctggacgtgttgaatctcagaacagcaataaaaggaaaacagtgccccagccaaaataaatgtctgtttggaacgcgtttaaaaagctctggaatatgtgggtaa

SEQ ID NO: 78162 - DNA, 600 bp, Chicken  19866894367413_6
aaccccaacgtgctgagaccggctgggaaggcgatgggaaaggagtccctttgggaccaaagtataacaagaagcagagattccctttccaggaaagctgcagtcccgcaccmggtgaagccagtggtggatgtgctgtcttctaaaggcttaaatatcacacagaagcttaaaccttaccccaagtgaacgcttcagagagggcaccctattcascacatgtacaccgccatccgcatgcagaatgcacgcagctcgccgagcaccagcggccrttgggtgcaccaagcagtgaacrayggcgaccacaaggccgtggggttcaggatggggtgtggttccatcacagctcttcaaaaaccacctcagtgtcacagatgtgctccataccttccaaaatatgttagtacacacggtgcatttccaaacacctctccgccgcgtcgcacaacagccacctccgagacccccgagcacccttcacaagttatttctggacgtgttgaatctcagaacagcaataaaaggaaaacagtgccccagccaaaataaatgtctgtttggaacgcgtttaaaaagctctggaatatgtgggtaagt

SEQ ID NO: 78163 - DNA, 600 bp, Chicken  19866894367413_7
gtgggaagggtacctttatgaagacctcgtggtagatttgtctatctaaaggaaatgctccgggagataaaagcctggaccccgactcgtttgcagtcacatcagaatcctcctctgtcctccaccagctcagctactaagcatgaaatctaaaccaacagatagaaaaaggcctcagcgccgcctgtgtcggtcaggctgtgaaagccccactttgcactgctcgcacaaactgctcgcaccaaaagccttcacgtgtcatcccagcagaggtgagatcagaaacaaaagtgagacccrgtttgaaacccccagccctccacccccaacccaagcgtggggctgtgcatggtgctcggtgctcctggggcagatgctacctcagggcacaggatccgggcatacatggcagcatgcacaaccacagacagcactcagatggacttttaagggctgtgagatgcacayttcacaccctaagcagtgcaatcccagttgtttcggccgagctcattcaggccaggacccggacccatagcactgcagccccctccctttgcgctcagacctggcaaacccttctgcttcactttttcctaa

SEQ ID NO: 78164 - DNA, 600 bp, Chicken  19866894367413_8
aaggcctcagcgccgcctgtgtcggtcaggctgtgaaagccccactttgcactgctcgcacaaactgctcgcaccaaaagccttcacgtgtcatcccagcagaggtgagatcagaaacaaaagtgagacccrgtttgaaacccccagccctccacccccaacccaagcgtggggctgtgcatggtgctcggtgctcctggggcagatgctacctcagggcacaggatccgggcatacatggcagcatgcacaaccacagacagcactcagatggacttttaagggctgtgagatgcacayttcacaccctaagcagtgcaatcccagttgtttcggccgagctcattcaggccaggacccggacccatagcactgcagccccctccctttgcgctcagacctggcaaacccttctgcttcactttttcctaatccagaaggaaaagcagatgatcaaacagatcagctctgcagacgatgtgtgcactgctctctgttgttgttgttgttttaacagaaacaacagtaatgcttccctcaaagcaggagcggcatggaggaacagtggaatgattgttgcaggagtgaatctggttttca

SEQ ID NO: 78165 - DNA, 599 bp, Chicken  19866894367416_1
  misc_feature (1)..(109): n is any nucleotide
nnnnnnnnnnnnnnnnnnnnnnnnnnnnnnnnnnnnnnnnnnnnnnnnnnnnnnnnnnnnnnnnnnnnnnnnnnnnnnnnnnnnnnnnnnnnnnnnnnnnnnnnnnnnngatgaaataaacatcaaggtacaaattttcctcattatcataaaaaagtcaatttaactgaacagtcatttcagaagttgaatgggcacttctgtttttatctattgcagaaattagaggaaaaaaaaacccacaaagtttaaagtgttctccagtcaatatttccatctgcaaaagtttgttttttgtgktttttttctccttttaaaagagaaacaatcatttacagaagtagtatctgatatatactacaggatgtcacaggaggaagaatgaagtctctttttaagaatgtcattcagggactattccactccaaaggacgagacttaataaatacagatgatccaaatgaagttcaattcctactagaatttatttaaaagatttggaaggatttaaaataatcttctaagtctctatcttgaaactctgaattttcaggatagatcttaacgcattaaaaaaaataatatatttcagtatattt

SEQ ID NO: 78166 - DNA, 353 bp, Chicken  19866894367421_1
acagaatctcccaaatccacttctgggaagaaaaaaaaagctgtatgtagtaactgaggttattgcatagaaagtctggagaagtctgcatttgcaaatcagacaacatttgaatggcattgtatgagggctgttttctgagaggcagttgtcacctagagggtctgtgatatgaagagcaaatcattcttgatagcgtgttttgaatcaggagaaagagcatggttatagcattttgatcttatgctaattattcatgtaatggccacagggatgaataacaactatctttcaacaaawctgggtttcctgtataggtgtcaatggcacgggagctgaagtttaatctttcc

SEQ ID NO: 78167 - DNA, 600 bp, Chicken  19866894367427_1
tacaaagaatagacagttgtacaagctttaattattgtttttttaaggaaacactgtgcaaaaaatgtttcttcttgtttgtttaaatagaaagtctaaaaactctcattctattgtcataagagagctgtcacagaaaacagtgagcttttccaaaatgcaatgagcatagtctaaattactgtgtttcatccatcagatgtactcagctgatggtttgggtccatttaaaaccaagaacatctttcagaatccaaccattttgatcagagcttctgaattgccagtatttatgtcacrtttttaatacagatccagttccagttatttgatttttagcctcctctgtaattttgtttaccttcagacacaacataagcgtgttgcgccctgttaagttctccaatcagcacagaaacttctaacaatggatttacacttaggcgctgctctgtgagactcacacaccttacactttgtacttccagtttatttccaagaagtggttcaggcttcccagaaacatctcctgatttgataagcagctactgcttgtgaattactatcaaagtgcagctgggcagcaagcatactaatctg

SEQ ID NO: 78168 - DNA, 600 bp, Chicken  19866894367435_1
tattttcttactgctgccccacacagtttgaactcagactgcttaaacttttcctatgagccacttgatttcaccacaataaaattcaccatcagatgtgagtgctaggggagcactgctgcttagcagtgatgagatgtgattcaaaacaaagcagcaatacagggctaaatacatagaaatgcagcatctgagagcattatttcatctacccgttctccagctgcttgccatggttatccattttaattaccctgctctaaaccttagcaaggacaagccggtacccgggaagctccrggaacagtgatccttctgcaactggataacattcaaatccaggctgggagcaccagatccagaggcagttaccatctgggagatgaaacaagcagttgcctgaagcagttttatctgaggaaagtctattctgtctgataccatatctggcctgaacgctcctcctcagacccttacgaatgtgcctacatcttagagttgagctggcactgtatgggtgaagcctgttctaccagcgggacagcagctgtgcacagcactttggattacagagcttccaggcaccgatgtcacatcaag

SEQ ID NO: 78169 - DNA, 343 bp, Chicken  19866894367435_2
agttgcctgaagcagttttatctgaggaaagtctattctgtctgataccatatctggcctgaacgctcctcctcagacccttacgaatgtgcctacatcttagagttgagctggcactgtatgggtgaagcctgttctaccagcgggacagcagctgtgcacagcactttggattacagagcttccaggcaccgatgtcacatcaagatttttatcttcctcctccccttttaatcacattaaatggcttgtcaaaaggcaaacactgacaaatgcactgcaaagcagaaatctcaacgyrcacatttaaatgtacatctacgtattaaaaataaatatatag

SEQ ID NO: 78170 - DNA, 342 bp, Chicken  19866894367435_3
gttgcctgaagcagttttatctgaggaaagtctattctgtctgataccatatctggcctgaacgctcctcctcagacccttacgaatgtgcctacatcttagagttgagctggcactgtatgggtgaagcctgttctaccagcgggacagcagctgtgcacagcactttggattacagagcttccaggcaccgatgtcacatcaagatttttatcttcctcctccccttttaatcacattaaatggcttgtcaaaaggcaaacactgacaaatgcactgcaaagcagaaatctcaacgyrcacatttaaatgtacatctacgtattaaaaataaatatatag

SEQ ID NO: 78171 - DNA, 600 bp, Chicken  19866894367450_1
tacagtcccatgagtatgtatgggaaatgggcaggagaatgtcaggcttccgattgcctccttagtttgtgatgtcaggagatagatggcacacgttaaaacagactgcaggagcagatagttcagcataaatcttcaggaaccagattgaaacactaagctcccctaaaacaatgtccccaaatgctttttgttgtgcctaagatatctagagcctctcagtaagaaacaggaatgaaagcgttgcactgttccaaggcacctgcagctggctcttgggtgttccctaaagcttcagcrtttgggtggtgtaaagactgctttgcagaagttatttccagcctcagtgtgtctgtggtatggtaaggctgtcacctgttttgttatgcttttgattgactgaccttgtaaaacacatcctgtgctgcttttgtttttctgcttgctgacgacagccacaagtcatcacaatgccggcgctgccactggatgaaatccagcttacagaaaaggatcccaagacagggaagctgagaaccttaccagcactggtgagctgtattttttcatgaaggctaaacaagacctttaccaaatagc

SEQ ID NO: 78172 - DNA, 444 bp, Chicken  19866894367464_1
cctagtccaatttccatcagaagcttttcatcaatttcagttaagactgatcattgcatattgtatgggacaaggacagttttatcttcataaatgtctgagcaatgcagtttgcacctcaaccacctaaataatgaatgttgatcattacctgtgttttcttcacaggctaaaagagaagttttgtacagatggcttttttactgcaacaacacttcttgtcatgcggatatattttatgtatgtaaagatgaacaactgccacttcagctgcttttacacagatttactactcacttyccaagtgatctgacagcttttgaaatctttatagtggaattcccagcttgtaataagcagaacttctgatagattagacaacagaagtaaagcctactcctcattttttctgcattgtggtttttctggagaaatgcagatcat

SEQ ID NO: 78173 - DNA, 600 bp, Chicken  19866894367465_1
gaaaacattcatttaggaactcgcatggaaaaggaacgggggagtgaagacaaataagaattacagctttacttgtgaagggaatcagaatttaggatatcaggagctgcagcgcaatgcaatcctcctacaattacacataattgtattattacctgagcagtgtctcggagagctccaggtgtgcatccctcatgttttcccacacgatgaggaagtgtgtgcttctgggatgctgtccctgttcaaacagcacggcgttcagcggggtttcctactggggaggataacaacacgackaaaagttggtggcttgcagttgcctcaagaattcttaatagattgaattaattcttaaytcctaygcattattgataattatattttgatgctgtcagccttttcattttaaaattacttttgcaattattttcatgctacgtgcctacctgtacatggcaaatattcttccattttgcagggcaccctgtatatttttggtggaatggtggattctgctttcacacaagcaaaaacccctctctggatgtatgacacaggtatgatgcacaatagccagtgtcctccttgggacattcc

SEQ ID NO: 78174 - DNA, 600 bp, Chicken  19866894367465_2
attacagctttacttgtgaagggaatcagaatttaggatatcaggagctgcagcgcaatgcaatcctcctacaattacacataattgtattattacctgagcagtgtctcggagagctccaggtgtgcatccctcatgttttcccacacgatgaggaagtgtgtgcttctgggatgctgtccctgttcaaacagcacggcgttcagcggggtttcctactggggaggataacaacacgackaaaagttggtggcttgcagttgcctcaagaattcttaatagattgaattaattcttaaytcctaygcattattgataattatattttgatgctgtcagccttttcattttaaaattacttttgcaattattttcatgctacgtgcctacctgtacatggcaaatattcttccattttgcagggcaccctgtatatttttggtggaatggtggattctgctttcacacaagcaaaaacccctctctggatgtatgacacaggtatgatgcacaatagccagtgtcctccttgggacattccaaggccataggtactaataaggagtaaaaaccaacccgctttctgctgcttgtaacaag

SEQ ID NO: 78175 - DNA, 600 bp, Chicken  19866894367465_3
gctttacttgtgaagggaatcagaatttaggatatcaggagctgcagcgcaatgcaatcctcctacaattacacataattgtattattacctgagcagtgtctcggagagctccaggtgtgcatccctcatgttttcccacacgatgaggaagtgtgtgcttctgggatgctgtccctgttcaaacagcacggcgttcagcggggtttcctactggggaggataacaacacgackaaaagttggtggcttgcagttgcctcaagaattcttaatagattgaattaattcttaaytcctaygcattattgataattatattttgatgctgtcagccttttcattttaaaattacttttgcaattattttcatgctacgtgcctacctgtacatggcaaatattcttccattttgcagggcaccctgtatatttttggtggaatggtggattctgctttcacacaagcaaaaacccctctctggatgtatgacacaggtatgatgcacaatagccagtgtcctccttgggacattccaaggccataggtactaataaggagtaaaaaccaacccgctttctgctgcttgtaacaagccttcc

SEQ ID NO: 78176 - DNA, 599 bp, Chicken  19866894367474_1
  misc_feature (1)..(56): n is any nucleotide
nnnnnnnnnnnnnnnnnnnnnnnnnnnnnnnnnnnnnnnnnnnnnnnnnnnnnnnngggtgtggctgaatctccctgttgtgcttactacgagcatgctttaacagtgtagacaaactatgaatgcattctcaaacctagcctctgcagttctggaatcttaaaggcaaatttaagttacctcttctcacataccttgtaaatctgtctgaaatgggtcaaaaatgtgtcatctttggaaccaaatgtggttcattaatcagcattatttatgaaaagaagcttattttttcttattcartatgttttatcactattctacttttgtgctagcaagttttaccttggagaaataaaagtgaggttttgttttgtattgtcattgttacaagtggattagtcctttatctctgattccctgcctcaggaagatgttggtcattttgttctgtgatagccatgcaaacattaaacatttaaacarttgtttatatgaattgtraagtttgccttctatggtttgagcattgtttgggagattttgtcatgaaatactccatacatttcctataaagctactcagtaagagcataacaaatt

SEQ ID NO: 78177 - DNA, 600 bp, Chicken  19866894367474_2
ttctcacataccttgtaaatctgtctgaaatgggtcaaaaatgtgtcatctttggaaccaaatgtggttcattaatcagcattatttatgaaaagaagcttattttttcttattcartatgttttatcactattctacttttgtgctagcaagttttaccttggagaaataaaagtgaggttttgttttgtattgtcattgttacaagtggattagtcctttatctctgattccctgcctcaggaagatgttggtcattttgttctgtgatagccatgcaaacattaaacatttaaacarttgtttatatgaattgtraagtttgccttctatggtttgagcattgtttgggagattttgtcatgaaatactccatacatttcctataaagctactcagtaagagcataacaaattccaggatgaaagccacgatcttaaagatcaaaatgttgattcattttctagctcttccctatatatcatctttgatggttctgtattgaactgcccttacctgaatgaccgtttcatcagtgctctttttcttatcttatcctgaatctttacttcgtcacatcagtctaggttgcttagggca

SEQ ID NO: 78178 - DNA, 600 bp, Chicken  19866894367474_3
atctgtctgaaatgggtcaaaaatgtgtcatctttggaaccaaatgtggttcattaatcagcattatttatgaaaagaagcttattttttcttattcartatgttttatcactattctacttttgtgctagcaagttttaccttggagaaataaaagtgaggttttgttttgtattgtcattgttacaagtggattagtcctttatctctgattccctgcctcaggaagatgttggtcattttgttctgtgatagccatgcaaacattaaacatttaaacarttgtttatatgaattgtraagtttgccttctatggtttgagcattgtttgggagattttgtcatgaaatactccatacatttcctataaagctactcagtaagagcataacaaattccaggatgaaagccacgatcttaaagatcaaaatgttgattcattttctagctcttccctatatatcatctttgatggttctgtattgaactgcccttacctgaatgaccgtttcatcagtgctctttttcttatcttatcctgaatctttacttcgtcacatcagtctaggttgcttagggcagtgttcagctttgttgat

SEQ ID NO: 78179 - DNA, 576 bp, Chicken  19866894367483_1
tctgcagtatttttgtacttgtctgtgatgcacacaaatcagttcttctaattacttctgaaggggacggcatttatctcattactaaattagtgccaacagcagataaggaagatgcaatgccaaaccagctcttaattctcagatgcatctctaagagcattgtctaaatgtccgtatctccagaaggcaaagaaaaagtcataatcagaggacaaatctgatcttaataagcagaaaatcgtaggagcttcccacatctgttttcctcttattagattagcggtggtgtcacattcratgtcatgccactatacactgaccttcagcaacttaaaagtcgctgaagcttttggaaggaagcttttggaagctgcttttcttggcaaggagcacatacacacaaactgtataagcagaggtatctgagaagcgtatgaccagggatatgggggagcccagttgcaagtatctccaaatagcatccagcagccctcaaagcttctctgacacctgaaaagcatttgtcttaaaaacgaattttaaaaccatatttttgcacattagccacagatg

SEQ ID NO: 78180 - DNA, 600 bp, Chicken  19866894367486_1
cagatacatctaattccgtgaactcctggaaggtttcatcttttaaaatcaccaataaaatattcaaatactcagtttatatttaattttgcactttaaaaatccttttggaataacactgaagtacactatctagaatgcatattacagatgcagctaataattcattagaaatttattttatgcattcttttgcaggtaacttgaaattacctataaactgaagtcattctcacaccgctatcatttacttagatgaaatcaagttgggataatctgacaaacttgcatttttccacycagcttaagagctcaaagcagtttcactgtgagcagcatatctgacagttttcagttgctctgcaaaatttgctctctgcttcctacagagcagacaggaggttaactagagaacaaggggctaattttgggataagggtctatgttcagtgcctctaaaagggtgactaagagttgcacaaagaattgttctaataaaagcatattaaaaagcgttattataacaacaagaggcttgttgaagagttagaccatttgtgacaacttgcctggacagacatgagaacgaatgttcttttt

SEQ ID NO: 78181 - DNA, 600 bp, Chicken  19866894367486_2
atgttcagtgcctctaaaagggtgactaagagttgcacaaagaattgttctaataaaagcatattaaaaagcgttattataacaacaagaggcttgttgaagagttagaccatttgtgacaacttgcctggacagacatgagaacgaatgttcttttttgtagcttttatatcgctgtgctaatgttaaaatagacagcctgacttgagcttctgcatttactttagtcaagattgatacccctaagaaattcaagaaaaaaacccaaccaaaactgcagtgcaatgtactgtactgtaygtatcgcactcaatacaggataatttatttcagagcttaataagtatcttcaatggaacgtctgatttgcagcagtcagtaaatatccttagcctgatttttaagacggcaacgtcttcaacacctaataagagttttatcaaagaaaagtatattaaatttctgtactaaatgaatgtctcacagagacaaccagctcagattggatcacatgcattttattagacagtcacggctttgtacatctgcatatgcaacagtgggattaacctaatgctgtgaatggaaatcaaatgaacc

SEQ ID NO: 78182 - DNA, 599 bp, Chicken  19866894367509_1
  misc_feature (1)..(13): n is any nucleotide
nnnnnnnnnnnnnggtttgatgttgcttgtctctgattttagtgttactccagctataaaaaaaaatgcatcatagtgtgccatgaaatggactcacagggggttttataaatagaagcctgatgctaagtttctaaactcatttgtgtgtactgaagcactaacaatttgttaaagacagaaagtatactgtggggcctggtagcttctcatacagctatcctctgatgcattcttttaggtgtaaaatgtttacaatcagagagtgtcccttaaaaatagtttttattacctctgtamatatttttaatatgcagctttatatgttccttgaccaacctttttgcttttcaagtgtcttttataaattatggcatatgaaaagctattttgcttttcaagtgtcttttataaattatgatatgatatattatcacatcaataaattaagttacaggactaacctaaggaaatacagctaattaaccccaaattgaatttggtttaattgaggaagtaggcttaattcacttgctctatgctcatctgagcaaccaaaatgaaaatgacaaaaaattgaatgaaggggaggagaaaga

SEQ ID NO: 78183 - DNA, 599 bp, Chicken  19866894367518_1
  misc_feature (1)..(89): n is any nucleotide
nnnnnnnnnnnnnnnnnnnnnnnnnnnnnnnnnnnnnnnnnnnnnnnnnnnnnnnnnnnnnnnnnnnnnnnnnnnnnnnnnnnnnnnnntaattgtgaagagggctcatttcttcttccgatgggcagtgcagacccacaaccagtaggtctttggggtcagttagcaggagtttggggtaaggtgaagcgctgcaggctgggagctgggtgagtcaatagtgcctgtgactggctccccagtgctgccctgtgcctaagttgtgaaagcaatttctgtattaaaaggtttacctccaargcctgtggtgatacactgggtactgtccctgtctggaccctggtcactcttccagatgtgcagcccttctggtagaggcagtggccggtgggacttggccacatctatcccttcccacaccccttttgtgctgccgttaaggaggctcagctagagctggcagtgtttgcagctgggatattagagggaaatggcagtaggcagtctagttataacctgcccagagggaagtttcttcctaatgcctatttaggtcataataaagacataaattaaaaaaaaggtgcacaagacactat

SEQ ID NO: 78184 - DNA, 600 bp, Chicken  19866894367519_1
ctgccaaccattctagcaagagcaatgtttggaaaagttcttccatattagatcaacaggatggaagtttctggatatccagaacacaggagtcaaatccagatttcaactgcttataagcttcttaggctggggattaaagcaagcatttgtatgggaaggagatggcagggagcaaagggagtagaaagagagacttgagaagttaagagggtaagaagcaaagacgcatattagtgaaggatagtaacgcatgttttaaaaatggatgccttctaacctaactttttaggttgcccyaactcttcatgcctgtctctacaatttctacattacataagttactaaactaatgttatcagtgcaaagcaagatgatattccaggtcttttccttagctaggaactaagctagaagtggaacactacttctgtgaaatgctttgcttattaacatgatttttattttttcacgtgactggggtcaactgccttagcactgacagcatggtacagaaatgcagacatgggcatactgtcaatttgagggaggtagaagtctctccttcagcaatttcacacagaatgatattagggaatg

SEQ ID NO: 78185 - DNA, 600 bp, Chicken  19866894367522_1
ctccaggatgttcaggatgatcagctgcagccgccccagaacagccccctcccagatgggccggcagctgctacctcaactccgcagccagtcccagctgcaggtgtccaggccgagaaggctgtccccaacaagagtctcctcgactggctccgtcagcagtccgactacacgctcgacgttcccggctttggcacagtaagagtgggctttggtggcatgtgtgtgtttctgtgtctgccttgtgtgctgcctttggtgttaggtttagtgtggttgctcttgaattcaaggcttccwtaagtatctcraagtgtagtgtctttccctgtaccacaggtgacggtgttcatcaggcctgggtcatgctttgggggtgggcacggttccctattcagttgcagaacccacctgctgagctgcatgcccctgccccaaggtccattctacagctccagtcctgggcatcagagatgtgcagtgtgagtctgcggtctggtgtcttccagaagtggcagggataaggagataaatgggaaaaggcatttgggatgctcagagcccatgggcttcctttcacttggggtcattttaggccat

SEQ ID NO: 78186 - DNA, 600 bp, Chicken  19866894367522_2
tcaggatgatcagctgcagccgccccagaacagccccctcccagatgggccggcagctgctacctcaactccgcagccagtcccagctgcaggtgtccaggccgagaaggctgtccccaacaagagtctcctcgactggctccgtcagcagtccgactacacgctcgacgttcccggctttggcacagtaagagtgggctttggtggcatgtgtgtgtttctgtgtctgccttgtgtgctgcctttggtgttaggtttagtgtggttgctcttgaattcaaggcttccwtaagtatctcraagtgtagtgtctttccctgtaccacaggtgacggtgttcatcaggcctgggtcatgctttgggggtgggcacggttccctattcagttgcagaacccacctgctgagctgcatgcccctgccccaaggtccattctacagctccagtcctgggcatcagagatgtgcagtgtgagtctgcggtctggtgtcttccagaagtggcagggataaggagataaatgggaaaaggcatttgggatgctcagagcccatgggcttcctttcacttggggtcattttaggccatgctgttgtatt

SEQ ID NO: 78187 - DNA, 517 bp, Chicken  19866894367531_1
tgtacaatggaatgtccccagcccccctgagcacaggtgctatgtggaaagccttaaagatccttgctccctttgtctatcttttagcatcacaatctatgattgtatgataatctgagttggaaaaagttagaggcaggatgggtctgtggaacaatcccacatatcacacctcaagatcagagacaccaggctgcctgcttccctcagcactttgcccatgagatgtgaagagagaccaagcctttcccttcattctattgtgttctcgatcagcagaagcaaccccaaagaagagcrtgcaggaggccatgaaggagaggggcaccagcgtggtacctggggtcttagaggagtggcctggacagcagataaagacctagggcaccaggcagtgcctcaagtcaaccaggcaagtttcctttactatcttctgagatataatggcaccattggcattccagaatgctgaaagtcacctgctccaaaaatagcaagcatagaggtattttaaatt

SEQ ID NO: 78188 - DNA, 600 bp, Chicken  19866894367532_1
tcagtcagctcctggcagcctgctgtcatggagcagagccacacctgccctcagtgcattctgacagctgcccagatgttagagacatgctgtggatgccagttatgaccaggacatgtaactgtgccttgactttggccatacaggtatcaccaatctgtgaaataccattcatggctaaacaacatttgaaaggtataattttaaagaattgtctcttggatctctgcgtaaataagaggaggcaatttattccagttccacaaataagctgtagtgctccataaccatgttataccsatgttaaatagaggtttctgtgtgtgcttttgtccatgagaaacacaggaaaagcaaagaaggctgctatttacctgttttgttgggtgtggagaggaagtgtgcatgggtttaaaaaaataaggcgttcccaattctgcttggtagggcagatgtcttagctattactgttaacaaccttatgctgtatactaaccaatttttcccctgagaaagttcatagcaaattaagagacagctttgacagcagatctgatcagaaagcacccatgaacaatagtgtttttcatctcagcaaca

SEQ ID NO: 78189 - DNA, 599 bp, Chicken  19866894367533_1
  misc_feature (1)..(195): n is any nucleotide
nnnnnnnnnnnnnnnnnnnnnnnnnnnnnnnnnnnnnnnnnnnnnnnnnnnnnnnnnnnnnnnnnnnnnnnnnnnnnnnnnnnnnnnnnnnnnnnnnnnnnnnnnnnnnnnnnnnnnnnnnnnnnnnnnnnnnnnnnnnnnnnnnnnnnnnnnnnnnnnnnnnnnnnnnnnnnnnnnnnnnnnnnnnnnnnnnnnctgagaaacactagtctatactagaactgggacatcctcacaattcagccaatttacatggtttcatgctttcatgtgctcttgaaaagaggagcgaaataaaamctttaaacttccacttgcaaattaatacttttaccttataggcatttaaattgtcttttgaaaatgaatgagtatagcaaaagcagagttcacagctgacctgcattttgctatcctgtctgatcagtatccctgagcggaaggaagttatggtgtgatgagactcagccaaaggtaaaactcttaataagacaaaagtatttcagaattatgtgagacacagcagctagccaaaattcaaattatatacaagcccttccagagacagctaaagaactcagtgaagtggtttaggattt

SEQ ID NO: 78190 - DNA, 600 bp, Chicken  19866894367539_1
cttgttctgaatgtgcatcagatttgctttttttctgttataatcactgtcaaaagctctgtttagaatgaattttagagaggttgtgatggttacattagcactgcccagtgccgttaggaagaaggtaaggataggaagtaaagactgtcactgaaagaaaattgaggataggtgtgagctctacctacggaaggatagggatgggctgttggctcttgagactgaaaagatgtgagagtggtattgctctaattttcacacataaatctggcaatgcatatgctgaaattaggaagwctgtattccctcactatcccctaatggctagattggcatttctatggcagagagtaataaagcatgtcccaaagcataaatgaaaataacacattcagtgatggaaagtttgaaaatacaaccagataaacttgcaaaatgcttgtgcattgcactctttagattatgaggttacagaaaaataaatattactccaaattctgctccattccatgcttcagaagagctatcacagagctacacacaaaaaatctagtttcccctctgcttgaccaattgtgcaagtgagaaaagtacact

SEQ ID NO: 78191 - DNA, 600 bp, Chicken  19866894367539_2
cctcactatcccctaatggctagattggcatttctatggcagagagtaataaagcatgtcccaaagcataaatgaaaataacacattcagtgatggaaagtttgaaaatacaaccagataaacttgcaaaatgcttgtgcattgcactctttagattatgaggttacagaaaaataaatattactccaaattctgctccattccatgcttcagaagagctatcacagagctacacacaaaaaatctagtttcccctctgcttgaccaattgtgcaagtgagaaaagtacactgcaaagaraaaggtaccttatattgctttatgaattgaaccctgactgattattttaagtggacttgttttagtgctcatgagctccacatcctacgctgattacattgtaatttcactgttgatgttaatagtgatggttttgtactaaacttattctgctgcaaataatgactgagattattaataaatcacagctctatttacacaaagaaggctaattctttataaagcacactgtttaaactacaattagtttattcacactctggcatcaggatatatagttctaagcgcagtaagatcttc

SEQ ID NO: 78192 - DNA, 600 bp, Chicken  19866894367542_1
tggtccatatgattctgcagcaccgagactatcagcagacctccaggacgcttggaggagtccctgagttactccagaagattaatgaggtgcttatttagttgactccagactgtaagtctgattgcagttgttcagttgagtaaactgaaaatatgacaaacagagatcagagtccagttaatttggatttggacaacttcattctttcctttcagttcatacattgcttaggcctgtgggaggtggagacttttttaccctgaccttattttgaaatctgtagtcatgaacttcagygttcaaggatggctgttaaggtgttgctgcttctgtaataacataaggaagaatagctcattataaagcaaaagcagactgaagtctgtatgtgcttgttagtctgaagctctgtttgtttttgagttttcctttatctaaaacattcgtgggaaatgctgtgctgaatgttaaatcagtactgttttgtgaagtattcatagggtcttttcctttcccagactcctgacttttatgtggaaatgaaatgggagttcactagctggggtaagaatcctgattgttggtgcctcttctaag

SEQ ID NO: 78193 - DNA, 600 bp, Chicken  19866894367542_2
cagactcctgacttttatgtggaaatgaaatgggagttcactagctggggtaagaatcctgattgttggtgcctcttctaagcagtagacgaaaggacttgctcctaccagtgtcacaaaggctatacagagggagagactgattggcatcattgttccttgctccccagaatacttaccatcacctctcagaataaccctttgtatttctgtatcgcaattgttctttgtttccgttctgtttgtggggttgtttgttttttgtttttttattagagactttaaccattgtcagagtcrgtgaaggcttttctcagggtcttgcttgtgtatctttggttgttgatgactaaggtggtgataggactggcatgtagatgtacaggcttcttggaagtatctgctttgctttaaaggaatgaatgctaggacttatggctgacttcattttccaagcagctatctatctatcagactgagattagttcagactaagatgtgaaatgggctaaaaccaatctctcatcccttttcatgttaatctttaaattaaaataatgggttttgccccttatagctgatcactctgaaagctaaaga

SEQ ID NO: 78194 - DNA, 527 bp, Chicken  19866894367542_3
ttatgtgttgcttggttttatagttccactggtttctagagtttgtccgagtgatgtctgtcgcatctggaaaagtggtgccaaattgagagttgatatcacattgctgggatttgaaaacatgagctgggagaggggaaggcgcagcctgatcttcaagggagaaggtatgctttttcttaccatgtcagcagtgctgattgccaagtgctggataaaccacagtgggaagccctatttttgctcaaaagatctgttgaggctgagttttaagcaagttttgtggatgttaccgtgaaygtcttggagatggtgttctgtgttttaacatagctgcttgattgctttgttttgagttaatctgaggtcaacatttggtaatagggcaaaaaytctacatcaaattcttatatactttctccctttggttctcttgcctccaaataaaatacaattttagatgcagttccaactctgagtgcaaaatacaccaaactagcttctaccctgatttgatatgcagtata

SEQ ID NO: 78195 - DNA, 434 bp, Chicken  19866894367542_4
tgatatcacattgctgggatttgaaaacatgagctgggagaggggaaggcgcagcctgatcttcaagggagaaggtatgctttttcttaccatgtcagcagtgctgattgccaagtgctggataaaccacagtgggaagccctatttttgctcaaaagatctgttgaggctgagttttaagcaagttttgtggatgttaccgtgaaygtcttggagatggtgttctgtgttttaacatagctgcttgattgctttgttttgagttaatctgaggtcaacatttggtaatagggcaaaaaytctacatcaaattcttatatactttctccctttggttctcttgcctccaaataaaatacaattttagatgcagttccaactctgagtgcaaaatacaccaaactagcttctaccctgatttgatatgcagtata

SEQ ID NO: 78196 - DNA, 600 bp, Chicken  19866894367546_1
ttccttaagctgaaatagcaacttcagaaaggcatggggaatcgtaagcatgatgcaaaaggggattgaaatacagagacggggaaacaccacagtttccttattgaagatgataaggaaattctttaccttaaatctccagagtctgtactgatggcctttgtaaaaatacactcctctgatctgtgagcaaatgatcccttcttggcctttgctattcatttcattacagcagtgtagtactagaggtgcaagagaatgtgtacaaagctgtaacaatatatatttatctaaagcacytttatggcatcttattgcatgctctggggaagtgatatcttcctgctctgaggcagggaacagaggcagagatgctaaggctcaagttgcatcaaacaagtagagatacatttcaatttattttctgggagaactgctgtatttcattaagtgtgaatgtggccctcagtggtctgtcagtgatcacgcagaagtgtctaacagggccaggagatgaactcctagcccaatgccttacatgtaatgtcatactgtgatggaatcacagcttatgtaaaggagctggtgctatgtacttaa

SEQ ID NO: 78197 - DNA, 595 bp, Chicken  19866894367551_1
ggctcaaaaagacagttcttagtagtaggttctatttttaaaaccatttcacaggaaaaagcatttcaccaccaacaccctacactgtccagcatgactagaagtagcagaacatgacaaataggcaacatttaccgcaaaacagagttttgtttcatttttattttagaacatgactttctgaacagatttagtcagaagttacattcacaccctcaaactctatttcaggttcttcttgaatgcttgtgcttattaaatagagatcatctttattttaaaacagaattccagcataawtcactcctctatcaaacatttataagcattgatctgtgttctcacagcatttaaggtgagaattacagttccaaatatttattgcatagctatctgcatttttcttatcagataatccctggcacttatttcaataatccaaccatcacttcacttatatcccacaattttcttgcaaccaagtcatccatggctttgggcagaagttcctcctctttgcagtccccaaaatatttcccagacacaccttcaacatcaggagaagaggccaaataaatagaagtctgggctcctt

SEQ ID NO: 78198 - DNA, 600 bp, Chicken  19866894367552_1
cctgtcaggatggcaaaacatcccaaatgttttgaagtgtttttgtttgtttgtttgtttgttttttaactgtttattgctcattttttatggtccaagaatccagacatacctcaccctacgtaaaaactgcacgtcagtactgagctgtgctttgttgatccccagagcagtggcacagcaccacagctgttggctgccttcaactgaaagaagaaagttctcacacagtatgttgcttttctgatcaaacaccaataaaatcttaatggaacgggtctctgggtggttgttttataygtatactcaaatcaaatcaccaacccaaacctgcagtcaccaaggagagcagtgctgtagttcagccacccaacccacgtgtatttattcccatttgtgagaaaggcgctgcaaggaaacactctgccagtagattttagagaagagatattgagcgatgttaacatataatctgcaaaaatgccatgtgcctggcttcaaatcccgtgaagtcagacgctgcaaaaacaaatgctttaagtgtctgctcatttcctcttttttatctttattttctgtaaacatttcttggcatttggc

SEQ ID NO: 78199 - DNA, 600 bp, Chicken  19866894367558_1
agtgtatggaaactataaaaaaaggttgaaaaaaggactgtaggtgtaaatgcaaggctgaaagaaaagtgttggtcccaaataaaggaatataagctactcacaagcccaaagcagagtcaaaccattacaaagccaggacaaaaccctcattgcctaactgacactgagtacctacagcccagatcttatgtcctgcttaacatccgctgaggaaaataagttgcactatcatttctagcaggtcagaaatactgtacatcaaagaccttgcacacctcattgaaccacacagatttsaagtagctacctgtattgaaggttctttacacgattgtcctgaaattaggtttgcctaggagtgtcaaggatggagaccttgactggattccttgcggatcagttatgcactgtggcccctatcttgtaaatacctaaaacttcttacatgttatgttcccgcaattaacctgaaaatgcttttgccatgtgttcattccctttctcttttttccatatttttttctagacattttgtgttttcctgagcatgggacagtaaaattctcaagtygatgggtctgactttgtattctaaat

SEQ ID NO: 78200 - DNA, 600 bp, Chicken  19866894367558_2
acacctcattgaaccacacagatttsaagtagctacctgtattgaaggttctttacacgattgtcctgaaattaggtttgcctaggagtgtcaaggatggagaccttgactggattccttgcggatcagttatgcactgtggcccctatcttgtaaatacctaaaacttcttacatgttatgttcccgcaattaacctgaaaatgcttttgccatgtgttcattccctttctcttttttccatatttttttctagacattttgtgttttcctgagcatgggacagtaaaattctcaagtygatgggtctgactttgtattctaaattgcctaaactgcaaaaaaagtaaaactttgatatttcagagttaattttaatgtggcagactaatcagatatggagatccctgactccagccaaggtagaaggatatttagtcatagtaagaggtcagatctgagctcttatgctagttaaaggcatctatattactggaacatacctcaggtcactgattcactctattaaatggaacagaagtagcttaatttggacagcatatcatggtgtgatagagcattgcagtgaaaagagtacagg

SEQ ID NO: 78201 - DNA, 599 bp, Chicken  19866894367559_1
  misc_feature (1)..(16): n is any nucleotide
nnnnnnnnnnnnnnnnaacaaagaatttcttttgtttgctttatttatttatttatttattaagaacaattcctgatcatcagaacaatcatgattagcactgcaatacggtaactactcaggaaacattagtaagggctgcaacgcgtgattagcgtgtacaaacacattatagcactcctttcatctaagtagccgtaatggttataattgactctaagaggctgtttattttgtcagtacagactgggtttacaacatgtattcatgtgttcagagggcacaggacaaggctctttygactcgtcaaaacttcattgagatcaacagacattcacctatctgagttctggtaggacttgttcctatgccttcagacacgttgsgatggattcttgctggaggcagaggtggaggaagtgaaggtgaccacttctcaaggcagggctttgtgatcagtcaggctgagaagaattcttttatgttttaattttgttttgttttgtttgctaatgacatttctggatgcaaatcaatgtactcaagacctggggaaacactggcaagaacataaccagaaaacatttcagaactggtat

SEQ ID NO: 78202 - DNA, 600 bp, Chicken  19866894367559_2
aatcatgattagcactgcaatacggtaactactcaggaaacattagtaagggctgcaacgcgtgattagcgtgtacaaacacattatagcactcctttcatctaagtagccgtaatggttataattgactctaagaggctgtttattttgtcagtacagactgggtttacaacatgtattcatgtgttcagagggcacaggacaaggctctttygactcgtcaaaacttcattgagatcaacagacattcacctatctgagttctggtaggacttgttcctatgccttcagacacgttgsgatggattcttgctggaggcagaggtggaggaagtgaaggtgaccacttctcaaggcagggctttgtgatcagtcaggctgagaagaattcttttatgttttaattttgttttgttttgtttgctaatgacatttctggatgcaaatcaatgtactcaagacctggggaaacactggcaagaacataaccagaaaacatttcagaactggtatctcaaagcctcctactgcctgaaagcactgtctctctctgactgttccttagttttgagtctagaataccatcaacaggccactaaa

SEQ ID NO: 78203 - DNA, 600 bp, Chicken  19866894367560_1
gtggccttctggtacctgacagggccctacaggaaagctagggagggactttttataagagcatgtagtgacagaacaaggggaaatggttttaagttggaagagggcaaatttagactagatattaggaagaaattcttcactgtgagggtggtgagacactggaacatgttgcccaacaagactgtggatgccccctccctggaatcattcagggccaggctggatggggctttgaacaacctggtcaagaggaaaatgtccctccctatatcagggacattctgtgatttctgattstgacaaagtgtatttttaagacacagtctgattttattcattcttaaaatagctgtcagcaacttaaatctcagcaatttttgtgaacagaagtcaactttcccttctttttctataacccaaccttctaaagaaataaccttctaaagaacttctcagtatagtatataaaatgattttgttttggtatacttagcaaatatacgggccagcatgtaaaggtagatgaaaaattattataatgattaagcaaatagaaggatgcaatactgtcacaggaataattattcccattctttc

SEQ ID NO: 78204 - DNA, 600 bp, Chicken  19866894367567_1
ttttgagtcaggactctagggagctcaagaaagagaatggaatattagaggggtagtggcaggctttatccgtagtgcctttgcctccagccatactaccatattaccaacagaccaatttttccaatgtaagataggaacataatctatcccttttaccaccaaccagcaggaatatgatgctaatgtatgcaaccctctttttacagtatttttttttctcagaaagagttctgtagaggcacctatgggaattctgtgtagtttaggccagaatctctctgtcattttttttctccmtatcatgcctaccttagaagcaaaaatgcctctatggtagtaaaaaatgcaccaaaaatgtgcaagaacattgggatggctggtaggtgtttcatcagctatataaattggaacagcttttgatcagcaatgttgtgtttattgttttacgtgtaactttctcaagattttcctgcaaattttaacacagttggttttgggaatttttcactgccctaaactctgcagcatgtccagtaatatatcagttctttcatatagttgtcatgctatttcatatagttgtcatgccattattgt

SEQ ID NO: 78205 - DNA, 599 bp, Chicken  19866894367574_1
  misc_feature (1)..(9): n is any nucleotide
nnnnnnnnnaactgataagctaagtgttttcctctgcacgttaatgtatatagagttctttttagcaaattatcttccttcccttgtaaaagtatatatatttgtgcatgtatatgcatataaaagtgtatgtaaacgtttgtatataaaaattggactaagttatatttaagtattaaaaccggattgttgtatcgttgttttattgctacatggtcccactgttaagatttgggatgccaggaactcctctgctgaaggttacattattaaaaccgcctacaatgttgcagccttaayttaggaagatgtggaccaggtcggagatcaaagttctccctccgctgaagaggtgtgcagacttttcccagcccatctgcaacccgggaaggttggctaacagtgagagagcagtttggtccatcaattcccaggtcagctctaggaacagtaakggctatcrgagctttgggaccagcgcgtcagcagagcagctggctgcagagatttggccactcttaatcccggtcacgatgatgacctacacgtcaaacactgaatcatggggttaagatcgaattttgctcccttcgcacttc

SEQ ID NO: 78206 - DNA, 552 bp, Chicken  19866894367574_2
gactaagttatatttaagtattaaaaccggattgttgtatcgttgttttattgctacatggtcccactgttaagatttgggatgccaggaactcctctgctgaaggttacattattaaaaccgcctacaatgttgcagccttaayttaggaagatgtggaccaggtcggagatcaaagttctccctccgctgaagaggtgtgcagacttttcccagcccatctgcaacccgggaaggttggctaacagtgagagagcagtttggtccatcaattcccaggtcagctctaggaacagtaakggctatcrgagctttgggaccagcgcgtcagcagagcagctggctgcagagatttggccactcttaatcccggtcacgatgatgacctacacgtcaaacactgaatcatggggttaagatcgaattttgctcccttcgcacttcagtgcacggatcccatactttcaataagtccgtgctagcatcccctaggctgactgcgaggcagagcctgcacggggctgacattgccctcttaccaaggtcggcggg

SEQ ID NO: 78207 - DNA, 544 bp, Chicken  19866894367574_3
tatatttaagtattaaaaccggattgttgtatcgttgttttattgctacatggtcccactgttaagatttgggatgccaggaactcctctgctgaaggttacattattaaaaccgcctacaatgttgcagccttaayttaggaagatgtggaccaggtcggagatcaaagttctccctccgctgaagaggtgtgcagacttttcccagcccatctgcaacccgggaaggttggctaacagtgagagagcagtttggtccatcaattcccaggtcagctctaggaacagtaakggctatcrgagctttgggaccagcgcgtcagcagagcagctggctgcagagatttggccactcttaatcccggtcacgatgatgacctacacgtcaaacactgaatcatggggttaagatcgaattttgctcccttcgcacttcagtgcacggatcccatactttcaataagtccgtgctagcatcccctaggctgactgcgaggcagagcctgcacggggctgacattgccctcttaccaaggtcggcggg

SEQ ID NO: 78208 - DNA, 600 bp, Chicken  19866894367576_1
ttatccacataacatgcatcagaggaagcgtcagtcccttaacggaagcatcactcatttgacactgacaagtgtgccttcatgtgcatgaagcagaccacacaggaatagaactccacttcttcctctgagaaactaaggaaaatagaacagcatctcagattaacccaaccacctctctgtggtctatactgaaactatagaaagcactaaattaaagattaagcaagtataagtgttgaaaagaatagaagttgcacacagagatactgtgttgagatgttatctgcaaaagtacaygccttcttaactgtcagaacaagacttaactcacttcaagcttggtagatgtctggggaattttctacattctcttttatttcttggaccaagtatcatagctccaaggttcttctagtaagagctgttttatcatttgtttatgcctgtagcatcaccatcctctacgtgcacgtttcattacctaaagctactgtggtcagtgctttctctatatggttcactacagatgaaaagctaccctccagggaatcaaggctgaaaaactaagtggctctggagtggggtcagtttatacaa

SEQ ID NO: 78209 - DNA, 600 bp, Chicken  19866894367578_1
aacatgaaatctggattaaattactcagggtgtgaaaaattgttttcactattcaattttgcgtatgctttttttttttttcccattacctatctcctggttcttccactatgcagtaggctgttgacattattctttttatataaatcattatttccaggtgcttttaccttttattaaggcaacccttgctcttcttccactgtctctgatctccagcataatcctttcagtagctacatagttgctgtcctcaaatttatatctgcaaagcaccatactttcatgctacacctaatkaaaattttaataaaaaaaaatggcaatggaacaatttgttcctctcgaaccagtctagcagtactcttggggaatggcgacaagcaacctctctcaataggcttcacaagcaacaattatattcacttcaaagacagcttttctagagtaataacagagctagcctttactgctaacgccaatactacattcacatcatctgacgtatgaatcctttcacagacatttcacggagtcaaacattgcaggagaccaactaggttggactggcttatatccacagtgctctgggctgggaat

SEQ ID NO: 78210 - DNA, 404 bp, Chicken  19866894367579_1
gacttgatttacacccagatttttagtcttacaaaagctgcctggtgctagtaacctccagaccaaaaccaaggaaagtgggtgagactgtttattttccatttctctaccacaaagtgaaacaggacagcggctgagccctcaaaacagagaagggaacaattattcttagaaacagtgcctctggaaagtgccttttatctcactggaaaagaaagcctattccttcatcgtggaaaaaaaaggcagattttacatattttaattagaacagctgaaaggttgggaaaaagagaatcyactttgctgtcaagctctttagtgagggaaaagtccccaaagttcaggaacctggagggagctttaaatctccacggctaaaaataatttgtcccttaagaaaa

SEQ ID NO: 78211 - DNA, 600 bp, Chicken  19866894367586_1
cccttcccaaacaatattattattattttatttatttatttatttatttatttacaattggactgtggtattttcagcagtcgtgttaagcaacagtgctaacaaactgctttcaagttaatattttgggctcagtcatgtaataagatcattaattccttccacatgaattattggattgctgtaatcatagttttttcaacactattattctaagtcttttacataaaggatacacaagtactagatgttccatagtaatattataaatgtaatttgtaaagtattaagaagaattakaaaaaggacaaaactaaagtctctctcttgcaacaccataacaccagacccataacagtttgaagaccatggagcacattgccagtcatggctgcactgtcctaccacaaccactgtatagaaagacaagatgaactacaacattttccaagcaatgttgccatcatagcagctgtgaaacagtgggtcagctctgctggtgcagatgtttatgagcacagtatgcaggcttttgttgattgctggaaaaagaatgcatagctaatagtgctgactatgttgcaaagtaatattctgtag

SEQ ID NO: 78212 - DNA, 600 bp, Chicken  19866894367598_1
cgtttccatgggatgcattccttcagagaaagaagcatgaggaggtgttccttggctatgtgacctgtatgcctaggtttcccagttgaggaatgatgaatatgtacctaggtgccaccttatctggtggggatgtagttgaactgtttattgagaattgaggccatcccgtattcaggtgttacagcagaagcaagttagcctgcttttctctcaaagagagctaaagagtggctttattgtggctgtgactgtcttactgtggtttagtaggcaagagggccactcaggtgaaagtgragaaatatgwgcaaggagttagaacttctggttcagaaggagaatgagggaattaatgccactctggtacaactggatgaattaatctgtcattattattaggttacaaatttattcctgttttatatataaaagcttgctctcttttttcttgcttagtcttcacaattctttggatttttataaagaaacagaattaaagtgtttttataaagatttggataatttttttaatcaatgtcttgagcaatttcactgtataggtaatatcttgccttggacagaaatatcraaggtgct

SEQ ID NO: 78213 - DNA, 600 bp, Chicken  19866894367598_2
ggatgcattccttcagagaaagaagcatgaggaggtgttccttggctatgtgacctgtatgcctaggtttcccagttgaggaatgatgaatatgtacctaggtgccaccttatctggtggggatgtagttgaactgtttattgagaattgaggccatcccgtattcaggtgttacagcagaagcaagttagcctgcttttctctcaaagagagctaaagagtggctttattgtggctgtgactgtcttactgtggtttagtaggcaagagggccactcaggtgaaagtgragaaatatgwgcaaggagttagaacttctggttcagaaggagaatgagggaattaatgccactctggtacaactggatgaattaatctgtcattattattaggttacaaatttattcctgttttatatataaaagcttgctctcttttttcttgcttagtcttcacaattctttggatttttataaagaaacagaattaaagtgtttttataaagatttggataatttttttaatcaatgtcttgagcaatttcactgtataggtaatatcttgccttggacagaaatatcraaggtgcttttctttgaa

SEQ ID NO: 78214 - DNA, 600 bp, Chicken  19866894367598_3
gaaagtgragaaatatgwgcaaggagttagaacttctggttcagaaggagaatgagggaattaatgccactctggtacaactggatgaattaatctgtcattattattaggttacaaatttattcctgttttatatataaaagcttgctctcttttttcttgcttagtcttcacaattctttggatttttataaagaaacagaattaaagtgtttttataaagatttggataatttttttaatcaatgtcttgagcaatttcactgtataggtaatatcttgccttggacagaaatatcraaggtgcttttctttgaacacaaccacaaataaacctattctcccatttctctatgtgcagtattcagttcttatagaggaacgcagttgtacattactaattcttattaaaaccaagaacttcaaaaagcagagctactactgtttctgtctgcatgatttcaacatcatcagcagcttgttttacaaattatttggttgttgtagttcaaattatagtctttctgctttaattttgttgctatttgtgttttgctatttacatttacaataaaatgtttaataggataaaaaaaaaaa

SEQ ID NO: 78215 - DNA, 600 bp, Chicken  19866894367599_1
tgtcgtattagcgaagtaaaaggcagggatttattaaatattgttggttattcaacatgcttacttttaagcaaatgtatttgttttgcatggatgacaatagttatgtttctatatgacattaggatttaatcagtgtttaattccagttgtactgggaactgtacaaatacagatatacaaagtatttttgtaacactggccaaagtgatacatcatggaaaaaaattaagtgcaatcaggcaattagcatagttttactagttatatattgtagtttgaatttcgtatacggcttgwtttttagctttggactgttttttggttttttgttatgttttgtatttaacctgggataagacataatgagaaggtgkgatgatattaacagccttgttagttaacaaaggcatgaaagacatgaaaagtgtggactacatctttgcccagtaagcagctaaaaagcatacagtaactccaaggtgattatttaatctgaatccctcagttttattgctttctaactgagaaatgatggggaaatcaggaagggctggcaaacacacaagcattagagactcttcagagcacttattaaag

SEQ ID NO: 78216 - DNA, 568 bp, Chicken  19866894367599_2
tatttgttttgcatggatgacaatagttatgtttctatatgacattaggatttaatcagtgtttaattccagttgtactgggaactgtacaaatacagatatacaaagtatttttgtaacactggccaaagtgatacatcatggaaaaaaattaagtgcaatcaggcaattagcatagttttactagttatatattgtagtttgaatttcgtatacggcttgwtttttagctttggactgttttttggttttttgttatgttttgtatttaacctgggataagacataatgagaaggtgkgatgatattaacagccttgttagttaacaaaggcatgaaagacatgaaaagtgtggactacatctttgcccagtaagcagctaaaaagcatacagtaactccaaggtgattatttaatctgaatccctcagttttattgctttctaactgagaaatgatggggaaatcaggaagggctggcaaacacacaagcattagagactcttcagagcacttattaaagcagctcttgatctgcagattgccatggctactacagaagcatgta

SEQ ID NO: 78217 - DNA, 563 bp, Chicken  19866894367619_1
gatggaaggaaagcagacgtctggagctgtggagtcattttgtttgcgttgctagtggtgagtcatcttccttgctctatccttagaaaaaaaaagaaagaaaaattcaaaaacgctgctgtatttaatggtgattctattgacatcatgtgcagataggtttttttttagttctcctatttttgtatctctcaactgcatcctttcctcttagttctacattagtcccagaggaaaagcatgtagaatatttcactgctgctttgaaatgcggctgccctgcacatgagaacatagacragtgtcaaagacttgcctccataaataccatttgctgtgttgtaatgctgcagcacttcaaagagccccattcaaagcacactgaattttttgacctaaaaaggtgtgccacttcaagatacagaaattattgccctccacaggattaaacctggctggtttcagcaagtgtttggtttttttctgctgtatgtatatatacatttcaataagcatatgcatacattaactgtaatcttgtatcaggagaagatttgagtgca

SEQ ID NO: 78218 - DNA, 599 bp, Chicken  19866894367627_1
  misc_feature (1)..(251): n is any nucleotide
nnnnnnnnnnnnnnnnnnnnnnnnnnnnnnnnnnnnnnnnnnnnnnnnnnnnnnnnnnnnnnnnnnnnnnnnnnnnnnnnnnnnnnnnnnnnnnnnnnnnnnnnnnnnnnnnnnnnnnnnnnnnnnnnnnnnnnnnnnnnnnnnnnnnnnnnnnnnnnnnnnnnnnnnnnnnnnnnnnnnnnnnnnnnnnnnnnnnnnnnnnnnnnnnnnnnnnnnnnnnnnnnnnnnnnnnnnnnnnnnnnnnnnnnnnngtttcctcacaagctgaattaccaaaatgtagtcttaatactaacactsgggraaaaaaaaaaaaaaaaagcctgtagaagcctaaatcctctgttgttttcactgcaagtgctaaaactcaagacggagatcttgcttagtttggaaagtctgaagtgatccacagctgtggagggggaagattacttctcaagctgtatcattttgagaacccaacatgctataaatagtctaagcacttgctgaggacttaccagagtaaatcctagtaaatcctacagctagaagaaagatggtgatgccatgtacattttaatcccgttgatgctgagagtactctctacaaa

SEQ ID NO: 78219 - DNA, 599 bp, Chicken  19866894367627_2
  misc_feature (1)..(247): n is any nucleotide
nnnnnnnnnnnnnnnnnnnnnnnnnnnnnnnnnnnnnnnnnnnnnnnnnnnnnnnnnnnnnnnnnnnnnnnnnnnnnnnnnnnnnnnnnnnnnnnnnnnnnnnnnnnnnnnnnnnnnnnnnnnnnnnnnnnnnnnnnnnnnnnnnnnnnnnnnnnnnnnnnnnnnnnnnnnnnnnnnnnnnnnnnnnnnnnnnnnnnnnnnnnnnnnnnnnnnnnnnnnnnnnnnnnnnnnnnnnnnnnnnnnnnnngtttcctcacaagctgaattaccaaaatgtagtcttaatactaacactsgggraaaaaaaaaaaaaaaaagcctgtagaagcctaaatcctctgttgttttcactgcaagtgctaaaactcaagacggagatcttgcttagtttggaaagtctgaagtgatccacagctgtggagggggaagattacttctcaagctgtatcattttgagaacccaacatgctataaatagtctaagcacttgctgaggacttaccagagtaaatcctagtaaatcctacagctagaagaaagatggtgatgccatgtacattttaatcccgttgatgctgagagtactctctacaaactaa

SEQ ID NO: 78220 - DNA, 600 bp, Chicken  19866894367631_1
atccccatcccacccccatcccgtccccatcccacctccatctcatccccatcccatccctatcccatccgtatcccatctccatcctcacccctatcctcatcccatccctatcccatctccatctcatccccatccccatcctgtccttatcccatccctatcccacctccatctcatccccatccccatcccatccctacccatccccatcccacttccatctcatcctcattcccatccccatcccatccctatctcatctcatcctcacccccattctcatcccgtccctatccmatctccttctcatccccatcccggccctatcccacctccatcttatcctcacccccatcctcatcccatccctatccccatcctgtccctatccatccctatcccgtctccatctcatcctcatcccatacctatcccatcttgtctcagcctccatctccatccaatccccatccatgtccccatcccaagccatcccatcctcaaaccaactcaccccattcccatcctatccccgtcccatcccgcccacacaccgaggctgcccacaaacaccatatcacgctgatgatctctgag

SEQ ID NO: 78221 - DNA, 600 bp, Chicken  19866894367643_1
gcgccgccacccactgccctgacactggggatggctgaacaaacacggctctcacaccgccggcctcgcacagagcacagcttgttcacccagcacccccctgaatccaccactgtgcgcagccccggcagcgggcagcgggcggccgggtgacagctttgttgttggccccgctgcgggtgccaccctgtgccagctgccccgctcggcccaaaatcagagcgggttttgatgttctggcttccctgcctctgtccttctagctagaagaaatccatcacgcatccttttgttcctccycgttctttttccatctcttytgcgttccctagcgtgcttcctgcctccccacacagggtgatgtgccgcacgccgggcaccagagggtgttttcctcccattgccmcaatgcttgggtttgggggaattttgctagtgagcacagggagaattttgtgagggaggacgcagggtttgctggcaccaaaaggaggtggtggaaaaatgctctgcgggggaaagcacccggcagctgtattctctgccaaacaaaaacacagcagtgactctgttctgctgtcacaagcactgcctgtgtct

SEQ ID NO: 78222 - DNA, 600 bp, Chicken  19866894367643_2
gacactggggatggctgaacaaacacggctctcacaccgccggcctcgcacagagcacagcttgttcacccagcacccccctgaatccaccactgtgcgcagccccggcagcgggcagcgggcggccgggtgacagctttgttgttggccccgctgcgggtgccaccctgtgccagctgccccgctcggcccaaaatcagagcgggttttgatgttctggcttccctgcctctgtccttctagctagaagaaatccatcacgcatccttttgttcctccycgttctttttccatctcttytgcgttccctagcgtgcttcctgcctccccacacagggtgatgtgccgcacgccgggcaccagagggtgttttcctcccattgccmcaatgcttgggtttgggggaattttgctagtgagcacagggagaattttgtgagggaggacgcagggtttgctggcaccaaaaggaggtggtggaaaaatgctctgcgggggaaagcacccggcagctgtattctctgccaaacaaaaacacagcagtgactctgttctgctgtcacaagcactgcctgtgtctgtggggtcgcactgcttgtt

SEQ ID NO: 78223 - DNA, 600 bp, Chicken  19866894367643_3
ccaccactgtgcgcagccccggcagcgggcagcgggcggccgggtgacagctttgttgttggccccgctgcgggtgccaccctgtgccagctgccccgctcggcccaaaatcagagcgggttttgatgttctggcttccctgcctctgtccttctagctagaagaaatccatcacgcatccttttgttcctccycgttctttttccatctcttytgcgttccctagcgtgcttcctgcctccccacacagggtgatgtgccgcacgccgggcaccagagggtgttttcctcccattgccmcaatgcttgggtttgggggaattttgctagtgagcacagggagaattttgtgagggaggacgcagggtttgctggcaccaaaaggaggtggtggaaaaatgctctgcgggggaaagcacccggcagctgtattctctgccaaacaaaaacacagcagtgactctgttctgctgtcacaagcactgcctgtgtctgtggggtcgcactgcttgtttgggtggggaaagctgctctgtagggacatacttgcagccccagctggcatcagctactgccccaaatagctcaaattaaggggaa

SEQ ID NO: 78224 - DNA, 600 bp, Chicken  19866894367647_1
aactcttaccagattggatacattttttttttgttttatttctgttgccagcagtgcaacaaatttctgcctttaggacactgctgcattctgccagcacagctgttcaactacacaaatgcatccatgcactgatctggttgaaaaataacttcatttaaaaagtcaaccttggatgcagaagcccctcactctggttcacaacccagtggcacaaccagtaggccagcacatgagagaaggcaactgaaggacaggcatgggtggctgaacacagcaattcaagcattatcataactyatcatgatgtgataacccrctctgcttagtcccatttatagtagccaataatttgttaaaatcttgcagtcttaaaaattcctcgcttaaaaaagaaggaaagtgctaaactatactaagaactcatttgtctatgaaataaaccaactatctagatattttaagtaacaaccactcatataatggaagactttaaaacataaagcgtacacttatgtaggttaagtttcataatagaagcctcaccaaaaatgaaaatgaaataaggacatgcaaaaatagactgtattttaaaggtct

SEQ ID NO: 78225 - DNA, 600 bp, Chicken  19866894367647_2
acattttttttttgttttatttctgttgccagcagtgcaacaaatttctgcctttaggacactgctgcattctgccagcacagctgttcaactacacaaatgcatccatgcactgatctggttgaaaaataacttcatttaaaaagtcaaccttggatgcagaagcccctcactctggttcacaacccagtggcacaaccagtaggccagcacatgagagaaggcaactgaaggacaggcatgggtggctgaacacagcaattcaagcattatcataactyatcatgatgtgataacccrctctgcttagtcccatttatagtagccaataatttgttaaaatcttgcagtcttaaaaattcctcgcttaaaaaagaaggaaagtgctaaactatactaagaactcatttgtctatgaaataaaccaactatctagatattttaagtaacaaccactcatataatggaagactttaaaacataaagcgtacacttatgtaggttaagtttcataatagaagcctcaccaaaaatgaaaatgaaataaggacatgcaaaaatagactgtattttaaaggtcttcagttgcataagcctcgt

SEQ ID NO: 78226 - DNA, 600 bp, Chicken  19866894367659_1
cccattgctgccccttcccctgcacagagctgccccaacagatccgccccactggagagatgaactgcggatgggagcagcgtttgtacattacaaaagaagccaaaaaataggcaaagtccaaatcttagaagacttcgctatgcgtctcacaaggtcacatggtgagataagcaaagctgtttaattagggcaccgtcgagagccccttgtgtggacccacgggactgcccacagctgtgcacctgccctccatcttcccttgggctctctctccccacctcctcctctcccacccascaagccctgaaatctcccagctcctccatttccacagctgttcccttcagagcccaccttggaagccctgtctcttcactgcgtcgtccagcagtgcatcaccacagtcgctggcagctggggcaggggacagagagccattagcatcagcggtaccaaagggctgccccaccatggctgcctttgcacagggcaaaaacaagatggcacaagacatgctgcagggacgtgctctccctcccctcccaccccatcactaacagctctcaagccctacctttagctcctgggctgtccaaa

SEQ ID NO: 78227 - DNA, 600 bp, Chicken  19866894367659_2
gccattagcatcagcggtaccaaagggctgccccaccatggctgcctttgcacagggcaaaaacaagatggcacaagacatgctgcagggacgtgctctccctcccctcccaccccatcactaacagctctcaagccctacctttagctcctgggctgtccaaagccatctccttaatgccctccgccagcagctccggcctggataacagcaagcagcagacacagcgtgatcagatccccatccagcaaagccatcaacgttttactgccccatctatcaccaaggataacgctcctmcagcagcaaacccactaaacatatctggctaatgcaatttcaaagctcstgcaatacagcggggggaactttggaaataacattcatgctgacagcctttttagtgagccaatgtaacactccacgggataagattaagcttgtgacagctgactagcttaaatcagcgcctccaaacttgcatgagatgtggtcccaacatttcttggggacaggaaaagcctgcctaactgctttcaacctacagaaagccatcactgtttgggtaagaaaccttcattaatacctgacgatgttttt

SEQ ID NO: 78228 - DNA, 600 bp, Chicken  19866894367659_3
gcacagggcaaaaacaagatggcacaagacatgctgcagggacgtgctctccctcccctcccaccccatcactaacagctctcaagccctacctttagctcctgggctgtccaaagccatctccttaatgccctccgccagcagctccggcctggataacagcaagcagcagacacagcgtgatcagatccccatccagcaaagccatcaacgttttactgccccatctatcaccaaggataacgctcctmcagcagcaaacccactaaacatatctggctaatgcaatttcaaagctcstgcaatacagcggggggaactttggaaataacattcatgctgacagcctttttagtgagccaatgtaacactccacgggataagattaagcttgtgacagctgactagcttaaatcagcgcctccaaacttgcatgagatgtggtcccaacatttcttggggacaggaaaagcctgcctaactgctttcaacctacagaaagccatcactgtttgggtaagaaaccttcattaatacctgacgatgtttttcatccatctctgctggattctttcccaatgctcccccactttctgggac

SEQ ID NO: 78229 - DNA, 600 bp, Chicken  19866894367665_1
tcagaggctatgcacagaagggcaagttcctgttcacactgactcagcttgtggcgtcctcaccgtccagctagaagcgttacaaattccacataagacttcacttccctctaacttacatccctctatcttcagcatctggatagctgctcctaaaacaaatcccattcaagagagtatggatctcagacattgtgatatgacaaaggggagaggtcccacaaagcatgtgggtttccctaattttttcttgttctctgttgggaccgtccacttctgggtcttggagagagtagaacytggtttatttatgtggctcttgtctgtgtgctaagatctttaaataaggcagactgctctgccatgtgggcacacacaccatgtgggaccccaatgaagaaaaggatttgcttttcctttaggcaattctcctttcactggctctttaattttaaggccattcgcattccaagccaaactgaactaaaaataggaatccttgctcagaatggcagtggcatggmtcacctactgctgcattcccatctcacactgcgtcgtcacacctccggctagaggagtgtgctgcagcaatcatcc

SEQ ID NO: 78230 - DNA, 570 bp, Chicken  19866894367665_2
agcatgtgggtttccctaattttttcttgttctctgttgggaccgtccacttctgggtcttggagagagtagaacytggtttatttatgtggctcttgtctgtgtgctaagatctttaaataaggcagactgctctgccatgtgggcacacacaccatgtgggaccccaatgaagaaaaggatttgcttttcctttaggcaattctcctttcactggctctttaattttaaggccattcgcattccaagccaaactgaactaaaaataggaatccttgctcagaatggcagtggcatggmtcacctactgctgcattcccatctcacactgcgtcgtcacacctccggctagaggagtgtgctgcagcaatcatccacaactatgtgctctgcgagcaggttttgaagctctgccaccccttggaagctcccactgctttttctttcatgtgctaatgcagtttgctgtcttatctcctctcacatccttggggcacacctctttgtgaggctgtacaccaccagcaacccaactaagtgggaaaaacacacagagattcagctgtcctc

SEQ ID NO: 78231 - DNA, 599 bp, Chicken  19866894367670_1
  misc_feature (1)..(80): n is any nucleotide
nnnnnnnnnnnnnnnnnnnnnnnnnnnnnnnnnnnnnnnnnnnnnnnnnnnnnnnnnnnnnnnnnnnnnnnnnnnnnnnncacacacagaatataaggggaatacagcctcaagctacctaatctgactaaaaatgacagatttctacacactaacaaaacaaaattgaaatagcaggcacttacttatgaacaaagaccatttctttatataatgacattactagaactgaactagccagctccatgatgcaaaccacgcaaggcaggcaagatttcaaccaagaaggaaacccgttayttggctcccttgaagaccagggaagcaattrtttctatttcatggccagcaaagctgggaaaaactggtctcctatggatgtatttcttgagactgaaatcctaygtggattctgcagtattcagaagaggctgcatctttcccagcactgtataagattagtagtctatcctaattcagaaggatttttttttccccacagaaatgagcagaaaattatcatatgagattctcatccatcaaaactgactgaaaaaagcccaagggaaacactggatgagggaacgacaggcagacga

SEQ ID NO: 78232 - DNA, 599 bp, Chicken  19866894367670_2
  misc_feature (1)..(49): n is any nucleotide
nnnnnnnnnnnnnnnnnnnnnnnnnnnnnnnnnnnnnnnnnnnnnnnnncacacacagaatataaggggaatacagcctcaagctacctaatctgactaaaaatgacagatttctacacactaacaaaacaaaattgaaatagcaggcacttacttatgaacaaagaccatttctttatataatgacattactagaactgaactagccagctccatgatgcaaaccacgcaaggcaggcaagatttcaaccaagaaggaaacccgttayttggctcccttgaagaccagggaagcaattrtttctatttcatggccagcaaagctgggaaaaactggtctcctatggatgtatttcttgagactgaaatcctaygtggattctgcagtattcagaagaggctgcatctttcccagcactgtataagattagtagtctatcctaattcagaaggatttttttttccccacagaaatgagcagaaaattatcatatgagattctcatccatcaaaactgactgaaaaaagcccaagggaaacactggatgagggaacgacaggcagacgatataatcacttaaggcttttttgcttaagaa

SEQ ID NO: 78233 - DNA, 600 bp, Chicken  19866894367670_3
agcctcaagctacctaatctgactaaaaatgacagatttctacacactaacaaaacaaaattgaaatagcaggcacttacttatgaacaaagaccatttctttatataatgacattactagaactgaactagccagctccatgatgcaaaccacgcaaggcaggcaagatttcaaccaagaaggaaacccgttayttggctcccttgaagaccagggaagcaattrtttctatttcatggccagcaaagctgggaaaaactggtctcctatggatgtatttcttgagactgaaatcctaygtggattctgcagtattcagaagaggctgcatctttcccagcactgtataagattagtagtctatcctaattcagaaggatttttttttccccacagaaatgagcagaaaattatcatatgagattctcatccatcaaaactgactgaaaaaagcccaagggaaacactggatgagggaacgacaggcagacgatataatcacttaaggcttttttgcttaagaaaccagataaattgcactgaaatrattacgactggaaaggctttttaatcaaagatatcaagattgttacagctcc

SEQ ID NO: 78234 - DNA, 600 bp, Chicken  19866894367670_4
gctgggaaaaactggtctcctatggatgtatttcttgagactgaaatcctaygtggattctgcagtattcagaagaggctgcatctttcccagcactgtataagattagtagtctatcctaattcagaaggatttttttttccccacagaaatgagcagaaaattatcatatgagattctcatccatcaaaactgactgaaaaaagcccaagggaaacactggatgagggaacgacaggcagacgatataatcacttaaggcttttttgcttaagaaaccagataaattgcactgaaatrattacgactggaaaggctttttaatcaaagatatcaagattgttacagctccttttctgtggcatgtgcaaacaggttagaaaccccacctaccacgctacagacgacttcagaagtgtaaacttatgtcagctaawaatatccattaaaaatatcagtgacagcattcctaamattcaaaagtgagtgtgttttcaaaygttagcttgaaaccttattttaaaagctgctaaattaacactgaagtaatttggggggaaacatgaaaattctcacagaacatacaggaatagctgccaa

SEQ ID NO: 78235 - DNA, 600 bp, Chicken  19866894367670_5
ttttccccacagaaatgagcagaaaattatcatatgagattctcatccatcaaaactgactgaaaaaagcccaagggaaacactggatgagggaacgacaggcagacgatataatcacttaaggcttttttgcttaagaaaccagataaattgcactgaaatrattacgactggaaaggctttttaatcaaagatatcaagattgttacagctccttttctgtggcatgtgcaaacaggttagaaaccccacctaccacgctacagacgacttcagaagtgtaaacttatgtcagctaawaatatccattaaaaatatcagtgacagcattcctaamattcaaaagtgagtgtgttttcaaaygttagcttgaaaccttattttaaaagctgctaaattaacactgaagtaatttggggggaaacatgaaaattctcacagaacatacaggaatagctgccaaaaaatgaatgctctcattgactgggccaatcagtttaaaaaaataaagttcaagaagtagaaacaagcacttggaatttggagaaaaatgagaaaatcagcactgaataaaccaaactgaaataaaaacttctgaaa

SEQ ID NO: 78236 - DNA, 600 bp, Chicken  19866894367670_6
gattctcatccatcaaaactgactgaaaaaagcccaagggaaacactggatgagggaacgacaggcagacgatataatcacttaaggcttttttgcttaagaaaccagataaattgcactgaaatrattacgactggaaaggctttttaatcaaagatatcaagattgttacagctccttttctgtggcatgtgcaaacaggttagaaaccccacctaccacgctacagacgacttcagaagtgtaaacttatgtcagctaawaatatccattaaaaatatcagtgacagcattcctaamattcaaaagtgagtgtgttttcaaaygttagcttgaaaccttattttaaaagctgctaaattaacactgaagtaatttggggggaaacatgaaaattctcacagaacatacaggaatagctgccaaaaaatgaatgctctcattgactgggccaatcagtttaaaaaaataaagttcaagaagtagaaacaagcacttggaatttggagaaaaatgagaaaatcagcactgaataaaccaaactgaaataaaaacttctgaaagccatcgawagagtaatattagaacttcttcaccatg

SEQ ID NO: 78237 - DNA, 600 bp, Chicken  19866894367670_7
aaaaagcccaagggaaacactggatgagggaacgacaggcagacgatataatcacttaaggcttttttgcttaagaaaccagataaattgcactgaaatrattacgactggaaaggctttttaatcaaagatatcaagattgttacagctccttttctgtggcatgtgcaaacaggttagaaaccccacctaccacgctacagacgacttcagaagtgtaaacttatgtcagctaawaatatccattaaaaatatcagtgacagcattcctaamattcaaaagtgagtgtgttttcaaaygttagcttgaaaccttattttaaaagctgctaaattaacactgaagtaatttggggggaaacatgaaaattctcacagaacatacaggaatagctgccaaaaaatgaatgctctcattgactgggccaatcagtttaaaaaaataaagttcaagaagtagaaacaagcacttggaatttggagaaaaatgagaaaatcagcactgaataaaccaaactgaaataaaaacttctgaaagccatcgawagagtaatattagaacttcttcaccatgttaggagtccactaaaaagctgcttt

SEQ ID NO: 78238 - DNA, 467 bp, Chicken  19866894367670_8
taaaaatatcagtgacagcattcctaamattcaaaagtgagtgtgttttcaaaygttagcttgaaaccttattttaaaagctgctaaattaacactgaagtaatttggggggaaacatgaaaattctcacagaacatacaggaatagctgccaaaaaatgaatgctctcattgactgggccaatcagtttaaaaaaataaagttcaagaagtagaaacaagcacttggaatttggagaaaaatgagaaaatcagcactgaataaaccaaactgaaataaaaacttctgaaagccatcgawagagtaatattagaacttcttcaccatgttaggagtccactaaaaagctgcttttatttgatatctcttgaaaaattactcatggatggcctaaattttttatgacatttcctgagttctttaatagtttcttttagagatacattaatcctaatctaaatgagaac

SEQ ID NO: 78239 - DNA, 600 bp, Chicken  19866894367673_1
gactggctgaagatccaccttacatatttattttgtgtaggggttgggggggggagataattacatggattccagataaatcattttataatttgtgtattttagcaacagttaggataatattaaacatattctcaaatgtatcttttctatgtaatgaagtactgtgaagataacagtgaagcatcactttgctgtggcgtaagtattaatcatatgtgttacatggttaagagctaggcagcagggcgtgctggaacaacaaagctattgcttatttaaaaagagaacaaaaaaaamctgctttttttgtgcatgagaacttttttgtaagcatgaaaaataacttggttttagagatgttatttttactygattctgtatctggattccttctctgagttgggcaaacgatttctcatcgcctcattctgtgggatgattttaatgttatggcaacttggattctttctctcaaatcccagatgctgccaggagccacttattgctgcrggaagccctgcgggtgcagcagcagtgagctggtttaagccttgtgctgtctactccaaaattggacctaagagaaaggtttgtggg

SEQ ID NO: 78240 - DNA, 600 bp, Chicken  19866894367673_2
gataaatcattttataatttgtgtattttagcaacagttaggataatattaaacatattctcaaatgtatcttttctatgtaatgaagtactgtgaagataacagtgaagcatcactttgctgtggcgtaagtattaatcatatgtgttacatggttaagagctaggcagcagggcgtgctggaacaacaaagctattgcttatttaaaaagagaacaaaaaaaamctgctttttttgtgcatgagaacttttttgtaagcatgaaaaataacttggttttagagatgttatttttactygattctgtatctggattccttctctgagttgggcaaacgatttctcatcgcctcattctgtgggatgattttaatgttatggcaacttggattctttctctcaaatcccagatgctgccaggagccacttattgctgcrggaagccctgcgggtgcagcagcagtgagctggtttaagccttgtgctgtctactccaaaattggacctaagagaaaggtttgtgggcttggttattacatccctgaaggctagcaaggcgtgtgtgcaggcctggggctcctctgctgctgctggttaat

SEQ ID NO: 78241 - DNA, 600 bp, Chicken  19866894367673_3
catatgtgttacatggttaagagctaggcagcagggcgtgctggaacaacaaagctattgcttatttaaaaagagaacaaaaaaaamctgctttttttgtgcatgagaacttttttgtaagcatgaaaaataacttggttttagagatgttatttttactygattctgtatctggattccttctctgagttgggcaaacgatttctcatcgcctcattctgtgggatgattttaatgttatggcaacttggattctttctctcaaatcccagatgctgccaggagccacttattgctgcrggaagccctgcgggtgcagcagcagtgagctggtttaagccttgtgctgtctactccaaaattggacctaagagaaaggtttgtgggcttggttattacatccctgaaggctagcaaggcgtgtgtgcaggcctggggctcctctgctgctgctggttaattcttgagcttctgtgctgcaagatgcaagcaaggttttctctagccatgataggccaggtgttctctggctgcatggcctttctcctgagtgctggagacatgggggcactccgagctgccctgggaaaggggcttctg

SEQ ID NO: 78242 - DNA, 600 bp, Chicken  19866894367683_1
ctaaaatgatttttaccaatgatttttaccatgaactgttagccagtttaagggtaagaaaaaacatcacgtgacctagcttaagctttgtcggttacattaacttttctcaatagtgaagctgcagtgtcatatactgttgatagactgagcaatcccttttggatgtggtctcagccatgttttctcactctatatttttgcttgactagaaatctaaattatagcaacaaatctgttttctttggcaacttcataaccagtaattctgatatgtctcacataagagctatggtgcargtacacatgcatatgttcatgtataatattcacaggcattatacttcggaagcaacttggaagtctgtataattgggagttccctcacagtgtagtaacgatagtggagaatagattaccttaatgaatgaatccctggctgcaggacaaagtagaaataaaagcagagtccatgtagtctaacccagaaattttccttttctgaatcaaaatccgcatctccatctgaataagtgaccctgaggatgttaaacattatgttgtcttttactgtacaagtctaaaaaagtagggctttcc

SEQ ID NO: 78243 - DNA, 600 bp, Chicken  19866894367683_2; identical to SEQ ID NO: 78242

SEQ ID NO: 78244 - DNA, 599 bp, Chicken  19866894367689_1
  misc_feature (1)..(250): n is any nucleotide
nnnnnnnnnnnnnnnnnnnnnnnnnnnnnnnnnnnnnnnnnnnnnnnnnnnnnnnnnnnnnnnnnnnnnnnnnnnnnnnnnnnnnnnnnnnnnnnnnnnnnnnnnnnnnnnnnnnnnnnnnnnnnnnnnnnnnnnnnnnnnnnnnnnnnnnnnnnnnnnnnnnnnnnnnnnnnnnnnnnnnnnnnnnnnnnnnnnnnnnnnnnnnnnnnnnnnnnnnnnnnnnnnnnnnnnnnnnnnnnnnnnnnnnnnntttcttccaacaaagcaaatatgccatgtacagtcttaggagtattttaraaactatcacctgaagtttataagtagtgtcagwctcctatggagaaggagaaagatccccataccagctcatagttattttctttcatgctccctctgaaattttaggccaagatgcactttagaaattcccttttccatgctacatgatgactttcagtgagtttgcccagccacatacgtggagcgcactcacatattcaagctgactggttgctcagtagtcccgtgycaaggagtaggactgaagttacacaccatgaaaaggcccagaaccttcctctctgatcaaatccagt

SEQ ID NO: 78245 - DNA, 599 bp, Chicken  19866894367689_2
  misc_feature (1)..(216): n is any nucleotide
nnnnnnnnnnnnnnnnnnnnnnnnnnnnnnnnnnnnnnnnnnnnnnnnnnnnnnnnnnnnnnnnnnnnnnnnnnnnnnnnnnnnnnnnnnnnnnnnnnnnnnnnnnnnnnnnnnnnnnnnnnnnnnnnnnnnnnnnnnnnnnnnnnnnnnnnnnnnnnnnnnnnnnnnnnnnnnnnnnnnnnnnnnnnnnnnnnnnnnnnnnnnnnnnnnnnnnnntttcttccaacaaagcaaatatgccatgtacagtcttaggagtattttaraaactatcacctgaagtttataagtagtgtcagwctcctatggagaaggagaaagatccccataccagctcatagttattttctttcatgctccctctgaaattttaggccaagatgcactttagaaattcccttttccatgctacatgatgactttcagtgagtttgcccagccacatacgtggagcgcactcacatattcaagctgactggttgctcagtagtcccgtgycaaggagtaggactgaagttacacaccatgaaaaggcccagaaccttcctctctgatcaaatccagtggtaaaatgatcattcttacttcacttgctgtgt

SEQ ID NO: 78246 - DNA, 599 bp, Chicken  19866894367689_3
  misc_feature (1)..(18): n is any nucleotide
nnnnnnnnnnnnnnnnnntttcttccaacaaagcaaatatgccatgtacagtcttaggagtattttaraaactatcacctgaagtttataagtagtgtcagwctcctatggagaaggagaaagatccccataccagctcatagttattttctttcatgctccctctgaaattttaggccaagatgcactttagaaattcccttttccatgctacatgatgactttcagtgagtttgcccagccacatacgtggagcgcactcacatattcaagctgactggttgctcagtagtcccgtgycaaggagtaggactgaagttacacaccatgaaaaggcccagaaccttcctctctgatcaaatccagtggtaaaatgatcattcttacttcacttgctgtgttctayagaacctgggcttgtatccacatcagccactttcataaaaagaggtttccaatttgtgagctgtaaggcttcttttgttggtttattggttggtcagttgacagattgggttttttagctgctgtattctgttgttggtggctaatttttaatcgattttgattcagagattagtgaccaggtataaattcat

SEQ ID NO: 78247 - DNA, 600 bp, Chicken  19866894367689_4
tatggagaaggagaaagatccccataccagctcatagttattttctttcatgctccctctgaaattttaggccaagatgcactttagaaattcccttttccatgctacatgatgactttcagtgagtttgcccagccacatacgtggagcgcactcacatattcaagctgactggttgctcagtagtcccgtgycaaggagtaggactgaagttacacaccatgaaaaggcccagaaccttcctctctgatcaaatccagtggtaaaatgatcattcttacttcacttgctgtgttctayagaacctgggcttgtatccacatcagccactttcataaaaagaggtttccaatttgtgagctgtaaggcttcttttgttggtttattggttggtcagttgacagattgggttttttagctgctgtattctgttgttggtggctaatttttaatcgattttgattcagagattagtgaccaggtataaattcatagctaccgtctatggagttgagatcctcgaagtcactccttttaatccatcagacctaaaaatgaagcccagtgtcctggaaaaatctcaagctggatataaataca

SEQ ID NO: 78248 - DNA, 600 bp, Chicken  19866894367689_5
ataaattcatagctaccgtctatggagttgagatcctcgaagtcactccttttaatccatcagacctaaaaatgaagcccagtgtcctggaaaaatctcaagctggatataaatacaggaatgtctggggtcagcagtacagttcaatgggaagtcattactttccacttttgcttgctgcttaagccttcaactctaatacatagcactctccatggaatatcatttagttacctcaaagaccaactctctgtgtttggccaggatttcccagaacagctgtatttgcctgaaacaatraaaaaaaatattactggtaacgggaagtccatagcacggaagagcagaatttcacagaagccagaccaaggatatttaattcattgaaaaaaagcaaccaaagcattcagggctcaaagctaactctattgcttcctttggcttcacctccacccacacacacacagccacatacaccaatcagcctatttcttttactgtctgagaaggaaggaagagaaaggatattgttaatatttggatgttgaaaaaaattggcagaggctcctttgcagggattaaacaatacaagtaactaaa

SEQ ID NO: 78249 - DNA, 600 bp, Chicken  19866894367692_1
gagtctccgtgcaggcttcaagcacctcaatggtgcagagtgattctgagtgctgaggggaaggtgtttccatgcaggtcctggttgttgtctcgaggatgcaaagctcagctggtgcaatcccatgctggcttggacaggtctccacacacggcccggctgcctcaggggtgcacagcttcgtggacaagggtgggtgctgcacgagaatggtttccacgtagatctcatctgtctcaggagtgcagggtgacgcagcgtgctggtgggggaaagcttccatgcacatccccactgtckcaggggcacagggggctgctggagaggtggactgcagcgaggtgctggtctctgcctggcactgctgaaggtctgctgctgggcacacacaggaggtgacacattgggatgtgcaggggtcgcagatgtccccaggtgcagggacagtgggaggtgggcaggcagggccacagacatcggggcaggagggtgcagcttggcacaggtccaccccaggagtctgttcgggacagggacatgggtcctgcatggggcaggtgtcagaatgagcagtgacactgcacgatgtgcagaggtcag

SEQ ID NO: 78250 - DNA, 463 bp, Chicken  19866894367692_2
cctggcactgctgaaggtctgctgctgggcacacacaggaggtgacacattgggatgtgcaggggtcgcagatgtccccaggtgcagggacagtgggaggtgggcaggcagggccacagacatcggggcaggagggtgcagcttggcacaggtccaccccaggagtctgttcgggacagggacatgggtcctgcatggggcaggtgtcagaatgagcagtgacactgcacgatgtgcagaggtcagtgggtacagatgtccccacacaggcaggaggtggcaggcagggcagctcgcacrgctccracatcttccttcctggaggaaataagaacaactcaatgttcaccaacccaatgcttccgactggttgctttcctggctgctaggctcaccaggaagatttgtgccgatcgtgttgcaattcaggtatgaggaaaagctcaatagagggaaaatcgga

SEQ ID NO: 78251 - DNA, 457 bp, Chicken  19866894367692_3
actgctgaaggtctgctgctgggcacacacaggaggtgacacattgggatgtgcaggggtcgcagatgtccccaggtgcagggacagtgggaggtgggcaggcagggccacagacatcggggcaggagggtgcagcttggcacaggtccaccccaggagtctgttcgggacagggacatgggtcctgcatggggcaggtgtcagaatgagcagtgacactgcacgatgtgcagaggtcagtgggtacagatgtccccacacaggcaggaggtggcaggcagggcagctcgcacrgctccracatcttccttcctggaggaaataagaacaactcaatgttcaccaacccaatgcttccgactggttgctttcctggctgctaggctcaccaggaagatttgtgccgatcgtgttgcaattcaggtatgaggaaaagctcaatagagggaaaatcgga

SEQ ID NO: 78252 - DNA, 599 bp, Chicken  19866894367699_1
  misc_feature (1)..(8): n is any nucleotide
nnnnnnnncagacagtcactctgcaaatatgtgtgctgatggaaggcagctgttattgtgtttccgtgatggggcactcaacaaaagctgaatgagtctttaatgcaaagataaattaagaaaaaagcaaggcgcctgtgaaagagatgtgtgcatatccctccgcttcccttcacatcaacaggcgttaccaaagtcctaacctcactctttggggatggtcaccatttcctttaccacttctaggcctgtactcagctgtttaccaccacaactatcagcctgagtttatcagccctmgagatctagcagcagaaaaacttgcaaaatctctcctgtatctrtctcatatgaatcaggtggatcagattggcttgtttatacagcttaaatagcaaacaatctgacgccgtagacagcaactctttattaggccctcagatgaatatctcccctgcaggtgccaagcagcagtaagcccgcctgggagaaaaaccaaaggaatttacaatgggttcttggtaatttttcttctctagtgacacagctaaatgtggcaggtgaaatctgccctcataatactgaggacatgtttgtct

SEQ ID NO: 78253 - DNA, 600 bp, Chicken  19866894367699_2
ggcagctgttattgtgtttccgtgatggggcactcaacaaaagctgaatgagtctttaatgcaaagataaattaagaaaaaagcaaggcgcctgtgaaagagatgtgtgcatatccctccgcttcccttcacatcaacaggcgttaccaaagtcctaacctcactctttggggatggtcaccatttcctttaccacttctaggcctgtactcagctgtttaccaccacaactatcagcctgagtttatcagccctmgagatctagcagcagaaaaacttgcaaaatctctcctgtatctrtctcatatgaatcaggtggatcagattggcttgtttatacagcttaaatagcaaacaatctgacgccgtagacagcaactctttattaggccctcagatgaatatctcccctgcaggtgccaagcagcagtaagcccgcctgggagaaaaaccaaaggaatttacaatgggttcttggtaatttttcttctctagtgacacagctaaatgtggcaggtgaaatctgccctcataatactgaggacatgtttgtctaacactgaggaactgacctaaaatgaaggttttgcattttggctc

SEQ ID NO: 78254 - DNA, 600 bp, Chicken  19866894367700_1
cactgtttactgcgttgctcgtgtgttcttatgttcctggacttgaactggaacgatcagtgcaaggaaatattccaatcatagaatggcttaggttggaagggattgtaaaaatcatctagctctaacctccagattgtccaccctacaaatccatagctttccaattcagagataaggatgtgatgcaggaccatggccttgcctaagttcagctgaataaaatcagctgcccttcctttgtccaattatgccatcactccttcatagaaggtggccagattactcaggcatgatctrcccttgctgaaatcgtgctggctgtggcagattacctccttacctcacacatgccttaatatatcttccaggagattaattctatgatctttgtaggcacagtggtaaaaatcactgacctgtttttccctgggtcttcctttctccctttcttgtaaatgagagccatgttgccctttttgcaatcacagggatgttgcctgacagccttgactggtgagttatgatatagagtggcttggaagctacatcagccagttacttcaggaccctgagacagaagtccctgtagacgtaaac

SEQ ID NO: 78255 - DNA, 600 bp, Chicken  19866894367709_1
aagctcgtgaaagacttttctgaagtaggatttgttgggtggttttttgtttgttttcaggaaagacgttgataaatcaaagtcaagacttcaaacaaacatctatgtctgcatcaacaaagatgagttccctgacccagaaaaagagaatggctcaaccaacctcagtttggcagagacataaatctcggtgactaggaattaactcactttttttctagaacaagaaaatgggagaggaagatttaaacgtttgcccccagcaaacacagatctctgtctgcaaagtgagcatgctgyctgctgctctagcaggagcatctctttcactctggaagacttgtccaactacagaatgagtcatgtctgaaacgcttcagcatctcacaggacacaagacagttcytgctgcccagttctactaattgcttctaaagtccagatcaaataatgtccataaagatatatctttattgcacaaagatgtgtaataccaggatatatatataaatcattatatgaagatatataatatccagaaagataaatgaagctgtcatgactggggaccggttgtcttgatatgaaacttgcagatat

SEQ ID NO: 78256 - DNA, 600 bp, Chicken  19866894367709_2
gtctgcatcaacaaagatgagttccctgacccagaaaaagagaatggctcaaccaacctcagtttggcagagacataaatctcggtgactaggaattaactcactttttttctagaacaagaaaatgggagaggaagatttaaacgtttgcccccagcaaacacagatctctgtctgcaaagtgagcatgctgyctgctgctctagcaggagcatctctttcactctggaagacttgtccaactacagaatgagtcatgtctgaaacgcttcagcatctcacaggacacaagacagttcytgctgcccagttctactaattgcttctaaagtccagatcaaataatgtccataaagatatatctttattgcacaaagatgtgtaataccaggatatatatataaatcattatatgaagatatataatatccagaaagataaatgaagctgtcatgactggggaccggttgtcttgatatgaaacttgcagatatatttttttaaaaaaaagaaaagcaaaatagaattggctgatttcctccaacaaatgttctggcaccagatcagaattagagtaaattctacctcactgcgaagtgg

SEQ ID NO: 78257 - DNA, 600 bp, Chicken  19866894367711_1
atttaaaaataaattaataaaataaaataatgcagtctctgcatctggacagttcttgcaaatatcctcttttaagggggaaatacagtgagactggaagtcttaaataaaagtcagctttcttaactttgggcagatgaaaactagggaagtgaatttgtgggttggtgttctgttttggtttttgattactccaaaattctgatttcttttagatgattcaagcattgtcccttggcttctgagctttaagcgtggaacagctctggaagaacagggaaataaaatagtcatcaaagraacaggatattttttcatatatggccaggtgagaaagctcaattcacttcagcacctggcttttaaatgatttttaatgtctccatacaggatgtttgaagtctctgcctcttcatcctgcaggttttatatactgatacaacatttgcgatgggacatctaatacagaggaagaaagcccacgtgtttggtgatgatctcagcttggtgacattatttcgttgcatccaaaatatgccacagtcttatccgaataattcttgctatactgctggtaaacatctaatttttttctttttg

SEQ ID NO: 78258 - DNA, 600 bp, Chicken  19866894367711_2
ggagctatcggtggctggatggcactaaacaaatgggactgggaaggaattttttttccctcacaaaaattgaggctgtccaaacttcctgcccttccatccacatatttggacatcacaactactttcaatttcatgtattgttttgtcccacccttgtcttatgctccctacctccaccatttctttcttgactaggatctctactccatcatgccacctcatgattcttgctgtcccaccactagctttcacctggagaaccaaatcttgttgcagcagctcatgctgttgagcacrtattgctgcagaagtcacttttgctcccagctcagcgactgcagcatgaaagctaggtgctctcagttatcacatcagctgatgtgtggcttgaaggaagtagacttctgagttccacagttgcagtgggtcgcccgacgtctgctaacttcacttggttggtaaagctgatgaaatcaacaacaaaaaaaacctctaaaaaaataactgaagcatagagtacaaggaaggataatgaaacagtatattcctcactcatcacaaaacagtggtgtcagctggtttctgcttgtttttgtt

SEQ ID NO: 78259 - DNA, 600 bp, Chicken  19866894367714_1
acactaaacatacttagattacagagcattaatcctgtgttgtttttttggctatgcagattgctctttcagtaaactgctacccagaatacatgaaggttaactgctgctgcgctgctttgtatacagttccttcttagctttatactctcatttgacaaagggcactggcagactattggtttcttgtcagggtgattcatttcacccagctgctcacctgcagagtgactgctgccttcaactattgcttttgcttgctgtgatgtccttagcgcagtgtctgcccctctgccagcrgaaaggagtgcrtgtcttctcctctgtcccacccgtgtgccatctcatggactggcacagcagtgtgtggtactgatggtgtctttgtgcatgtaggcgagatgagtaaggagacgcctgtgtgtctcctggtgatgctcagccacctctggcaaaggcagagcgggcagcggtgtggcagtgctctgtactgcaaagggtcagcagggygtgtaagggaagtaggtaacttaaagcacgtggtgtttcacttggcttcagcgagaggactccagcctcgcttcagtaagttacgtacgt

SEQ ID NO: 78260 - DNA, 600 bp, Chicken  19866894367714_2
cttagattacagagcattaatcctgtgttgtttttttggctatgcagattgctctttcagtaaactgctacccagaatacatgaaggttaactgctgctgcgctgctttgtatacagttccttcttagctttatactctcatttgacaaagggcactggcagactattggtttcttgtcagggtgattcatttcacccagctgctcacctgcagagtgactgctgccttcaactattgcttttgcttgctgtgatgtccttagcgcagtgtctgcccctctgccagcrgaaaggagtgcrtgtcttctcctctgtcccacccgtgtgccatctcatggactggcacagcagtgtgtggtactgatggtgtctttgtgcatgtaggcgagatgagtaaggagacgcctgtgtgtctcctggtgatgctcagccacctctggcaaaggcagagcgggcagcggtgtggcagtgctctgtactgcaaagggtcagcagggygtgtaagggaagtaggtaacttaaagcacgtggtgtttcacttggcttcagcgagaggactccagcctcgcttcagtaagttacgtacgttattactcactg

SEQ ID NO: 78261 - DNA, 600 bp, Chicken  19866894367714_3
agctgctcacctgcagagtgactgctgccttcaactattgcttttgcttgctgtgatgtccttagcgcagtgtctgcccctctgccagcrgaaaggagtgcrtgtcttctcctctgtcccacccgtgtgccatctcatggactggcacagcagtgtgtggtactgatggtgtctttgtgcatgtaggcgagatgagtaaggagacgcctgtgtgtctcctggtgatgctcagccacctctggcaaaggcagagcgggcagcggtgtggcagtgctctgtactgcaaagggtcagcagggygtgtaagggaagtaggtaacttaaagcacgtggtgtttcacttggcttcagcgagaggactccagcctcgcttcagtaagttacgtacgttattactcactgaattatgtatttaattttcaccttttcaccttttttttttggtgaaatacaaacaaatgggttgaaaaatggtatctctttttgcagggggaaaaggagaataaatattaatgatgtggcacgttgcttagagttgctctgtgtctgatgaatatggaacagttctatttttttacttaaaacttaaaatttgtcaga

SEQ ID NO: 78262 - DNA, 600 bp, Chicken  19866894367723_1
agagaacctcccttgctctgctggccacactctttttaatgcacctcaggataccattggtctgctgggccattgccaacctgtagttcaccagatccttctcctcagagctctaacaggtcatcccctaaactgtaccaatgcaagcagttattccttcccacttgtagaactcttacttgcccttattgaatatcataaggatcctctccacccaattctccagtctttccagatccctctgaatggtagcacagctttctggtgtgtcagacactcctctcagctttgtatcatcarcaaacttgttgaacatgcactctrtcccttcatacaggtcactgatgaagatgatgaacgaaactaggcacagtgctgacctctgggaagcagtgatatctacatagctctcagtcaagtatttgtggtttgagggatgtagattttaaagaaaaagccatggccaacccacaagaaacatgatgaaaccagaaatttagatagagttaaatctagmcaggtacataaaggggaacaataaataaataaayaaataaaattctacaggtatatcagtgataaatgaaagaggtgggcccc

SEQ ID NO: 78263 - DNA, 600 bp, Chicken  19866894367723_2
ccacactctttttaatgcacctcaggataccattggtctgctgggccattgccaacctgtagttcaccagatccttctcctcagagctctaacaggtcatcccctaaactgtaccaatgcaagcagttattccttcccacttgtagaactcttacttgcccttattgaatatcataaggatcctctccacccaattctccagtctttccagatccctctgaatggtagcacagctttctggtgtgtcagacactcctctcagctttgtatcatcarcaaacttgttgaacatgcactctrtcccttcatacaggtcactgatgaagatgatgaacgaaactaggcacagtgctgacctctgggaagcagtgatatctacatagctctcagtcaagtatttgtggtttgagggatgtagattttaaagaaaaagccatggccaacccacaagaaacatgatgaaaccagaaatttagatagagttaaatctagmcaggtacataaaggggaacaataaataaataaayaaataaaattctacaggtatatcagtgataaatgaaagaggtgggccccctctaggaagaaaccagagacatg

SEQ ID NO: 78264 - DNA, 600 bp, Chicken  19866894367723_3
attctccagtctttccagatccctctgaatggtagcacagctttctggtgtgtcagacactcctctcagctttgtatcatcarcaaacttgttgaacatgcactctrtcccttcatacaggtcactgatgaagatgatgaacgaaactaggcacagtgctgacctctgggaagcagtgatatctacatagctctcagtcaagtatttgtggtttgagggatgtagattttaaagaaaaagccatggccaacccacaagaaacatgatgaaaccagaaatttagatagagttaaatctagmcaggtacataaaggggaacaataaataaataaayaaataaaattctacaggtatatcagtgataaatgaaagaggtgggccccctctaggaagaaaccagagacatggttacaagggataccaaggaatctgaggtgctcaatgacttttcagcatcagtcttcactggcaagggctctacctgcatcatccaagttgtagaaagctaaggtaagaactgggagaaggaagacatgccaactgtaagtgaagatcgggttcaagatgatctatagaacttgaaagtgcacaagtccatgg

SEQ ID NO: 78265 - DNA, 600 bp, Chicken  19866894367723_4
gcacagctttctggtgtgtcagacactcctctcagctttgtatcatcarcaaacttgttgaacatgcactctrtcccttcatacaggtcactgatgaagatgatgaacgaaactaggcacagtgctgacctctgggaagcagtgatatctacatagctctcagtcaagtatttgtggtttgagggatgtagattttaaagaaaaagccatggccaacccacaagaaacatgatgaaaccagaaatttagatagagttaaatctagmcaggtacataaaggggaacaataaataaataaayaaataaaattctacaggtatatcagtgataaatgaaagaggtgggccccctctaggaagaaaccagagacatggttacaagggataccaaggaatctgaggtgctcaatgacttttcagcatcagtcttcactggcaagggctctacctgcatcatccaagttgtagaaagctaaggtaagaactgggagaaggaagacatgccaactgtaagtgaagatcgggttcaagatgatctatagaacttgaaagtgcacaagtccatgggacctggtgagattcatccacagattctgagagc

SEQ ID NO: 78266 - DNA, 600 bp, Chicken  19866894367727_1
cagatgattgttatgtgctgttttgcaaaatatgacttgacagtttaataataggaatacactaaaggaaactaagttttgagttctagatcatcgtccccctagaagcgtatgcctgagcacagttttctttacagagtgagcacgcggggaaacaaaagatcaactatttccagctgcgagtttctcaaatgctatcagcaaaatcaactgacagcagttggtaacatcacaaaaggaactactgtgcttcctcactatctttactaaaaatcctaagtccaactaggaaaataaaarattcctgttcaatcttctcttagggtatctcagaacatatttagtatattcttcagagttctacaggcagagttattgtatagcatgtgaaataaacattacttccacgaagcacaaatcagaaagcagctgagaaagcagcagtttgtttccattttatgcatcacgtagaacttgtacagaggagcactacgtgcactacgtactgcttgcccactaaaattcattctagcagtatcaggtatccttactacatcaaattaaagcatttaactgctttgtgctcacttcactgctctg

SEQ ID NO: 78267 - DNA, 600 bp, Chicken  19866894367729_1
ttttcacggctttgaggaaaattgcatctcttcctttataggagagtaggtaaataaaataaattgatctttgtcaccctgagttccttccataattttctccactttatcatgtccatggagggttaaacactgggtctacacatgcttagttggaattgcagtgcattaagactttattttcaggaccaaagttaacacatacacactgaggttactaagcacttaactatgggctggtgacaatgtagttggttataaagtttatgacacacaatgccacagaaagaggaaaataartgtttaaaagaggaatgaagttctagtaatgaatgtcagtcaaaatcctcattaaccaatacaacctagtcatttctctgaattataaaaaaatcatgtagtacttagcacatgcctgctaaaaaaggcagaagaacaggagttcattaaactcgtcatacccccagacagaagtggatgttatttcagtcatctgagaaaactagaggacaaatcatttcaaacagtttttttgtttgtttgtttgtttgttttttaatgttactaacacatggtggaacatacagtttttcttgttgc

SEQ ID NO: 78268 - DNA, 600 bp, Chicken  19866894367729_2
aagttctagtaatgaatgtcagtcaaaatcctcattaaccaatacaacctagtcatttctctgaattataaaaaaatcatgtagtacttagcacatgcctgctaaaaaaggcagaagaacaggagttcattaaactcgtcatacccccagacagaagtggatgttatttcagtcatctgagaaaactagaggacaaatcatttcaaacagtttttttgtttgtttgtttgtttgttttttaatgttactaacacatggtggaacatacagtttttcttgttgcttgaaactggaaggctrattggatcaccagggtcagtgagactgttttccccagtaaaacttctcatgcagttccttaatcccattaatttcttttggattgctcatgtgcattaaatgaccaccagatcttgtcccatagagatggcaagcttggctgtgttgcattaaccagcacaagcctcaacagaagttaattccagcctttaatgttacctaatctttcaacttctgaagcataagttaacagtcatactagtttgctttatttttagctataaaaattgctaataagtcacagtatttatagatgctttc

SEQ ID NO: 78269 - DNA, 600 bp, Chicken  19866894367732_1
tgggcccagatgccctcacacgcatcttttctgcgtcagagcctttttctttgctctgcagccagccctctcccttggctggactgaagaatggcccttctgctgcaatagcagggtgcatttcttctcctggcctgggtttttgtgctctgctcttaggctctagagcctttctgacctttggcggatacttgataccagcgttcccttgtctgggggggggggaaaggagggatgttatggctcttcaggcccagaaagaagtgagcagaaacggcgtcctctggagctgcagccccrtgttgcagtgggacgctgcggcgctgctccgggaggcgtgtgacacaatccagacatcatttactggctccatataacctgaggcattcacacataaattcaacctgaatacataagcttatatagagagratccttaaaccatcccggctaaaaatatttgtaaaatgctgggaaactttttgcagtgcatttggatgctctcttccctgttacgaatgcgtgctggggtcacttgcatgtctgtgcagacatctgagatgtgatttccatatgtgggtttacaggatggagaagttgt

SEQ ID NO: 78270 - DNA, 593 bp, Chicken  19866894367732_2
ggcctgggtttttgtgctctgctcttaggctctagagcctttctgacctttggcggatacttgataccagcgttcccttgtctgggggggggggaaaggagggatgttatggctcttcaggcccagaaagaagtgagcagaaacggcgtcctctggagctgcagccccrtgttgcagtgggacgctgcggcgctgctccgggaggcgtgtgacacaatccagacatcatttactggctccatataacctgaggcattcacacataaattcaacctgaatacataagcttatatagagagratccttaaaccatcccggctaaaaatatttgtaaaatgctgggaaactttttgcagtgcatttggatgctctcttccctgttacgaatgcgtgctggggtcacttgcatgtctgtgcagacatctgagatgtgatttccatatgtgggtttacaggatggagaagttgttcaggcctggagcctaaacaaaaaatactctatcacagccaggctaacgagattaaagatgtaattgcaggctcacctgagcctgtctgggtgatctcctgatagtccctgtgcactccgagtc

SEQ ID NO: 78271 - DNA, 600 bp, Chicken  19866894367733_1
gaacctcaaagaccatctagtttcaacccccctgccacgggcagtgtcaccaaccactacaccaggcagcccagagctcttctccacctgagccggaaggcttccctccacaaccaggcaaagggcagggaggcagctggcagcagggctctgggggctgagcactgctgcttgagcagcccagcccactgcaccaccagcagcctgcccggcacagagcacaggaccccatgcttcatgttttgcaatagcacagagacaacaaagaaaacacatttgagaaacagtgtgggaaacacrccagtgttttaacgaacgctccctttggaaacgaagccttttttaagcakaccactatgattttgttttagtgactcatacgaatggattctggagaaggtttaaaaatgggatattttctcttctgcttctaggttcacctcaagacacgtgaatgaaaatacagcagcaggartatcaggctggcctcacactcaccaacagacactaaatagggatctactaaatttgtaaagctaagctgaagtttcaaatatgtaattctgaaaacacaattcctcctgaagtcaggctgggcgc

SEQ ID NO: 78272 - DNA, 600 bp, Chicken  19866894367733_2
caaccactacaccaggcagcccagagctcttctccacctgagccggaaggcttccctccacaaccaggcaaagggcagggaggcagctggcagcagggctctgggggctgagcactgctgcttgagcagcccagcccactgcaccaccagcagcctgcccggcacagagcacaggaccccatgcttcatgttttgcaatagcacagagacaacaaagaaaacacatttgagaaacagtgtgggaaacacrccagtgttttaacgaacgctccctttggaaacgaagccttttttaagcakaccactatgattttgttttagtgactcatacgaatggattctggagaaggtttaaaaatgggatattttctcttctgcttctaggttcacctcaagacacgtgaatgaaaatacagcagcaggartatcaggctggcctcacactcaccaacagacactaaatagggatctactaaatttgtaaagctaagctgaagtttcaaatatgtaattctgaaaacacaattcctcctgaagtcaggctgggcgcgggccataaaactataaaaagatactttgtccctatagagggcgagaagc

SEQ ID NO: 78273 - DNA, 600 bp, Chicken  19866894367733_3
gcagcccagcccactgcaccaccagcagcctgcccggcacagagcacaggaccccatgcttcatgttttgcaatagcacagagacaacaaagaaaacacatttgagaaacagtgtgggaaacacrccagtgttttaacgaacgctccctttggaaacgaagccttttttaagcakaccactatgattttgttttagtgactcatacgaatggattctggagaaggtttaaaaatgggatattttctcttctgcttctaggttcacctcaagacacgtgaatgaaaatacagcagcaggartatcaggctggcctcacactcaccaacagacactaaatagggatctactaaatttgtaaagctaagctgaagtttcaaatatgtaattctgaaaacacaattcctcctgaagtcaggctgggcgcgggccataaaactataaaaagatactttgtccctatagagggcgagaagctaatcattagccacccatttatagtgcttatttcgttattttaatatctttgtgttgtaggagcctaccccttatttctaccagatgggtaaaaaaataaaaagatccaccgcctccaggcaaaa

SEQ ID NO: 78274 - DNA, 599 bp, Chicken  19866894367737_1
  misc_feature (1)..(113): n is any nucleotide
nnnnnnnnnnnnnnnnnnnnnnnnnnnnnnnnnnnnnnnnnnnnnnnnnnnnnnnnnnnnnnnnnnnnnnnnnnnnnnnnnnnnnnnnnnnnnnnnnnnnnnnnnnnnnnnnncagtcatagaatcataggttcattatggttggaaaagacctctaaagatcatttaagccaaccaccaagaccatcctcaccaggcctattaagcatgtcccacagtgccacatttacctttttcttgaacacctcatgggacggtcattccaccacctttctgagcagactgttcctatgcctcatygttctttctgagaagaaatgtttcttaatattcccctgaacctcaccaggggcaacttaaggccatgccctcttgtcctcttgctgttctcttggagaagaggctgaccccccccttgccacagtctcctttcagggagttgtaaagagcaataaggtctccyctgagccttctcttgtccagactatacaatcccagttccctcagccactccccacaagatttgtgctccagacccatcaccagctttgttactcttcccaggatgcgctccaggatgctgatgtcttttttgtagt

SEQ ID NO: 78275 - DNA, 600 bp, Chicken  19866894367737_2
atttaagccaaccaccaagaccatcctcaccaggcctattaagcatgtcccacagtgccacatttacctttttcttgaacacctcatgggacggtcattccaccacctttctgagcagactgttcctatgcctcatygttctttctgagaagaaatgtttcttaatattcccctgaacctcaccaggggcaacttaaggccatgccctcttgtcctcttgctgttctcttggagaagaggctgaccccccccttgccacagtctcctttcagggagttgtaaagagcaataaggtctccyctgagccttctcttgtccagactatacaatcccagttccctcagccactccccacaagatttgtgctccagacccatcaccagctttgttactcttcccaggatgcgctccaggatgctgatgtcttttttgtagtgaggagcccagaactgatcttctgtcatagttgatgtgtgacaaaagacaaatggatatgcatgaagtgcagaggtacattctttgaccttttcccctctgtggcccaatatgatttctaaaattctgtttccttcttatctggatcccaggacagtactttct

SEQ ID NO: 78276 - DNA, 600 bp, Chicken  19866894367753_1
taatatgcaggtggaacttttgccgtgtatgaataaacttaaatctgagtgtttaaatgaaaacttcatttactagcagcagcgggtgggtcagaattcttagacaaggaaaaaagtggaggaaaatgttacgtaactcttcagaggctgcgaaatgtgttaggttggatgcggtctgtagttacggaggcatgtttgttatacaactgacagtactgctttaactgactgccgctgactcaacagctgtgctcatcttccttcagttttgaatgacacatcaaaggagatgtgctcacragatagagcggctgcttgcaccacaagctgcaactacccaggtgctggaagagctggaggtgtgcagtctcagtgtgctggtccaggygtttgttcttagatacgctcagctgtttccagactgctgtatcaggggtggctgctgttgtatgtgcaattcttgagtcactgtaaatgactgaagtgttgttgctacrcggtgattccagatctctgtgctatgggtacaggtatcgctcatcacgttacttgattatctgtttctgggactcggaagcttttttgaagtaattccttggt

SEQ ID NO: 78277 - DNA, 600 bp, Chicken  19866894367753_2
ggtcagaattcttagacaaggaaaaaagtggaggaaaatgttacgtaactcttcagaggctgcgaaatgtgttaggttggatgcggtctgtagttacggaggcatgtttgttatacaactgacagtactgctttaactgactgccgctgactcaacagctgtgctcatcttccttcagttttgaatgacacatcaaaggagatgtgctcacragatagagcggctgcttgcaccacaagctgcaactacccaggtgctggaagagctggaggtgtgcagtctcagtgtgctggtccaggygtttgttcttagatacgctcagctgtttccagactgctgtatcaggggtggctgctgttgtatgtgcaattcttgagtcactgtaaatgactgaagtgttgttgctacrcggtgattccagatctctgtgctatgggtacaggtatcgctcatcacgttacttgattatctgtttctgggactcggaagcttttttgaagtaattccttggttaaactgttctctgtgttaacttactgtcagcctctgcttaagtggaagtctgtatgtgtccacttcaaattaaatggggaaaagttt

SEQ ID NO: 78278 - DNA, 600 bp, Chicken  19866894367753_3
gttatacaactgacagtactgctttaactgactgccgctgactcaacagctgtgctcatcttccttcagttttgaatgacacatcaaaggagatgtgctcacragatagagcggctgcttgcaccacaagctgcaactacccaggtgctggaagagctggaggtgtgcagtctcagtgtgctggtccaggygtttgttcttagatacgctcagctgtttccagactgctgtatcaggggtggctgctgttgtatgtgcaattcttgagtcactgtaaatgactgaagtgttgttgctacrcggtgattccagatctctgtgctatgggtacaggtatcgctcatcacgttacttgattatctgtttctgggactcggaagcttttttgaagtaattccttggttaaactgttctctgtgttaacttactgtcagcctctgcttaagtggaagtctgtatgtgtccacttcaaattaaatggggaaaagttttagttgaactgtaattgcaacttcagctggtagacagacacagtcrtagggttccagaaaagccgcgtgagttctggctctttatgatttatttcctttagtagagaca

SEQ ID NO: 78279 - DNA, 429 bp, Chicken  19866894367753_4
ggtggctgctgttgtatgtgcaattcttgagtcactgtaaatgactgaagtgttgttgctacrcggtgattccagatctctgtgctatgggtacaggtatcgctcatcacgttacttgattatctgtttctgggactcggaagcttttttgaagtaattccttggttaaactgttctctgtgttaacttactgtcagcctctgcttaagtggaagtctgtatgtgtccacttcaaattaaatggggaaaagttttagttgaactgtaattgcaacttcagctggtagacagacacagtcrtagggttccagaaaagccgcgtgagttctggctctttatgatttatttcctttagtagagacataggtgcagaactgcgcacaaagccgcagcatgtatttcgtgcatgctttcccaaagcctatttga

SEQ ID NO: 78280 - DNA, 600 bp, Chicken  19866894367754_1
gaacttagttaacaataatgaaagtgattcaggtatcatttttaaacattaaatatcaggcatgaatgcttaatggaaaagccttgccattactctacttctggaagagagttaaaggaggaagcatctttttctccccttctttcccaccctgagggaaggtaaagaggagagctctgcacattgaacacagatgacttcgagaatgctttcaccaaataatccctatgttttgttactctttctcttagaggcagccgagaagtggttgatgatggaactatccctggagatgggctrggagctgcaggtctggattccagcttttatgggcatttaaaacgcaattggatctggacaagctatatcatcaataaaactaagaaggtactgtctcatacttcaatgattgttgcagatttttgttcacttaaggattgcattaagacaccggttgcaaaatgttgcattctgggccacaagcacacattgccagtttatgttgtgtttccttccacmagtgctcccaggtcccctgcagaattgctttcagtccataataaaataatactggaaaccccagcacaggcaaataaagat

SEQ ID NO: 78281 - DNA, 600 bp, Chicken  19866894367754_10
tgtagctggtactgactttgtcacaccccatactgattacatgggttatgtccatctccttgcagtaacctagcatgctcctggggcattacaattgataagtaaataatttccttttctcttactgaacatcaggagcagtattttttgtcttttgtaatgtctgatgtgcagtttgcagatcgtccagagggactcaaaargaaaatgcactgttaaaattgcatagccttatatctaagttaagtaggaagaaatgcttcaggttgaatataaaagctcagttcagttcccttgtgyttttgcactgtactggagacttaataattacttgataagtccatatttatgtgggattttattctgtgtaagctgctgagaaatagcatgaaataccacgttgactgaaaagggcaagttggaaagagcttctgtctttaaagacagagaaactggcacttgctttttataccttagtattggagaatctaattgctttaaagatcgattaccttaatcatgtgtcatcttaggtaataaaattaacattttgggagaaccaaaggcaggacctgagtctgtcrtccagaaaaaggaaag

SEQ ID NO: 78282 - DNA, 600 bp, Chicken  19866894367754_11
ttcagttcccttgtgyttttgcactgtactggagacttaataattacttgataagtccatatttatgtgggattttattctgtgtaagctgctgagaaatagcatgaaataccacgttgactgaaaagggcaagttggaaagagcttctgtctttaaagacagagaaactggcacttgctttttataccttagtattggagaatctaattgctttaaagatcgattaccttaatcatgtgtcatcttaggtaataaaattaacattttgggagaaccaaaggcaggacctgagtctgtcrtccagaaaaaggaaagtattgaaatcagtcaagaagctacccaggatcgaaacaaacgwgtaagaggtggaaagaaccaaaagaggaagaggcttaggaaggacacaggaaagccaaccaagaagaagaagaaaggtaggtaaccagtacataccacgaagaggaagcattctttttaatgctgctgcctaatgtggtttccttaataaagctgatgtgatagtgtgcaagatggaaatgtactggccagccctctggtttgccacttctagagaagaggttcagctgtgcagaagcttg

SEQ ID NO: 78283 - DNA, 600 bp, Chicken  19866894367754_12
tatttatgtgggattttattctgtgtaagctgctgagaaatagcatgaaataccacgttgactgaaaagggcaagttggaaagagcttctgtctttaaagacagagaaactggcacttgctttttataccttagtattggagaatctaattgctttaaagatcgattaccttaatcatgtgtcatcttaggtaataaaattaacattttgggagaaccaaaggcaggacctgagtctgtcrtccagaaaaaggaaagtattgaaatcagtcaagaagctacccaggatcgaaacaaacgwgtaagaggtggaaagaaccaaaagaggaagaggcttaggaaggacacaggaaagccaaccaagaagaagaagaaaggtaggtaaccagtacataccacgaagaggaagcattctttttaatgctgctgcctaatgtggtttccttaataaagctgatgtgatagtgtgcaagatggaaatgtactggccagccctctggtttgccacttctagagaagaggttcagctgtgcagaagcttgctgtaactgttaacccatgtgagaatcctgattgtactactggaaatgctaaagaaatt

SEQ ID NO: 78284 - DNA, 600 bp, Chicken  19866894367754_2
taatccctatgttttgttactctttctcttagaggcagccgagaagtggttgatgatggaactatccctggagatgggctrggagctgcaggtctggattccagcttttatgggcatttaaaacgcaattggatctggacaagctatatcatcaataaaactaagaaggtactgtctcatacttcaatgattgttgcagatttttgttcacttaaggattgcattaagacaccggttgcaaaatgttgcattctgggccacaagcacacattgccagtttatgttgtgtttccttccacmagtgctcccaggtcccctgcagaattgctttcagtccataataaaataatactggaaaccccagcacaggcaaataaagatggccatcacagctctggttaatgtcctgtctctgaaggctgccaataaaagattgtttggaaaggctgtaagaggaagggagatctatagtatgatctttctcaattaatcttctaagtagacagtcctggaatactgcaagtggggcttgaggcctttctgattctggggccttttcatccagcattagcttatacaattgatttttggacatgatta

SEQ ID NO: 78285 - DNA, 600 bp, Chicken  19866894367754_3
atactggaaaccccagcacaggcaaataaagatggccatcacagctctggttaatgtcctgtctctgaaggctgccaataaaagattgtttggaaaggctgtaagaggaagggagatctatagtatgatctttctcaattaatcttctaagtagacagtcctggaatactgcaagtggggcttgaggcctttctgattctggggccttttcatccagcattagcttatacaattgatttttggacatgattagatctttagtatccacaacttcatgtaaagtttcaaagacctactatrtgccactactccctcttcaagactttcagctccctagtaattayagtaggtgatttactgaaattcaaaccttcataatcaagcagtcattttagaatagaactagagccaaacatgtagtaggatgacggatgaattcttcctcgcaacaacagatctttctgaggtttatactgaagacttactattyatactgctaaaaggaattatttatagtgatgataacactgctgcactccttttgcatatcaccttttwaaaagacatattgttctaggaaaatacagtttctgagaacag

SEQ ID NO: 78286 - DNA, 600 bp, Chicken  19866894367754_4
ctctggttaatgtcctgtctctgaaggctgccaataaaagattgtttggaaaggctgtaagaggaagggagatctatagtatgatctttctcaattaatcttctaagtagacagtcctggaatactgcaagtggggcttgaggcctttctgattctggggccttttcatccagcattagcttatacaattgatttttggacatgattagatctttagtatccacaacttcatgtaaagtttcaaagacctactatrtgccactactccctcttcaagactttcagctccctagtaattayagtaggtgatttactgaaattcaaaccttcataatcaagcagtcattttagaatagaactagagccaaacatgtagtaggatgacggatgaattcttcctcgcaacaacagatctttctgaggtttatactgaagacttactattyatactgctaaaaggaattatttatagtgatgataacactgctgcactccttttgcatatcaccttttwaaaagacatattgttctaggaaaatacagtttctgagaacagactgacagtaagactccaaaccttcctgaccaaacaccctcttc

SEQ ID NO: 78287 - DNA, 600 bp, Chicken  19866894367754_5
ttctgattctggggccttttcatccagcattagcttatacaattgatttttggacatgattagatctttagtatccacaacttcatgtaaagtttcaaagacctactatrtgccactactccctcttcaagactttcagctccctagtaattayagtaggtgatttactgaaattcaaaccttcataatcaagcagtcattttagaatagaactagagccaaacatgtagtaggatgacggatgaattcttcctcgcaacaacagatctttctgaggtttatactgaagacttactattyatactgctaaaaggaattatttatagtgatgataacactgctgcactccttttgcatatcaccttttwaaaagacatattgttctaggaaaatacagtttctgagaacagactgacagtaagactccaaaccttcctgaccaaacaccctcttccactcagtactggaggtaaggtggtgatgstggtgggggctgtaaygtactgtagctggtactgactttgtcacaccccatactgattacatgggttatgtccatctccttgcagtaacctagcatgctcctggggcattacaatt

SEQ ID NO: 78288 - DNA, 600 bp, Chicken  19866894367754_6
tagtatccacaacttcatgtaaagtttcaaagacctactatrtgccactactccctcttcaagactttcagctccctagtaattayagtaggtgatttactgaaattcaaaccttcataatcaagcagtcattttagaatagaactagagccaaacatgtagtaggatgacggatgaattcttcctcgcaacaacagatctttctgaggtttatactgaagacttactattyatactgctaaaaggaattatttatagtgatgataacactgctgcactccttttgcatatcaccttttwaaaagacatattgttctaggaaaatacagtttctgagaacagactgacagtaagactccaaaccttcctgaccaaacaccctcttccactcagtactggaggtaaggtggtgatgstggtgggggctgtaaygtactgtagctggtactgactttgtcacaccccatactgattacatgggttatgtccatctccttgcagtaacctagcatgctcctggggcattacaattgataagtaaataatttccttttctcttactgaacatcaggagcagtattttttgtcttttgtaatgtc

SEQ ID NO: 78289 - DNA, 600 bp, Chicken  19866894367754_7
ataatcaagcagtcattttagaatagaactagagccaaacatgtagtaggatgacggatgaattcttcctcgcaacaacagatctttctgaggtttatactgaagacttactattyatactgctaaaaggaattatttatagtgatgataacactgctgcactccttttgcatatcaccttttwaaaagacatattgttctaggaaaatacagtttctgagaacagactgacagtaagactccaaaccttcctgaccaaacaccctcttccactcagtactggaggtaaggtggtgatgstggtgggggctgtaaygtactgtagctggtactgactttgtcacaccccatactgattacatgggttatgtccatctccttgcagtaacctagcatgctcctggggcattacaattgataagtaaataatttccttttctcttactgaacatcaggagcagtattttttgtcttttgtaatgtctgatgtgcagtttgcagatcgtccagagggactcaaaargaaaatgcactgttaaaattgcatagccttatatctaagttaagtaggaagaaatgcttcaggttgaatataaaagc

SEQ ID NO: 78290 - DNA, 600 bp, Chicken  19866894367754_8
tttagaatagaactagagccaaacatgtagtaggatgacggatgaattcttcctcgcaacaacagatctttctgaggtttatactgaagacttactattyatactgctaaaaggaattatttatagtgatgataacactgctgcactccttttgcatatcaccttttwaaaagacatattgttctaggaaaatacagtttctgagaacagactgacagtaagactccaaaccttcctgaccaaacaccctcttccactcagtactggaggtaaggtggtgatgstggtgggggctgtaaygtactgtagctggtactgactttgtcacaccccatactgattacatgggttatgtccatctccttgcagtaacctagcatgctcctggggcattacaattgataagtaaataatttccttttctcttactgaacatcaggagcagtattttttgtcttttgtaatgtctgatgtgcagtttgcagatcgtccagagggactcaaaargaaaatgcactgttaaaattgcatagccttatatctaagttaagtaggaagaaatgcttcaggttgaatataaaagctcagttcagttccctt

SEQ ID NO: 78291 - DNA, 600 bp, Chicken  19866894367754_9
cagactgacagtaagactccaaaccttcctgaccaaacaccctcttccactcagtactggaggtaaggtggtgatgstggtgggggctgtaaygtactgtagctggtactgactttgtcacaccccatactgattacatgggttatgtccatctccttgcagtaacctagcatgctcctggggcattacaattgataagtaaataatttccttttctcttactgaacatcaggagcagtattttttgtcttttgtaatgtctgatgtgcagtttgcagatcgtccagagggactcaaaargaaaatgcactgttaaaattgcatagccttatatctaagttaagtaggaagaaatgcttcaggttgaatataaaagctcagttcagttcccttgtgyttttgcactgtactggagacttaataattacttgataagtccatatttatgtgggattttattctgtgtaagctgctgagaaatagcatgaaataccacgttgactgaaaagggcaagttggaaagagcttctgtctttaaagacagagaaactggcacttgctttttataccttagtattggagaatctaattgctttaaag

SEQ ID NO: 78292 - DNA, 600 bp, Chicken  19866894367756_1
tgcctaaacataacgcagggcttctgcaagccttagtgatatatcaggagataaagagttgtgttccagagaaggatgcacatggtccactatgcgctttaccctgctgcgtttcaaggtatcattagatggaaagaagcaccaaatatacttcttagaggtgaaagcagttccaattcattgctttaaacagcatttgcatgtacttatttatacacaaagagctcaagtggacttgctctgggtgtgcttgggaatgctgaggaataacagaaaggagatggagcaggatccagtttyggacctgcaggcatttcagtgtctgtttatgagctaagcacaggagctcccataaccaagggagcctgaagagctcaccctgaaggagacacctacacgtgtctggctgtatggatattcatacgcaaccaactgtaatggtaactgcagacacctggcttacatgggacatccctgccttgagctgtctgcagtctggatccgaatcccatcctcagtatgcaaactatcacttacagacttaaggaaattgataggtacttagaaatgggaggtttcctttatgcctatttctcatct

SEQ ID NO: 78293 - DNA, 600 bp, Chicken  19866894367758_1
gcatgtgtggaaatgcatttcttctctgtcaaaagtggtgttaaattggtggttgttttatctgattgagtcaaagggatcctctcaggctacatgtgaacaaggttgtatgatatctagttggcaggattcaatggatttacaaagctgttttcacgaagaacactcagtaattgcttctgcactgggttgacagagtgataacacccttgtagtttaataaatagcagagtgggcaatccttaagtgtgtgagcatgaatcggagcacaaaatgccacttctgtcctgacctgcctgrggccacagcagagcacaaagacatccctcgctgtacagaccacgctgtttgctgccagccaggagaggactcagaaaaggtggtgctgtgcctggcagaggtttggcgtgacgtagtcaggcagccacggtactgccaaggccatgggctccaaagccacacatctcttctctactccacacctcagatctgcagactttggcttaatgttaataaggtttttaaacctagaatgtgggacactttctgtctggcttctgcatcagtaaagttcactcagtgactcacactctttacttc

SEQ ID NO: 78294 - DNA, 600 bp, Chicken  19866894367773_1
tcttagatatttagagacacttaaaaaggaagaaaaggaacatgctccagagctttcaagtagctttgtggaaaaggtagaatatattttattttgggagtgatgtatagcccagataagacttttcaccaagacccattatatctcaagttgaattcttaattgatttagctcctctgatctgtactttgccagacatgaaccactcacctttggactgagtccagggtgtaatggaaagttcgctgaaacctcatcagcttttgttaaacctgagtgaatttcagcccagcacatttyttgtgaataattaaacacagttaagcagctgatggatttgaacctctggctccagtgttcagctgtatttcacaaggaatgggctcatgaaattcatggggttttttatgggtcttcttttggcctcctgtgatggataactgcatctggcagcccagggtggatgtttttccatctcccactcattactagcatgagctgytccatgtggcactcctctctcatcagtttctgtttctcagtggtaaattctccagtatttatttctcctttttccctttttatgtaacattcagagtt

SEQ ID NO: 78295 - DNA, 600 bp, Chicken  19866894367773_2
ccactcacctttggactgagtccagggtgtaatggaaagttcgctgaaacctcatcagcttttgttaaacctgagtgaatttcagcccagcacatttyttgtgaataattaaacacagttaagcagctgatggatttgaacctctggctccagtgttcagctgtatttcacaaggaatgggctcatgaaattcatggggttttttatgggtcttcttttggcctcctgtgatggataactgcatctggcagcccagggtggatgtttttccatctcccactcattactagcatgagctgytccatgtggcactcctctctcatcagtttctgtttctcagtggtaaattctccagtatttatttctcctttttccctttttatgtaacattcagagttgttatcctttactttaatatcactttctatcagtacaactgctatagtcacagtgagggtgtagtgctatggcaacagtgtattagctgcgatcttgccaatgagtaagacacagcacagaaatcaggtgatttatcaaaatctgctgtggcagaactgagcaatgagctggtggcctgagctatcccaggacctgcccatc

SEQ ID NO: 78296 - DNA, 599 bp, Chicken  19866894367783_1
  misc_feature (1)..(41): n is any nucleotide
nnnnnnnnnnnnnnnnnnnnnnnnnnnnnnnnnnnnnnnnncccagacggatggggtactttggcagcttcctttccgcagctgcctgcaaggaccagtgcaggagcagggcgagcaggaagacaaaggaggagatctcaggcactgagggagcacagaagagagcctctcatccttgaggctttcctcagtggcacgaatagcattcttccttgctgacaatgcaaggcagagcaacagacaaaatgacgtgctatctgatacaaaaatcagactgataacagaacagctcttggtacrgcactcctttattctcatgatttacagagcacacaccattttcaggtgctagtttcatctcagactgcagagtggctctggcaaagctgtatcttcctgctcagtctcccattcacaactgtgatgaagatggccaggaattgcatcctttctccctcttccttagaagtattattcctacagctgctgaccaagttgatgtctttccaagcaggatctgagcggtgcagcagttctgctttccatttggaaattgccaatgcagtcacaaacacattctcagtaactgcctcagtagt

SEQ ID NO: 78297 - DNA, 600 bp, Chicken  19866894367785_1
taccaagattaaaggctgccattcttacaaaggaaagaaaacctgcaaatacaataggcatattaaacaagattttggcagaatttggctacctcagttgaaaactgcaactcctgttcagctgctgcctagccccagagttgcctcaacttgcctgctgcctcctggttgggatcttagcctccgcaggctgttatcctgctcccaagcatgtccagagttgctccagcccaaccatcacaactccatcccacacctgagcgtgccaggttctggcatcactacccagggctgccagcrctatcctcatccccagcccaggarccagcrtgcatraagcacagaagtgarcactgccatcccctagaaatgccttgtgctactgcagcccaagggagcacctgccccaagtcctgccctacacaactccccaacagccccccaaacacccagtttctacccagggagcaaggcacagatagccccaggcatggtgacagtgaaagggagcacagcctacactgyggcagagacacccggcrctyggcagctacaaagcctttctcagattgatgttgaagcattcagcagtagactgtg

SEQ ID NO: 78298 - DNA, 600 bp, Chicken  19866894367785_2
ttacaaaggaaagaaaacctgcaaatacaataggcatattaaacaagattttggcagaatttggctacctcagttgaaaactgcaactcctgttcagctgctgcctagccccagagttgcctcaacttgcctgctgcctcctggttgggatcttagcctccgcaggctgttatcctgctcccaagcatgtccagagttgctccagcccaaccatcacaactccatcccacacctgagcgtgccaggttctggcatcactacccagggctgccagcrctatcctcatccccagcccaggarccagcrtgcatraagcacagaagtgarcactgccatcccctagaaatgccttgtgctactgcagcccaagggagcacctgccccaagtcctgccctacacaactccccaacagccccccaaacacccagtttctacccagggagcaaggcacagatagccccaggcatggtgacagtgaaagggagcacagcctacactgyggcagagacacccggcrctyggcagctacaaagcctttctcagattgatgttgaagcattcagcagtagactgtgcagagtggtggagccttcagttat

SEQ ID NO: 78299 - DNA, 600 bp, Chicken  19866894367785_3
aggaaagaaaacctgcaaatacaataggcatattaaacaagattttggcagaatttggctacctcagttgaaaactgcaactcctgttcagctgctgcctagccccagagttgcctcaacttgcctgctgcctcctggttgggatcttagcctccgcaggctgttatcctgctcccaagcatgtccagagttgctccagcccaaccatcacaactccatcccacacctgagcgtgccaggttctggcatcactacccagggctgccagcrctatcctcatccccagcccaggarccagcrtgcatraagcacagaagtgarcactgccatcccctagaaatgccttgtgctactgcagcccaagggagcacctgccccaagtcctgccctacacaactccccaacagccccccaaacacccagtttctacccagggagcaaggcacagatagccccaggcatggtgacagtgaaagggagcacagcctacactgyggcagagacacccggcrctyggcagctacaaagcctttctcagattgatgttgaagcattcagcagtagactgtgcagagtggtggagccttcagttatcttcaa

SEQ ID NO: 78300 - DNA, 600 bp, Chicken  19866894367785_4
gaaaacctgcaaatacaataggcatattaaacaagattttggcagaatttggctacctcagttgaaaactgcaactcctgttcagctgctgcctagccccagagttgcctcaacttgcctgctgcctcctggttgggatcttagcctccgcaggctgttatcctgctcccaagcatgtccagagttgctccagcccaaccatcacaactccatcccacacctgagcgtgccaggttctggcatcactacccagggctgccagcrctatcctcatccccagcccaggarccagcrtgcatraagcacagaagtgarcactgccatcccctagaaatgccttgtgctactgcagcccaagggagcacctgccccaagtcctgccctacacaactccccaacagccccccaaacacccagtttctacccagggagcaaggcacagatagccccaggcatggtgacagtgaaagggagcacagcctacactgyggcagagacacccggcrctyggcagctacaaagcctttctcagattgatgttgaagcattcagcagtagactgtgcagagtggtggagccttcagttatcttcaagctatc

SEQ ID NO: 78301 - DNA, 600 bp, Chicken  19866894367785_5
caataggcatattaaacaagattttggcagaatttggctacctcagttgaaaactgcaactcctgttcagctgctgcctagccccagagttgcctcaacttgcctgctgcctcctggttgggatcttagcctccgcaggctgttatcctgctcccaagcatgtccagagttgctccagcccaaccatcacaactccatcccacacctgagcgtgccaggttctggcatcactacccagggctgccagcrctatcctcatccccagcccaggarccagcrtgcatraagcacagaagtgarcactgccatcccctagaaatgccttgtgctactgcagcccaagggagcacctgccccaagtcctgccctacacaactccccaacagccccccaaacacccagtttctacccagggagcaaggcacagatagccccaggcatggtgacagtgaaagggagcacagcctacactgyggcagagacacccggcrctyggcagctacaaagcctttctcagattgatgttgaagcattcagcagtagactgtgcagagtggtggagccttcagttatcttcaagctatccaaagctgcgatctg

SEQ ID NO: 78302 - DNA, 600 bp, Chicken  19866894367785_6
ccagcccaaccatcacaactccatcccacacctgagcgtgccaggttctggcatcactacccagggctgccagcrctatcctcatccccagcccaggarccagcrtgcatraagcacagaagtgarcactgccatcccctagaaatgccttgtgctactgcagcccaagggagcacctgccccaagtcctgccctacacaactccccaacagccccccaaacacccagtttctacccagggagcaaggcacagatagccccaggcatggtgacagtgaaagggagcacagcctacactgyggcagagacacccggcrctyggcagctacaaagcctttctcagattgatgttgaagcattcagcagtagactgtgcagagtggtggagccttcagttatcttcaagctatccaaagctgcgatctgcacagcaagagccgttttcctcctttgcaggtgctctgctgtatcatagtgtctaaaacaatgccaggtcttgtccagggcaacccaggctggggtcagctgcatcattttccactttttcctgtacaacctaggctggaagtagagttttctttcagaaatcctgcatccatt

SEQ ID NO: 78303 - DNA, 600 bp, Chicken  19866894367785_7
actccatcccacacctgagcgtgccaggttctggcatcactacccagggctgccagcrctatcctcatccccagcccaggarccagcrtgcatraagcacagaagtgarcactgccatcccctagaaatgccttgtgctactgcagcccaagggagcacctgccccaagtcctgccctacacaactccccaacagccccccaaacacccagtttctacccagggagcaaggcacagatagccccaggcatggtgacagtgaaagggagcacagcctacactgyggcagagacacccggcrctyggcagctacaaagcctttctcagattgatgttgaagcattcagcagtagactgtgcagagtggtggagccttcagttatcttcaagctatccaaagctgcgatctgcacagcaagagccgttttcctcctttgcaggtgctctgctgtatcatagtgtctaaaacaatgccaggtcttgtccagggcaacccaggctggggtcagctgcatcattttccactttttcctgtacaacctaggctggaagtagagttttctttcagaaatcctgcatccatttctcctcctgttgtggg

SEQ ID NO: 78304 - DNA, 600 bp, Chicken  19866894367785_8
ccatcccacacctgagcgtgccaggttctggcatcactacccagggctgccagcrctatcctcatccccagcccaggarccagcrtgcatraagcacagaagtgarcactgccatcccctagaaatgccttgtgctactgcagcccaagggagcacctgccccaagtcctgccctacacaactccccaacagccccccaaacacccagtttctacccagggagcaaggcacagatagccccaggcatggtgacagtgaaagggagcacagcctacactgyggcagagacacccggcrctyggcagctacaaagcctttctcagattgatgttgaagcattcagcagtagactgtgcagagtggtggagccttcagttatcttcaagctatccaaagctgcgatctgcacagcaagagccgttttcctcctttgcaggtgctctgctgtatcatagtgtctaaaacaatgccaggtcttgtccagggcaacccaggctggggtcagctgcatcattttccactttttcctgtacaacctaggctggaagtagagttttctttcagaaatcctgcatccatttctcctcctgttgtgggatt

SEQ ID NO: 78305 - DNA, 600 bp, Chicken  19866894367800_1
tcttaagagtggggctgcagtgttcaaaattcagtcactaagtccctgttcagtacctggaagaaacagcagatttttgccttgtgattttgtatcaaaaaagagctttctcatacactactcctctttaaggattactgtttccataacacaaaaggaaaaatcagactgaatgaagtatgcatccttagcaaaaggcagtgggattttgttaattgaccaaaactatggtgagttttcctcatctccctgctctctctcctttaacactcagacaattggataacttaaaaaaaaaayaaaaaaaaaacccaccacatttctgtgatccattctccacataagttgcttgagaatgttgtgcttttgagaacgcagtaatctttctggccagctcattctctatcttagcacactggcagcaaagtgggaggcaatttgccacctaatatctaccttcaaaagcctaaagcactcaactgatgcatcttctcctccccataatctgctttatctcactctgtagggctaacagctctggttaataaaagagctgtgccctgaaaaaaaataagccttttgttttgagtaacaaattgt

SEQ ID NO: 78306 - DNA, 600 bp, Chicken  19866894367806_1
agataaaaaaaaagaaagaccccaccccctgtgtaacaaataggagcatctcagagataatcataacgttgcagggagcagtcacacacaggaatgcgctcattcagaggaacctggaatcaaatgtgcatgagtccgattcctcttcccttctccccacaaacagcactcacttcaggcagcccatccacactgctcagacacggatggagcaaaacacagccagctccaacgttggtacctgcatctcactcagaccccaacaactccatacagcacgacagttctacagacagaggygaagaatacacacttgatccccagctagcttaaatcacatgggtcccttaagagcgctgttagtttaatactgatcttgatacttgaacatgaaggtacagggatacttcccatgatgcagagagagatgaggacttgaacctagctagtcatttcaagcatgttaaggtacatagaaatatggtcagatatttatgcaccaattcattttttcatatgaaaataaaataatgtctggcatgggatgcttataaagatgaggttgttgttgaatttygttcttaatactttggagatgat

SEQ ID NO: 78307 - DNA, 600 bp, Chicken  19866894367806_2
acgacagttctacagacagaggygaagaatacacacttgatccccagctagcttaaatcacatgggtcccttaagagcgctgttagtttaatactgatcttgatacttgaacatgaaggtacagggatacttcccatgatgcagagagagatgaggacttgaacctagctagtcatttcaagcatgttaaggtacatagaaatatggtcagatatttatgcaccaattcattttttcatatgaaaataaaataatgtctggcatgggatgcttataaagatgaggttgttgttgaatttygttcttaatactttggagatgattatcaaagtatttcctgctcagagaggccagaaaatcagcagggagcagcaccaacccacacaggtatgcagccattaaaagccgtgctctgcttatacctatttcaccttmataggaacctgggtacagcagatttgaaagaacagtgaaaattttctacaccacagtaacaaaaggaacaacaagataaaagcaacccagcaccaatgagcttttcactctgccaaacataactggagttttctgtttgcttcttcacacaggtgcatcactgat

SEQ ID NO: 78308 - DNA, 600 bp, Chicken  19866894367806_3
atgatgcagagagagatgaggacttgaacctagctagtcatttcaagcatgttaaggtacatagaaatatggtcagatatttatgcaccaattcattttttcatatgaaaataaaataatgtctggcatgggatgcttataaagatgaggttgttgttgaatttygttcttaatactttggagatgattatcaaagtatttcctgctcagagaggccagaaaatcagcagggagcagcaccaacccacacaggtatgcagccattaaaagccgtgctctgcttatacctatttcaccttmataggaacctgggtacagcagatttgaaagaacagtgaaaattttctacaccacagtaacaaaaggaacaacaagataaaagcaacccagcaccaatgagcttttcactctgccaaacataactggagttttctgtttgcttcttcacacaggtgcatcactgattacatttattaaccccagtgaatgaaatatttctgctgttgctattttaattaatcatctgccttccagctctgcccgaggtactcaggtacctcaagctagcagaggtgaggcccagtaatgtcctaaccatat

SEQ ID NO: 78309 - DNA, 600 bp, Chicken  19866894367818_1
tgaaataaatcctctgccctgatgtaagaggagagagggaaaagtcccaactggcccatatgtgaaacagtaaatgggtccgccatgacccacatggaaaagtaaataaaacctgctgaattggattgagctcaggaatgtggctcctttattttgatcctggggattagctcccagtcttaccatagcagggagtctgatcttgctctcattgaaatccaaaatctaaatccacattaacaccatagaaacaggatcaaaccttgccatctaaagtaaaagcaatccaggagcttaatsagcaagttctgtgtgtagtgttgcgcacatacatgtgctgagagagttgcaggttcagagaagagtacttgttccacccaggagccggaaaaagatgaccccatcctccctcaggaatctgcacagtgcaagcagtgttaggatagagagacagtgtctcactcatstggttcttaggttttaaggtgggctttatgactctgaagtcagattttatagtccagtgtttctgtacattccagatgatttgaggcaaggtcagcccttaacttttgaagatatgtaagaaacaaacaaaca

SEQ ID NO: 78310 - DNA, 600 bp, Chicken  19866894367818_2
tagctcccagtcttaccatagcagggagtctgatcttgctctcattgaaatccaaaatctaaatccacattaacaccatagaaacaggatcaaaccttgccatctaaagtaaaagcaatccaggagcttaatsagcaagttctgtgtgtagtgttgcgcacatacatgtgctgagagagttgcaggttcagagaagagtacttgttccacccaggagccggaaaaagatgaccccatcctccctcaggaatctgcacagtgcaagcagtgttaggatagagagacagtgtctcactcatstggttcttaggttttaaggtgggctttatgactctgaagtcagattttatagtccagtgtttctgtacattccagatgatttgaggcaaggtcagcccttaacttttgaagatatgtaagaaacaaacaaacaaaaaagataatttggaattctgagtacagatttcagtggcagcagtttcctattaagtcttcataagagtttgctacttttaacaatgcagatcctactaatttaatgggaaatacacagctctagagccatttctaaataagtttgcacacatcctcgtgaccctt

SEQ ID NO: 78311 - DNA, 600 bp, Chicken  19866894367819_1
ttatcacccactgtaatgtatttaacttcccattcatgagtcactctcagactttactgcttttcagctaaacaaacaacaaatataccaaatttctagccacaaataaagaagaaactttgaacagaacactttatcaatgaaacatgttacacacaactatattgatgtcagtcatattttcactgaagcagaaaggagtaagagcaggccaatatttgatgatcattttactaaggctttgaacatcacctgaacccaacagatggcatcaactgtagcatctttactaattggccrtgatacaacttccttcataagatgtgtatactaatatattaaaacattttaaaggtgagaagagtgtatagagtatatgtgaaagtaatatctatctgcttattaaaaatctttcttctgatctttaaagctagaagttaaacagctgtgtaatgctcacttatcctacagaattagtattattacaaatgattaacattttattgaagctgaagctatgaagatgcaaaccacattaaactgagaattaagctgaggaatacttatatattaaaaagttagtatatggactttgaagtc

SEQ ID NO: 78312 - DNA, 600 bp, Chicken  19866894367822_1
tttcaagactctgcaggcattactcatatgatcttttctgtaactcagagtttgagacaaagcttggaggagagagaaggcattaaattaacaggtcgagctggaagagccaagtgttcaagcagggaggtcctttctcaggtctgtggaaaggctgcagtaatgctgttggtgcggtgtactgctttttctgggtgtgaacaaatgcgtgatgaaataagatgggaaagctaacaggtttctgtagaccaagccagagagtgagttcaagcacaggaatatgttgcttgcctctcttcrtcctttaaacagaaagaaaaagccatmttttcatccttaaatttccctcctttcagcatctacagggggctatgagaaagaaggrggcagattctttaggagggwmtkttgtgtcaggacaaggggaaatggtttcaaactaaaagaggggagatttagactggatgtaaggaagacactggcacaggttgcatggagaggtggtggatgccccatccttggaaacactcaaggtcagtctggatggggctctgagcacctaatgtagcrtaggtgcccctgttcgttgcaggggagttg

SEQ ID NO: 78313 - DNA, 600 bp, Chicken  19866894367822_2
atgatcttttctgtaactcagagtttgagacaaagcttggaggagagagaaggcattaaattaacaggtcgagctggaagagccaagtgttcaagcagggaggtcctttctcaggtctgtggaaaggctgcagtaatgctgttggtgcggtgtactgctttttctgggtgtgaacaaatgcgtgatgaaataagatgggaaagctaacaggtttctgtagaccaagccagagagtgagttcaagcacaggaatatgttgcttgcctctcttcrtcctttaaacagaaagaaaaagccatmttttcatccttaaatttccctcctttcagcatctacagggggctatgagaaagaaggrggcagattctttaggagggwmtkttgtgtcaggacaaggggaaatggtttcaaactaaaagaggggagatttagactggatgtaaggaagacactggcacaggttgcatggagaggtggtggatgccccatccttggaaacactcaaggtcagtctggatggggctctgagcacctaatgtagcrtaggtgcccctgttcgttgcaggggagttggacccgatgacctttaagggtcttttc

SEQ ID NO: 78314 - DNA, 600 bp, Chicken  19866894367822_3
aattaacaggtcgagctggaagagccaagtgttcaagcagggaggtcctttctcaggtctgtggaaaggctgcagtaatgctgttggtgcggtgtactgctttttctgggtgtgaacaaatgcgtgatgaaataagatgggaaagctaacaggtttctgtagaccaagccagagagtgagttcaagcacaggaatatgttgcttgcctctcttcrtcctttaaacagaaagaaaaagccatmttttcatccttaaatttccctcctttcagcatctacagggggctatgagaaagaaggrggcagattctttaggagggwmtkttgtgtcaggacaaggggaaatggtttcaaactaaaagaggggagatttagactggatgtaaggaagacactggcacaggttgcatggagaggtggtggatgccccatccttggaaacactcaaggtcagtctggatggggctctgagcacctaatgtagcrtaggtgcccctgttcgttgcaggggagttggacccgatgacctttaagggtcttttccaaatcaaatgattctattttatatatacatatatatttttgcttccacagatgagct

SEQ ID NO: 78315 - DNA, 600 bp, Chicken  19866894367822_4
agagccaagtgttcaagcagggaggtcctttctcaggtctgtggaaaggctgcagtaatgctgttggtgcggtgtactgctttttctgggtgtgaacaaatgcgtgatgaaataagatgggaaagctaacaggtttctgtagaccaagccagagagtgagttcaagcacaggaatatgttgcttgcctctcttcrtcctttaaacagaaagaaaaagccatmttttcatccttaaatttccctcctttcagcatctacagggggctatgagaaagaaggrggcagattctttaggagggwmtkttgtgtcaggacaaggggaaatggtttcaaactaaaagaggggagatttagactggatgtaaggaagacactggcacaggttgcatggagaggtggtggatgccccatccttggaaacactcaaggtcagtctggatggggctctgagcacctaatgtagcrtaggtgcccctgttcgttgcaggggagttggacccgatgacctttaagggtcttttccaaatcaaatgattctattttatatatacatatatatttttgcttccacagatgagctcttccactgtttttttggaa

SEQ ID NO: 78316 - DNA, 600 bp, Chicken  19866894367822_5
gagccaagtgttcaagcagggaggtcctttctcaggtctgtggaaaggctgcagtaatgctgttggtgcggtgtactgctttttctgggtgtgaacaaatgcgtgatgaaataagatgggaaagctaacaggtttctgtagaccaagccagagagtgagttcaagcacaggaatatgttgcttgcctctcttcrtcctttaaacagaaagaaaaagccatmttttcatccttaaatttccctcctttcagcatctacagggggctatgagaaagaaggrggcagattctttaggagggwmtkttgtgtcaggacaaggggaaatggtttcaaactaaaagaggggagatttagactggatgtaaggaagacactggcacaggttgcatggagaggtggtggatgccccatccttggaaacactcaaggtcagtctggatggggctctgagcacctaatgtagcrtaggtgcccctgttcgttgcaggggagttggacccgatgacctttaagggtcttttccaaatcaaatgattctattttatatatacatatatatttttgcttccacagatgagctcttccactgtttttttggaac

SEQ ID NO: 78317 - DNA, 600 bp, Chicken  19866894367822_6
gccaagtgttcaagcagggaggtcctttctcaggtctgtggaaaggctgcagtaatgctgttggtgcggtgtactgctttttctgggtgtgaacaaatgcgtgatgaaataagatgggaaagctaacaggtttctgtagaccaagccagagagtgagttcaagcacaggaatatgttgcttgcctctcttcrtcctttaaacagaaagaaaaagccatmttttcatccttaaatttccctcctttcagcatctacagggggctatgagaaagaaggrggcagattctttaggagggwmtkttgtgtcaggacaaggggaaatggtttcaaactaaaagaggggagatttagactggatgtaaggaagacactggcacaggttgcatggagaggtggtggatgccccatccttggaaacactcaaggtcagtctggatggggctctgagcacctaatgtagcrtaggtgcccctgttcgttgcaggggagttggacccgatgacctttaagggtcttttccaaatcaaatgattctattttatatatacatatatatttttgcttccacagatgagctcttccactgtttttttggaacct

SEQ ID NO: 78318 - DNA, 600 bp, Chicken  19866894367822_7
gcacaggaatatgttgcttgcctctcttcrtcctttaaacagaaagaaaaagccatmttttcatccttaaatttccctcctttcagcatctacagggggctatgagaaagaaggrggcagattctttaggagggwmtkttgtgtcaggacaaggggaaatggtttcaaactaaaagaggggagatttagactggatgtaaggaagacactggcacaggttgcatggagaggtggtggatgccccatccttggaaacactcaaggtcagtctggatggggctctgagcacctaatgtagcrtaggtgcccctgttcgttgcaggggagttggacccgatgacctttaagggtcttttccaaatcaaatgattctattttatatatacatatatatttttgcttccacagatgagctcttccactgtttttttggaaccttaccaggggatgcttttcctcctgcttggatttatctcctyagctgtaatttctttcactgggtctgctgctgacagtggcatttgcaggtgatgcttccaagctgaatgcaaccgggctgaaggctgtcttgttcatgacatgtaaaaatgaaaaaagcaa

SEQ ID NO: 78319 - DNA, 600 bp, Chicken  19866894367822_8
ggagatttagactggatgtaaggaagacactggcacaggttgcatggagaggtggtggatgccccatccttggaaacactcaaggtcagtctggatggggctctgagcacctaatgtagcrtaggtgcccctgttcgttgcaggggagttggacccgatgacctttaagggtcttttccaaatcaaatgattctattttatatatacatatatatttttgcttccacagatgagctcttccactgtttttttggaaccttaccaggggatgcttttcctcctgcttggatttatctcctyagctgtaatttctttcactgggtctgctgctgacagtggcatttgcaggtgatgcttccaagctgaatgcaaccgggctgaaggctgtcttgttcatgacatgtaaaaatgaaaaaagcaattaaatttcttgctggactggaaagttgctcactgcgaagcaatgcctttttgataatttctgctttttagggtaaatacagtgcagaactaggaatgtaaactcactcagagcatttgttctttttcatgcattattctgtgtggaaatgaatcatacagtcataccagaaagcttaa

SEQ ID NO: 78320 - DNA, 600 bp, Chicken  19866894367823_1
cccatttccacggcactgctcccataaatatcagggctcattttggcctgtgtcacgattagtaagaaatcatttagttatacagcgtttataagaaaagactactggagtagtctttcaaaatggactagttagggaatgtggattttggtctctgaagtggatggtggttttctggacacagtcttggtgctcacgaagaggtggtcatcatttacctttcacaatgctagacctcctgtctatggcagtcaaaagccagctgcctcctggtgagtcacagcaaagcacagagactamatatcactttgccaaacgtatttgattattgcaaagtgcatttccccaaatgcctttgtttcctgtagcaagtaataggaaaaagtgagacttatcaggtaaaaatgttttcttttccacacggggatttcttgaacacctgcatctgcagcttattgagtaaaatgagcataaatcagaaaaaaatgtatggatttacttttctcattaatcggaggaataaattgtattaagacgttgatgttttcctggaagagaaaacaaacgattctgtgaaagacatataaagcaaaaaatctg

SEQ ID NO: 78321 - DNA, 600 bp, Chicken  19866894367829_1
aggataaagcacagccctgctgaaaaaagacctggggatactggtgggtactaagctagacaggaaccagcaatgtgccctcgcagcctagaaagctaactctatcctgggctgcatcaaaagaagcatggccatcacggagaagagggagatcctgcccctctactctgtgctggtgagacctcacctggagtactgcgtccagatgtggagtcctcagtacaggagagacatggacctgtcagagtgcatccagaggaggaccacaaaaatgatccaaaggatggaacacctctcctrtgtggacaggctgagaattggggctgttcagcctggagaaggttccggggagagctgagagtggaytttaagtatctaaaggggtctatgagaaagaaggggtcagcctctttagcaggctctgttataatgggaaaaagggaaacagtttcaaacgaacagaggggagatttagatgagatatacaaaaaagagatcatccttgacatcacaggctgctccatcctcccagactgggatggatgagccctgctctcctgcctgcccatctctgctttgccttacaactgcctttgccct

SEQ ID NO: 78322 - DNA, 600 bp, Chicken  19866894367829_2
ccagcaatgtgccctcgcagcctagaaagctaactctatcctgggctgcatcaaaagaagcatggccatcacggagaagagggagatcctgcccctctactctgtgctggtgagacctcacctggagtactgcgtccagatgtggagtcctcagtacaggagagacatggacctgtcagagtgcatccagaggaggaccacaaaaatgatccaaaggatggaacacctctcctrtgtggacaggctgagaattggggctgttcagcctggagaaggttccggggagagctgagagtggaytttaagtatctaaaggggtctatgagaaagaaggggtcagcctctttagcaggctctgttataatgggaaaaagggaaacagtttcaaacgaacagaggggagatttagatgagatatacaaaaaagagatcatccttgacatcacaggctgctccatcctcccagactgggatggatgagccctgctctcctgcctgcccatctctgctttgccttacaactgcctttgccctacgtcacctctgcaagttggtccaggctttaggattccgctacgatcatactgagattgttgcaga

SEQ ID NO: 78323 - DNA, 600 bp, Chicken  19866894367829_3
gaaaaagggaaacagtttcaaacgaacagaggggagatttagatgagatatacaaaaaagagatcatccttgacatcacaggctgctccatcctcccagactgggatggatgagccctgctctcctgcctgcccatctctgctttgccttacaactgcctttgccctacgtcacctctgcaagttggtccaggctttaggattccgctacgatcatactgagattgttgcagaaaatgactctcccgtccttcctgctgctgcattcgggctggcagagagcctcctgcagacggctccygcagagctgccggtgctgtgcccaggaagttttttgtccccgtcaggaaatccatcatatggcctccggctgggtccccctcaataaagcactcggtgatgtcccagcccgatgggaactcataaacgtggtacttgatgccgagcttcctcagcactgctgtgatgctgtcggaggtgatgtagtggccactgtcggttgaaggcaagcaatgcctgtacttcttccataagctggcccaaccgctgctgtctgtagaggggaggaaggtcaggcacatctcaaagcatacacctgaaa

SEQ ID NO: 78324 - DNA, 600 bp, Chicken  19866894367830_1
ttgtcttgtgcttttttgttgttttttttcctccctgtaatctctgttgtttttttttcctcctctttctttccctcctgtatttcctctcaattcctctatcatttctggactgttttctctctgccttccctcccactatctcttctgatgggagatttctccctgtccctgacaagtcaagtcacactccccaaccagtcacacttcccaaccagtcagataaacagagttggtttccttgtcattacaaagaagagaagctagaatcttggtatttataaacatttgttttatatyatattcacaattcagatcattttagataatttggttttctgcttctctccatctgtatatcaaatctccataatgggtttcccacttgcaatgctgctattttttaggcaaatcagaagaaaaaatgtgaagtggtaaaatgatttcaaggtgaacccacagattactgggcaaccccaaaccagggcaatcctgatagcacagaactggtcagtccccatggatctaaactatgagtctacaaggcatggttttgtgccacccttgctcgctgactaactgatcctctgcattcaatgg

SEQ ID NO: 78325 - DNA, 599 bp, Chicken  19866894367834_1
  misc_feature (1)..(61): n is any nucleotide
nnnnnnnnnnnnnnnnnnnnnnnnnnnnnnnnnnnnnnnnnnnnnnnnnnnnnnnnnnnnngcaatttttctgctttttcctcccctctcctcacctctcccttttcctctcctctcccctcctttgccttctttccttttcattccctctttttcatatcaatatttaggagatttgggtgttcggtctgtcttcctaacagtgctgtggaggcagccttgtgcaatgggagcaaggcagctgtgccagcaaggactccagtattctgggacagggattgacccttggctccaaatgtrgcagaaccaagaggtacacaagcatcagtcgtgctgctytcaggagcagctaacagatcctgtgctcaccagggtttttccagctatggtgctgtactcagaataaggcacccataagattttacggcctctcacctacatggcawcaaaggtgcctccaaaaacacatcccagctcttgctttcatacagtcagagcacctcaggggagagtcacttccactctcccctcaaccactacacagccgcctgacacagcacagcagaaagcaagggtaaaaggagctggcccaattagca

SEQ ID NO: 78326 - DNA, 599 bp, Chicken  19866894367834_2
  misc_feature (1)..(22): n is any nucleotide
nnnnnnnnnnnnnnnnnnnnnngcaatttttctgctttttcctcccctctcctcacctctcccttttcctctcctctcccctcctttgccttctttccttttcattccctctttttcatatcaatatttaggagatttgggtgttcggtctgtcttcctaacagtgctgtggaggcagccttgtgcaatgggagcaaggcagctgtgccagcaaggactccagtattctgggacagggattgacccttggctccaaatgtrgcagaaccaagaggtacacaagcatcagtcgtgctgctytcaggagcagctaacagatcctgtgctcaccagggtttttccagctatggtgctgtactcagaataaggcacccataagattttacggcctctcacctacatggcawcaaaggtgcctccaaaaacacatcccagctcttgctttcatacagtcagagcacctcaggggagagtcacttccactctcccctcaaccactacacagccgcctgacacagcacagcagaaagcaagggtaaaaggagctggcccaattagcacagcaccctgggccaggcacttcagctgggcctgccggg

SEQ ID NO: 78327 - DNA, 600 bp, Chicken  19866894367834_3
cctctttttcatatcaatatttaggagatttgggtgttcggtctgtcttcctaacagtgctgtggaggcagccttgtgcaatgggagcaaggcagctgtgccagcaaggactccagtattctgggacagggattgacccttggctccaaatgtrgcagaaccaagaggtacacaagcatcagtcgtgctgctytcaggagcagctaacagatcctgtgctcaccagggtttttccagctatggtgctgtactcagaataaggcacccataagattttacggcctctcacctacatggcawcaaaggtgcctccaaaaacacatcccagctcttgctttcatacagtcagagcacctcaggggagagtcacttccactctcccctcaaccactacacagccgcctgacacagcacagcagaaagcaagggtaaaaggagctggcccaattagcacagcaccctgggccaggcacttcagctgggcctgccgggcctcctgctgggccagctgtgatgtgygagcagcgagtgccaggcagaggagccaggacctggccacattcgaaacccttgcctgagatttccctgcttcctttttct

SEQ ID NO: 78328 - DNA, 600 bp, Chicken  19866894367834_4
tcaccagggtttttccagctatggtgctgtactcagaataaggcacccataagattttacggcctctcacctacatggcawcaaaggtgcctccaaaaacacatcccagctcttgctttcatacagtcagagcacctcaggggagagtcacttccactctcccctcaaccactacacagccgcctgacacagcacagcagaaagcaagggtaaaaggagctggcccaattagcacagcaccctgggccaggcacttcagctgggcctgccgggcctcctgctgggccagctgtgatgtgygagcagcgagtgccaggcagaggagccaggacctggccacattcgaaacccttgcctgagatttccctgcttcctttttctctttctcccytttcactacgtgaaacacacagagggctgtatgtgcaaacactgacagatggtgacacccggctccggccctggcagattagaaagagaacccgatgttcaagggaccaattaccactctgtcccctcagggaagagcatatcagatgtttactgggggttaataataaatgaattgaaaaaaaaattgctcttcgaacaccatattct

SEQ ID NO: 78329 - DNA, 579 bp, Chicken  19866894367834_5
tccaaaaacacatcccagctcttgctttcatacagtcagagcacctcaggggagagtcacttccactctcccctcaaccactacacagccgcctgacacagcacagcagaaagcaagggtaaaaggagctggcccaattagcacagcaccctgggccaggcacttcagctgggcctgccgggcctcctgctgggccagctgtgatgtgygagcagcgagtgccaggcagaggagccaggacctggccacattcgaaacccttgcctgagatttccctgcttcctttttctctttctcccytttcactacgtgaaacacacagagggctgtatgtgcaaacactgacagatggtgacacccggctccggccctggcagattagaaagagaacccgatgttcaagggaccaattaccactctgtcccctcagggaagagcatatcagatgtttactgggggttaataataaatgaattgaaaaaaaaattgctcttcgaacaccatattctgtgtattcatgtcagcaggttgtaattagctaattaaatgcttggacgacagaacggccccagtgggggt

SEQ ID NO: 78330 - DNA, 480 bp, Chicken  19866894367844_1
tttgtttgcttgtttttttattctccactgggaatcaaatgacatgaacattgtaacatactccttcctatatactcttctcactactaaaaacaaacatctagtccagagaaactgtatatcatcacattaatatagaaagtcaatgaaagttcaggaagtccacaagggactttattcttcccattaactgtatttactctaatcatactctaaaatttcacaggtaaattgtgtcacattatcaaaaagggagttatctgtgtaactattttatttctgacaattaaaaaaaaaaawtcagaagtgaacacagttcattaacgcaaccttttgtaatccttacaaaatgagaagaaaaaagcagaaaaatccatgaagtcaggaaatgttcagtacaaagcagtggtggaaagctagcacaaagtgcagttctaccatgcccagcacaactgtgatgtatcaaaaagaatcccacaa

SEQ ID NO: 78331 - DNA, 600 bp, Chicken  19866894367845_1
ctgcagtggcctagaattttcttcaaaagattataccctattactctatccatctatagagctctggaatttatagtgctattttgctgggtttttttatttttaccagatgttatcctaaaaccatttcaaaagcagtgataatatatacagcaactacaatgcaaatgaatttcagtgatgtagatcccttacatagttctctctctcttggatactgctttcaaagtcgtgtggcattgaaaaggagcacaaggcttccatatatatcttcagatttatttgtatgtatcgttgatstgcttttagatattcctgcaagcaagctgctttggcaaattgttgagcaggcaagtcgttttttgtttaaaaataaaaattaaaaagaaaagctatgaaaaaaaaaagagagagaaaaaacaccttaagcccctttcagaatggaaggaaattgcaaatcaaatagcaaaagagaaccacaagttattttaaagcaatatttacacttctggaaattaagaagtatgaaattttacttgtaaatcataccacagtgagatgaaaaagtgaatcaactaaggaaggaaaggagcaaatgaa

SEQ ID NO: 78332 - DNA, 600 bp, Chicken  19866894367845_2
ttttaaagcaatatttacacttctggaaattaagaagtatgaaattttacttgtaaatcataccacagtgagatgaaaaagtgaatcaactaaggaaggaaaggagcaaatgaatgaaggggtaaataaataaacagtagaccactggagcagatgaaaccataatgctttctttatttgctttcaatttgagcatcggcatttattcatttcacaaactagacataaaaggagcagctttgtcaaccagacttgaatctctaaaattgctgaaatgcttaggaaggaaatatccattgragtctctgtggacacacagttacttttgaaaaattaactttacatgtgtttctatatttcattgctatatttcatgcaatgtattatgycctcatagctcccagraatattactggggacatctacatattagtgctgaagagcactgattctctgtctttacggaaatggaactccagttttagaggaaaggggaaggtgatccttttgtcaaggtatacatccacagagagattttcaaaggcattagagggatttaggattacaaatcctattgactttgaatggaacttatgctcc

SEQ ID NO: 78333 - DNA, 600 bp, Chicken  19866894367845_3
ctaaggaaggaaaggagcaaatgaatgaaggggtaaataaataaacagtagaccactggagcagatgaaaccataatgctttctttatttgctttcaatttgagcatcggcatttattcatttcacaaactagacataaaaggagcagctttgtcaaccagacttgaatctctaaaattgctgaaatgcttaggaaggaaatatccattgragtctctgtggacacacagttacttttgaaaaattaactttacatgtgtttctatatttcattgctatatttcatgcaatgtattatgycctcatagctcccagraatattactggggacatctacatattagtgctgaagagcactgattctctgtctttacggaaatggaactccagttttagaggaaaggggaaggtgatccttttgtcaaggtatacatccacagagagattttcaaaggcattagagggatttaggattacaaatcctattgactttgaatggaacttatgctcccaccactttcagagttcttatgaccttctttattcccaagaggtaaaaaacaaagaggtaaatcctggcaaaatattgcaatgagattt

SEQ ID NO: 78334 - DNA, 600 bp, Chicken  19866894367845_4
gcaaatgaatgaaggggtaaataaataaacagtagaccactggagcagatgaaaccataatgctttctttatttgctttcaatttgagcatcggcatttattcatttcacaaactagacataaaaggagcagctttgtcaaccagacttgaatctctaaaattgctgaaatgcttaggaaggaaatatccattgragtctctgtggacacacagttacttttgaaaaattaactttacatgtgtttctatatttcattgctatatttcatgcaatgtattatgycctcatagctcccagraatattactggggacatctacatattagtgctgaagagcactgattctctgtctttacggaaatggaactccagttttagaggaaaggggaaggtgatccttttgtcaaggtatacatccacagagagattttcaaaggcattagagggatttaggattacaaatcctattgactttgaatggaacttatgctcccaccactttcagagttcttatgaccttctttattcccaagaggtaaaaaacaaagaggtaaatcctggcaaaatattgcaatgagattttgaactgacatgctct

SEQ ID NO: 78335 - DNA, 600 bp, Chicken  19866894367850_1
actcattcagagaaacaagatctggacaacataggcggaatatgacattcattctagcctaccttgtcaatttctaacttaagtattagaccataccataaagcatagggagtataactactctgaacttgtctactctctgagtatgtaagaaaccatgttcatttcttctgaaattaggtgggctttttatttaaaactccatggtgatttgatcaaggtgatttaacttcctaaacatctctcagcattttggctgatttgaatacattctcagatacctacctcccttataacatsttgtttcagattgagttatagatcccatggtttaaaatttgcaaaaggacaaaaatagcaggaatgttccctgtttcctagaagttgaagactataaaacacctgaactgtttatctttctaattcacatttcatacaactgctcagactaacaggaattgcatgtacttatttaaaggagaatgccataaatatggaaacaaataataatacttctaattataaaacttaatattctgaaagtatacaaagctgattttgttgtttgcaggacagacccagagataaaaattcactctc

SEQ ID NO: 78336 - DNA, 600 bp, Chicken  19866894367852_1
ggacctgatccagtgactcaacatacaggagctgagacagctacaccagaaaccaggtgttttcaagagatgtaatggtaaaacacgattctgaaacagtaaatttatcagtctttggctatcagcatgaattaatgctacttactggtcttagggtgacacaggaagaatgaagaatcctttcaattgtcccagaagcgagcaaatggagagcagtaacatccgtggagactttgaactagcacctatgtaacagaatggaaagttgcattcctattaccgcttaacacctgtacataygtgaactccgccatttgatactagccaattttaggtctgatctctgtccaggataaaggtgactcccaacagacctatgagaggagggtacaggtgtactgctgcccaccccgcaggtagctcagcagggagggtgctcactgagttgctgaacccaacaggggaggaagggggatcaactgtgctaactggaagttaggaacaagctacatcacaacaaccacgccccgtatctgctccagtgcccacataaaggcagaatttacgctgtcacccttcccttgatcaaagggcttgttc

SEQ ID NO: 78337 - DNA, 599 bp, Chicken  19866894367857_1
  misc_feature (1)..(166): n is any nucleotide
nnnnnnnnnnnnnnnnnnnnnnnnnnnnnnnnnnnnnnnnnnnnnnnnnnnnnnnnnnnnnnnnnnnnnnnnnnnnnnnnnnnnnnnnnnnnnnnnnnnnnnnnnnnnnnnnnnnnnnnnnnnnnnnnnnnnnnnnnnnnnnnnnnnnnnnnnnnnnnnnnnnnnnccccccgcccggccccccagcgccacgggggcacaggccggggagctgtggggcagcagtggggcccaggggccggccggggcccccaccatgccccacggagcccaggagctcagcattcggcttcggacackgcgaagagggcactgtcctgcttgcccacctcggccacggcggcggccagctgcgagaggttgccgttggggaagtgtcgggcctcccacaggttgaggatcatggccgtggggctgggcttggaggcgtagaagctgacatggctgtggggcagaggggtggcattggggtgcgggratggggatggccccgycgtcggcaccgccccattctcgtgggtatcggagcgcaggatgagggcagacgtcccctccccatctctgaacccatcccacctgtcaaggttgagtttctgggc

SEQ ID NO: 78338 - DNA, 600 bp, Chicken  19866894367857_2
ccccccagcgccacgggggcacaggccggggagctgtggggcagcagtggggcccaggggccggccggggcccccaccatgccccacggagcccaggagctcagcattcggcttcggacackgcgaagagggcactgtcctgcttgcccacctcggccacggcggcggccagctgcgagaggttgccgttggggaagtgtcgggcctcccacaggttgaggatcatggccgtggggctgggcttggaggcgtagaagctgacatggctgtggggcagaggggtggcattggggtgcgggratggggatggccccgycgtcggcaccgccccattctcgtgggtatcggagcgcaggatgagggcagacgtcccctccccatctctgaacccatcccacctgtcaaggttgagtttctgggccagcgtcctccagtcggccccgcgggcgcacggcgtgtccaggctgctgatgatcttctggcggatgaggaaggggatcttgaaggcactgggacccaccagggccggggagcccacctcgctgtcagggaccagccagtccgaaaacctcgtgtcctataagggaagtgccatagggt

SEQ ID NO: 78339 - DNA, 600 bp, Chicken  19866894367857_3
gggcacaggccggggagctgtggggcagcagtggggcccaggggccggccggggcccccaccatgccccacggagcccaggagctcagcattcggcttcggacackgcgaagagggcactgtcctgcttgcccacctcggccacggcggcggccagctgcgagaggttgccgttggggaagtgtcgggcctcccacaggttgaggatcatggccgtggggctgggcttggaggcgtagaagctgacatggctgtggggcagaggggtggcattggggtgcgggratggggatggccccgycgtcggcaccgccccattctcgtgggtatcggagcgcaggatgagggcagacgtcccctccccatctctgaacccatcccacctgtcaaggttgagtttctgggccagcgtcctccagtcggccccgcgggcgcacggcgtgtccaggctgctgatgatcttctggcggatgaggaaggggatcttgaaggcactgggacccaccagggccggggagcccacctcgctgtcagggaccagccagtccgaaaacctcgtgtcctataagggaagtgccatagggtgagcgcagcccagggg

SEQ ID NO: 78340 - DNA, 600 bp, Chicken  19866894367862_1
tgagcatgaatatgtatcttctgaatggtgaaactaacaaatgagttactacaagctgactcactaccttatatgcaaccagttatttactttagtggatctactaatttctgccacttgaaagtttagcttggtgtgcaacttcatttttaatcacagccgccaatcaacagaaaagcttcatcttccatccttgttttgaaaatgcactccaaacccttgctttgatcatgccatatttcagtgcttaattctgctttttaatctttcagaactttcttgtaaagggaaaataatcargagaatttctagtttacattttccgttgagcgcttctggaagaaagaataatgaccttcctttatattaaaaaaaaaatctttttttactaaaaggtctattccaatgtcatcaagaaacatgcatgaatacgctttgattctgagtwtctacatagccccattgacgcaaagcttaatatgaccatgatctagagcccgttgttctttcctgcaattatctcccattctctgcccttgttgaataatgtaggattacccccataatcagtctgctgcacctactgtcctgtttcaaagt

SEQ ID NO: 78341 - DNA, 600 bp, Chicken  19866894367862_2
tttaatcacagccgccaatcaacagaaaagcttcatcttccatccttgttttgaaaatgcactccaaacccttgctttgatcatgccatatttcagtgcttaattctgctttttaatctttcagaactttcttgtaaagggaaaataatcargagaatttctagtttacattttccgttgagcgcttctggaagaaagaataatgaccttcctttatattaaaaaaaaaatctttttttactaaaaggtctattccaatgtcatcaagaaacatgcatgaatacgctttgattctgagtwtctacatagccccattgacgcaaagcttaatatgaccatgatctagagcccgttgttctttcctgcaattatctcccattctctgcccttgttgaataatgtaggattacccccataatcagtctgctgcacctactgtcctgtttcaaagttcttgagagagagctaaacgctttccttcttagtgatgtcaggggtgagtaaggcagctttgtagtaaacgtgcttccaactagcctgaaaarttgaactttaacaaaaattgctctctctcatcatctcttccatgaggtcttaaca

SEQ ID NO: 78342 - DNA, 600 bp, Chicken  19866894367862_3
aggtctattccaatgtcatcaagaaacatgcatgaatacgctttgattctgagtwtctacatagccccattgacgcaaagcttaatatgaccatgatctagagcccgttgttctttcctgcaattatctcccattctctgcccttgttgaataatgtaggattacccccataatcagtctgctgcacctactgtcctgtttcaaagttcttgagagagagctaaacgctttccttcttagtgatgtcaggggtgagtaaggcagctttgtagtaaacgtgcttccaactagcctgaaaarttgaactttaacaaaaattgctctctctcatcatctcttccatgaggtcttaacactactataggagracactctaatcaaactaacttctgctctcctagacgtttttcttcccctccctcttttttattttttaggaaaaggaacaaagaaaaagtaacattctgatgacaggcaaagtagagaaagtgcacagaatttttgcatgtgaaagatggcagtcaagtccatttattgcgtagtatatttcataagttgggagttttgaataatctgttctaaaatatttgttacctagga

SEQ ID NO: 78343 - DNA, 539 bp, Chicken  19866894367862_4
attgacgcaaagcttaatatgaccatgatctagagcccgttgttctttcctgcaattatctcccattctctgcccttgttgaataatgtaggattacccccataatcagtctgctgcacctactgtcctgtttcaaagttcttgagagagagctaaacgctttccttcttagtgatgtcaggggtgagtaaggcagctttgtagtaaacgtgcttccaactagcctgaaaarttgaactttaacaaaaattgctctctctcatcatctcttccatgaggtcttaacactactataggagracactctaatcaaactaacttctgctctcctagacgtttttcttcccctccctcttttttattttttaggaaaaggaacaaagaaaaagtaacattctgatgacaggcaaagtagagaaagtgcacagaatttttgcatgtgaaagatggcagtcaagtccatttattgcgtagtatatttcataagttgggagttttgaataatctgttctaaaatatttgttacctaggaatactca

SEQ ID NO: 78344 - DNA, 452 bp, Chicken  19866894367867_1
agttttcatctttttagcttttcccttcatctttactggttgtttaatgccttctttgcttctgtcttcaacactaatgatgggctctgggaccactggagctttgagtttgagcaccatggctgcagtaacaataaactcacagccaaccctaaacttctttgggatttgctactcccactggatatggggcccaatggaattcatcccagtatactcaaagagatgactgatatcattacaagacctctcaattatttttcagttgtcttgggaatctggagaagtccagttaactgraggctggcaagaacttgtctcaattttcaagaaggatatgaaagaaaatgtcagtaattacaggcccatcggtctcattttgttgcccggcaaaaatatagagaggattattctgggagttattgaaaaacacctgaaaaacaatgcagtta

SEQ ID NO: 78345 - DNA, 600 bp, Chicken  19866894367870_1
gcttggacatattttgaaagataaattcaaatttcaccagggctagttatagctttgaaattagaactacttcatacactggctaaatcatttgttagtacagtgtgtgacaggtacatatagttttacctgaattcattttgatgtaaaacaaatcacatcaaacatgtcacaggtacagctccaccaaacttagttcaacattagactaataatcatttgaagtctgcttgaatgtgtagagatgtgcactggctgtggtacctggtatttacagaaatgtgaagaaaatagagagtratgtcaagattgtcagccagggagccatattcctaaacagtttccttgaattcttgggaatgatcagcttctcaatggcagcagatccatgcatccatttcaggaacttcttagctatatgcctttgatgctatgaatctgasgcattttatctgaggcattttatctgaggcattgggtatttttataaatacacaggttctgcagaggcaatattaaatcccttgttcacaaggaaatgaatayctgcactgtttgtgaatgacaatttacattgatagagctcctcttgttttctgt

SEQ ID NO: 78346 - DNA, 600 bp, Chicken  19866894367870_2
atgtaaaacaaatcacatcaaacatgtcacaggtacagctccaccaaacttagttcaacattagactaataatcatttgaagtctgcttgaatgtgtagagatgtgcactggctgtggtacctggtatttacagaaatgtgaagaaaatagagagtratgtcaagattgtcagccagggagccatattcctaaacagtttccttgaattcttgggaatgatcagcttctcaatggcagcagatccatgcatccatttcaggaacttcttagctatatgcctttgatgctatgaatctgasgcattttatctgaggcattttatctgaggcattgggtatttttataaatacacaggttctgcagaggcaatattaaatcccttgttcacaaggaaatgaatayctgcactgtttgtgaatgacaatttacattgatagagctcctcttgttttctgtataacagatatcaaacttgctgcatcaatcctcattatcttgccacacagtagtggaaatattacttagacattgaagtaagcaatctgtactatgctttgggggaaggtaacttacactgcaaaagctgtcttttttttttt

SEQ ID NO: 78347 - DNA, 600 bp, Chicken  19866894367870_3
gtgcactggctgtggtacctggtatttacagaaatgtgaagaaaatagagagtratgtcaagattgtcagccagggagccatattcctaaacagtttccttgaattcttgggaatgatcagcttctcaatggcagcagatccatgcatccatttcaggaacttcttagctatatgcctttgatgctatgaatctgasgcattttatctgaggcattttatctgaggcattgggtatttttataaatacacaggttctgcagaggcaatattaaatcccttgttcacaaggaaatgaatayctgcactgtttgtgaatgacaatttacattgatagagctcctcttgttttctgtataacagatatcaaacttgctgcatcaatcctcattatcttgccacacagtagtggaaatattacttagacattgaagtaagcaatctgtactatgctttgggggaaggtaacttacactgcaaaagctgtctttttttttttcttaaattcacctataggcatacttcatatgctagaataaatcagatacaatgatgaagagggatttgggagtgttggttgatgaaagattcaacatgagcca

SEQ ID NO: 78348 - DNA, 600 bp, Chicken  19866894367880_1
agtcagtgggcggtgtgtttcagcagtggtggcagtgggtcaccttcactggtgcagatggttatgatcatggcatgcaggctcttgttcatcactggcaaaaatgcatagctaatggtggtacctctgtagaaacattgtgctttgtagctgagaatttgctctaccaaatcgtgttattgtgctctttgtgtctgttgcagttttcatggaaatacataggaaacattccttttggaaagactgtgtggcccaggacaatttccattcactaaatgtggcccaggcaagacaaaaggytggacacccatgggctaaggattggagtgggcaagagaggaaaggtatggctgggggtctggagttcttaatttgggcttcaagggaagctctgaggttcagcattcttgtagtggattcctgacagggtgaggaatgcacttagaggtacaaataaggcttaaagtctgtgggttttgcagtctgagtgagtcacagcagcaccaacattgcctgaactgctctttcctcttcaggatcttcagtttttgctggccaaactgctctgccctyccctcaatctcccatctctgttcccca

SEQ ID NO: 78349 - DNA, 600 bp, Chicken  19866894367880_2
aaatgtggcccaggcaagacaaaaggytggacacccatgggctaaggattggagtgggcaagagaggaaaggtatggctgggggtctggagttcttaatttgggcttcaagggaagctctgaggttcagcattcttgtagtggattcctgacagggtgaggaatgcacttagaggtacaaataaggcttaaagtctgtgggttttgcagtctgagtgagtcacagcagcaccaacattgcctgaactgctctttcctcttcaggatcttcagtttttgctggccaaactgctctgccctyccctcaatctcccatctctgttccccaggcttctcctgaccgcctcatgtcagtcatctcattaaagacagctttctacctatcagcctatgctccagaatggctcctgtaggtctcggctaatttttatcagacttttgtgcatgattcctctcctacagaccatcctggaggcagtgcccagctctgtacaaaaaggaaaaagcccagaaggaagattggaaacttctgaaatgagaacccacatccaagaccttttcctatgcagggtctcacagggactgaggaagaggggatctg

SEQ ID NO: 78350 - DNA, 600 bp, Chicken  19866894367882_1
atccttcaacccacctttaggtattagttttctagactgcacaccttaaccacgatatcacatttaaaagtttgtattaagctgctgaccattttcctataacttactgttttatggaagaggacttggatgataatgctaaccactcaaattatttcttatgcttagctgagaaggcaaacaatcaaatgagacccaagtatgtttctctataatagaaacaaaggttagtaccaggccaacccttgtaaagtactggatctctgaacaacctttacaaggtctcatggctgccagttytgaaagcaagtaaatctaataaaagagatggcactgggtgttaaaaaaaaaaacaaaaaaccaacaacaaaccaacaacactgacaacttcaaaagtatttaccatttcaactagctaccctagtgctactaaccataaggtccctgagacagaattgtcacaaataccttcagaagttcattttgaactctttttgtctccatcttattatttacacttaaaaaaatcttatattgtttcagaactgtgtgattattgcagctgaacatagcttccccttgtccaaaaaaaaagaagct

SEQ ID NO: 78351 - DNA, 599 bp, Chicken  19866894367884_1
  misc_feature (1)..(217): n is any nucleotide
nnnnnnnnnnnnnnnnnnnnnnnnnnnnnnnnnnnnnnnnnnnnnnnnnnnnnnnnnnnnnnnnnnnnnnnnnnnnnnnnnnnnnnnnnnnnnnnnnnnnnnnnnnnnnnnnnnnnnnnnnnnnnnnnnnnnnnnnnnnnnnnnnnnnnnnnnnnnnnnnnnnnnnnnnnnnnnnnnnnnnnnnnnnnnnnnnnnnnnnnnnnnnnnnnnnnnnnnnctccacccctggcacgcaggtgactccgtggcctctgggtggcgccgccgccgcgggccgccgccgtgcacccggtaagagamgcgcggggccgcggcgcccggcacagagaacggcggcggagagggggcagcgcggaggagcgcagcgaggcggagcgcagcgcagcggccgcctctctccgctcacggcggcggcagagctgcgggggaccgtgactcctcctgcgcccggagcgaacttgtcctcgccttgccgccggtgcgccccggtgtccgctcgctgggaacttgtgccggtcgctgaaatattggattatgttcctgccgagccgggctgcggggagctgagcagggaaggaagaatgcgggtctgttggatg

SEQ ID NO: 78352 - DNA, 596 bp, Chicken  19866894367896_1
ctccatctgaaggtcaatagcttgtggggtgatgtaaggcaatggcagtgtgacgaggtgtaacattaatcctctgtgttgtcttgtctgattaaccctcacgccaccccactgggtgctctccatcactgcatgacaccgagcgacaccaaaaggctgtgttcacgtgtgttgttggttttttttcgtgtgcaaagtgcttgacagggcaaatatccaggtcacgtgaaagccacagggaaggaaaggagctcccacagaaagaagttgcaatgttcaccatgtctaaggaaaacatgmtgatacgtgtgttaaaggaatgccatatatgatgtgctgacagcgctgcagaggctgttcagcgtcatcaccgtgaagggccacagtgcttccctactgaaaccaataggggaatttgtccttggctgctggctgtcctcctctgggacatgccagcaggtaactccatgctctacagaagtcccaagtctcagatgcttctttaaaagctataaaggcaaattcccacatcgtgtacactgggaagcatttccaaggttcatttctgctgagagagaatctttgtaagccctccc

SEQ ID NO: 78353 - DNA, 600 bp, Chicken  19866894367897_1
agtcattaaaataagaggatgaggcagagatactaaaaggaatgcctgacactgcagaatctccccatcatccctactaactgcccaaaccagtctgaaggtgtctcaccgtctccatggtagtccaggcctgccgtaagggagtagtgaaacagttagggagaggaccaccttccctgcagatgttggattcaatctccaacctcacagagtcatcaaacccaagaggatgtgtggcttgaagggagaagtacctgcagcaccagacaggagaagacaacacaaaaggttttgcaaagmttttcctgtgctgaatacctgccccatttccaccagaggccattaacgccgctgcagccactagatggtgctggctgcaaaartgtatgcacaactcctaataactaagggcagggaggaaaaaagtccccagttcacagaaatggttttgacaaagcctwtccctgaaggtacagatagaataaacagagcataatgtgattatcagtgagcagactcttacacacagttctgtaacagagaaataggaacgaagcagaaaatacccacaactgtgaagtagcatttgctcattaaaaa

SEQ ID NO: 78354 - DNA, 600 bp, Chicken  19866894367897_2
cccaaaccagtctgaaggtgtctcaccgtctccatggtagtccaggcctgccgtaagggagtagtgaaacagttagggagaggaccaccttccctgcagatgttggattcaatctccaacctcacagagtcatcaaacccaagaggatgtgtggcttgaagggagaagtacctgcagcaccagacaggagaagacaacacaaaaggttttgcaaagtttttcctgtgctgaatacctgccccatttccaccagaggccattaacgccgctgcagccactagatggtgctggctgcaaaartgtatgcacaactcctaataactaagggcagggaggaaaaaagtccccagttcacagaaatggttttgacaaagcctwtccctgaaggtacagatagaataaacagagcataatgtgattatcagtgagcagactcttacacacagttctgtaacagagaaataggaacgaagcagaaaatacccacaactgtgaagtagcatttgctcattaaaaactgagtctgttaatgaaggggggggcgataaagggatggagctaacacaaatgagttctttccttcttcaatttttacttcat

SEQ ID NO: 78355 - DNA, 600 bp, Chicken  19866894367897_3
agaggaccaccttccctgcagatgttggattcaatctccaacctcacagagtcatcaaacccaagaggatgtgtggcttgaagggagaagtacctgcagcaccagacaggagaagacaacacaaaaggttttgcaaagtttttcctgtgctgaatacctgccccatttccaccagaggccattaacgccgctgcagccactagatggtgctggctgcaaaartgtatgcacaactcctaataactaagggcagggaggaaaaaagtccccagttcacagaaatggttttgacaaagcctwtccctgaaggtacagatagaataaacagagcataatgtgattatcagtgagcagactcttacacacagttctgtaacagagaaataggaacgaagcagaaaatacccacaactgtgaagtagcatttgctcattaaaaactgagtctgttaatgaaggggggggcgataaagggatggagctaacacaaatgagttctttccttcttcaatttttacttcatattagaataggttctcaacaagcctcacaactgggcttccagaagcagttcttatgcccatcctccagcagcactatt

SEQ ID NO: 78356 - DNA, 590 bp, Chicken  19866894367897_4
gattcaatctccaacctcacagagtcatcaaacccaagaggatgtgtggcttgaagggagaagtacctgcagcaccagacaggagaagacaacacaaaaggttttgcaaagtttttcctgtgctgaatacctgccccatttccaccagaggccattaacgccgctgcagccactagatggtgctggctgcaaaartgtatgcacaactcctaataactaagggcagggaggaaaaaagtccccagttcacagaaatggttttgacaaagcctwtccctgaaggtacagatagaataaacwgagcataatgtgattatcagtgagcagactcttacacacagttctgtaacagagaaataggaacgaagcagaaaatacccacaactgtgaagtagcatttgctcattaaaaactgagtctgttaatgaaggggggggcgataaagggatggagctaacacaaatgagttctttccttcttcaatttttacttcatattagaataggttctcaacaagcctcacaactgggcttccagaagcagttcttatgcccatcctccagcagcactattgctaagctaaacccaaa

SEQ ID NO: 78357 - DNA, 588 bp, Chicken  19866894367897_5
ttcaatctccaacctcacagagtcatcaaacccaagaggatgtgtggcttgaagggagaagtacctgcagcaccagacaggagaagacaacacaaaaggttttgcaaagtttttcctgtgctgaatacctgccccatttccaccagaggccattaacgccgctgcagccactagatggtgctggctgcaaaartgtatgcacaactcctaataactaagggcagggaggaaaaaagtccccagttcacagaaatggttttgacaaagcctwtccctgaaggtacagatagaataaacagwgcataatgtgattatcagtgagcagactcttacacacagttctgtaacagagaaataggaacgaagcagaaaatacccacaactgtgaagtagcatttgctcattaaaaactgagtctgttaatgaaggggggggcgataaagggatggagctaacacaaatgagttctttccttcttcaatttttacttcatattagaataggttctcaacaagcctcacaactgggcttccagaagcagttcttatgcccatcctccagcagcactattgctaagctaaacccaaa

SEQ ID NO: 78358 - DNA, 600 bp, Chicken  19866894367902_1
gctcacgtgctgccatttcatctcttcatcgctcagccagagctctgcaggacgttaaacagggcccgtgctctgcggccttgtaaagctccttatctcctggctcgagcaccttcctttgttgggctggccccggtttgtttctctgctaatctcagcagagcctggcggtctcggctttttgccccttcccaggtgggaccagcagtgctgccgagctatggggtggagctgcaggcatcgggctggagctgctgcccaactgggtttggggccaccctccgtgacacagcggcctgwgcccgccgggtgcccaagagatgaaggcagccggcctcagcctggctgctgggtgacacggatggggcaggcagcctgtcgagtactgagcaactaaaggaaataaaaaccctgtgacaaactgaaaggaggtgagaggaaaggaagaaggatgcaattatgatgcgctcacaagtctctgcaaaatttcagatgctgtgagtacagtacaaaaatcacggcaagatctggatccaaaacagcaatgacaagaaggcgttacactacagcgataccagatcttgcatgccatagctatag

SEQ ID NO: 78359 - DNA, 600 bp, Chicken  19866894367911_1
tctgtcttcctcacatggtcagtcacaaacttcatttgctctggggccaaatagcagtcaatacttagtgtttaatcaagatccaattcacacaaagatgatagctgttgcctataaaaaacagacaaattatcagataggaatggttgaaatatgtagacaacagttacaggattccttgaatctagaagcaaatttttgttattataagtggataattcaaaaagaaatgaagctcaagggaaaatcttttacacaatggacattgaaatagatctgagaaacattttattacaaagrctgtgtgaaatatagtttaatggtttcacagttcttttttttttttttttttttttattacttcacagagtaatagctcagactggttctgacctcaaaggttctgcaaactatcctgttactaatggatattacaaaaacttttttgacacaaacttgaggtttcccaaaggcatcaagcttctataaaataccattgttcaaaagacacgcgccaccttagttttcttttcttatgcaactcaaaataagttagtttatcccagggaatcaaatttcccagtgctgtaggtaacaata

SEQ ID NO: 78360 - DNA, 600 bp, Chicken  19866894367912_1
caggtacttgaaataaaaccaagtgcctactcagggtaaaatagctttaaggctgaagtctgtaccatttggtgaatctagggtggcaagcagtgtaaggctggggggaagaagcaatgggaaaggaacacagaggatttgtcagtcatttgagccctcttctgaatctgagtcagagcccagggggatgtgcaggtgatgggtaaagggcacatcaactatttccgaaattgctgaagtttatgtatgcattcttaatattgagaaagagaaaactgtgtgcagaactgtagtttagayyscccatacccctgacatgctgctggctctcctggaccatagtttctgcagtggatagaacacagagcattgttttcccttgactggagctctggtccttgtaataccatacaagtaataaataaatcacattgatttccatacacaaaaaggccagattctgcccataaaaatatatgctctgttcaagtcagaggaaattgcacgtgtgtggctgagcacagaagctggctcaaagcccacttgtgactaagccatgcatgtgaggacagaatacagcccattgtctcctgagagctt

SEQ ID NO: 78361 - DNA, 600 bp, Chicken  19866894367912_2
aggtacttgaaataaaaccaagtgcctactcagggtaaaatagctttaaggctgaagtctgtaccatttggtgaatctagggtggcaagcagtgtaaggctggggggaagaagcaatgggaaaggaacacagaggatttgtcagtcatttgagccctcttctgaatctgagtcagagcccagggggatgtgcaggtgatgggtaaagggcacatcaactatttccgaaattgctgaagtttatgtatgcattcttaatattgagaaagagaaaactgtgtgcagaactgtagtttagayyscccatacccctgacatgctgctggctctcctggaccatagtttctgcagtggatagaacacagagcattgttttcccttgactggagctctggtccttgtaataccatacaagtaataaataaatcacattgatttccatacacaaaaaggccagattctgcccataaaaatatatgctctgttcaagtcagaggaaattgcacgtgtgtggctgagcacagaagctggctcaaagcccacttgtgactaagccatgcatgtgaggacagaatacagcccattgtctcctgagagcttt

SEQ ID NO: 78362 - DNA, 600 bp, Chicken  19866894367912_3
ggtacttgaaataaaaccaagtgcctactcagggtaaaatagctttaaggctgaagtctgtaccatttggtgaatctagggtggcaagcagtgtaaggctggggggaagaagcaatgggaaaggaacacagaggatttgtcagtcatttgagccctcttctgaatctgagtcagagcccagggggatgtgcaggtgatgggtaaagggcacatcaactatttccgaaattgctgaagtttatgtatgcattcttaatattgagaaagagaaaactgtgtgcagaactgtagtttagayyscccatacccctgacatgctgctggctctcctggaccatagtttctgcagtggatagaacacagagcattgttttcccttgactggagctctggtccttgtaataccatacaagtaataaataaatcacattgatttccatacacaaaaaggccagattctgcccataaaaatatatgctctgttcaagtcagaggaaattgcacgtgtgtggctgagcacagaagctggctcaaagcccacttgtgactaagccatgcatgtgaggacagaatacagcccattgtctcctgagagctttt

SEQ ID NO: 78363 - DNA, 600 bp, Chicken  19866894367912_4
ctggtccttgtaataccatacaagtaataaataaatcacattgatttccatacacaaaaaggccagattctgcccataaaaatatatgctctgttcaagtcagaggaaattgcacgtgtgtggctgagcacagaagctggctcaaagcccacttgtgactaagccatgcatgtgaggacagaatacagcccattgtctcctgagagctttttaatttttctttcttttactctaggacatgaatcacacaaactgaaaaccaggcttttcctccaagattacgtgtctcatggacaattkttttaatttttgttcttaaattttactatttccactgaagaagccggtgaaagaaaataaagtatgccaacagcttcttcctataaacctgctctatgaaaaaagcatctgatgcagatgcctggagtagcttctgatcaagttttcccgaaatcatttcagtgagtgagacactgaattaatagtctccgactccattaactttacacctgcttttctgcagttttaacatcatggtgcccatccttccctattctttgtcttctctccctgtgtccccaggagagctttgcagaaaac

SEQ ID NO: 78364 - DNA, 600 bp, Chicken  19866894367913_1
agaaggctgcagggagacctcattgagatattccaatatttaaagagagattatgaacataagggaaatcaactttttacagtggtagatagtgatagaacaagggggaactgttttaaactaaaggaggagagatttatattagatgtcagggtagatttttactgagggagtggtgaggtgctggaacaggcttcccagagaggctgtggatgctccaaccctggagatgtttaaggtcaggttggactggacccagagcaatctgatctagtacttgatctagtggctggcagctcwgccctgcctgtggcagggggttggaacttgatgatccttgagaccccttccaacacaagccattctatgattctatgattctccccttagctacctttccttcagactacaaaattccagctctcttgtgctcctcacaagacttgtgctccagactcctcaccagctcaaaactgaacacagtactcaaggtatggcccaaccagagctgaggagtacagggagatgattatcttcctggctcctgctagcaacactatttcttatacaagccaagatgccattggccttcttggccat

SEQ ID NO: 78365 - DNA, 600 bp, Chicken  19866894367930_1
tgtactaatttatactcttcttcagagatagtgggtccctggttaggagtgcaatatacctgttttgtgccttgtaaatgagtactgctggtagctgaaaaatgtctgagaacttgagaggcaggagtgcagtagctttcttatctgtgaggaatgatgagacatttgcaatggacatatttactccaattacaaatcaattaaaaggtcagggtttcagtgtttcataactgtttttagaatgaggcaaattacttacgtgagaacctcctgtatctaaaatctgacgtaatgtgcacrggcatgcatggacagtgcgaatgcttattccatatacaaatataatggaaaaaataaattagtagctccgtgctccatttgagtaatacacagctgagcatacgatataattaggctgtcctgcatgtatgcattatgctgcgtgtatcttgttacgtggttgcgtactgttgtggaaaagattttgttatgcttcgtgagaggaggtcaaggctagaaatgtatgagttattcattgtaattttaaaataaaccacatatttttaagctcttttgtgttcttgggctaattataagcct

SEQ ID NO: 78366 - DNA, 600 bp, Chicken  19866894367930_2
tgcatgtatgcattatgctgcgtgtatcttgttacgtggttgcgtactgttgtggaaaagattttgttatgcttcgtgagaggaggtcaaggctagaaatgtatgagttattcattgtaattttaaaataaaccacatatttttaagctcttttgtgttcttgggctaattataagcctgttttatcttttaacatgattaatgatagcattgttgtcaatgcccatagtttcttggcacgtcctagttgtggttggtatcccactcataggagccattggggaatcatggttctctttwggaagactaagacarcgtgtctgcagagagaagaggcaggtctcgtgggcttttgtgcagcctcccttggaagatgaagggcagctatccaaaatgcgttcgagtcgtttttggctttggggttcaagaagttgtttgtttagttttataggtagcgtcagttaagtcaagtaactgtttattttctgctttctgatggaagaggtggaagaactgacctttttcgattgtgaaaactattgtagggaggaaatgcatacgaatgataggatgagaaggaatggccttaagttatgtacc

SEQ ID NO: 78367 - DNA, 600 bp, Chicken  19866894367930_3
tgctgcgtgtatcttgttacgtggttgcgtactgttgtggaaaagattttgttatgcttcgtgagaggaggtcaaggctagaaatgtatgagttattcattgtaattttaaaataaaccacatatttttaagctcttttgtgttcttgggctaattataagcctgttttatcttttaacatgattaatgatagcattgttgtcaatgcccatagtttcttggcacgtcctagttgtggttggtatcccactcataggagccattggggaatcatggttctctttwggaagactaagacarcgtgtctgcagagagaagaggcaggtctcgtgggcttttgtgcagcctcccttggaagatgaagggcagctatccaaaatgcgttcgagtcgtttttggctttggggttcaagaagttgtttgtttagttttataggtagcgtcagttaagtcaagtaactgtttattttctgctttctgatggaagaggtggaagaactgacctttttcgattgtgaaaactattgtagggaggaaatgcatacgaatgataggatgagaaggaatggccttaagttatgtaccaggggaggttcaggt

SEQ ID NO: 78368 - DNA, 600 bp, Chicken  19866894367933_1
tcacatttccttcagctcctctcggtacaatgcatcctgtaggaaatgtacagctgttattttttgttttatcatgagcctgacaagaagaccctgagctgtacggtttgagtactgtggcaccgtttcagtgctgagcatcgtgactgctgagcctggtgccaaagtttcaaggacttgattgctgagctgctgaacagagcattagagcactggacacgagcatgagggaggtaaaggacccagaacagaacctccacatctgtttgccaaaatgaaagaatcactggggtgttgagrcttgcagcatggcaygcgttggcccctaagacctacagctcatccaggttgaagttgtaaaatgggatctgttcatcttgtcctttgttttccaaactttgcttgtgtctcatcttgacctgagttggcataagggtctggcttttgtctcaggcaccttgaatctgttgtgcagcctgataaagtcatctcgatagctttggtgagagcacttacgtacgtctcgcacgtcatatggctgatgagtccatgtggagatgagtcacctgtgggtgagacatcctggggcctcttctatat

SEQ ID NO: 78369 - DNA, 600 bp, Chicken  19866894367933_2
ctcctctcggtacaatgcatcctgtaggaaatgtacagctgttattttttgttttatcatgagcctgacaagaagaccctgagctgtacggtttgagtactgtggcaccgtttcagtgctgagcatcgtgactgctgagcctggtgccaaagtttcaaggacttgattgctgagctgctgaacagagcattagagcactggacacgagcatgagggaggtaaaggacccagaacagaacctccacatctgtttgccaaaatgaaagaatcactggggtgttgagrcttgcagcatggcaygcgttggcccctaagacctacagctcatccaggttgaagttgtaaaatgggatctgttcatcttgtcctttgttttccaaactttgcttgtgtctcatcttgacctgagttggcataagggtctggcttttgtctcaggcaccttgaatctgttgtgcagcctgataaagtcatctcgatagctttggtgagagcacttacgtacgtctcgcacgtcatatggctgatgagtccatgtggagatgagtcacctgtgggtgagacatcctggggcctcttctatatgcatttatataattg

SEQ ID NO: 78370 - DNA, 600 bp, Chicken  19866894367935_1
gcaattttagcttccagaagaatgacaaaccctaaacaaagtattgactgatctagtaactcataaatttatttttgacaaaatatttatctctgtcagttcagaaattcttcacatacagcacagtgtggtaactgttattcattgctgttgtcagaccactgtcatctatagcttgatcacaagtagttgtgcaattcaaaattaaaaattcaaagtcgtggaatttgcccatatttggtgtggaagatcataaatctcaatcctttagaaatgcctgtggagaacaaattaacctgrttgtttttgtgaaggccccctcatttctttccattaattctctttaacattcaaaggcaaaaaatgacaaaaatagcaatgatagattcagtaaaaaagtgaaaggaatttctcttacaagttacacaagtgaaaagtaacatctgtccaactccaacagaaaaaaaatagtggttgtatgagtgggataacaaggtacaaggaaaaaaaatggaaagcagtgaaaggattgaaaaatgaacagtaaagaaaatattcattaattctactcacaattttggaagggagggatgacggaaa

SEQ ID NO: 78371 - DNA, 600 bp, Chicken  19866894367935_2
aaaatgaacagtaaagaaaatattcattaattctactcacaattttggaagggagggatgacggaaacagacagttttaaaatagagagatcatagaaaactgttattgacctcaagagatggagaagaaagaaaatcaggaaatgcttatgtagataagggaggtatgtaaaaagggcagtcaattgcccaggagaggtttcagttacttctcagatttgaaggacagtggaattacaaaggaagtattcattttcctggagctaggacagagtcaacaggtttcaaaagctattctgragcttgtttaaggaattaaaccaaataaaattaataacatgggtaaacatctacagtttygtgataagaacgaagtttgaaagacacatggctaaaaaaccctcacacttaacagtatataagtagtaaaattttatcagaagaatataggaaatatttgtgcagatcaagtaatttaaaacaatctacaatttccaagatcagtgaaatcaagtgcatttgagttacaagatagcttgtaattttagtctgctttcatttgtactcatccctgatacaatatttttcctaagtcagaaa

SEQ ID NO: 78372 - DNA, 600 bp, Chicken  19866894367935_3
acggaaacagacagttttaaaatagagagatcatagaaaactgttattgacctcaagagatggagaagaaagaaaatcaggaaatgcttatgtagataagggaggtatgtaaaaagggcagtcaattgcccaggagaggtttcagttacttctcagatttgaaggacagtggaattacaaaggaagtattcattttcctggagctaggacagagtcaacaggtttcaaaagctattctgragcttgtttaaggaattaaaccaaataaaattaataacatgggtaaacatctacagtttygtgataagaacgaagtttgaaagacacatggctaaaaaaccctcacacttaacagtatataagtagtaaaattttatcagaagaatataggaaatatttgtgcagatcaagtaatttaaaacaatctacaatttccaagatcagtgaaatcaagtgcatttgagttacaagatagcttgtaattttagtctgctttcatttgtactcatccctgatacaatatttttcctaagtcagaaacaacacmtkgttactgaaaaacctttagttctttataytcttgagcaacattaaagctat

SEQ ID NO: 78373 - DNA, 600 bp, Chicken  19866894367935_4
ttaaggaattaaaccaaataaaattaataacatgggtaaacatctacagtttygtgataagaacgaagtttgaaagacacatggctaaaaaaccctcacacttaacagtatataagtagtaaaattttatcagaagaatataggaaatatttgtgcagatcaagtaatttaaaacaatctacaatttccaagatcagtgaaatcaagtgcatttgagttacaagatagcttgtaattttagtctgctttcatttgtactcatccctgatacaatatttttcctaagtcagaaacaacacmtkgttactgaaaaacctttagttctttataytcttgagcaacattaaagctatgctaccagtctttcaatgctaaaatgaattaatagaaggcactgttgctcaaatggctcagtcctctgaaagacttaagtacacaacttcataccatctagataattgaaaggagattctgaaacccaaccaattcttacaatatgacaaataaaacattagagtcttaactaaagcccatgatgtaagctgaattagctgacttcacagtaagggaactaggatcattcatgcaatgcagcacctg

SEQ ID NO: 78374 - DNA, 600 bp, Chicken  19866894367935_5
aaggaattaaaccaaataaaattaataacatgggtaaacatctacagtttygtgataagaacgaagtttgaaagacacatggctaaaaaaccctcacacttaacagtatataagtagtaaaattttatcagaagaatataggaaatatttgtgcagatcaagtaatttaaaacaatctacaatttccaagatcagtgaaatcaagtgcatttgagttacaagatagcttgtaattttagtctgctttcatttgtactcatccctgatacaatatttttcctaagtcagaaacaacacmtkgttactgaaaaacctttagttctttataytcttgagcaacattaaagctatgctaccagtctttcaatgctaaaatgaattaatagaaggcactgttgctcaaatggctcagtcctctgaaagacttaagtacacaacttcataccatctagataattgaaaggagattctgaaacccaaccaattcttacaatatgacaaataaaacattagagtcttaactaaagcccatgatgtaagctgaattagctgacttcacagtaagggaactaggatcattcatgcaatgcagcacctgag

SEQ ID NO: 78375 - DNA, 600 bp, Chicken  19866894367935_6
atgggtaaacatctacagtttygtgataagaacgaagtttgaaagacacatggctaaaaaaccctcacacttaacagtatataagtagtaaaattttatcagaagaatataggaaatatttgtgcagatcaagtaatttaaaacaatctacaatttccaagatcagtgaaatcaagtgcatttgagttacaagatagcttgtaattttagtctgctttcatttgtactcatccctgatacaatatttttcctaagtcagaaacaacacmtkgttactgaaaaacctttagttctttataytcttgagcaacattaaagctatgctaccagtctttcaatgctaaaatgaattaatagaaggcactgttgctcaaatggctcagtcctctgaaagacttaagtacacaacttcataccatctagataattgaaaggagattctgaaacccaaccaattcttacaatatgacaaataaaacattagagtcttaactaaagcccatgatgtaagctgaattagctgacttcacagtaagggaactaggatcattcatgcaatgcagcacctgagttgaggagctgtatattgcagggaataac

SEQ ID NO: 78376 - DNA, 600 bp, Chicken  19866894367937_1
atttgtccttcataaaatgaaaaaaaagaaagcagcttccatctcctgcataacaacacaaaaagaaagaaaaaaaaaaaagaaaaggaaagaaaagaaaagaaaaaaaagaatagagaaaagaaagaaagaagaaaaaaatgcttaatttaaaagcatcgttcccagtcaggaacaacagaacgatttgagcaaaggaaaaaggaacattttgttttttaaaattgtcttgggggataaagggaacttttttttttttcacacgtttacctctctatgatctgaactataattagacgwgaatgagaggcttttctgatggaatttataattaaagtattatttagtagcagactttctgttcaccaaactctgggatgccaacttttaatcaggaaagcattatctgtatgtttcagtgaatctggagttatgctgcatgaataaggactgttttctgagcttgttaggtgtaaataatttaagatgaaaaaaawatatatctccttttaaatataagtaactgcaaaagcccttgagatctacagttcatggtctcttatccagaattaaagatattcagttattcrgtaaacaaat

SEQ ID NO: 78377 - DNA, 600 bp, Chicken  19866894367937_2
gaaaaaggaacattttgttttttaaaattgtcttgggggataaagggaacttttttttttttcacacgtttacctctctatgatctgaactataattagacgwgaatgagaggcttttctgatggaatttataattaaagtattatttagtagcagactttctgttcaccaaactctgggatgccaacttttaatcaggaaagcattatctgtatgtttcagtgaatctggagttatgctgcatgaataaggactgttttctgagcttgttaggtgtaaataatttaagatgaaaaaaawatatatctccttttaaatataagtaactgcaaaagcccttgagatctacagttcatggtctcttatccagaattaaagatattcagttattcrgtaaacaaatttcaaagatgtaatggatgtctgtatctcttaatagatttagctataatttatctcacatctcctctataatgaggctgctgtgtgcttttaaagtaagacatttcaaaacaaataggctcagtagtccaccaggcacttttacatgctgcaccragctctaatcggatgccagattctgcaaaatgtcattacagt

SEQ ID NO: 78378 - DNA, 600 bp, Chicken  19866894367937_3
aattagacgwgaatgagaggcttttctgatggaatttataattaaagtattatttagtagcagactttctgttcaccaaactctgggatgccaacttttaatcaggaaagcattatctgtatgtttcagtgaatctggagttatgctgcatgaataaggactgttttctgagcttgttaggtgtaaataatttaagatgaaaaaaawatatatctccttttaaatataagtaactgcaaaagcccttgagatctacagttcatggtctcttatccagaattaaagatattcagttattcrgtaaacaaatttcaaagatgtaatggatgtctgtatctcttaatagatttagctataatttatctcacatctcctctataatgaggctgctgtgtgcttttaaagtaagacatttcaaaacaaataggctcagtagtccaccaggcacttttacatgctgcaccragctctaatcggatgccagattctgcaaaatgtcattacagtataattcctcaaattatttttgactcaaacacagttcagctttttggtagtattttcattgctaggaacatctgagataccaatgagatcact

SEQ ID NO: 78379 - DNA, 600 bp, Chicken  19866894367937_4
ttctgagcttgttaggtgtaaataatttaagatgaaaaaaawatatatctccttttaaatataagtaactgcaaaagcccttgagatctacagttcatggtctcttatccagaattaaagatattcagttattcrgtaaacaaatttcaaagatgtaatggatgtctgtatctcttaatagatttagctataatttatctcacatctcctctataatgaggctgctgtgtgcttttaaagtaagacatttcaaaacaaataggctcagtagtccaccaggcacttttacatgctgcaccragctctaatcggatgccagattctgcaaaatgtcattacagtataattcctcaaattatttttgactcaaacacagttcagctttttggtagtattttcattgctaggaacatctgagataccaatgagatcactttgggctgttgagtccaggtgtctgcactggtacttctagtacaggtcygcatttcagagagggctgtgcctccccagctttttttcagtccctggtgctttcttcacagaagtcaggctagtaattaagtatgcagataatattatgcgaggcctctgcttgga

SEQ ID NO: 78380 - DNA, 600 bp, Chicken  19866894367937_5
tagctataatttatctcacatctcctctataatgaggctgctgtgtgcttttaaagtaagacatttcaaaacaaataggctcagtagtccaccaggcacttttacatgctgcaccragctctaatcggatgccagattctgcaaaatgtcattacagtataattcctcaaattatttttgactcaaacacagttcagctttttggtagtattttcattgctaggaacatctgagataccaatgagatcactttgggctgttgagtccaggtgtctgcactggtacttctagtacaggtcygcatttcagagagggctgtgcctccccagctttttttcagtccctggtgctttcttcacagaagtcaggctagtaattaagtatgcagataatattatgcgaggcctctgcttggattttctacttccccactgtgacagttgaatgcagtgtgttgttttgagttgggtagatacataaattcaagaggttcatacagctttcaggatagtgggctgagctcttcttgcacatcacaattcctatgtgcggtgctgtctccctgtggatgaaacattgctaagagtcagggcagctgtg

SEQ ID NO: 78381 - DNA, 599 bp, Chicken  19866894367938_1
  misc_feature (1)..(25): n is any nucleotide
nnnnnnnnnnnnnnnnnnnnnnnnntttgaatgagagcccgcaggctgttattgacgtttcagcttatatatatatatacatatatatacatatataacatacttatgtaatacctacagattaaaatagagtttaaaaaaaataggttactctaactgctgtagaaactgtttgattttcagtaatgcaaaagagcaggatttcaatgaagtcacagtactggaaactaggttatttggttacaataaaaatatcctttgcagagacaaaagagtaccatactgccaggaactgtaggsaacagtatttttttacttaacctaaagacctgttctctaacttttaattaaaaagaatactgttcctaacatttttaatggtaaaatcsttgctactaatttttcacacttctcccagcagcttggatgccagtccttgtgtctttgtgcctaacttgagagagcttgtcctgaatgagggccyagtatctgataatgtttaatggagagcaaggactgggatatcatatggatataaagaacacaaagataagacaakttgaaaacatcggacaaacttttaactcatattaaagagc

SEQ ID NO: 78382 - DNA, 600 bp, Chicken  19866894367938_2
catatataacatacttatgtaatacctacagattaaaatagagtttaaaaaaaataggttactctaactgctgtagaaactgtttgattttcagtaatgcaaaagagcaggatttcaatgaagtcacagtactggaaactaggttatttggttacaataaaaatatcctttgcagagacaaaagagtaccatactgccaggaactgtaggsaacagtatttttttacttaacctaaagacctgttctctaacttttaattaaaaagaatactgttcctaacatttttaatggtaaaatcsttgctactaatttttcacacttctcccagcagcttggatgccagtccttgtgtctttgtgcctaacttgagagagcttgtcctgaatgagggccyagtatctgataatgtttaatggagagcaaggactgggatatcatatggatataaagaacacaaagataagacaakttgaaaacatcggacaaacttttaactcatattaaagagcaaaaacaggacaaggaaaatgagaatatgtcagacaatgtttcatctacaaggtgtgctgcttccaaggtcaaatgtaaggttgataaaa

SEQ ID NO: 78383 - DNA, 600 bp, Chicken  19866894367938_3
aatgcaaaagagcaggatttcaatgaagtcacagtactggaaactaggttatttggttacaataaaaatatcctttgcagagacaaaagagtaccatactgccaggaactgtaggsaacagtatttttttacttaacctaaagacctgttctctaacttttaattaaaaagaatactgttcctaacatttttaatggtaaaatcsttgctactaatttttcacacttctcccagcagcttggatgccagtccttgtgtctttgtgcctaacttgagagagcttgtcctgaatgagggccyagtatctgataatgtttaatggagagcaaggactgggatatcatatggatataaagaacacaaagataagacaakttgaaaacatcggacaaacttttaactcatattaaagagcaaaaacaggacaaggaaaatgagaatatgtcagacaatgtttcatctacaaggtgtgctgcttccaaggtcaaatgtaaggttgataaaattactttaatatttaatattttctctataatgctttttttgtctgaaackgaaaatttatttttatagaaagcttstgatttttactgagctttt

SEQ ID NO: 78384 - DNA, 600 bp, Chicken  19866894367938_4
tgcagagacaaaagagtaccatactgccaggaactgtaggsaacagtatttttttacttaacctaaagacctgttctctaacttttaattaaaaagaatactgttcctaacatttttaatggtaaaatcsttgctactaatttttcacacttctcccagcagcttggatgccagtccttgtgtctttgtgcctaacttgagagagcttgtcctgaatgagggccyagtatctgataatgtttaatggagagcaaggactgggatatcatatggatataaagaacacaaagataagacaakttgaaaacatcggacaaacttttaactcatattaaagagcaaaaacaggacaaggaaaatgagaatatgtcagacaatgtttcatctacaaggtgtgctgcttccaaggtcaaatgtaaggttgataaaattactttaatatttaatattttctctataatgctttttttgtctgaaackgaaaatttatttttatagaaagcttstgatttttactgagcttttgaaaagtgttaaatgcttcatgttaaggttgtaggggcatattttggaacccaattcagcattcaattcartggg

SEQ ID NO: 78385 - DNA, 600 bp, Chicken  19866894367938_5
tggatgccagtccttgtgtctttgtgcctaacttgagagagcttgtcctgaatgagggccyagtatctgataatgtttaatggagagcaaggactgggatatcatatggatataaagaacacaaagataagacaakttgaaaacatcggacaaacttttaactcatattaaagagcaaaaacaggacaaggaaaatgagaatatgtcagacaatgtttcatctacaaggtgtgctgcttccaaggtcaaatgtaaggttgataaaattactttaatatttaatattttctctataatgckttttttgtctgaaackgaaaatttatttttatagaaagcttstgatttttactgagcttttgaaaagtgttaaatgcttcatgttaaggttgtaggggcatattttggaacccaattcagcattcaattcartgggaagctgattgagaatttgaacctagatgtggtgctgaatatggacagtgttagccatttaattacttaaaatggtaattattcttgttatatatggattttccatttcagtatgtagaaatgtgaaactactctaagaaatgatatcagatatgatggacaagt

SEQ ID NO: 78386 - DNA, 600 bp, Chicken  19866894367938_6
tgtctttgtgcctaacttgagagagcttgtcctgaatgagggccyagtatctgataatgtttaatggagagcaaggactgggatatcatatggatataaagaacacaaagataagacaakttgaaaacatcggacaaacttttaactcatattaaagagcaaaaacaggacaaggaaaatgagaatatgtcagacaatgtttcatctacaaggtgtgctgcttccaaggtcaaatgtaaggttgataaaattactttaatatttaatattttctctataatgctttttttgtctgaaackgaaaatttatttttatagaaagcttstgatttttactgagcttttgaaaagtgttaaatgcttcatgttaaggttgtaggggcatattttggaacccaattcagcattcaattcartgggaagctgattgagaatttgaacctagatgtggtgctgaatatggacagtgttagccatttaattacttaaaatggtaattattcttgttatatatggattttccatttcagtatgtagaaatgtgaaactactctaagaaatgatatcagatatgatggacaagtttacaagtgctaccaa

SEQ ID NO: 78387 - DNA, 600 bp, Chicken  19866894367938_7
ttgtcctgaatgagggccyagtatctgataatgtttaatggagagcaaggactgggatatcatatggatataaagaacacaaagataagacaakttgaaaacatcggacaaacttttaactcatattaaagagcaaaaacaggacaaggaaaatgagaatatgtcagacaatgtttcatctacaaggtgtgctgcttccaaggtcaaatgtaaggttgataaaattactttaatatttaatattttctctataatgctttttttgtctgaaackgaaaatttatttttatagaaagcttstgatttttactgagcttttgaaaagtgttaaatgcttcatgttaaggttgtaggggcatattttggaacccaattcagcattcaattcartgggaagctgattgagaatttgaacctagatgtggtgctgaatatggacagtgttagccatttaattacttaaaatggtaattattcttgttatatatggattttccatttcagtatgtagaaatgtgaaactactctaagaaatgatatcagatatgatggacaagtttacaagtgctaccaaaagcaagaagcaatcattatgcagtt

SEQ ID NO: 78388 - DNA, 600 bp, Chicken  19866894367938_8
caakttgaaaacatcggacaaacttttaactcatattaaagagcaaaaacaggacaaggaaaatgagaatatgtcagacaatgtttcatctacaaggtgtgctgcttccaaggtcaaatgtaaggttgataaaattactttaatatttaatattttctctataatgctttttttgtctgaaackgaaaatttatttttatagaaagcttstgatttttactgagcttttgaaaagtgttaaatgcttcatgttaaggttgtaggggcatattttggaacccaattcagcattcaattcartgggaagctgattgagaatttgaacctagatgtggtgctgaatatggacagtgttagccatttaattacttaaaatggtaattattcttgttatatatggattttccatttcagtatgtagaaatgtgaaactactctaagaaatgatatcagatatgatggacaagtttacaagtgctaccaaaagcaagaagcaatcattatgcagttctcctacataagatatacagcaggcataagaaagcacatcacaatgtttctaaattatttacactttaaagatgacgcatctattcatta

SEQ ID NO: 78389 - DNA, 600 bp, Chicken  19866894367939_1
agattgagattcagcacatagactttcttaaagcctcaactaaagactcacgttcctacacatcgtaaccagcaaaatacaaaatacttttctttagatgcagctggatctgcattaaacgtttttccactagagttaagctggttagagttcatggtgtctgcttaaacagccaacacttttatgctggcaaagtttcacatatcaagctggttcagtcttcctggatgaggatgctagtgaggtttcctctgagtttgttgctaattttatgactcataagtccttaggaatctacayttctgatagaagacagagccatttggcatcctartaaaggatcactcacatcagctggcaattaaagcaacatgtgctttttcactgtttatttttgttctccatcaattttgcaagcatttatctcctattgctgccttaattgatattggaagtttcaaaattgttgacaaagttctgccagcatggatactagctrgaaatatgaggggaaaaatccttgcagtcagcctgcaggcaaggaaactgatgggtagaaaaaatgcctctgccttgggcactctgcacctccctctgcca

SEQ ID NO: 78390 - DNA, 600 bp, Chicken  19866894367939_2
ctcaactaaagactcacgttcctacacatcgtaaccagcaaaatacaaaatacttttctttagatgcagctggatctgcattaaacgtttttccactagagttaagctggttagagttcatggtgtctgcttaaacagccaacacttttatgctggcaaagtttcacatatcaagctggttcagtcttcctggatgaggatgctagtgaggtttcctctgagtttgttgctaattttatgactcataagtccttaggaatctacayttctgatagaagacagagccatttggcatcctartaaaggatcactcacatcagctggcaattaaagcaacatgtgctttttcactgtttatttttgttctccatcaattttgcaagcatttatctcctattgctgccttaattgatattggaagtttcaaaattgttgacaaagttctgccagcatggatactagctrgaaatatgaggggaaaaatccttgcagtcagcctgcaggcaaggaaactgatgggtagaaaaaatgcctctgccttgggcactctgcacctccctctgccaacatgcctaaaataacacaggttccaaaatctga

SEQ ID NO: 78391 - DNA, 600 bp, Chicken  19866894367939_3
acatatcaagctggttcagtcttcctggatgaggatgctagtgaggtttcctctgagtttgttgctaattttatgactcataagtccttaggaatctacayttctgatagaagacagagccatttggcatcctartaaaggatcactcacatcagctggcaattaaagcaacatgtgctttttcactgtttatttttgttctccatcaattttgcaagcatttatctcctattgctgccttaattgatattggaagtttcaaaattgttgacaaagttctgccagcatggatactagctrgaaatatgaggggaaaaatccttgcagtcagcctgcaggcaaggaaactgatgggtagaaaaaatgcctctgccttgggcactctgcacctccctctgccaacatgcctaaaataacacaggttccaaaatctgaggattaaagtcctgaattttagccttttgtgcctgcttctgtactgtagtgtctctctgcccttaggcacaaaagctaaggaggactgatgcagtctctggtgactgatgtttgtgcagtgggttaggtggactaaacagagagaccatgtcttttggaaagctc

SEQ ID NO: 78392 - DNA, 600 bp, Chicken  19866894367943_1
tcttttacagtcagtccaaacaatgttcgtgtgtatttaaaatattctgcaagttgtagctctctgcttgtaatacatttgtcgtagtagaattttatttttacaaaaacctgtaaatacattactctaattttttatttttccagtttaaaacctcactgtctagcctggctgtatctgtatataatcacatccctgtcacttttaattgattggatggctcaaatgagaatgatcaaaaaaggaatggaaaagaaaataggccactaatttaacatggggtgatactttcagtacatytgtgaaactacaagggagaaaacactgaggcagaaaaagaatgttatggcaggctacagagctgttggtctgttgcaggaccctgtcatctttttgctatgattccagcttaatagtgccgtgtctgaggagtcacataaatgattcatactgatttgactcagtggcagtgtatgaatctggttgccattatgaccaccagaactaacagatagaaagtaatccccagggggtttctaactataaatgacatctgccgtgttccacaggcttggaaagctggaattgttttagcccaca

SEQ ID NO: 78393 - DNA, 600 bp, Chicken  19866894367946_1
atttagatttattatgtgcttgcttaaagatcaatgtttaaaatggatatatattgcattaatccaaatacacaacatatcataaagctatttgcccaataaatttacaattccagcagacattttaatcctgtttctgcttccaaggagtgctcttttctgcatacaaacacatccacccacaaagacacacactcgctcacaaagtactattgcaattaacctcatttataaaccaccaactagccctgtaacttcagcgtgatgtacatttaaccacagagaattaaagtcccacaraggggaagggacaaaaagcagggtgcagtgctggggctgaggctgaggctgaggccatcgtggcgatgcatggcagatcgagccctccaccagccagtccctgtgcttggggcatcgctccgcctcgcatcgccttcccacagccaccctcggctatttgaactccacttctgtggtttaaaataatatcccattgacgtgggatccaaaactccttcagagctaataaaatgtcaccctgccaaactgagatgatacgtgccaacctttagcctagtgtgaaattttataactgagtta

SEQ ID NO: 78394 - DNA, 600 bp, Chicken  19866894367953_1
tgaaaggcaggaaattgaggcagtttcagcatccttatgagggatgcagagtaacactcatcaggtagaaggtcctggattgagaagatcatggtaaaagagagaaaagcagaatctctgtcacacaggaattttggaataaggccaacccttctgtatctgaaaactacatttatcatactggttcaacaattcatcttcattagaattataaatagctctccattcataaactgacaaacttcaactgaaaagtctccaatataatcacaatttgtagctgagagggttcgtgagatraacttcagaggaagtctttgtgccaaatgtgtaataacttgaccatactagctcagaagtgtattttctttagttagcaggaaaaacaactgcaaagtaaatgaatcacgaatcatctccattgggagagtgccaaaaaacctgtttgctcttcaaattttggtaactttttatcttctggaaattcatttcaaagtaccagaaatcrgctaaaattaaacctgggttttcagccagagtgtatttatgcataagagctttcaagcctctcagcttagcctcttaataaaacttgcactt

SEQ ID NO: 78395 - DNA, 600 bp, Chicken  19866894367953_2
ttataaatagctctccattcataaactgacaaacttcaactgaaaagtctccaatataatcacaatttgtagctgagagggttcgtgagatraacttcagaggaagtctttgtgccaaatgtgtaataacttgaccatactagctcagaagtgtattttctttagttagcaggaaaaacaactgcaaagtaaatgaatcacgaatcatctccattgggagagtgccaaaaaacctgtttgctcttcaaattttggtaactttttatcttctggaaattcatttcaaagtaccagaaatcrgctaaaattaaacctgggttttcagccagagtgtatttatgcataagagctttcaagcctctcagcttagcctcttaataaaacttgcacttactagtgcaagactagactccaaaacaaatgacattagtcgttctccattatgccatttacaaggtaggactatctagggagaaggtgcttgtctgcttgctaagaaactacagtgtaaatgtccaatcacagaatcatagaatggcctgggttgaaaaggactgcaatgatcatcgagtttcaacccccctgctatgtgcagggttg

SEQ ID NO: 78396 - DNA, 600 bp, Chicken  19866894367956_1
ctatgaacaaaatatttattttacacacttgtctgcatttaatccataaatctgtctactacgatagtgttttactggtgtagatgaggcaagtaagctgagatcatagcagacatgtcctctaaggctttacagaaaatcattgctttttaatccctttatccctgttatttcctaccactgtggaaatccagcggcggggaaagctggcgcggcgtaggacagatgcataatgcacagtgctaagcaggcaaaaatccttctgtttttataatgctccaagcacgttatacatgtcartgttagtgccgtgtgccctacataaataaaaacaacttaccaatkctcagcggggtgttacacatcttacagctaacctccgtatgcgctgtctgggtatcagtgagtaagctgctaattagggttagccaggagtgcagaacggggccgattgcagggcaggcaccgacccagcacgtggctgcacactgcaagttgaacagtacccgagctcaaggctggcttttattttctgcattgtttccctctgcataaacatcaggaacatgcttagacagtagaattgagcccrgatgtctg

SEQ ID NO: 78397 - DNA, 600 bp, Chicken  19866894367956_2
ataaatctgtctactacgatagtgttttactggtgtagatgaggcaagtaagctgagatcatagcagacatgtcctctaaggctttacagaaaatcattgctttttaatccctttatccctgttatttcctaccactgtggaaatccagcggcggggaaagctggcgcggcgtaggacagatgcataatgcacagtgctaagcaggcaaaaatccttctgtttttataatgctccaagcacgttatacatgtcartgttagtgccgtgtgccctacataaataaaaacaacttaccaatkctcagcggggtgttacacatcttacagctaacctccgtatgcgctgtctgggtatcagtgagtaagctgctaattagggttagccaggagtgcagaacggggccgattgcagggcaggcaccgacccagcacgtggctgcacactgcaagttgaacagtacccgagctcaaggctggcttttattttctgcattgtttccctctgcataaacatcaggaacatgcttagacagtagaattgagcccrgatgtctggagggcatctggaggtgttcaggtgtgtgattgcttcctgtctgc

SEQ ID NO: 78398 - DNA, 591 bp, Chicken  19866894367956_3
catgtcartgttagtgccgtgtgccctacataaataaaaacaacttaccaatkctcagcggggtgttacacatcttacagctaacctccgtatgcgctgtctgggtatcagtgagtaagctgctaattagggttagccaggagtgcagaacggggccgattgcagggcaggcaccgacccagcacgtggctgcacactgcaagttgaacagtacccgagctcaaggctggcttttattttctgcattgtttccctctgcataaacatcaggaacatgcttagacagtagaattgagcccrgatgtctggagggcatctggaggtgttcaggtgtgtgattgcttcctgtctgcccaccgcagcgctctcctgtctgcagtacaaacacagcgctgctggagggtgtgggtgctgcggggctgggcaggaacgtgggtagcagtgagaggctgcagtgtgcagtgtttggggagggggagttctgcaggatttttgatgggtagcttacgtgtctgttaggtgagagcacagcggtggcagtagaaaataaggagcgtggaggcagtgtcagtgtagatttcagcaacaaat

SEQ ID NO: 78399 - DNA, 600 bp, Chicken  19866894367971_1
gcttcttaagtaatgaaaactaccggcctgattttggagacattaccttatgatgcgacaccttcagaactgtaaaaacatccctccaagcaaggttaactcaatgtttggcaactgagtttctcaggaggaacagatgtggcatttaactacagccttcagaattcacagcccatctctaagcagccatttctagaacagcaggcccacaaactggccgtgagttcagctactgctacactgaacaactgacaagggtattctgattctatcctgcggactggacataaaacatctccrggtaaaggttcccagcatgtttttaaactagtaagcagctttacaatttaaacaacagcaacagtatcagttaatttataaaaatattaagtgatatattataagcataaaaaagcaaatgattcacagcttaatattttactgtaagataagagaagaaatttgyattggaaaaaaccataccacaaaatattgggtctaaaggtgatcctatctaagccatggcaaatgtgcacaygaccctaggagagacaggcaccaggacatctatttaaataagcaataaaatgggtgtatgtg

SEQ ID NO: 78400 - DNA, 600 bp, Chicken  19866894367971_2
cacagcccatctctaagcagccatttctagaacagcaggcccacaaactggccgtgagttcagctactgctacactgaacaactgacaagggtattctgattctatcctgcggactggacataaaacatctccrggtaaaggttcccagcatgtttttaaactagtaagcagctttacaatttaaacaacagcaacagtatcagttaatttataaaaatattaagtgatatattataagcataaaaaagcaaatgattcacagcttaatattttactgtaagataagagaagaaatttgyattggaaaaaaccataccacaaaatattgggtctaaaggtgatcctatctaagccatggcaaatgtgcacaygaccctaggagagacaggcaccaggacatctatttaaataagcaataaaatgggtgtatgtgtgcaaagtgcaaggtaatcacgagggcaagaaagtgcatggagatagaagtctggaagacaaaagatgggyttgtacyacttccacagaagcagactgcatcccatctggatcatcctccagaaccattttactttccatgccttgtaaatttagtatttattata

SEQ ID NO: 78401 - DNA, 600 bp, Chicken  19866894367971_3
cactgaacaactgacaagggtattctgattctatcctgcggactggacataaaacatctccrggtaaaggttcccagcatgtttttaaactagtaagcagctttacaatttaaacaacagcaacagtatcagttaatttataaaaatattaagtgatatattataagcataaaaaagcaaatgattcacagcttaatattttactgtaagataagagaagaaatttgyattggaaaaaaccataccacaaaatattgggtctaaaggtgatcctatctaagccatggcaaatgtgcacaygaccctaggagagacaggcaccaggacatctatttaaataagcaataaaatgggtgtatgtgtgcaaagtgcaaggtaatcacgagggcaagaaagtgcatggagatagaagtctggaagacaaaagatgggyttgtacyacttccacagaagcagactgcatcccatctggatcatcctccagaaccattttactttccatgccttgtaaatttagtatttattatactggtacatgattgaagactcagcaactcgaggctgcattaataaaacagcacttagaggaaagacagagca

SEQ ID NO: 78402 - DNA, 600 bp, Chicken  19866894367971_4
taatttataaaaatattaagtgatatattataagcataaaaaagcaaatgattcacagcttaatattttactgtaagataagagaagaaatttgyattggaaaaaaccataccacaaaatattgggtctaaaggtgatcctatctaagccatggcaaatgtgcacaygaccctaggagagacaggcaccaggacatctatttaaataagcaataaaatgggtgtatgtgtgcaaagtgcaaggtaatcacgagggcaagaaagtgcatggagatagaagtctggaagacaaaagatgggyttgtacyacttccacagaagcagactgcatcccatctggatcatcctccagaaccattttactttccatgccttgtaaatttagtatttattatactggtacatgattgaagactcagcaactcgaggctgcattaataaaacagcacttagaggaaagacagagcagtcaacaacacggaagggaactgcatgtatcagaaggtctagcaccagaattctcactaattacttcagacagctcagggagctgtattcctaactgtggaagaactattagataaaatgaaaataaattgca

SEQ ID NO: 78403 - DNA, 600 bp, Chicken  19866894367971_5
taaaaatattaagtgatatattataagcataaaaaagcaaatgattcacagcttaatattttactgtaagataagagaagaaatttgyattggaaaaaaccataccacaaaatattgggtctaaaggtgatcctatctaagccatggcaaatgtgcacaygaccctaggagagacaggcaccaggacatctatttaaataagcaataaaatgggtgtatgtgtgcaaagtgcaaggtaatcacgagggcaagaaagtgcatggagatagaagtctggaagacaaaagatgggyttgtacyacttccacagaagcagactgcatcccatctggatcatcctccagaaccattttactttccatgccttgtaaatttagtatttattatactggtacatgattgaagactcagcaactcgaggctgcattaataaaacagcacttagaggaaagacagagcagtcaacaacacggaagggaactgcatgtatcagaaggtctagcaccagaattctcactaattacttcagacagctcagggagctgtattcctaactgtggaagaactattagataaaatgaaaataaattgcatgcacca

SEQ ID NO: 78404 - DNA, 560 bp, Chicken  19866894367971_6
acagagtggaaaaagaacattacaggcattcatacaaaccagacacctttcattttctattagtaagatcccaagagacaatttagtactctgcgaatatggcactggaaggctggaaagttgtttcctgagtactagccattgcacaaagatttcagagtacgtgatattcttgaccagacaaaagcaacactcatttccccatcctacacagaaacagcatcacgtacatcatagctaatcagaacgacatttctcctaagacattaaaatttaattattccttgagaggaagaaaawaaaaaagccaatgcctccatcaagattatcagcatttttctgaagtaacaaattaggcctttggcatttcacagcagtgatccaagatttgaggcttcttaaaagctccaagttttgaagcaatcaaatggctgacagccggaacacaattagcatgattaaccagttatttaaataacaacacagtctagaagcacaactgcattatacagcactgcttgcactggacatcagatgtttgtcaactgttcattaaatat

SEQ ID NO: 78405 - DNA, 600 bp, Chicken  19866894367981_1
aggtattccatatgttctttgcaaggagcttgtacagaatttggaagacaaatacacggtgtactgatgtgaatctttttcattgtggattaaaataatagtaaaaggaacacaattagaaaaaaaaatggctttgattcagactattgggtatacaatggaaagtaataagtcatcaaaaattttgatttagtcattttattctattatatacatttacaatacattatataacattattttgtatttaaaacatcactaaagattcataatcttgagataagaatgatttacatttakcttttgtctgtttattacctttgagtaatactatactttttcttaacatatagaactcttgatctgcaatctaagttaataattgctgtagacgttgccaaagggatggagtacctccacaacctcacacagccgatcatacaccgcgatttgaacaggtaaatgtctttattttataaaatcagggaatgtgaaacctcaatgcaacagcacttgtctgcagtctcacctgtgtggtatctcactgagactgatggagctcaaaggaaggaaggtctgcttggatcagtcggactygat

SEQ ID NO: 78406 - DNA, 530 bp, Chicken  19866894367981_2
takcttttgtctgtttattacctttgagtaatactatactttttcttaacatatagaactcttgatctgcaatctaagttaataattgctgtagacgttgccaaagggatggagtacctccacaacctcacacagccgatcatacaccgcgatttgaacaggtaaatgtctttattttataaaatcagggaatgtgaaacctcaatgcaacagcacttgtctgcagtctcacctgtgtggtatctcactgagactgatggagctcaaaggaaggaaggtctgcttggatcagtcggactygatagctgggcatgatgctttcccatttrctggaggctttagtagattgaaattataacacacagtagacaacttctgtgggttctgtgtaacttctctttattaatgatttcactgacagatttcttatcaggaacttgcgaaatatttacaccctgtttgcttatattaatcctgcaagataaacaatttatgcaatggagtgtatcccccagtacagtctttttatg

SEQ ID NO: 78407 - DNA, 501 bp, Chicken  19866894367981_3
aatactatactttttcttaacatatagaactcttgatctgcaatctaagttaataattgctgtagacgttgccaaagggatggagtacctccacaacctcacacagccgatcatacaccgcgatttgaacaggtaaatgtctttattttataaaatcagggaatgtgaaacctcaatgcaacagcacttgtctgcagtctcacctgtgtggtatctcactgagactgatggagctcaaaggaaggaaggtctgcttggatcagtcggactygatagctgggcatgatgctttcccatttrctggaggctttagtagattgaaattataacacacagtagacaacttctgtgggttctgtgtaacttctctttattaatgatttcactgacagatttcttatcaggaacttgcgaaatatttacaccctgtttgcttatattaatcctgcaagataaacaatttatgcaatggagtgtatcccccagtacagtctttttatg

SEQ ID NO: 78408 - DNA, 600 bp, Chicken  19866894367998_1
ggaatgtgtgctggagaaagctgaaatgtctttttacagtgcctatttagacttggaaattgaacagctgttgcattacatctttttttatttctacttaaattttgaaatcaaagccagtcccgtatctgtaccatttgattggtatgtgttcaatatatttgtttttttccataaggactctttctgctttttcttgtggggtgtaaatggcacatctttaattgtattaaaacaaacaaaaaacagctacaaacagcgcaacaaacaaaaccttaagaacaaaaataaaaaaaaatwaaaaggaaattacactgtccaataacttaacaagaatatattggtctcttaaggtgtttcatgctctaggagaagcagtctttcttcgtatgatcctgactattctaagatcattatgaggtaaaaccattgaattaaaatgatcgtggcgtagccaccaactgcttgatgacttcatttccaaaaagcargatttaatgagtctggagcacaagtcctatgaggagcagctgagggaactgggattgcttagtctggagaagaggaggctcagccttaaagttctctacagtgacttaa

SEQ ID NO: 78409 - DNA, 600 bp, Chicken  19866894367998_2
ttttcttgtggggtgtaaatggcacatctttaattgtattaaaacaaacaaaaaacagctacaaacagcgcaacaaacaaaaccttaagaacaaaaataaaaaaaaatwaaaaggaaattacactgtccaataacttaacaagaatatattggtctcttaaggtgtttcatgctctaggagaagcagtctttcttcgtatgatcctgactattctaagatcattatgaggtaaaaccattgaattaaaatgatcgtggcgtagccaccaactgcttgatgacttcatttccaaaaagcargatttaatgagtctggagcacaagtcctatgaggagcagctgagggaactgggattgcttagtctggagaagaggaggctcagccttaaagttctctacagtgacttaaaggaggttgtggtgaggtgggttggcctcttttcccacataactagcagtaggactagaggggatggcctcagtttcgcggcagggaagattcaggttgggtgttaggaaaagtttctctgaaagggatggtcaggcactggaatgggctgcccagggtggtggagtcaccatccctgttggggatcaaga

SEQ ID NO: 78410 - DNA, 600 bp, Chicken  19866894368002_1
aatattacaggagtagcataattttccttctctttcttccttggtcagcaaaacatctcctgcagagtcatccccttgccggattccaagtggtgtgtaaagcactgattcaggctttccctgtgctcagtagggagggacaagaatactacaagacactcatgctgcctcatgcttcccttactggtatttgtatcatcctcaaaaagcaccaattttgctctcgttgacacacagtgtgattaacgaaacacccagtttctaagcaagggaggtgtattgagatgcatcccacccatrttctgaaatcctgggcaacgaacagtgcccaatccacccctacgtttccccatttgctcatgggtcagttgatgttaaatagcaatccaccacaatatttgtgccagaaattatccttaatttatgagggttttttgaggcagccctgggggatcatggcacaatagcactcataaggaatgttaaattggtttttgtgtgtgggttttaagtgcttcataaaacatctctaatggcttaggtatgaactggtgtgtcattattgccatacaggtatgtggtcagattcgagcagcccag

SEQ ID NO: 78411 - DNA, 599 bp, Chicken  19866894368025_1
  misc_feature (1)..(232): n is any nucleotide
nnnnnnnnnnnnnnnnnnnnnnnnnnnnnnnnnnnnnnnnnnnnnnnnnnnnnnnnnnnnnnnnnnnnnnnnnnnnnnnnnnnnnnnnnnnnnnnnnnnnnnnnnnnnnnnnnnnnnnnnnnnnnnnnnnnnnnnnnnnnnnnnnnnnnnnnnnnnnnnnnnnnnnnnnnnnnnnnnnnnnnnnnnnnnnnnnnnnnnnnnnnnnnnnnnnnnnnnnnnnnnnnnnnnnnnntacacaggtctaagagctgaggaaatagaatagaggacataagtgttacaaattccaagaagatgctwtggtgtcatccaatcccagaaactgctgtatctacactcattatgctctgcagcatcgctgtgctatttagaaccaactgcacgcatctagtttattcctagtaccaattgcagtaaagcaggtctcacacaaacagcaacgtgcgagacaacgtgcttgtacaaacgtgagtacacctttaagctgtgggcagagctccaggaaggtattgtcttccattaagaagttgcagaacagctcaggaattaactagcatgcagctagtctcgtatgcagctgtccrgcagagtcaaacctg

SEQ ID NO: 78412 - DNA, 600 bp, Chicken  19866894368025_2
ttccaagaagatgctwtggtgtcatccaatcccagaaactgctgtatctacactcattatgctctgcagcatcgctgtgctatttagaaccaactgcacgcatctagtttattcctagtaccaattgcagtaaagcaggtctcacacaaacagcaacgtgcgagacaacgtgcttgtacaaacgtgagtacacctttaagctgtgggcagagctccaggaaggtattgtcttccattaagaagttgcagaacagctcaggaattaactagcatgcagctagtctcgtatgcagctgtccrgcagagtcaaacctgcatatttattaacagcataacaggtgaggtgaaacaagaaagtcttcggcttctgggggtacgacatcagcagtaatcactctaaaccagcactttgctatagagtttgttacctacctgtgctatctgaatgaatttttcctgagaatactgaggtaggagcactttcggaacatccttcagagcatccacttgaagatagaggttcagccaagagatgattgtcacaggacagagttcccactttaaagcctgtgagcattaaacaaatacgtaagcgcctta

SEQ ID NO: 78413 - DNA, 600 bp, Chicken  19866894368025_3
tatctgaatgaatttttcctgagaatactgaggtaggagcactttcggaacatccttcagagcatccacttgaagatagaggttcagccaagagatgattgtcacaggacagagttcccactttaaagcctgtgagcattaaacaaatacgtaagcgccttaaaccatgcaaagattgttctgggctctgatctttgctttcccccatgcttcccagctgagttcactcagtttattgcacagactcccaaaagacacttgaggtcacacacgcttttaagtacccattttaagatcacrttcctcctactttttgaaggaagtgacattaaaacacaacatgaatctggagcgagatttcaaacgagtcttacaaacrccaagttattacctttaacataataagttccatccttacaatatcatcttcactgcaagcaccatcagtgacataagcaaattcctgtatttttggagcgtagatttccttcaaaaggaggaagaaaaagatgagaagatggagcttgatactggcagagcatattgwagtattaacttctcttacactagagctcttttttcttgctccatggagtgaca

SEQ ID NO: 78414 - DNA, 600 bp, Chicken  19866894368025_4
aggttcagccaagagatgattgtcacaggacagagttcccactttaaagcctgtgagcattaaacaaatacgtaagcgccttaaaccatgcaaagattgttctgggctctgatctttgctttcccccatgcttcccagctgagttcactcagtttattgcacagactcccaaaagacacttgaggtcacacacgcttttaagtacccattttaagatcacrttcctcctactttttgaaggaagtgacattaaaacacaacatgaatctggagcgagatttcaaacgagtcttacaaacrccaagttattacctttaacataataagttccatccttacaatatcatcttcactgcaagcaccatcagtgacataagcaaattcctgtatttttggagcgtagatttccttcaaaaggaggaagaaaaagatgagaagatggagcttgatactggcagagcatattgwagtattaacttctcttacactagagctcttttttcttgctccatggagtgacatgaaacttgcacagtaggggatgctcaaaacaagtaggttctatgttgtgtgttgcataacacaacaaatttactgcaa

SEQ ID NO: 78415 - DNA, 600 bp, Chicken  19866894368025_5
ccaaaagacacttgaggtcacacacgcttttaagtacccattttaagatcacrttcctcctactttttgaaggaagtgacattaaaacacaacatgaatctggagcgagatttcaaacgagtcttacaaacrccaagttattacctttaacataataagttccatccttacaatatcatcttcactgcaagcaccatcagtgacataagcaaattcctgtatttttggagcgtagatttccttcaaaaggaggaagaaaaagatgagaagatggagcttgatactggcagagcatattgwagtattaacttctcttacactagagctcttttttcttgctccatggagtgacatgaaacttgcacagtaggggatgctcaaaacaagtaggttctatgttgtgtgttgcataacacaacaaatttactgcaacctttttagctttggagaaaatagtgataggacaagggggaatggttttaaactgagacaggggaggtttaggttggatattaggaggaagtttttccacagagagtggtgacacactggaacaggttgcccarggaggttgtggatgccccatccctggaggcattc

SEQ ID NO: 78416 - DNA, 600 bp, Chicken  19866894368025_6
gaagatggagcttgatactggcagagcatattgwagtattaacttctcttacactagagctcttttttcttgctccatggagtgacatgaaacttgcacagtaggggatgctcaaaacaagtaggttctatgttgtgtgttgcataacacaacaaatttactgcaacctttttagctttggagaaaatagtgataggacaagggggaatggttttaaactgagacaggggaggtttaggttggatattaggaggaagtttttccacagagagtggtgacacactggaacaggttgcccarggaggttgtggatgccccatccctggaggcattcaaggccaggctggatgtggctctgggcagcctggtctggtggttggtgaccctgcacacagcaggggggttggaactcaatgatcattgtggtccttttcaacccaggccattctatgattttatgattctatgacataaatgctgacagaacaatcagaacaatcttccattaagatcagttcccactcagccattctatttgctgctaaaaataagaaatgagaacaatcccacttttggagtacagggctctgttagagggca

SEQ ID NO: 78417 - DNA, 600 bp, Chicken  19866894368025_7
aaggccaggctggatgtggctctgggcagcctggtctggtggttggtgaccctgcacacagcaggggggttggaactcaatgatcattgtggtccttttcaacccaggccattctatgattttatgattctatgacataaatgctgacagaacaatcagaacaatcttccattaagatcagttcccactcagccattctatttgctgctaaaaataagaaatgagaacaatcccacttttggagtacagggctctgttagagggcactcagcaatgcaggttaggcacaatgtcagtcastgctgatatggccatggagaccaaaaatcccactgcygacacagctggcagaatccatggtgtagagacagttaaagaacgcagccaacctcctcatgccagttttagccacaaatgggtaggtgtagaggtacctgccagcagaacagcttgcagctcagcacctcattttgcaaacagcagtttgatcaggggagtttccaactacctaaacttaacatcccaaatttgcctctctgtttggcctaccatgtgctacagtgtttccaggagacacacagaaaccaacacaactcatca

SEQ ID NO: 78418 - DNA, 572 bp, Chicken  19866894368025_8
ggtggttggtgaccctgcacacagcaggggggttggaactcaatgatcattgtggtccttttcaacccaggccattctatgattttatgattctatgacataaatgctgacagaacaatcagaacaatcttccattaagatcagttcccactcagccattctatttgctgctaaaaataagaaatgagaacaatcccacttttggagtacagggctctgttagagggcactcagcaatgcaggttaggcacaatgtcagtcastgctgatatggccatggagaccaaaaatcccactgcygacacagctggcagaatccatggtgtagagacagttaaagaacgcagccaacctcctcatgccagttttagccacaaatgggtaggtgtagaggtacctgccagcagaacagcttgcagctcagcacctcattttgcaaacagcagtttgatcaggggagtttccaactacctaaacttaacatcccaaatttgcctctctgtttggcctaccatgtgctacagtgtttccaggagacacacagaaaccaacacaactcatcatcactgttg

SEQ ID NO: 78419 - DNA, 600 bp, Chicken  19866894368033_1
gatttggaccttaacaaatcatgggttgctttaggttacacttgctcctgcctcagcctacctacgtgttttcatttagattttggcaagacctttgtctggccagctggcttttgtgctcgagaccatcctgtcttttgtcttgagttacccttccttcttcccaactgcagccctgactgcacttgcagtaacagggatgaatttatcaaatgtttgtgtattcacacaattaaaacgcagatattgatttgttactttgatctcttggcttcccttaccagaatgtaggcatgtagrcacaaatacagggtgtggaggatctgttgcaaagggcaattttgatctggccgtagcagcgtgagccatctgttgattggcctttgtcagccaaattgtgctactagttggcatagtgaatatgtatgcagcactctgcaggacaaaactcataaattcagattgccttgcatgaacttatatatgcagttcagctccacaaagagaaagaaaaagaaaaaaactgcatacattgcttatgcaacaaaatgttgcttatttatagtggcatttacaaggtgcagggaaagctgatatcct

SEQ ID NO: 78420 - DNA, 600 bp, Chicken  19866894368034_1
atccacaggaagcataagctgagtctttctctatagtttgtcctcgggtttattttctttctttacttgattctttgtttccactgccatgatttttcatcagttttgatcatagtcaagccatgctaaaataattaatgtgccagttgactggaacggataatcagttcagtgcatgcaactgatgcagctctttgagagagacacaattgctgcagggaaagaaaggtcccacaggtggcatttcatcagcctgcagctctgggaaggttttctaaagtccctggctgccaaagcaargagaattacctgtctcagtttgcattagaaggcaaaatatttccgccttgcaacagcagagcagcatagcactcrytgcatttctacagctctgaaggcaaagaaggaggccttgtgatttttgtctgatgtcagaacttttgaagaaagtaatgcattagggggagaggtgagctgcttgatcatcgtttagtttctgggggttgggagtacggcatgctgtaggcttgatgagatgctgttgtgatggaaccctgactgaattcagcttctttacagctggcagggtcaacacagtkt

SEQ ID NO: 78421 - DNA, 600 bp, Chicken  19866894368034_2
tgtttccactgccatgatttttcatcagttttgatcatagtcaagccatgctaaaataattaatgtgccagttgactggaacggataatcagttcagtgcatgcaactgatgcagctctttgagagagacacaattgctgcagggaaagaaaggtcccacaggtggcatttcatcagcctgcagctctgggaaggttttctaaagtccctggctgccaaagcaargagaattacctgtctcagtttgcattagaaggcaaaatatttccgccttgcaacagcagagcagcatagcactcrytgcatttctacagctctgaaggcaaagaaggaggccttgtgatttttgtctgatgtcagaacttttgaagaaagtaatgcattagggggagaggtgagctgcttgatcatcgtttagtttctgggggttgggagtacggcatgctgtaggcttgatgagatgctgttgtgatggaaccctgactgaattcagcttctttacagctggcagggtcaacacagtktgtatggctggaggaaaaggatttatgcttcacagtaagtctgcccttggctgtgctggggggctggaggaactct

SEQ ID NO: 78422 - DNA, 600 bp, Chicken  19866894368034_3
gtttccactgccatgatttttcatcagttttgatcatagtcaagccatgctaaaataattaatgtgccagttgactggaacggataatcagttcagtgcatgcaactgatgcagctctttgagagagacacaattgctgcagggaaagaaaggtcccacaggtggcatttcatcagcctgcagctctgggaaggttttctaaagtccctggctgccaaagcaargagaattacctgtctcagtttgcattagaaggcaaaatatttccgccttgcaacagcagagcagcatagcactcrytgcatttctacagctctgaaggcaaagaaggaggccttgtgatttttgtctgatgtcagaacttttgaagaaagtaatgcattagggggagaggtgagctgcttgatcatcgtttagtttctgggggttgggagtacggcatgctgtaggcttgatgagatgctgttgtgatggaaccctgactgaattcagcttctttacagctggcagggtcaacacagtktgtatggctggaggaaaaggatttatgcttcacagtaagtctgcccttggctgtgctggggggctggaggaactctg

SEQ ID NO: 78423 - DNA, 600 bp, Chicken  19866894368034_4
rgagaattacctgtctcagtttgcattagaaggcaaaatatttccgccttgcaacagcagagcagcatagcactcrytgcatttctacagctctgaaggcaaagaaggaggccttgtgatttttgtctgatgtcagaacttttgaagaaagtaatgcattagggggagaggtgagctgcttgatcatcgtttagtttctgggggttgggagtacggcatgctgtaggcttgatgagatgctgttgtgatggaaccctgactgaattcagcttctttacagctggcagggtcaacacagtktgtatggctggaggaaaaggatttatgcttcacagtaagtctgcccttggctgtgctggggggctggaggaactctgcaccacctcattagttgcagagttgctcgaagctgcatccatttctccagaagggggagagtggagtagttggatgctggaggagcgtacccagtacagaactgtcctttttccctgactcaagcctgggcacagtatagaaaaatcaagacagttagaattaggctgtcaaatctgctcgcataggtttttgcaaagtccatcacgtctgactgtcagtggt

SEQ ID NO: 78424 - DNA, 600 bp, Chicken  19866894368035_1
ctttcactgatgctgatggagggtgttctcccagttatctgcaagtcatggcccacagccttctgatgccagggtgacatctctgtggcctagcagcggtgagtgacggtgaacaaatgctgctgtgagcacctagaaagaacctatgttaccccagaaagcgttggaggttccctcatccctcaggttgtggatggtacggtgctgcctatgctggattaagatgcatgcatgaaaacctgtacgagggcaggagggcagcaaggcacagtaaatgtgcatacacacacacacacacasggctctttgcagactgactgaaggcctttgcctttggacttaagccgcaagcatcagcattttattcgttataagtagactttaataaaaacacagcttttgaatttagcgtaaacagtgctaaaccatcttgattccaaaataggtgtttcaggtgactgtgggtggttgcttggttgctgttatttattgtaatattagcatgttacagaaaacaaatgggtggcagtctgggctttcttggaagtggagggagcagaaggctggagaatgacatagttgtatttcagggcttactct

SEQ ID NO: 78425 - DNA, 600 bp, Chicken  19866894368040_1
agcagctgaagtaccagaaagaagaaaaggtactgaattgctctctgcttacttctgaatgaggttttctgaggcaggttttcatgcctgtccttcttctcaaactctaatcatctcagactgaggtatcacaataagccaaacacagaattcgccacagcttattttacttttgccactacaaacagattacaagtacactctgtccgataggcaaccctccagcaacagccattcctccacgggcaggaatcgtggccaacacagcaatgaccttcccccctcgtggcccacaggacycacttcctcagaattcccccatacggaaattcacttggatctacttctaggactctcacagtatgtaaaacacttaactttctttactgtcaagaatataaaggcagaaggcttagctctaaaggaaacagactaagaaaaaaaaatggcgtgcttcttctacagtgggactaaacaaggaacctgtatgtcctgctattgctgcaccgaatctccatggccatccttcacagtgcaggtgtgaggctgcctttggccaaatgccttcaacaagctgagttgaagccccatagcctgaag

SEQ ID NO: 78426 - DNA, 600 bp, Chicken  19866894368041_1
gctcaaatacaaagcctgttttatttctgatcccccaaagggtaggagatctagtcaaaagtttccaaaagtggattattatgaatgtttgtttcaaggcataaggatcaagccttcaaaactcataaaggaactacaacccaaatgatgtgggaatcattctctctcttgtcccagtcaaacagctgacatcaacaaacagagtttgaagtaggaacacatgagaatgtgagagtagaacaacacatgggtgtacaaagatgtacataaaccaaattcacaagtattttgtactgtctyccytcagaagattcctgatagcttcaagtcagacaacccctcacgtgcagcagatggagcatgtaataggaagacttcatagtagtgaacatcttttcaattgtcagattaaaggcattccaactaagaggatttgctagataaattaattctgagcaattacctctgggcttctgggatacttgggtttaagaaaaggtatatgaagtgttttcacaggaattattttatcagtagtcattcccagctatattgagatgtagttcaactgtctatgaattaacctgtcttctcattagt

SEQ ID NO: 78427 - DNA, 600 bp, Chicken  19866894368041_2
caaatacaaagcctgttttatttctgatcccccaaagggtaggagatctagtcaaaagtttccaaaagtggattattatgaatgtttgtttcaaggcataaggatcaagccttcaaaactcataaaggaactacaacccaaatgatgtgggaatcattctctctcttgtcccagtcaaacagctgacatcaacaaacagagtttgaagtaggaacacatgagaatgtgagagtagaacaacacatgggtgtacaaagatgtacataaaccaaattcacaagtattttgtactgtctyccytcagaagattcctgatagcttcaagtcagacaacccctcacgtgcagcagatggagcatgtaataggaagacttcatagtagtgaacatcttttcaattgtcagattaaaggcattccaactaagaggatttgctagataaattaattctgagcaattacctctgggcttctgggatacttgggtttaagaaaaggtatatgaagtgttttcacaggaattattttatcagtagtcattcccagctatattgagatgtagttcaactgtctatgaattaacctgtcttctcattagtata

SEQ ID NO: 78428 - DNA, 600 bp, Chicken  19866894368041_3
attccaactaagaggatttgctagataaattaattctgagcaattacctctgggcttctgggatacttgggtttaagaaaaggtatatgaagtgttttcacaggaattattttatcagtagtcattcccagctatattgagatgtagttcaactgtctatgaattaacctgtcttctcattagtatagtattattaaaaatatatacatataaaagcaaaaagcaatagcacatacagtccctctgcagatatcttgtggcaaatacttctgtactgcccaactaccaattgttcaacawagaaatcaaaytttctttgtcatgaaaataccagtctgcctcatttttcttgactgattgagaaacatcaaaacaaccgagtgacaaacgttacaagtccccacccaaccagattttgacagcagtttcatatttttctcttgaatcttctggcaaaaggtgattgcattctgacatttgctccattactgatcctgctgtaccagctgccaagcacaccttgcattctttgtgcctcttgcacatctacatacatcaatacaaggagcagatcaccaggagaaaggtatttttagaaac

SEQ ID NO: 78429 - DNA, 600 bp, Chicken  19866894368041_4
gaggatttgctagataaattaattctgagcaattacctctgggcttctgggatacttgggtttaagaaaaggtatatgaagtgttttcacaggaattattttatcagtagtcattcccagctatattgagatgtagttcaactgtctatgaattaacctgtcttctcattagtatagtattattaaaaatatatacatataaaagcaaaaagcaatagcacatacagtccctctgcagatatcttgtggcaaatacttctgtactgcccaactaccaattgttcaacawagaaatcaaaytttctttgtcatgaaaataccagtctgcctcatttttcttgactgattgagaaacatcaaaacaaccgagtgacaaacgttacaagtccccacccaaccagattttgacagcagtttcatatttttctcttgaatcttctggcaaaaggtgattgcattctgacatttgctccattactgatcctgctgtaccagctgccaagcacaccttgcattctttgtgcctcttgcacatctacatacatcaatacaaggagcagatcaccaggagaaaggtatttttagaaacattttccctcg

SEQ ID NO: 78430 - DNA, 600 bp, Chicken  19866894368041_5
aaacgttacaagtccccacccaaccagattttgacagcagtttcatatttttctcttgaatcttctggcaaaaggtgattgcattctgacatttgctccattactgatcctgctgtaccagctgccaagcacaccttgcattctttgtgcctcttgcacatctacatacatcaatacaaggagcagatcaccaggagaaaggtatttttagaaacattttccctcgctaggatctctaaaatgtcgtaactcagactcaagccaagaagcgccgaacagagcaggcagaaacctccacaraggtatcactacgcagcttttcagtggcacttgggaaatcttcaggtgtgacaccccagtcaatagcaatgctcgattacctttgcaatagcaaaggctttgctcatactatctcaagtgcttacagcagtccctttcactctgtcttttatgcagcctttagggagaatgggtttatgtaaagttaccatttctgaatacaaaacatttccaataaatgcggccacaattcagcttataattttataaaccagagaatcttttaagtcaactactctccaaactaattgctactggaat

SEQ ID NO: 78431 - DNA, 600 bp, Chicken  19866894368048_1
ggttaccacctcccaaaggcttcagcaggtccttgcctatggatggtgtggttgcggcatgttgcctgtgagtgcacagttgtgcgggtcagactttttctctagcagggatagacaagatatggtgtaggcacaagatggggaactttattttcccagtgtacaaacagtgatatacatggcagagagtaggctacttcacagattacttcatgcctatcttcagactctgtagcattaagaaaaaaaaatgttaaaaaagaaataagaaaggatttaccagagagaggtaacaggagsgggtaaactctttttgtgttgaaaaacacagacaaaagactttcacgtgagaagggttggggatttaaggacttgcccacacctgagagcctgccatgatgcaccttttcaaaaaaaggcaattttcgacctttctgaaagtcagacctctggtgaggtttcacatttggacatgcaaattaagtaatttagaaatggtagttgcagcagtctgtgttggttaacctccctccaccctccagttctgcagaatttctattttggaaagttgttgctatacatacatacttgtcacttgct

SEQ ID NO: 78432 - DNA, 600 bp, Chicken  19866894368050_1
tgagaattttctctatcaaacagtgttattgtgcgtggttgtatctgttgtagcttccatagaaataaataggaggcattacatttcagagtgacctacatatatgcacctattgtccattaccttttctcatctatccgaatagttatgtggccatgcttcagggagctgtgaggaacagatccaaatgcctgcttctacgaataacttgaatttggaattgagtaattacaacaaatgacactgagatgcctttgctgggagagtcaatagatataaaattcaggtgatgtgtgaaaygtgaattttctgtctaaatagcaaagaagcatgattattaaagggcttttgctttttctggagtggaatgagtgtgtgctaacttcttctatgctttattatgtaaaaacaattggtttgcaggttcatttaygcttggaaaacttttgaactcttggaatcttgtaggatgagaagatggtttcctacccattgtcatgtctgagcttgaggaaagttcctacacagagtattatttgtcacgcactggaaagccagcacattctttccccattcaacgcattgagctatagagacata

SEQ ID NO: 78433 - DNA, 492 bp, Chicken  19866894368050_2
ctatccgaatagttatgtggccatgcttcagggagctgtgaggaacagatccaaatgcctgcttctacgaataacttgaatttggaattgagtaattacaacaaatgacactgagatgcctttgctgggagagtcaatagatataaaattcaggtgatgtgtgaaaygtgaattttctgtctaaatagcaaagaagcatgattattaaagggcttttgctttttctggagtggaatgagtgtgtgctaacttcttctatgctttattatgtaaaaacaattggtttgcaggttcatttaygcttggaaaacttttgaactcttggaatcttgtaggatgagaagatggtttcctacccattgtcatgtctgagcttgaggaaagttcctacacagagtattatttgtcacgcactggaaagccagcacattctttccccattcaacgcattgagctatagagacatagccttatcgcaggtcataagcatgt

SEQ ID NO: 78434 - DNA, 600 bp, Chicken  19866894368052_1
ttccagcatactatgactcactccaagcaaattactcagttttcaagtctatgtattaatactcaatgcttctcctcaagcagtgctcatgtatggtggcctaataaagatcttttgcttctataaaaattagaaaattcattttctcttattccttttaatgaaggttggacagaatatttggtttatctaaatgacatttcctttatttatctttcatttttaaatactcaactaggataagaaatgtggtctgtgatccaaatttttttctgtcccattcaatagattaaaaaaaawggtaaataaaatggttatttgatcagttttgctcacagaacggtaatttcattagccacagaacaattaaaaactgttccctaaagatatctgaagaacagcaaacttcatttttttttttttaagttaccacctaaaataagagcggacacaaaaaaatgaagctggaagttaattcttcctttgttgatttaaaaagaaattcaaaccactgttttatataattcaacagaaacttgtaaacacaattttcagttgtttaatttttttcctctgaatcacgaaagcaccctgtgactg

SEQ ID NO: 78435 - DNA, 599 bp, Chicken  19866894368053_1
  misc_feature (1)..(48): n is any nucleotide
nnnnnnnnnnnnnnnnnnnnnnnnnnnnnnnnnnnnnnnnnnnnnnnncttaaaaggagatagccggggtgataatcttgaccatatttctattaagaaatgtgcaagcccattgcataccactcatctctaaattcctttacttcactgctttactacgttctcaacgcttctaatgccttaaatgctatttttagccacggcttttcccaatgagagcgagaaaagagtgaaggagagatcactgcagcctgaaccacagcgaagcacagagcagctcctgcccccagttacagagtkgccagtgccctctgagccctgccagaggtttccctttgactttcmcagccaaagggcccccaaagtgctcccagatccctgttgtgaggcagcaccaagctgctcttgggcaaacaccaccaaaacacagcacagggagcagcacagctccgctctacagctcccagcaagatgactacgcctttatcacccaacactgggagcagcccaygcctgcaggacctgctgacaaagaccatctcgcttagcttctgctttttttaatgtaagaagatgctcaagcagatctccctcgctgc

SEQ ID NO: 78436 - DNA, 599 bp, Chicken  19866894368053_2
  misc_feature (1)..(3): n is any nucleotide
nnncttaaaaggagatagccggggtgataatcttgaccatatttctattaagaaatgtgcaagcccattgcataccactcatctctaaattcctttacttcactgctttactacgttctcaacgcttctaatgccttaaatgctatttttagccacggcttttcccaatgagagcgagaaaagagtgaaggagagatcactgcagcctgaaccacagcgaagcacagagcagctcctgcccccagttacagagtkgccagtgccctctgagccctgccagaggtttccctttgactttcmcagccaaagggcccccaaagtgctcccagatccctgttgtgaggcagcaccaagctgctcttgggcaaacaccaccaaaacacagcacagggagcagcacagctccgctctacagctcccagcaagatgactacgcctttatcacccaacactgggagcagcccaygcctgcaggacctgctgacaaagaccatctcgcttagcttctgctttttttaatgtaagaagatgctcaagcagatctccctcgctgcccttcaaggttcacgggtatcaaactacagctgggtgggagaaac

SEQ ID NO: 78437 - DNA, 544 bp, Chicken  19866894368053_3
aatgagagcgagaaaagagtgaaggagagatcactgcagcctgaaccacagcgaagcacagagcagctcctgcccccagttacagagtkgccagtgccctctgagccctgccagaggtttccctttgactttcmcagccaaagggcccccaaagtgctcccagatccctgttgtgaggcagcaccaagctgctcttgggcaaacaccaccaaaacacagcacagggagcagcacagctccgctctacagctcccagcaagatgactacgcctttatcacccaacactgggagcagcccaygcctgcaggacctgctgacaaagaccatctcgcttagcttctgctttttttaatgtaagaagatgctcaagcagatctccctcgctgcccttcaaggttcacgggtatcaaactacagctgggtgggagaaacaaaggcaggcaaaccacaaacaagccagggagcctcctggccacctccccccgcactgtttacaactagcacygcgtcaggccgacccaaaccaagcacctgaaaaagcga

SEQ ID NO: 78438 - DNA, 338 bp, Chicken  19866894368053_4
caccaaaacacagcacagggagcagcacagctccgctctacagctcccagcaagatgactacgcctttatcacccaacactgggagcagcccaygcctgcaggacctgctgacaaagaccatctcgcttagcttctgctttttttaatgtaagaagatgctcaagcagatctccctcgctgcccttcaaggttcacgggtatcaaactacagctgggtgggagaaacaaaggcaggcaaaccacaaacaagccagggagcctcctggccacctccccccgcactgtttacaactagcacygcgtcaggccgacccaaaccaagcacctgaaaaagcga

SEQ ID NO: 78439 - DNA, 600 bp, Chicken  19866894368057_1
tatttgttccagactcctgatgcaggctccggtaattaactacgctgagaatgtttcattgagagcacccagaggtgttgaccctacagcccaacctgcacagtctaagatggggtcttcaactccctctgctggcaaaggccataactagagaattaaccaagaaagaaatcctgtcatgtcccgttcccaccagcagctggctacctgagatttgcctctgcaagtaggtgtcttaaagggagattataacacctgaagactcctgacctcccacaaagcactagtttgtgactgggragctctggagatgagtcctgcacatccatcragatggactccatgatcttgagtcccttccaactaaagctattctatgattccaygcatttccttcctaagtgatatcaatagatgacatggaacatggtacctgggttragacaaccaaaagacataacgagagtacccttacagtaagtttcccaagtaccaaagttacatcttcaagtcaaatttactgaagtgaatggtctactgaaggtaacaaagcatcatatgtgagatgggcattctccacttctgagatcacttcttcag

SEQ ID NO: 78440 - DNA, 600 bp, Chicken  19866894368057_2
gtaattaactacgctgagaatgtttcattgagagcacccagaggtgttgaccctacagcccaacctgcacagtctaagatggggtcttcaactccctctgctggcaaaggccataactagagaattaaccaagaaagaaatcctgtcatgtcccgttcccaccagcagctggctacctgagatttgcctctgcaagtaggtgtcttaaagggagattataacacctgaagactcctgacctcccacaaagcactagtttgtgactgggragctctggagatgagtcctgcacatccatcragatggactccatgatcttgagtcccttccaactaaagctattctatgattccaygcatttccttcctaagtgatatcaatagatgacatggaacatggtacctgggttragacaaccaaaagacataacgagagtacccttacagtaagtttcccaagtaccaaagttacatcttcaagtcaaatttactgaagtgaatggtctactgaaggtaacaaagcatcatatgtgagatgggcattctccacttctgagatcacttcttcagcctgaagtcacagaatcataaaagggcttgg

SEQ ID NO: 78441 - DNA, 600 bp, Chicken  19866894368057_3
cagcccaacctgcacagtctaagatggggtcttcaactccctctgctggcaaaggccataactagagaattaaccaagaaagaaatcctgtcatgtcccgttcccaccagcagctggctacctgagatttgcctctgcaagtaggtgtcttaaagggagattataacacctgaagactcctgacctcccacaaagcactagtttgtgactgggragctctggagatgagtcctgcacatccatcragatggactccatgatcttgagtcccttccaactaaagctattctatgattccaygcatttccttcctaagtgatatcaatagatgacatggaacatggtacctgggttragacaaccaaaagacataacgagagtacccttacagtaagtttcccaagtaccaaagttacatcttcaagtcaaatttactgaagtgaatggtctactgaaggtaacaaagcatcatatgtgagatgggcattctccacttctgagatcacttcttcagcctgaagtcacagaatcataaaagggcttggattggaagggatcccaaagattatccagttccaatccccctgccatgggtaggat

SEQ ID NO: 78442 - DNA, 600 bp, Chicken  19866894368057_4
ccataactagagaattaaccaagaaagaaatcctgtcatgtcccgttcccaccagcagctggctacctgagatttgcctctgcaagtaggtgtcttaaagggagattataacacctgaagactcctgacctcccacaaagcactagtttgtgactgggragctctggagatgagtcctgcacatccatcragatggactccatgatcttgagtcccttccaactaaagctattctatgattccaygcatttccttcctaagtgatatcaatagatgacatggaacatggtacctgggttragacaaccaaaagacataacgagagtacccttacagtaagtttcccaagtaccaaagttacatcttcaagtcaaatttactgaagtgaatggtctactgaaggtaacaaagcatcatatgtgagatgggcattctccacttctgagatcacttcttcagcctgaagtcacagaatcataaaagggcttggattggaagggatcccaaagattatccagttccaatccccctgccatgggtaggatagatcaacttgctaatgatcaggatgcctggggccccaccctacctgcctttgga

SEQ ID NO: 78443 - DNA, 599 bp, Chicken  19866894368059_1
  misc_feature (1)..(19): n is any nucleotide
nnnnnnnnnnnnnnnnnnnctgtatgcttaacttgtcagggggtttgcattgctttctagctctaacggcacatttcatttagtaaacatctaagtgttgagaagttttgagcaaagattaagaaaagacgacaaaaaatgactcccagaacaaaacaggcaataggtgcttcaatttttccaacttgtggtttcctgtagggaaaagtgccacttaaattgtttatttcaactgttaatatagagctaaaacttgatttttcagaaaagcaaagtagaatagactatattaattatatyagttaggagatggaaaaataaaaacagattgtgtttccgaatggttttacatttgttcaggaaattttatagttcagaatagatctgtattcattactattattgctaatatatggacttcagtaatcaaaacagcagtgtacaaatgattatgatctattgatcagggacggattactcatccccttccaaataattaagaatttctctcccaagtctagccaaaatgagctggatcctccttaatttcctgttgttttcttctagacaaaccaagcttaagagagacattgatttaa

SEQ ID NO: 78444 - DNA, 600 bp, Chicken  19866894368064_1
ttagaacaattctttcaatcataatactgaaagcataaatatttccatacttcaagtctgttcttagccacccagctctgccttaattctcctcttgaggtatattcacttctgctaaagtgacagccagggccaaacccagaaaagctggaaggtccagaaataacccccctttctgagctgtataaatcccatcgtcatgccaggctaagcatgggggaacactctaccacattatattgagaaaacccccacacaccctcaaaatgcacaagacagtaggaatttgcctcaaccaamcaaagcaaaatcagagtgaggacgstggggtttgagctgctggcaggctctttaatttcagggcactgtagaatatgtaagggagccaggatttcacccacaggagaatactgaaaagttttcgttttattattatgcccgactgtattgtggtttaaaatccacacagggattgccacagcttgttagctggctttaatagttgcattaataaatcctataaactaattgtgcagtgacaaagttaattacattgaaatgagatagtatatttctctacaaatatgataaagaatttat

SEQ ID NO: 78445 - DNA, 600 bp, Chicken  19866894368064_2
actgaaagcataaatatttccatacttcaagtctgttcttagccacccagctctgccttaattctcctcttgaggtatattcacttctgctaaagtgacagccagggccaaacccagaaaagctggaaggtccagaaataacccccctttctgagctgtataaatcccatcgtcatgccaggctaagcatgggggaacactctaccacattatattgagaaaacccccacacaccctcaaaatgcacaagacagtaggaatttgcctcaaccaamcaaagcaaaatcagagtgaggacgstggggtttgagctgctggcaggctctttaatttcagggcactgtagaatatgtaagggagccaggatttcacccacaggagaatactgaaaagttttcgttttattattatgcccgactgtattgtggtttaaaatccacacagggattgccacagcttgttagctggctttaatagttgcattaataaatcctataaactaattgtgcagtgacaaagttaattacattgaaatgagatagtatatttctctacaaatatgataaagaatttataaagagatgcactcatgtctgggag

SEQ ID NO: 78446 - DNA, 600 bp, Chicken  19866894368064_3
ccttctagacccccttctccaccgaacagcaataccagacactccttccaagtggatgttttgagttacttttgggctgtgttaaaaggcaccagataaagaaagagcagcaatcatcagctcagagtagctccatggcacaggggatgttttacctcctctttatcaaatctaatcatcttgccctaaatttaatggagaagctaatcctggcagagctattgtcaccaacaaaccaaagtctccttccaactcatagaaaaggtgatactaaaaacaaggtcattttgggaagctgakgctaacgctgctttgggtattggatgaattgactgcacttcactcagctcagcagcaccaaggaatgtacagaggcaacctcagtgccactgatctgagggtgaagctgcaaacatttgctgcaggtggggtgagtctcttatcaggcactcagcatggcaggaacaccaagtttaaaaacagaaacataaaaaaactgaggtgtcggaaatagaaacctgaacttaagctcttaaatccataattcagctcataaataagtaaatttgaagagtgctgagtatccaattagtaggagct

SEQ ID NO: 78447 - DNA, 600 bp, Chicken  19866894368072_1
aacagctgcctgcagtgcatgggaagggagacaattccttctgaagttatttataggttgctttcgttccggcagccgggggaatcgctgccatccgggcagagaaagtagtcttgaggtcacccccactcagtggaaattaaagttctgcgtcatgctgaaaggaggaacgtttgatgcgagggctggttggagttgggctttcagattatgtagcatccagagcacacggtaggtgagtgctgtacggcaccttttggctctgttggacgtgactgagatatcatcactcctcctgtrttcaccatgaagggaaattaccagaggttgtgactgtgcacacacatgggatcccagaaagggtatgtgcacatatctacagsactcatagccctacatttcrgagtgtttctgtgcggtattagaatgcaaatgattccatctttcaaacaggggagggaagggattgaacagattattttcccccagatttaaaaggaattttttgttctgcagaaacatctcactgtatataatgtgcagaaattctcttcagtcagagatcaagaccacgttccatctgtggggggaatggaggga

SEQ ID NO: 78448 - DNA, 600 bp, Chicken  19866894368072_2
atcgctgccatccgggcagagaaagtagtcttgaggtcacccccactcagtggaaattaaagttctgcgtcatgctgaaaggaggaacgtttgatgcgagggctggttggagttgggctttcagattatgtagcatccagagcacacggtaggtgagtgctgtacggcaccttttggctctgttggacgtgactgagatatcatcactcctcctgtrttcaccatgaagggaaattaccagaggttgtgactgtgcacacacatgggatcccagaaagggtatgtgcacatatctacagsactcatagccctacatttcrgagtgtttctgtgcggtattagaatgcaaatgattccatctttcaaacaggggagggaagggattgaacagattattttcccccagatttaaaaggaattttttgttctgcagaaacatctcactgtatataatgtgcagaaattctcttcagtcagagatcaagaccacgttccatctgtggggggaatggagggaaatcactcrstgcatttagatcagatacragtattctttagagcaccagctttgctgcacttctagaaacgttttcaataaaa

SEQ ID NO: 78449 - DNA, 600 bp, Chicken  19866894368072_3
gaaagtagtcttgaggtcacccccactcagtggaaattaaagttctgcgtcatgctgaaaggaggaacgtttgatgcgagggctggttggagttgggctttcagattatgtagcatccagagcacacggtaggtgagtgctgtacggcaccttttggctctgttggacgtgactgagatatcatcactcctcctgtrttcaccatgaagggaaattaccagaggttgtgactgtgcacacacatgggatcccagaaagggtatgtgcacatatctacagsactcatagccctacatttcrgagtgtttctgtgcggtattagaatgcaaatgattccatctttcaaacaggggagggaagggattgaacagattattttcccccagatttaaaaggaattttttgttctgcagaaacatctcactgtatataatgtgcagaaattctcttcagtcagagatcaagaccacgttccatctgtggggggaatggagggaaatcactcrstgcatttagatcagatacragtattctttagagcaccagctttgctgcacttctagaaacgttttcaataaaatgaaggtttcatttcacttg

SEQ ID NO: 78450 - DNA, 600 bp, Chicken  19866894368072_4
aagggaaattaccagaggttgtgactgtgcacacacatgggatcccagaaagggtatgtgcacatatctacagsactcatagccctacatttcrgagtgtttctgtgcggtattagaatgcaaatgattccatctttcaaacaggggagggaagggattgaacagattattttcccccagatttaaaaggaattttttgttctgcagaaacatctcactgtatataatgtgcagaaattctcttcagtcagagatcaagaccacgttccatctgtggggggaatggagggaaatcactcrstgcatttagatcagatacragtattctttagagcaccagctttgctgcacttctagaaacgttttcaataaaatgaaggtttcatttcacttgcaggtaaayatgttaggctacaggtttgcctcagtgaccacaagagtttaaaaattatattttaaagaagaagaaagctaattttcagtaaaacctattcagcttgataactgcctcgccacctctrctgagtctatgcagtaggctcaggactttgaaatcagcagtccaggggtggagatatgtgactggcagggacgtgaagg

SEQ ID NO: 78451 - DNA, 600 bp, Chicken  19866894368072_5
agggaaattaccagaggttgtgactgtgcacacacatgggatcccagaaagggtatgtgcacatatctacagsactcatagccctacatttcrgagtgtttctgtgcggtattagaatgcaaatgattccatctttcaaacaggggagggaagggattgaacagattattttcccccagatttaaaaggaattttttgttctgcagaaacatctcactgtatataatgtgcagaaattctcttcagtcagagatcaagaccacgttccatctgtggggggaatggagggaaatcactcrstgcatttagatcagatacragtattctttagagcaccagctttgctgcacttctagaaacgttttcaataaaatgaaggtttcatttcacttgcaggtaaayatgttaggctacaggtttgcctcagtgaccacaagagtttaaaaattatattttaaagaagaagaaagctaattttcagtaaaacctattcagcttgataactgcctcgccacctctrctgagtctatgcagtaggctcaggactttgaaatcagcagtccaggggtggagatatgtgactggcagggacgtgaaggc

SEQ ID NO: 78452 - DNA, 600 bp, Chicken  19866894368072_6
gtgactgtgcacacacatgggatcccagaaagggtatgtgcacatatctacagsactcatagccctacatttcrgagtgtttctgtgcggtattagaatgcaaatgattccatctttcaaacaggggagggaagggattgaacagattattttcccccagatttaaaaggaattttttgttctgcagaaacatctcactgtatataatgtgcagaaattctcttcagtcagagatcaagaccacgttccatctgtggggggaatggagggaaatcactcrstgcatttagatcagatacragtattctttagagcaccagctttgctgcacttctagaaacgttttcaataaaatgaaggtttcatttcacttgcaggtaaayatgttaggctacaggtttgcctcagtgaccacaagagtttaaaaattatattttaaagaagaagaaagctaattttcagtaaaacctattcagcttgataactgcctcgccacctctrctgagtctatgcagtaggctcaggactttgaaatcagcagtccaggggtggagatatgtgactggcagggacgtgaaggcactgatgggatggatgaca

SEQ ID NO: 78453 - DNA, 600 bp, Chicken  19866894368072_7
tgtgcggtattagaatgcaaatgattccatctttcaaacaggggagggaagggattgaacagattattttcccccagatttaaaaggaattttttgttctgcagaaacatctcactgtatataatgtgcagaaattctcttcagtcagagatcaagaccacgttccatctgtggggggaatggagggaaatcactcrstgcatttagatcagatacragtattctttagagcaccagctttgctgcacttctagaaacgttttcaataaaatgaaggtttcatttcacttgcaggtaaayatgttaggctacaggtttgcctcagtgaccacaagagtttaaaaattatattttaaagaagaagaaagctaattttcagtaaaacctattcagcttgataactgcctcgccacctctrctgagtctatgcagtaggctcaggactttgaaatcagcagtccaggggtggagatatgtgactggcagggacgtgaaggcactgatgggatggatgacacatcggtacacatgaccacaggtagagggggtagtacaagggkctgagagtaaattcagaagctggagggattagtcaacatg

SEQ ID NO: 78454 - DNA, 600 bp, Chicken  19866894368072_8
atataatgtgcagaaattctcttcagtcagagatcaagaccacgttccatctgtggggggaatggagggaaatcactcrstgcatttagatcagatacragtattctttagagcaccagctttgctgcacttctagaaacgttttcaataaaatgaaggtttcatttcacttgcaggtaaayatgttaggctacaggtttgcctcagtgaccacaagagtttaaaaattatattttaaagaagaagaaagctaattttcagtaaaacctattcagcttgataactgcctcgccacctctrctgagtctatgcagtaggctcaggactttgaaatcagcagtccaggggtggagatatgtgactggcagggacgtgaaggcactgatgggatggatgacacatcggtacacatgaccacaggtagagggggtagtacaagggkctgagagtaaattcagaagctggagggattagtcaacatggttaactgaaatcaaagatgggcacagactctcttcctgtttacttccccttgaagtcaatgggattgtgtgctctgcagctgtcccacagggcagtgccttcatgctgtgccaacca

SEQ ID NO: 78455 - DNA, 600 bp, Chicken  19866894368072_9
tttcaataaaatgaaggtttcatttcacttgcaggtaaayatgttaggctacaggtttgcctcagtgaccacaagagtttaaaaattatattttaaagaagaagaaagctaattttcagtaaaacctattcagcttgataactgcctcgccacctctrctgagtctatgcagtaggctcaggactttgaaatcagcagtccaggggtggagatatgtgactggcagggacgtgaaggcactgatgggatggatgacacatcggtacacatgaccacaggtagagggggtagtacaagggkctgagagtaaattcagaagctggagggattagtcaacatggttaactgaaatcaaagatgggcacagactctcttcctgtttacttccccttgaagtcaatgggattgtgtgctctgcagctgtcccacagggcagtgccttcatgctgtgccaaccacagcacagctatggagatatccatggaggggggaagagcagaaatcctgtagcttgcctgatgccaagctggagagcagccactcctgtttccaggtcaggccgcgggctttcagttccagagttctccattgctgcagatg

SEQ ID NO: 78456 - DNA, 600 bp, Chicken  19866894368074_1
tttgttctcatttcttagggtagaatatggatattataattgtttttggtaatattatactataccactttcagttgatatttataccccaatttgatacttgttgaatagatctgtggaaatgcagcatattctttttttttttttttttaaaaattttggggtatgcttcttctgcaatgaatgcaagtgttgggaaaaaaagaaaaaaaagatagccaatctgcaaagagttacatatatgcaacaagaaaatacaaaagaaaccccacatgatccaaaaaggagctttcagcgtgwgaactgaaaacttaaaacagtaagttgaaatacataagattaaataattgaagttagtcttctttgccaatctttgactcttggctgttggtatttacagatgtctgtaaatttaaaatttaatctaaacaaatttaagacctttgaacttcaatttctgctctatgtattgtgttaatctgattgttttcagagacaagatactaggctagaaatgacttcactttgaaatagtatttctgatttttgataaagacggtagataataaggaaatatccaacagctttgtaacctgggta

SEQ ID NO: 78457 - DNA, 600 bp, Chicken  19866894368079_1
atctctactgtaggaaaataatctaccaatgaaattttgccatttcagccattagcagttaaattctagtcagtgcaccagtgtaaatgtgccaaggcaagggtgagaacactgaaatcactttgagtgtatggccatagcacctctcctcttgagagttttatagcagcagaatacttgtacacggagaagtgctacatgcaaactcaacaactccaacctacagcaaagaattacaacagataaggttatacagattcttcaggaggaacacaggcactgtttattttgacttgcagmagacaatatcaagcaaacaatctttgcaagtccttaccaggtttgtgctctatgactctataattaccaaatagttcatcttcaataagctgtgcagaagcagcaggctgtatgatatggaagaaaaactgctttttgtagtgaaaagagaaaagcagataaaagtaaaaaaatagctctgacgagagataaagatgaaaacaaatgaaatagcagtaatcagaactcaaacatactgaagaagaaaacagaaaaggtgtatttgctgggaaaaagaagcagtttgtgagagagatgtcg

SEQ ID NO: 78458 - DNA, 600 bp, Chicken  19866894368085_1
tagcacacatttttggttctgctggtgttatttttcacctataaacagaatgttctttgaaacactgtaatatatactcacaaatcatccaaaaccatttatgcttataacctcagagcacattaagagcacagtacagacttttcttagatttctgttctccacataatcagaattagaagtgccctcctggtataactcgccatgcttccatacatatctttggaagggccagacagtacttaaagatctgtccttgcaccttcctttccagttactgtgctacacaaagataatttmtgttacacaaggaacaataaaaacaaaagattttaaaatctgtagtccttacccatgagatgcagagtttgtgtgagctgctcttacaccatttttcagatcacttacctcactaacaagcttgttagcactctgggcttgtttaaggaccaggttgtcttcagctgttagagagtgaaagtgagctgcacctttcatcttggaaagatctttcttgtattttatctgaaaagtaagaaaaattataaaacagatgcctaccttttcaatgctgctttttggactggctatcagagctga

SEQ ID NO: 78459 - DNA, 599 bp, Chicken  19866894368087_1
  misc_feature (1)..(7): n is any nucleotide
nnnnnnnttcttatttgttgcatcactacttctgggcacaactgttaaaaaaagaaccatcatctgtgtacttgaatgcaaactcagacaacgtagtgctggttagaccgtgctttgtttggacgtatagacaaaagcctcattcaatctatttcactgctgcccaagtaacactgaatgcaaatcacagatcatttgcccttactactctgtcatttgttaaatgtatttcctaactgggaaacaaaacccacctgattttactgaagacagttttcccaacttgaaattctgttaggsctctctccattattgacagtctgtcagaaatgggaccgcttatacacatctggatacagtactgacaacttcatggagatatctcttaaattgactgagtttggatttgagacacaaatcccaagctccayaatatcagactctttcctctctgtctcccttcctgcccctcctctcacgttgctctcttagtaaatttagtacaactattactcattaaacagtgcttagctgaggagccagctttaatagctgggtaattcttaattcactttacattaaaataataaatctcaggg

SEQ ID NO: 78460 - DNA, 600 bp, Chicken  19866894368087_2
caaaagcctcattcaatctatttcactgctgcccaagtaacactgaatgcaaatcacagatcatttgcccttactactctgtcatttgttaaatgtatttcctaactgggaaacaaaacccacctgattttactgaagacagttttcccaacttgaaattctgttaggsctctctccattattgacagtctgtcagaaatgggaccgcttatacacatctggatacagtactgacaacttcatggagatatctcttaaattgactgagtttggatttgagacacaaatcccaagctccayaatatcagactctttcctctctgtctcccttcctgcccctcctctcacgttgctctcttagtaaatttagtacaactattactcattaaacagtgcttagctgaggagccagctttaatagctgggtaattcttaattcactttacattaaaataataaatctcagggtgtgttttcctgagatattcttttttgcagtaacttgacctttttaaccattactcttacattctcctctttataaaagctaccttgatgacagatgtatttttctaacttccctgtgcacctcagaacatc

SEQ ID NO: 78461 - DNA, 600 bp, Chicken  19866894368089_1
ttgctgagtgccaggcctgggctcaggcacaaaccagtcctgggatggctgtgcagccatgtgcagactgaggcctgtgctctgtcttgtcatccccaatcacctcatcagccagcaacaagtttgtttccccaacagacttcagctctgttcccatccaggctgactaagataatgaatttcagtactaatccttttaggctgaaaacaagattccagaagatatttgttacgtgcagccttattccatgagggaagttgcagtgtatatttcccatacgtatttgcaaaatccttctraatatacgcctttacttttactagcttcttgtcatcacagaaagcactgataggcagcagtacacccctataggccatctctgtagcaatctcctgagcagcctaatgagtttatagcccaattaaggcctgcaggaaactcatctgatttctttcagctgcaaaggtggagatcagccttcatttgagggcagagccctttggttcttggctctttgttctgcttctggtttcctcacccctgcttgtagggattgtctcagatgatgctcagccaaactctgagtactgttattcaat

SEQ ID NO: 78462 - DNA, 600 bp, Chicken  19866894368092_1
gcttctgtgttacactttgctccaagcaaagctttcggcccatgctgttttgctgtcctgtgctgtcagaagcagtcctgtgttgggagcagtaccctctgagcactctggagaattgcatgtctccatagagacttaaatctcatttttcttcttcttgagtgctctcattttcacatgaatatgtgggtatccacgctaaatattctcctgcaaatctcctttttcttcctgcatttattgcttttaagtttgtttgttctgaggtggaggaagaaaccccaaggggagacacaatgygctgcctggcagttctgctgggctgcagcactgctgtccctgttctgtcagagcaggaaaaggtggttattattaccattttataatgtgtagcttcaggtacattcctgcttccctaagcagtttgagttgctgtgcagatgttactgtaagaccctgttccctcttaacctgtctgctttcaacccaatgctgaatggcccatccagctgacactgtggctctttgttccctcctagggctctgggacctccagctctgctgccaccaccccgtcagtgtccacccctgtcaccggcc

SEQ ID NO: 78463 - DNA, 599 bp, Chicken  19866894368096_1
  misc_feature (1)..(14): n is any nucleotide
nnnnnnnnnnnnnncaagggatctattgctgcatttgcaatgttcattacgacaccactgttccagttttcatcctcacttttgtaaaagagctatttatcttttttttcaagcttatgaatctgatagctgtatgtcagttttgtaagcctgataaataccttcaggtagaggagatctaaggaaaagctggtgggcccatgacagggtgaactcatcatgcaggacagtgctgaaaagcattgaggtcaaggaacatagagggctggctgcttccccagggataaggaactaggagtyaaggggaccctagagcctgctgtgcccttaccaacagggtgctgtcccacaagatgtcaacatagcatgcatagctgggtgctggtaacagggcccatcagctgccatagactcaaaagtaaatcaagtccaggctccaagcagataatcctgtcaggagcagcaggttctggagccaaagacaaggctggagagatggctacagtctgcatccaaagtctmcctaagagacagaggcagaaatgagctacaacatacatgcaaggggcccatcctggaggcagccaaccacagtatag

SEQ ID NO: 78464 - DNA, 600 bp, Chicken  19866894368096_2
caggacagtgctgaaaagcattgaggtcaaggaacatagagggctggctgcttccccagggataaggaactaggagtcaaggggaccctagagcctgctgtgcccttaccaacagggtgctgtcccacaagatgtcaacatagcatgcatagctgggtgctggtaacagggcccatcagctgccatagactcaaaagtaaatcaagtccaggctccaagcagataatcctgtcaggagcagcaggttctggagccaaagacaaggctggagagatggctacagtctgcatccaaagtctmcctaagagacagaggcagaaatgagctacaacatacatgcaaggggcccatcctggaggcagccaaccacagtatagattccaggtcccctcagcaatggaccagcacagctacagtctgcctcaggcaggaaataagctgggcttcctgagagggcctagttgaggttgatcaatgagctctccagcacagtcaggccctcaagagttgcttgttgttatttattcatttaaaatttcttctttctttttccaccaactgcagacctaacatgctgaagacaggttgctttaatttgtc

SEQ ID NO: 78465 - DNA, 600 bp, Chicken  19866894368097_1
caggttcactttcagctctatgtggctgaaggctccagcagttcaggagtcaggtattcattcctggggtcaagtcatctgacaagtgtcacagtggagagaaccttctgcatccctttttgctcaggcttgcaagatttctttgaacttcaagttgtgcccttcagtgctatcagagaaacgagtactttggtgacagcagtgggacttctacccatgcacacaaaaaaggaagcttttgagatccttttggcatatgaatcattcagttacttttcagtttggattgtctccagttcyaatttagaaggcatatcaaayggctggrttataaaggaatgggcaacgatgcttccctgtgcttacagatgctcagggatgtcatatccccttctccctccccctgatcttcagcttctccagaaaatcagtaatatgaaaaggcactgtgtttgaaggcataagatgaccacagctgaagaytctgagctgtttttaagacrtttagttatgattccactctctattttaataaccactgctggagcattgcttcagccagaaaagaagatgaatgtctctcatgccctgacgtacaag

SEQ ID NO: 78466 - DNA, 600 bp, Chicken  19866894368097_2
gtggctgaaggctccagcagttcaggagtcaggtattcattcctggggtcaagtcatctgacaagtgtcacagtggagagaaccttctgcatccctttttgctcaggcttgcaagatttctttgaacttcaagttgtgcccttcagtgctatcagagaaacgagtactttggtgacagcagtgggacttctacccatgcacacaaaaaaggaagcttttgagatccttttggcatatgaatcattcagttacttttcagtttggattgtctccagttcyaatttagaaggcatatcaaayggctggrttataaaggaatgggcaacgatgcttccctgtgcttacagatgctcagggatgtcatatccccttctccctccccctgatcttcagcttctccagaaaatcagtaatatgaaaaggcactgtgtttgaaggcataagatgaccacagctgaagaytctgagctgtttttaagacrtttagttatgattccactctctattttaataaccactgctggagcattgcttcagccagaaaagaagatgaatgtctctcatgccctgacgtacaagaaaaacaccatggggaaatct

SEQ ID NO: 78467 - DNA, 600 bp, Chicken  19866894368097_3
aaggctccagcagttcaggagtcaggtattcattcctggggtcaagtcatctgacaagtgtcacagtggagagaaccttctgcatccctttttgctcaggcttgcaagatttctttgaacttcaagttgtgcccttcagtgctatcagagaaacgagtactttggtgacagcagtgggacttctacccatgcacacaaaaaaggaagcttttgagatccttttggcatatgaatcattcagttacttttcagtttggattgtctccagttcyaatttagaaggcatatcaaayggctggrttataaaggaatgggcaacgatgcttccctgtgcttacagatgctcagggatgtcatatccccttctccctccccctgatcttcagcttctccagaaaatcagtaatatgaaaaggcactgtgtttgaaggcataagatgaccacagctgaagaytctgagctgtttttaagacrtttagttatgattccactctctattttaataaccactgctggagcattgcttcagccagaaaagaagatgaatgtctctcatgccctgacgtacaagaaaaacaccatggggaaatctaactatc

SEQ ID NO: 78468 - DNA, 600 bp, Chicken  19866894368097_4
agtactttggtgacagcagtgggacttctacccatgcacacaaaaaaggaagcttttgagatccttttggcatatgaatcattcagttacttttcagtttggattgtctccagttcyaatttagaaggcatatcaaayggctggrttataaaggaatgggcaacgatgcttccctgtgcttacagatgctcagggatgtcatatccccttctccctccccctgatcttcagcttctccagaaaatcagtaatatgaaaaggcactgtgtttgaaggcataagatgaccacagctgaagaytctgagctgtttttaagacrtttagttatgattccactctctattttaataaccactgctggagcattgcttcagccagaaaagaagatgaatgtctctcatgccctgacgtacaagaaaaacaccatggggaaatctaactatcccaaatggacaatatcaaaggcaaagggctgcaatggatgaggtaatattcatgttgtcatgcagtgctgtagacagcctaatctcatctgcttactgcagtggtgccatccacctgccaagcttcaggtttttatagaatcacagaatcataga

SEQ ID NO: 78469 - DNA, 600 bp, Chicken  19866894368097_5
gggacttctacccatgcacacaaaaaaggaagcttttgagatccttttggcatatgaatcattcagttacttttcagtttggattgtctccagttcyaatttagaaggcatatcaaayggctggrttataaaggaatgggcaacgatgcttccctgtgcttacagatgctcagggatgtcatatccccttctccctccccctgatcttcagcttctccagaaaatcagtaatatgaaaaggcactgtgtttgaaggcataagatgaccacagctgaagaytctgagctgtttttaagacrtttagttatgattccactctctattttaataaccactgctggagcattgcttcagccagaaaagaagatgaatgtctctcatgccctgacgtacaagaaaaacaccatggggaaatctaactatcccaaatggacaatatcaaaggcaaagggctgcaatggatgaggtaatattcatgttgtcatgcagtgctgtagacagcctaatctcatctgcttactgcagtggtgccatccacctgccaagcttcaggtttttatagaatcacagaatcatagaatcacagaatctcaaggttg

SEQ ID NO: 78470 - DNA, 600 bp, Chicken  19866894368097_6
accatggggaaatctaactatcccaaatggacaatatcaaaggcaaagggctgcaatggatgaggtaatattcatgttgtcatgcagtgctgtagacagcctaatctcatctgcttactgcagtggtgccatccacctgccaagcttcaggtttttatagaatcacagaatcatagaatcacagaatctcaaggttggaaaggacctataagatcatctagtccaactgtcctcccataagggaccagtaaggatcactgagtccaactcctggctccacacagcactacccaaaaatcrgacaaaatgcctgggagtatcatccagatacttcttgaactatgacagcttggagccatgaccactgccctgggcagcctgttccatgcccaccaccatgggtaaatcggtctgaaccataacatcatgggctgcgtctccatgggacatctaacagaggttcttattctacttttgcacagttgagaaaaaaggaaggaagtgacacaatacttttgtcctcccagactaggcttggtacttggctgctgcagaaatagttcctcctagggaactattctgcctagggaaagcttccag

SEQ ID NO: 78471 - DNA, 600 bp, Chicken  19866894368104_1
gtaagattcccctctcattgatacaagaaatgcatgttgctgaatgtttaagatcacaagaaggttgggaaagaagtccattagtgacctttgacaaattattccagtacgtgtggccttttgaacacgtgtttctggtgcatacatggtttgcacactggtaccgtggatatgaacagccaagctaaaggcaaagacaagtggaagtttgtcccagtatgcttacatcttatttctttgggatgagtttgaacgaagctgaatacaaatcagccaattaattttcttggcctaattaaygtgtgtctgataatacagtgagaatgtttttattttacatactattttcacttcaaaagtgtgggtgcagtatgtggtcagatgctaagattttgacgtactctgcaggacccgccatgtagctgctgccatttagaataaatcgcattccactgtagttttaaaaggacaccctccgctctgcattcggatcaaagacagtagagaaaaagaagaagttgcacagatgcagcagtgctgccggtggaaaaactgcgtgaggaacacctaaagagttccttgcaaagcagctcatgctgt

SEQ ID NO: 78472 - DNA, 600 bp, Chicken  19866894368107_1
attctcccatttgctaattagtcattttaacaaacaaaaacggtctttcccaaggaacagaacaaaagccaaagagggaagtactcacattcctttgagccgctgccacattttctctgcatgtcctcctatttgatactttatagaagtgctttccagttcccgagttgtttccgttgctcgagcccccatcgttactgtcctacagtgatacagttatagtcaggctcagcagcaagtaaaagcattcctcagtccactacaaatgtcagaagatccacgcatgttagacagtagcakctttcacatcaaaacacatcagaattacaagagctgagggatgattctgcctgaatcactactcacttgggtagaaaaatccactcttcccccccacaccagcacagagcagcacacagctcctctgacctcacgagtctaatccatacgtgtgagccagctactacactaccgactgcctgcacaggctccttcctcacgcactttgcctgcagtaggaatatgcacagaagcacaaaagattccttaaaacagactataatgcattgccatgcaggataaacgtgaatggttttaacg

SEQ ID NO: 78473 - DNA, 600 bp, Chicken  19866894368108_1
acgaaatcctgcagagaaaataccttccgaagcccagaaggttttaatcatggaagcacccagctgagtaacaatttacttagaatttataatgctgacattcataaaaggaagctgatgctttctctggtgtacgtgtttgacaatttttttgtaatttgcaggtatgcaaaaggggatgatgaaacagcttaaaatgatgatgaaaacttgttttcttatatgttgatgtactagaaaaagtgatactgtttaaaggttctttctcatgtgcattagctctcatatttgatgatagasaattattaccactggtgttttggtgtggacaataaaaaaaatagctaaaytcttcctgaaattactagttattttattattttattcctgacttcctcagcttttggtccagaagaaaaggagaaaaacaaacaaacaaaaaaaaaggtgggrggagatggaagtcaaaaccaaagygtcattaaataaatgstaatgrtgacattattatcctctcaacttgttagctgtgaaactrtgcacaatgattgtggaagacccaactgcagctcttttctctgccaagggggttatgaacct

SEQ ID NO: 78474 - DNA, 600 bp, Chicken  19866894368108_2
tggaagcacccagctgagtaacaatttacttagaatttataatgctgacattcataaaaggaagctgatgctttctctggtgtacgtgtttgacaatttttttgtaatttgcaggtatgcaaaaggggatgatgaaacagcttaaaatgatgatgaaaacttgttttcttatatgttgatgtactagaaaaagtgatactgtttaaaggttctttctcatgtgcattagctctcatatttgatgatagasaattattaccactggtgttttggtgtggacaataaaaaaaatagctaaaytcttcctgaaattactagttattttattattttattcctgacttcctcagcttttggtccagaagaaaaggagaaaaacaaacaaacaaaaaaaaaggtgggrggagatggaagtcaaaaccaaagygtcattaaataaatgstaatgrtgacattattatcctctcaacttgttagctgtgaaactrtgcacaatgattgtggaagacccaactgcagctcttttctctgccaagggggttatgaacctggctcgtgtcattttctctcttcactttgtcttactgcatggtacgaatt

SEQ ID NO: 78475 - DNA, 600 bp, Chicken  19866894368108_3
gtaatttgcaggtatgcaaaaggggatgatgaaacagcttaaaatgatgatgaaaacttgttttcttatatgttgatgtactagaaaaagtgatactgtttaaaggttctttctcatgtgcattagctctcatatttgatgatagasaattattaccactggtgttttggtgtggacaataaaaaaaatagctaaaytcttcctgaaattactagttattttattattttattcctgacttcctcagcttttggtccagaagaaaaggagaaaaacaaacaaacaaaaaaaaaggtgggrggagatggaagtcaaaaccaaagygtcattaaataaatgstaatgrtgacattattatcctctcaacttgttagctgtgaaactrtgcacaatgattgtggaagacccaactgcagctcttttctctgccaagggggttatgaacctggctcgtgtcattttctctcttcactttgtcttactgcatggtacgaattgttccaggcagaactgaattgcttcagtagaaattcctagagaagactcatttgcaatggagctgtgtatgtttgggcagctaaggtcaccatttctgttact

SEQ ID NO: 78476 - DNA, 600 bp, Chicken  19866894368108_4
gatgatgaaacagcttaaaatgatgatgaaaacttgttttcttatatgttgatgtactagaaaaagtgatactgtttaaaggttctttctcatgtgcattagctctcatatttgatgatagasaattattaccactggtgttttggtgtggacaataaaaaaaatagctaaaytcttcctgaaattactagttattttattattttattcctgacttcctcagcttttggtccagaagaaaaggagaaaaacaaacaaacaaaaaaaaaggtgggrggagatggaagtcaaaaccaaagygtcattaaataaatgstaatgrtgacattattatcctctcaacttgttagctgtgaaactrtgcacaatgattgtggaagacccaactgcagctcttttctctgccaagggggttatgaacctggctcgtgtcattttctctcttcactttgtcttactgcatggtacgaattgttccaggcagaactgaattgcttcagtagaaattcctagagaagactcatttgcaatggagctgtgtatgtttgggcagctaaggtcaccatttctgttactttcattgtactgaaacatttatat

SEQ ID NO: 78477 - DNA, 600 bp, Chicken  19866894368108_5
aaaatgatgatgaaaacttgttttcttatatgttgatgtactagaaaaagtgatactgtttaaaggttctttctcatgtgcattagctctcatatttgatgatagasaattattaccactggtgttttggtgtggacaataaaaaaaatagctaaaytcttcctgaaattactagttattttattattttattcctgacttcctcagcttttggtccagaagaaaaggagaaaaacaaacaaacaaaaaaaaaggtgggrggagatggaagtcaaaaccaaagygtcattaaataaatgstaatgrtgacattattatcctctcaacttgttagctgtgaaactrtgcacaatgattgtggaagacccaactgcagctcttttctctgccaagggggttatgaacctggctcgtgtcattttctctcttcactttgtcttactgcatggtacgaattgttccaggcagaactgaattgcttcagtagaaattcctagagaagactcatttgcaatggagctgtgtatgtttgggcagctaaggtcaccatttctgttactttcattgtactgaaacatttatatattctttcagagggaa

SEQ ID NO: 78478 - DNA, 600 bp, Chicken  19866894368108_6
atgatgaaaacttgttttcttatatgttgatgtactagaaaaagtgatactgtttaaaggttctttctcatgtgcattagctctcatatttgatgatagasaattattaccactggtgttttggtgtggacaataaaaaaaatagctaaaytcttcctgaaattactagttattttattattttattcctgacttcctcagcttttggtccagaagaaaaggagaaaaacaaacaaacaaaaaaaaaggtgggrggagatggaagtcaaaaccaaagygtcattaaataaatgstaatgrtgacattattatcctctcaacttgttagctgtgaaactrtgcacaatgattgtggaagacccaactgcagctcttttctctgccaagggggttatgaacctggctcgtgtcattttctctcttcactttgtcttactgcatggtacgaattgttccaggcagaactgaattgcttcagtagaaattcctagagaagactcatttgcaatggagctgtgtatgtttgggcagctaaggtcaccatttctgttactttcattgtactgaaacatttatatattctttcagagggaatatgaa

SEQ ID NO: 78479 - DNA, 600 bp, Chicken  19866894368108_7
aaaagtgatactgtttaaaggttctttctcatgtgcattagctctcatatttgatgatagasaattattaccactggtgttttggtgtggacaataaaaaaaatagctaaaytcttcctgaaattactagttattttattattttattcctgacttcctcagcttttggtccagaagaaaaggagaaaaacaaacaaacaaaaaaaaaggtgggrggagatggaagtcaaaaccaaagygtcattaaataaatgstaatgrtgacattattatcctctcaacttgttagctgtgaaactrtgcacaatgattgtggaagacccaactgcagctcttttctctgccaagggggttatgaacctggctcgtgtcattttctctcttcactttgtcttactgcatggtacgaattgttccaggcagaactgaattgcttcagtagaaattcctagagaagactcatttgcaatggagctgtgtatgtttgggcagctaaggtcaccatttctgttactttcattgtactgaaacatttatatattctttcagagggaatatgaaaggaaaaaggagctgtcctaaccagaggggacaatgctt

SEQ ID NO: 78480 - DNA, 599 bp, Chicken  19866894368114_1
  misc_feature (1)..(78): n is any nucleotide
nnnnnnnnnnnnnnnnnnnnnnnnnnnnnnnnnnnnnnnnnnnnnnnnnnnnnnnnnnnnnnnnnnnnnnnnnnnnnntttaatagctggttttgaagaaatttctctcactgcagagttctaacagactttatctctttgcttccagaaatcccactgtggaatggatcatccattgtttacgtagcctgggaatccatgtgtctcataatgcataagcacatgagaaatacctgatctactttaaagaagttgccatatctttatgacatagtacagacctctgcagagggccccagragcaacacagttatgctagtggagtgttatgctgcatgaattctcttacaatggctaagtagctggggagattatttttcaggctgaatgcttccttgacagagctatttccagttttgggttaaattcattccaaatgtagagcttcacaaatccttcctgaaatcaaaatgtagtcaatgtcatctggcatgctgaggagttctttcatccatgaaacctggagcactttagagataaccatagctatgtattacacacataaccccctactgctttgatgcagtctactgaccttg

SEQ ID NO: 78481 - DNA, 599 bp, Chicken  19866894368115_1
  misc_feature (1)..(11): n is any nucleotide
nnnnnnnnnnnttttttttccccctcctacacccagtattttgctgtttctcctggcagcccatcggcgacggcagctttgcccccttggcctccggtccctttgtggggtcggggtgcagccagaagccgcctccccctgtctggcatttgcagggccgtgggaggaacggccccgtttgtcccaaaggtcagggaaatgccagtgaggccgcgctgtgggtgattgccaggcgggtggcagcggctgctgctgggtgctgtgcagtctgcagggtgggatggatccggcatggcctgytccgcacgctgtgctccctggggtccratcccggctgagcagagctcactgtgggctttgtggggcagctctgtgctggctgtgctgcttcgtttggttacgctgagttttctccaattggagactggggggcgcggggcccccgacgaggggctttggtgaggcgggctgcaagccgatccccttttgtggttttgctgttttggatgatacaatttgttattccaagaattacccggcaaatggaccccattagcccagtccccggagcactgcgcttcgtctgcgctcacctcggg

SEQ ID NO: 78482 - DNA, 600 bp, Chicken  19866894368115_2
tacacccagtattttgctgtttctcctggcagcccatcggcgacggcagctttgcccccttggcctccggtccctttgtggggtcggggtgcagccagaagccgcctccccctgtctggcatttgcagggccgtgggaggaacggccccgtttgtcccaaaggtcagggaaatgccagtgaggccgcgctgtgggtgattgccaggcgggtggcagcggctgctgctgggtgctgtgcagtctgcagggtgggatggatccggcatggcctgytccgcacgctgtgctccctggggtccratcccggctgagcagagctcactgtgggctttgtggggcagctctgtgctggctgtgctgcttcgtttggttacgctgagttttctccaattggagactggggggcgcggggcccccgacgaggggctttggtgaggcgggctgcaagccgatccccttttgtggttttgctgttttggatgatacaatttgttattccaagaattacccggcaaatggaccccattagcccagtccccggagcactgcgcttcgtctgcgctcacctcggggcggctgcagcgcccgcagcccagcagc

SEQ ID NO: 78483 - DNA, 599 bp, Chicken  19866894368116_1
  misc_feature (1)..(5): n is any nucleotide
nnnnnctgaggttgagagtaaagcttcttttccttcctgggaaggagcaaaggtagtgtgatactaaggacttcatacactcccaacagaacggttttgcatacaaatcctcatatctaatgatagctttgaaaatttaagattctgtatgtattgtaccagtacttcagcctaaaatgaattacacaagccactggttaatggtgtccctcaaacctttagaagaccccattgttattctttatgtgttatgtaaagcaaagagtactttcaattaaatatttcaggattcttaagcaygctattggaagtaaaactagcctgagttgcctgttatgagcccagcatggtaaagattctctatttgtttatatgtctgtatatgtgtaaatatccactaaactcccatatacacagtaggaaaaaaaagagggagagagggaaatacgcatgackgatgcacattttacctcagttctattttttatgtgttttgaaatagaccactggaagtagtctgtacaatttagctcttctttattgcagaattgcaaggatcatctagctgctggaaatcttttcttgatttgacagctggg

SEQ ID NO: 78484 - DNA, 600 bp, Chicken  19866894368116_2
taccagtacttcagcctaaaatgaattacacaagccactggttaatggtgtccctcaaacctttagaagaccccattgttattctttatgtgttatgtaaagcaaagagtactttcaattaaatatttcaggattcttaagcaygctattggaagtaaaactagcctgagttgcctgttatgagcccagcatggtaaagattctctatttgtttatatgtctgtatatgtgtaaatatccactaaactcccatatacacagtaggaaaaaaaagagggagagagggaaatacgcatgackgatgcacattttacctcagttctattttttatgtgttttgaaatagaccactggaagtagtctgtacaatttagctcttctttattgcagaattgcaaggatcatctagctgctggaaatcttttcttgatttgacagctgggttttaaaataagagagtgcagtctgttgttgtaggtcagactgctatgtctatatacgcagaattaatgccatcatgaggcatttcagcagaaagccttgttctcttcactaatgtttaggaaatcatgaaattttgtacctgaataaagataggaa

SEQ ID NO: 78485 - DNA, 600 bp, Chicken  19866894368131_1
cctcagaagagagatgctcctgccctttgatcatcttcattttcatcctctggacctgcttgaacagctctgtatccttcctttgctggaggccctaggcctagacacagtactccatgtgggtactgtgaggtcagagtagagggggagaatcacctccctcgctctgctagccacccttttttgatgcagcctgagatatagttggccttgtgggctgcaagcacacactgttggctaatattcagctttttgtccatcagaacccccaaatccttcttcacagggctgttcttaatragttcttatattacacacrtatctggaattaccccaacccaaacaacaccttgcacttgggctttttgaacctcattaggttctcatgggcccacttttcaagcctgtccaggtccttctgaatggcatcccttccttctatcacgtcaattgaactgttcagtttagtgtcatctacaaacttgctgagatgcactcagtcccgctgtctatgctgttgataaagatgttgaagaaagccagtcccagaatggaacccttagggacaaaacttgtgattggcctccacttgaaagcaga

SEQ ID NO: 78486 - DNA, 600 bp, Chicken  19866894368131_2
ctgccctttgatcatcttcattttcatcctctggacctgcttgaacagctctgtatccttcctttgctggaggccctaggcctagacacagtactccatgtgggtactgtgaggtcagagtagagggggagaatcacctccctcgctctgctagccacccttttttgatgcagcctgagatatagttggccttgtgggctgcaagcacacactgttggctaatattcagctttttgtccatcagaacccccaaatccttcttcacagggctgttcttaatragttcttatattacacacrtatctggaattaccccaacccaaacaacaccttgcacttgggctttttgaacctcattaggttctcatgggcccacttttcaagcctgtccaggtccttctgaatggcatcccttccttctatcacgtcaattgaactgttcagtttagtgtcatctacaaacttgctgagatgcactcagtcccgctgtctatgctgttgataaagatgttgaagaaagccagtcccagaatggaacccttagggacaaaacttgtgattggcctccacttgaaagcagagcaattaaaaacagccctc

SEQ ID NO: 78487 - DNA, 600 bp, Chicken  19866894368137_1
agggaccatcaggtataagagccttgaagtcatagctggagaccttctgtggaggcattggagtcccagtgccaatcccatcacctgtttcctcttctgctaagctcaaagccatggctcacacttctcccttacctgtgcatggtgtgcctgcctgcctgtgtgatgtgctcccataccattaaaaaacaaatggtaaaacatatttgctctgcacggccttggcttcacaaactctcttcccctggctcactccactgctgtgagcagccacactggtgccagcagctctgcctgtarcagcaacaatattcactgcttaaatatttgcaggatcactgtctgaattggcattctttccaaagctatctgggctccatgaaaaactcgtggaataaacacagtaacacagggccagctcctcagctagtgctagtcagtttgattctgtgtaagccaaatggaggatttgctcttcctggtgtctgcctaagatatgcaaaataatgaacaatgctagcaaatgtacacacagttcagtggtgaattggtgcatcttttcatttattgtcttgatttttctgtttcatactgctggga

SEQ ID NO: 78488 - DNA, 599 bp, Chicken  19866894368140_1
  misc_feature (1)..(15): n is any nucleotide
nnnnnnnnnnnnnnntgtctgcattgcactctgagcggtgcaagctgaggcacttggcttttttgtctacgagacccaaatgtgagcagagggaaagggatgcgcacggatctcgctgccccatcacggtcctgggcaccctcctgctgctcccctgcgccccggggacagctgacagcgggggaactgcagccgactccaagagcagagacaaatagctgctctcagagcccctctgcttcccactgcgttctgaacatcaggcagaaaaattccccttaaacccttgaattccatccrgactaaygccgatcccaatggccrggtcctaccccccggctccagctctcccccagcctggcccagcccccgagcccccgttttgcacaccaatctcacaccctgaaccgggacaactgaaccttttgtttctgcacggctgcaactgctgctgctgcgctcctgcgaggcgaagcggggcggcacacattgatactcactgtgcggcagcgcgggctccacgctcacattatggctctggttggtgtggctgaagcttttctttgggtttatcttccacttcggagactgcgttttgt

SEQ ID NO: 78489 - DNA, 599 bp, Chicken  19866894368140_2
  misc_feature (1)..(8): n is any nucleotide
nnnnnnnntgtctgcattgcactctgagcggtgcaagctgaggcacttggcttttttgtctacgagacccaaatgtgagcagagggaaagggatgcgcacggatctcgctgccccatcacggtcctgggcaccctcctgctgctcccctgcgccccggggacagctgacagcgggggaactgcagccgactccaagagcagagacaaatagctgctctcagagcccctctgcttcccactgcgttctgaacatcaggcagaaaaattccccttaaacccttgaattccatccrgactaaygccgatcccaatggccrggtcctaccccccggctccagctctcccccagcctggcccagcccccgagcccccgttttgcacaccaatctcacaccctgaaccgggacaactgaaccttttgtttctgcacggctgcaactgctgctgctgcgctcctgcgaggcgaagcggggcggcacacattgatactcactgtgcggcagcgcgggctccacgctcacattatggctctggttggtgtggctgaagcttttctttgggtttatcttccacttcggagactgcgttttgttgtcctt

SEQ ID NO: 78490 - DNA, 600 bp, Chicken  19866894368140_3
tgcactctgagcggtgcaagctgaggcacttggcttttttgtctacgagacccaaatgtgagcagagggaaagggatgcgcacggatctcgctgccccatcacggtcctgggcaccctcctgctgctcccctgcgccccggggacagctgacagcgggggaactgcagccgactccaagagcagagacaaatagctgctctcagagcccctctgcttcccactgcgttctgaacatcaggcagaaaaattccccttaaacccttgaattccatccrgactaaygccgatcccaatggccrggtcctaccccccggctccagctctcccccagcctggcccagcccccgagcccccgttttgcacaccaatctcacaccctgaaccgggacaactgaaccttttgtttctgcacggctgcaactgctgctgctgcgctcctgcgaggcgaagcggggcggcacacattgatactcactgtgcggcagcgcgggctccacgctcacattatggctctggttggtgtggctgaagcttttctttgggtttatcttccacttcggagactgcgttttgttgtccttcggatgtaaagggatcag

SEQ ID NO: 78491 - DNA, 600 bp, Chicken  19866894368149_1
ctggcagaagaaactggcactcattgtgtcctaccccattcagggaaacatgtctgtgctcattttcttggaacactctgtttgcacatcccagtaaacagcactgccacaaaaaagcccctgctctgcccccagtgtttgcctgtggctgcactcaaagctgagagtgcaggtgaagagctcagcttgagaggtaccaaccttaaaatctgtagagagttaagtggcagtaagttacactagctcaatgcacaaaacagaagacaaacagaacaaactgtttctccctccattccaaastcagttctggaaaagaattacatgaaacccaagggaaatcacatacccatccttctgctgtcttacccagctgttagcttttagattttcaaggagtagcacagaaggaattctgcacattgcccgcacctctgtataaatcagcctgctttccctccacaaactgttgccgtgtataacattgaaagctgccagcaccctcagggccagaaggttatggtaggtttccacctctgacttctcactcctcctttgagcacagcagccaggtaacctggtggcacatttcaggaaaggtgg

SEQ ID NO: 78492 - DNA, 600 bp, Chicken  19866894368151_1
tgaagtgaacagaaagtattttccgggtgttgacctgataatgaagacattaagcacctcacctcgcatataaattccaatttcaattgaccttttcaagcctgtggttcataacacaggcgaacaagtgccatttccttcaatacaaccaatcacaaggaaaccagcaacaagatacgtccagacagactgacatgagttcacagaccattattcctcaccactcagcccttcgcttgctccaccatgccggagggtgtcgagcagtgtctggcgtgccctgaaataccctggcactgygcctgatgcctttcctcctctacatccccttttgaactgttctaatggttttctcttatgtcctgttgcttcccatcactgcaaaattaactcagcatttcagcttcatggaagacacagcatacgttttcctccttctrcatatgcttatgttccactagcattaatggacattacagtcatgcactgaacgcataccattaaggcttcctgaattaaatactgcaagatcaaacgttccagcagagcacagccatataataaatcgggcttccagtttttcagtactatttcttttaa

SEQ ID NO: 78493 - DNA, 589 bp, Chicken  19866894368151_2
caatacaaccaatcacaaggaaaccagcaacaagatacgtccagacagactgacatgagttcacagaccattattcctcaccactcagcccttcgcttgctccaccatgccggagggtgtcgagcagtgtctggcgtgccctgaaataccctggcactgygcctgatgcctttcctcctctacatccccttttgaactgttctaatggttttctcttatgtcctgttgcttcccatcactgcaaaattaactcagcatttcagcttcatggaagacacagcatacgttttcctccttctrcatatgcttatgttccactagcattaatggacattacagtcatgcactgaacgcataccattaaggcttcctgaattaaatactgcaagatcaaacgttccagcagagcacagccatataataaatcgggcttccagtttttcagtactatttcttttaacaaacccaagcattctgagggggccttccagcacatttttattatacctatactaccacagcccccagtcgtgcaataggaccctgtgtggacagacccctggggggatgtgcacagctccagtaactg

SEQ ID NO: 78494 - DNA, 600 bp, Chicken  19866894368152_1
ctacaaaccagttaggcttcaggaaaagcactttgcttcttcttgctgagacaagctaaggctagcagctgagatgtccctattctggagcagcattccaggggaaggcattccagcaccttggagtccttggccccagcaccaactgcacacaggtttatcagcagcctttcctgttagcttgaaatttatcagatatttttgcaatggatcttgatgaaatttcacctgtgatttgtatggttttctgaaacagttttgtgtttcaataaaatgagcttttttctttttctttctttyttttttyaaacaaagctattctcaggcattttcccaaacagcttatctcattttcctgcctatctgcagagatgatggttaactgaagacttagataaagccatttttaaatattatctcagtattttcttgctattcagtttctctgtttgggcctatcttacctcgcatttctcctaagcatgaagtatggattaggactgcttagtgttcacagctggacagctttacactgcagtctagatcatcactttcactaaatctttttaaataggaaaactgccactatagctaattgaa

SEQ ID NO: 78495 - DNA, 600 bp, Chicken  19866894368152_2
ccagttaggcttcaggaaaagcactttgcttcttcttgctgagacaagctaaggctagcagctgagatgtccctattctggagcagcattccaggggaaggcattccagcaccttggagtccttggccccagcaccaactgcacacaggtttatcagcagcctttcctgttagcttgaaatttatcagatatttttgcaatggatcttgatgaaatttcacctgtgatttgtatggttttctgaaacagttttgtgtttcaataaaatgagcttttttctttttctttctttyttttttyaaacaaagctattctcaggcattttcccaaacagcttatctcattttcctgcctatctgcagagatgatggttaactgaagacttagataaagccatttttaaatattatctcagtattttcttgctattcagtttctctgtttgggcctatcttacctcgcatttctcctaagcatgaagtatggattaggactgcttagtgttcacagctggacagctttacactgcagtctagatcatcactttcactaaatctttttaaataggaaaactgccactatagctaattgaagatggta

SEQ ID NO: 78496 - DNA, 475 bp, Chicken  19866894368161_1
atgtatgtgttgagtttaaatgtgcaagtgttcagagagcagagtgagttgagtctgagtcttgcaaatccatagttttcagcaaacttgcatgttgtgcatctgaggggcaatggaaagaaagtggtaatttttgctactgggagtaatagcattttgtcatcatctttcatattccaccttctcatgtctcgtcctgcagcaaaagccctatattgctacacctgtgagtgggaacaaagcaactggagctgtctgaaggctaagaagtgtgcagacaaggataagtactgtgtgacraatgttgcctctgtaggaataggtatgtgctgtcagtgcacaggggctcaggaatggaaagtggggttttggctcgatttgtatggttgccctttgtgaatggatgagttgaggaatcatggggaaggacatatggaaggaggagattttgatagcccaatctggcagtgcttaa

SEQ ID NO: 78497 - DNA, 600 bp, Chicken  19866894368163_1
aagtgaagtaagctctgatatttgtgtgttcatccatcatgaatcaaacctgctaattaaaatgatgcttttgacccctatgtgaactgattacagcactgctttaagattataagttgttataatggctgctgtttttagcactaccttagttgctgttcgtctacttcacaagattaaagattatctgtcagtgttagatgcaaataaccaacgtgcctcaaaatagcagatctatatacagaggtgggtgagccttttgctcgtccacctgaagtctgtttttcctttatttccatwgggagcgagcagtgtcacactggaagcaattaaacatatagaagtaccttatgtgtataatgtagatgtagctatcagctgagataatgaaagaaactgtcaggcgtgatttctttgcttgcgaatttgttttgcagcttgcagatgtgcttcagctacttgtagagctcagtggacaaaggttgtgagaagggctgggaacttacggtgcttcttcagctgttttcagttgcttagaaaagagggaaataatacagctcagctttctcttagcaagttgaaggaatttcagcccttgtt

SEQ ID NO: 78498 - DNA, 600 bp, Chicken  19866894368172_1
ctccacttagtagctctcacagcagaataaaatgatcctaatgggcatagccttgcttcaattgcccttgatgcaagatggccctcataggcctgagtgctcttatgccagtgtgtctacgcttgctgctgtgctatgagccctggtgcctgctcacaagcagcctccttcccccagttacggggcaaccaaaggctgtagtgggggcaactgtgatcttgctgctggtgtttctgcatagtgtctggccctaccccctctgtaaaccctcacagtgcatctgtccccttgtctcaggcrtatccgtgtgtgcacacccctggaagaagctgatggctgctctgctcctgtgagatctctgcgctgctccctgtcacaacactgagcagagacaggctgcctcaagcagggccgagtgctggcacccacataccacatcaacaaagcctcctcctcccttgcagtgaaggagaggaggccccagatgtccctatggccgcccaagcagccctttctgcaggacaaggtaaagggacattaggatgagggcttcagcctcgcctttttctatgagggaaactgaggcagtgtccgagctca

SEQ ID NO: 78499 - DNA, 600 bp, Chicken  19866894368179_1
tttgggcttcatcttcttctgcaagtacaaagcatgctgttagccagaacatggaaaatgccaccagaaatcacaagcaacaacatggaaagggaatcagtgtgtcacaaaagaaaggtcatgcacctgacagatattctctagaatcttaaggtctcttgttaggcttgagacaaaaggaacagcattcacattgccctctacttcaaacttaaaacatctgaagtggctttgtgctctactacccgagaaacaagagcagcagtgacaagtcacactggattcaattggagttcaccrattgaatctcatcaccttcacaacttacaggggtgagctgcagcacatctaagccattacttaccatcactcatgtgttacagaactttgcaggctgctcttcactcaagatttaaaaaaatctgcagcctctcccttgtagtttaaatagtaaattagaggggaaaatttcattaattccagctctacaagttactttatttccctaaaccactacctgcttgtgttcttgtatgttaagctcagtgttcattaactatttcaaaaacacagcatttgtagcaactttaacatttaatt

SEQ ID NO: 78500 - DNA, 599 bp, Chicken  19866894368189_1
  misc_feature (1)..(173): n is any nucleotide
nnnnnnnnnnnnnnnnnnnnnnnnnnnnnnnnnnnnnnnnnnnnnnnnnnnnnnnnnnnnnnnnnnnnnnnnnnnnnnnnnnnnnnnnnnnnnnnnnnnnnnnnnnnnnnnnnnnnnnnnnnnnnnnnnnnnnnnnnnnnnnnnnnnnnnnnnnnnnnnnnnnnnnnnnnnnnagtattctgcactgacatgcagccatccaagtcaggtaacgcagtgtgatggcgtgcacactgttgggagcttttccctcgttctgctgcaggatgaggggtgcagagctcccggatcgccctgcargcatgagctggtgtgggtgagaggaaggaagcagagctctgccacttgaaaggaatccaccacctctcgtgggattagtggaggggggagcgggctccaagacaggagtccattcacacttctgcctcttctacgtaagcctgcaggatttttgcctccatcgagcccggattgcatacagaattactctgaggtcctccctgtgggaccctttgtggtatctcttgatagcagcaataacaatcttccttatctgttgttttcctgagaacaggagccatccgttgcaggcagccaac

SEQ ID NO: 78501 - DNA, 600 bp, Chicken  19866894368189_2
gtatctcttgatagcagcaataacaatcttccttatctgttgttttcctgagaacaggagccatccgttgcaggcagccaacttggaggctctcagtaacaagtagaatgcgtattccacaagcagattcttgccatctgtttagggaatatcattagattggcatccgatccaggcagaaagcctctgtgtggggagaaatctgctctcagatctcagccctgctatttgccaccagaacttggcaatgcaaagagcagagttaactcctgggataagtctggcctcgtctgaaaggcraattcccatctggaaggtgtgtgagagtccagtgggtttgcagtaaaatggcactttgcatcaaagcagacagagttatgctgtgtccaacaggagaaagctgttgttcatttgtgtgggagttataacttttttttccccctcttaaagcattaactaaatgttgtgagatcagcgcaaattgggcttgggatttactactgttggtgatggcagccaccagaagatgcagccaacacggctgcctgatgtaggcagcctgcagtcacaggaggtgtgtgtgctctgagcacccacagc

SEQ ID NO: 78502 - DNA, 600 bp, Chicken  19866894368191_1
tgatatcatatgcaccatatatattcagtttaaactattgggaaaagatttttattgatataagttacaacataactcttacacactaattgtgagttctgcagattaactacggagagttgttcatattcatcttttgcagaaggggtttattttgtttattatctgttgtatcacaataccacagacattctgtataatccatacattcagctaaaacttcttccacatagagatcaaaagggaataccagcacagttttcatttaatagtagatggcattatttaaaatattcattrttggaaggataaatttcccaaataaaagaagaacactaaaaccacactttttttcagtaactttagagaaaaaaaagataaaatattcaggaagatatagtaaaatttttaactgtaaatcactgtaattactccatccttaagagagtgaaatacaaaaaataaatgagaccaacagcaattaataagttaaatcttgttgcagaggctagacatgctctgttttacagcccttctctgttcaaaaactgtttttttcacaccaggcaactatggaattcatagtagcatgacaatggt

SEQ ID NO: 78503 - DNA, 600 bp, Chicken  19866894368197_1
agctgacaagcaggacctgaggagatgcctgctagaggaggatgaggaggccaagaggaagtgggctgccacagtggatcgttgtactaaaagggttctcttgagaatccaccaaaagtctgtgagtcaaagagttcacatgaaggcggtcttccaatttctgtgaggttgcagtcgactctgtttctactgtatactgttaagtaaaacatagtgcttctcctgctttccttgccattaggaaagcttaagcactggaattcagctataaggagagaatatgcccttataccatgaggrgtttgatataatcagacaagagagatttgttgagtctgtgagagagagcaaatatgacaaaatgctgcttttttaaaattcccgtagaatgtaaattgagatcacttatgaaaagctttgagatattataaaaacttttttttacagtgctttggaagtcagcatccttttaaaggcatactgagagagttacaaaattttcagaggattgaggcatgcttagttaattgtgctcagtttctctccggccctrtgtcactgccttatactggcccttccccattcagctcgcatctcatc

SEQ ID NO: 78504 - DNA, 600 bp, Chicken  19866894368197_2
actggaattcagctataaggagagaatatgcccttataccatgaggrgtttgatataatcagacaagagagatttgttgagtctgtgagagagagcaaatatgacaaaatgctgcttttttaaaattcccgtagaatgtaaattgagatcacttatgaaaagctttgagatattataaaaacttttttttacagtgctttggaagtcagcatccttttaaaggcatactgagagagttacaaaattttcagaggattgaggcatgcttagttaattgtgctcagtttctctccggccctrtgtcactgccttatactggcccttccccattcagctcgcatctcatcgaaatgcccacccagctctgyagtttctgtcaacacacaggtgcagaaggacagggagttttgatattatctagacactaccctcctggttgctgctcaccacatcagaagtgtcccttctgctcttttcctggccactgctgctccttttttgcatgaggtgaaggtgttatcttccatgagaggagtgtggaaaaggatcaaaaggagacaaaaaaaaaaagtggtaccatacaacggraaattaaatrat

SEQ ID NO: 78505 - DNA, 600 bp, Chicken  19866894368197_3
gagatttgttgagtctgtgagagagagcaaatatgacaaaatgctgcttttttaaaattcccgtagaatgtaaattgagatcacttatgaaaagctttgagatattataaaaacttttttttacagtgctttggaagtcagcatccttttaaaggcatactgagagagttacaaaattttcagaggattgaggcatgcttagttaattgtgctcagtttctctccggccctrtgtcactgccttatactggcccttccccattcagctcgcatctcatcgaaatgcccacccagctctgyagtttctgtcaacacacaggtgcagaaggacagggagttttgatattatctagacactaccctcctggttgctgctcaccacatcagaagtgtcccttctgctcttttcctggccactgctgctccttttttgcatgaggtgaaggtgttatcttccatgagaggagtgtggaaaaggatcaaaaggagacaaaaaaaaaaagtggtaccatacaacggraaattaaatratttgagcacacaagagagacccaaaggctcttcctggcagtatgacttagctttgacaattcccttcac

SEQ ID NO: 78506 - DNA, 466 bp, Chicken  19866894368197_4
tctccggccctrtgtcactgccttatactggcccttccccattcagctcgcatctcatcgaaatgcccacccagctctgyagtttctgtcaacacacaggtgcagaaggacagggagttttgatattatctagacactaccctcctggttgctgctcaccacatcagaagtgtcccttctgctcttttcctggccactgctgctccttttttgcatgaggtgaaggtgttatcttccatgagaggagtgtggaaaaggatcaaaaggagacaaaaaaaaaaagtggtaccatacaacggraaattaaatratttgagcacacaagagagacccaaaggctcttcctggcagtatgacttagctttgacaattcccttcaccatgatgttgagtttcctgggaacttgcctttggggccagccagatttccaaagctgaaatagctaagtctcttttcttgttgaca

SEQ ID NO: 78507 - DNA, 456 bp, Chicken  19866894368197_5
trtgtcactgccttatactggcccttccccattcagctcgcatctcatcgaaatgcccacccagctctgyagtttctgtcaacacacaggtgcagaaggacagggagttttgatattatctagacactaccctcctggttgctgctcaccacatcagaagtgtcccttctgctcttttcctggccactgctgctccttttttgcatgaggtgaaggtgttatcttccatgagaggagtgtggaaaaggatcaaaaggagacaaaaaaaaaaagtggtaccatacaacggraaattaaatratttgagcacacaagagagacccaaaggctcttcctggcagtatgacttagctttgacaattcccttcaccatgatgttgagtttcctgggaacttgcctttggggccagccagatttccaaagctgaaatagctaagtctcttttcttgttgaca

SEQ ID NO: 78508 - DNA, 599 bp, Chicken  19866894368201_1
  misc_feature (1)..(3): n is any nucleotide
nnnatggctgtgttccctgtcatgctcagcctgacgctcaccactctctttggaaatgccattgcgtttgcgaccggggtgctgtatggcctgtcagctcttggcaagaagtaagaaaggatttgcttgcttggggaggggaggggacctccagccctgcccccatctgctgccccagctctaaggaaggctgtgctttcctcttgtatcaaccgcgcttttgggtgtgaatgctgctggagggtatgtccctgctggagtgctttctctccaaacaaaaccccttgaaagaaggtctgrgggtctgctgaacctctgagctttcccttggcagctcagtgtaggttgccccaggaaagcctttgtgtcccaacaggggtgaggctgggragggccagcaagtctcatttcattcctgttgtcacttggtatggagaggccttggcacaagctgggagacatttgtactgtgtgctgtactgatgggatgggtgcccggtgctcacgtcaccctgatgtcccttctctctgcaggggagatgccatttcctacgctcggatccaccagcagcagaagcaaatggatgaagagaagctca

SEQ ID NO: 78509 - DNA, 600 bp, Chicken  19866894368201_2
ctgtcagctcttggcaagaagtaagaaaggatttgcttgcttggggaggggaggggacctccagccctgcccccatctgctgccccagctctaaggaaggctgtgctttcctcttgtatcaaccgcgcttttgggtgtgaatgctgctggagggtatgtccctgctggagtgctttctctccaaacaaaaccccttgaaagaaggtctgrgggtctgctgaacctctgagctttcccttggcagctcagtgtaggttgccccaggaaagcctttgtgtcccaacaggggtgaggctgggragggccagcaagtctcatttcattcctgttgtcacttggtatggagaggccttggcacaagctgggagacatttgtactgtgtgctgtactgatgggatgggtgcccggtgctcacgtcaccctgatgtcccttctctctgcaggggagatgccatttcctacgctcggatccaccagcagcagaagcaaatggatgaagagaagctcacggggtgcctggagggacaggctctgtgaagtgcatgagcccagggtgaccttttggaccctgagatggtggtgaagatttggaaacccac

SEQ ID NO: 78510 - DNA, 600 bp, Chicken  19866894368216_1
cttttgattcttaaaacctcagagaaaaagaaagagtgcttaaaaatctatctggatgaaatctgtttgaaataagcagtcttcagttttaaagaatacttgcttatcttcatgtacttatactatgtgtgtatttcatgacaatatggcaatgcaactattattttcatgtccctcattttgctggtgaaactgttttgtatggccagaaagactaacagcttctcagcacacttaatctatctctagttttgtcctcctattgtacttcatcttgtgggagaaacaccagtggaaaamaaacattgagttttctgttggagggygtggagggctgagcagagccatgccgtccagcaygacagccacagaaaaggagtgcaagtagggggaaaaaaagcacaaattctggtgttaaaatggatttctgacagctctgagactccacagcataacgcacaggggctggacaggtgttgtaggtgagtaggaaggtgccatgtcttaaagtggagggaatgtgatggggaagggaggctgtggggcaagaatgctgcagcatggctcaggaggtgcctacacaaggtggcaagggccaag

SEQ ID NO: 78511 - DNA, 600 bp, Chicken  19866894368216_2
aaagaaagagtgcttaaaaatctatctggatgaaatctgtttgaaataagcagtcttcagttttaaagaatacttgcttatcttcatgtacttatactatgtgtgtatttcatgacaatatggcaatgcaactattattttcatgtccctcattttgctggtgaaactgttttgtatggccagaaagactaacagcttctcagcacacttaatctatctctagttttgtcctcctattgtacttcatcttgtgggagaaacaccagtggaaaamaaacattgagttttctgttggagggygtggagggctgagcagagccatgccgtccagcaygacagccacagaaaaggagtgcaagtagggggaaaaaaagcacaaattctggtgttaaaatggatttctgacagctctgagactccacagcataacgcacaggggctggacaggtgttgtaggtgagtaggaaggtgccatgtcttaaagtggagggaatgtgatggggaagggaggctgtggggcaagaatgctgcagcatggctcaggaggtgcctacacaaggtggcaagggccaagctagagcccaggcaggggagcttcac

SEQ ID NO: 78512 - DNA, 600 bp, Chicken  19866894368216_3
atctgtttgaaataagcagtcttcagttttaaagaatacttgcttatcttcatgtacttatactatgtgtgtatttcatgacaatatggcaatgcaactattattttcatgtccctcattttgctggtgaaactgttttgtatggccagaaagactaacagcttctcagcacacttaatctatctctagttttgtcctcctattgtacttcatcttgtgggagaaacaccagtggaaaamaaacattgagttttctgttggagggygtggagggctgagcagagccatgccgtccagcaygacagccacagaaaaggagtgcaagtagggggaaaaaaagcacaaattctggtgttaaaatggatttctgacagctctgagactccacagcataacgcacaggggctggacaggtgttgtaggtgagtaggaaggtgccatgtcttaaagtggagggaatgtgatggggaagggaggctgtggggcaagaatgctgcagcatggctcaggaggtgcctacacaaggtggcaagggccaagctagagcccaggcaggggagcttcacatccctgtcaaaactgatctttgagtcctgctat

SEQ ID NO: 78513 - DNA, 600 bp, Chicken  19866894368219_1
tcatttgtttccattcattctcctattctagaaactatacatgttttatctgttaaggatgggaaagaagaacagaaggttattgctgcagtgtgtttctttattacaggtaaaataatagtgagtagctttatcgtgcctataaaataactagaggcaatctgcacagtatattttatttgagaaaaaaacacctatacagtttgggtacagaattttttgaaaactagaagttcagatctgttacatgatgaaacagtcataaactaaagataaggcagaaataaaattaggaatgcrttttgtttaaaattcaagtcagccagtgcagaaaggaaaggaaagaaatttttcataactccagtaaacagtcactcatcctaaacaggaaacacataagcaaaatcaactgaacatgarcagctgtatcagttactggatctatgggtcaaataatgaagaaaaaaaaaaaatagtcctgatatccattaaaataatttgcmtgttatttgtgttatattggctccaatgacaaggtcaaactcactgcacaatggatttctgccaaaaggcacggtcctgaccacctcacagttccat

SEQ ID NO: 78514 - DNA, 600 bp, Chicken  19866894368219_2
gtgagtagctttatcgtgcctataaaataactagaggcaatctgcacagtatattttatttgagaaaaaaacacctatacagtttgggtacagaattttttgaaaactagaagttcagatctgttacatgatgaaacagtcataaactaaagataaggcagaaataaaattaggaatgcrttttgtttaaaattcaagtcagccagtgcagaaaggaaaggaaagaaatttttcataactccagtaaacagtcactcatcctaaacaggaaacacataagcaaaatcaactgaacatgarcagctgtatcagttactggatctatgggtcaaataatgaagaaaaaaaaaaaatagtcctgatatccattaaaataatttgcmtgttatttgtgttatattggctccaatgacaaggtcaaactcactgcacaatggatttctgccaaaaggcacggtcctgaccacctcacagttccatgtttctgctgctttctttgagctggcacaagcattcaagtggcaaatggtaataattttagatttccctagttctcaagtacgcaacaagaatgaaaaccaatctttattaactggcact

SEQ ID NO: 78515 - DNA, 600 bp, Chicken  19866894368219_3
ttgggtacagaattttttgaaaactagaagttcagatctgttacatgatgaaacagtcataaactaaagataaggcagaaataaaattaggaatgcrttttgtttaaaattcaagtcagccagtgcagaaaggaaaggaaagaaatttttcataactccagtaaacagtcactcatcctaaacaggaaacacataagcaaaatcaactgaacatgarcagctgtatcagttactggatctatgggtcaaataatgaagaaaaaaaaaaaatagtcctgatatccattaaaataatttgcmtgttatttgtgttatattggctccaatgacaaggtcaaactcactgcacaatggatttctgccaaaaggcacggtcctgaccacctcacagttccatgtttctgctgctttctttgagctggcacaagcattcaagtggcaaatggtaataattttagatttccctagttctcaagtacgcaacaagaatgaaaaccaatctttattaactggcacttgaaaaaaaatgtttcacagttccctctaaaatcattttcacatgtataataaaatttacatgccatctcaatgttttttttt

SEQ ID NO: 78516 - DNA, 600 bp, Chicken  19866894368219_4
attggtctcatgaagctgctaatgacttgactgtagaatcttttccacttgatctgaagaactccaaaatttcacatttctaaagatctctaagtttaagtatattttcaagataaggtattctttttaggttacacaagaaattatttttttttcccattgttactaaacactgtcaactgaatctaattctggcacagacaataaaactctaattaaaacagagatatatgaggaagtttgtcaaataaacaacccactctcatgaaatcatgctaagatattgagctagatctgcaygagctcatctgtctacattaacagtgcaattctttattacagaaactagtgcagctctcagaagcaatgcacactgcatcccaattaaccctatttcttaggcaactagacattgtgtaggactgtgtagatgctgctgtaaagcttctgcttttggaactaaccctgtgttctcagatagttaaacttgccttatactaacatatcattaaactatctagacacagattctacatatctacatattcaatatgcattcttcgacacttgaatttacatctgtgtctggattcctgtgaa

SEQ ID NO: 78517 - DNA, 600 bp, Chicken  19866894368222_1
tgctacatcacggtctgctctgtgcccgctgcagttctaagtagcgtgtagacgtggatatatacaaaaccatgtaccacataattacaaaaaatccagcacatcacgaagagatcttgaaaccagtaacacgagagctgctgacctttctgagagaaatgtgatggggctttgcttgaacagatgtctaggtacaaactgagagtatgacaccatcagtcatatttagagaatgtaatgccactgactcttctgctcttctggccagtgtttgtgactgtgatgggttgaagcatctgkggagggagggtgtgtttttgtacagctactgggaaacagtttatatatttgctccattttagaaatgatgtagtagttagaaggatatgagtaattagttttctctctgaatgttttcagttttcctgacagttcaggcatagaactgtagtactttatgtaaaactcaatatgagttaggagagtataaaattgtcctctttctaaatgrtacacaaaaactgtgaagctgttcagrcacagctggctacttacagcctcagtgagacacttttggagttagaaaatctattttggcag

SEQ ID NO: 78518 - DNA, 600 bp, Chicken  19866894368222_2
accatcagtcatatttagagaatgtaatgccactgactcttctgctcttctggccagtgtttgtgactgtgatgggttgaagcatctgkggagggagggtgtgtttttgtacagctactgggaaacagtttatatatttgctccattttagaaatgatgtagtagttagaaggatatgagtaattagttttctctctgaatgttttcagttttcctgacagttcaggcatagaactgtagtactttatgtaaaactcaatatgagttaggagagtataaaattgtcctctttctaaatgrtacacaaaaactgtgaagctgttcagrcacagctggctacttacagcctcagtgagacacttttggagttagaaaatctattttggcaggarggacagggttgatgtttaagtcatttattaaagtactgtaagtaacattatgacattatgctggagtactttcttatgttcttggttgactgatgttgtagtcatgcactccacatttattatccacaacactttatagctcttttttttttcctttttgtctttaaacactaatttagagtatgcattcttcagtgcatgtcagctt

SEQ ID NO: 78519 - DNA, 600 bp, Chicken  19866894368222_3
tgccactgactcttctgctcttctggccagtgtttgtgactgtgatgggttgaagcatctgkggagggagggtgtgtttttgtacagctactgggaaacagtttatatatttgctccattttagaaatgatgtagtagttagaaggatatgagtaattagttttctctctgaatgttttcagttttcctgacagttcaggcatagaactgtagtactttatgtaaaactcaatatgagttaggagagtataaaattgtcctctttctaaatgrtacacaaaaactgtgaagctgttcagrcacagctggctacttacagcctcagtgagacacttttggagttagaaaatctattttggcaggarggacagggttgatgtttaagtcatttattaaagtactgtaagtaacattatgacattatgctggagtactttcttatgttcttggttgactgatgttgtagtcatgcactccacatttattatccacaacactttatagctcttttttttttcctttttgtctttaaacactaatttagagtatgcattcttcagtgcatgtcagctttccatagaatcacagaatggcccgggt

SEQ ID NO: 78520 - DNA, 600 bp, Chicken  19866894368222_4
gggagggtgtgtttttgtacagctactgggaaacagtttatatatttgctccattttagaaatgatgtagtagttagaaggatatgagtaattagttttctctctgaatgttttcagttttcctgacagttcaggcatagaactgtagtactttatgtaaaactcaatatgagttaggagagtataaaattgtcctctttctaaatgrtacacaaaaactgtgaagctgttcagrcacagctggctacttacagcctcagtgagacacttttggagttagaaaatctattttggcaggarggacagggttgatgtttaagtcatttattaaagtactgtaagtaacattatgacattatgctggagtactttcttatgttcttggttgactgatgttgtagtcatgcactccacatttattatccacaacactttatagctcttttttttttcctttttgtctttaaacactaatttagagtatgcattcttcagtgcatgtcagctttccatagaatcacagaatggcccgggttggaagggacctcaaagatcatgaatctccaaccccctggccacacgcagggccaccaacctcca

SEQ ID NO: 78521 - DNA, 600 bp, Chicken  19866894368225_1
aaaagatcttgtaatggtttggtttcctgtctgtggaatggtaaaattcaaaaatcattaagtagttcacaaatctaagaaaaaatacagcatttttttttaattgattaaaattagagcatgattaaacaaatcctgttactgaagtgactaatatacaaactaatatgaaaaggagagaaacagaaaaagaggacagatactgcttgagttttatttctgttccaaaatgattcttaatgagaatttttcatgcaacttgcctgctcttatagttttttatttaaatataaatatgayggcttatataacaccacttgttaaattgacaattgtttagccagcctgataatcagagaccacaatacattgcatttacaaaaataaaagttaaaaaggaaaataaaagccaactttgattatttgatgataaaatactaaacaatccacttgttgctttggaataaagttcacagtcagttgaagcaaacctcattaaaagcaatgaatataagcactcaagatctagaccaaggtttatctgcaatttcccagttttgtttatgtacaactatctttaaaatccacattcataaaaac

SEQ ID NO: 78522 - DNA, 545 bp, Chicken  19866894368225_2
aggtttatctgcaatttcccagttttgtttatgtacaactatctttaaaatccacattcataaaaactttatttaaagaacagaactgtactggagctaactggtataagcagataactagttaaacagtataaatcatactgacttatttcctagaacacactctggccatatctgatgacccagtaggatgggggagaggattggaaacaaagctgagcttgtgaattgagatagaaattatttactaagacagaaaaggaacagagaaaagaaaaaaatataatgataaggttctcyctatatatccatagtgcaactgcttaccacccatcaactgacacgcaactagcaattcaatggctcaccaccagccaactgatctgccaataccacctgcctacctatatgcagtggccaacccctgattttggccaactccctgcaggtttatagtcttctgcatgatgttgcatggtatggaataacctcttggccaatccagcacagctatcctggcacttgccttgccactgcaccataat

SEQ ID NO: 78523 - DNA, 600 bp, Chicken  19866894368228_1
gtcctagcctcagtggtatatttaccttaacaaatacatcatttgtcaaatgctttaagatttaaaaatgaatcatcctctataaaggctaggaatcggttcatctaaagctaattccaattctgttgattgccagtatttataataatgtttatagactcaataattaaaacgtttcaaatattattcttgcaagcatctgcagagcaaacacaaaaactcgtttggaaaagcactatatttgccagcccactgtactagtttagtaaagacaaatgcatatgcacagcactgagaacrtaagttaaaggtgacccagcaaagcaacaaggagtcaattggctttcagtatcaaagcattttctccagtggaatctgattcacaggttaatgtacaaattgcaggcagagactctttcttttaatgtgcatttcagacattctcaaaataaatgctacagttttagaggcaagtcatacttcttacaataaagcttaagctgctaacctaagtaatgaccactattctcatagaggtgattcattgtatgtcaatgcttggggatgctatcttctcagctaacacactggcaagcttta

SEQ ID NO: 78524 - DNA, 599 bp, Chicken  19866894368260_1
  misc_feature (1)..(113): n is any nucleotide
nnnnnnnnnnnnnnnnnnnnnnnnnnnnnnnnnnnnnnnnnnnnnnnnnnnnnnnnnnnnnnnnnnnnnnnnnnnnnnnnnnnnnnnnnnnnnnnnnnnnnnnnnnnnnnnnntcatcatagcctcttaatttcagcactgagcttactaaacgtgaaatggtagagaactgtataattgcagccagacattataggcaataattatctgtagtctgtcacaatacatctgttgtaactttatacctccatgtagacatgctgtctactttacctagcacataccagaggctgtctgtgsttcagaaactgttctgaagcctcgtcacaaccctatgttgatgtgattagtttggtgtacttgctccatacttagcctgcctggatagctcagtgaacagaaacattagtaccagcatcatatttgctgtgagtaatccagacttctcttcactatcagtgtttgccttgggtttgcagtttcctccagaatcctacaaagacgtctgccctgtgctaagtgtgtgtatcaagtcttgttgattattattcagtgtgacagtgggatgactgataaaataaatgaggagaataaatagc

SEQ ID NO: 78525 - DNA, 600 bp, Chicken  19866894368271_1
ttcttgaatcctttagtgctctactttgatcttctgtggttgttacagtgacatcactctgaacaaagcctgccttacactcttcttaacatcttgcccttgggtcctcacttcaaatgtgctgttctgaactcatacttgtatatatttgacttaatgtatgaaacaagtgtgcttgaaggtcagactcaactgaggtataaaccagggctactcactctgaagcttatgcaagttctgtctgcttgtatccagagcagatcaagcctcgaaaagcttgacctttattttctctttccrtgtgacaggttctcttcttatgtgactagttaaagatttttttttttggggggggggattcaaatagctatcagaacagtttgataactaagaaacaaagtgaaggtttggttatttgctgaagtatgacctgaaatctctcttcccagtttcctttgtaatgtgatggtgagagtcttgcctagagcagtactgaggcatgaggtacaagtaaattctcaaagtaaattctgagatccattttgcttgataaatctacagcattttagtccattcatttaaatgttgatgctatggaca

SEQ ID NO: 78526 - DNA, 600 bp, Chicken  19866894368276_1
ttaagagctggaaattttttttccagctgctgtgtcagtagagtctgacacacctgagcctttaacatggaatgtttctgggatatgaggattaagggagccaggtgggtaggggaagaggtgtgtttaatgagaaaaagaagagagtgtgtgtagggtctgcctacccaagaccactacaacttgtagtggtccagaaagtggtccagtcttccagaaagactgggcaatttttgtcctgtgacatgcaaagaatggagaaagggtactctgaatgaaaacctgctggttttacccagkttacttttaaatgcttgcctagctctaattacttcctgctttaatttttctgtagacctaatttctgagcaaagttgtctggttctcacaggcaagtggagttaataaaggtgcactttgaggctcaacctaagtctgaaaaggcacagtacatgttcttaagctaactccatgcctggacaggagttagtccagctcaggaatatggtggaaaaacaagcaaatatgattaaaatctcccttttgtataaactcacagcagtaacatttaaattttcaatgagtttttgtcttcttaat

SEQ ID NO: 78527 - DNA, 476 bp, Chicken  19866894368287_1
caaaatcctagcttaaataaattcagattgattttaagattgtgctagaagctatcattctgttttaaagtgttcgcagaatacaagatggcaaaagttcaagtgctttaagttacaggggaaggaaagccctgaaatgatctgatagaaggagtaagatgatttcaagaaggaaacccaaagcacttaaaggatgaaatgttgtttctttcccttggagactgccatttgcttacagaaacaaaatcttccaacaacatcatgtgctggaaaacttggagggccccctttctactcctycttttccccattcaagtagctgtcatgctccatccctgaaggcattcaaggccagrttggatggggcrttagggagcttgatgtggtgggtggcaatcctgcccatggcaaggggggttagaactagatgggctttaggatcccttccaacccaagctgttctatgattctatgat

SEQ ID NO: 78528 - DNA, 420 bp, Chicken  19866894368287_2
attctgttttaaagtgttcgcagaatacaagatggcaaaagttcaagtgctttaagttacaggggaaggaaagccctgaaatgatctgatagaaggagtaagatgatttcaagaaggaaacccaaagcacttaaaggatgaaatgttgtttctttcccttggagactgccatttgcttacagaaacaaaatcttccaacaacatcatgtgctggaaaacttggagggccccctttctactcctycttttccccattcaagtagctgtcatgctccatccctgaaggcattcaaggccagrttggatggggcrttagggagcttgatgtggtgggtggcaatcctgcccatggcaaggggggttagaactagatgggctttaggatcccttccaacccaagctgttctatgattctatgat

SEQ ID NO: 78529 - DNA, 408 bp, Chicken  19866894368287_3
agtgttcgcagaatacaagatggcaaaagttcaagtgctttaagttacaggggaaggaaagccctgaaatgatctgatagaaggagtaagatgatttcaagaaggaaacccaaagcacttaaaggatgaaatgttgtttctttcccttggagactgccatttgcttacagaaacaaaatcttccaacaacatcatgtgctggaaaacttggagggccccctttctactcctycttttccccattcaagtagctgtcatgctccatccctgaaggcattcaaggccagrttggatggggcrttagggagcttgatgtggtgggtggcaatcctgcccatggcaaggggggttagaactagatgggctttaggatcccttccaacccaagctgttctatgattctatgat

SEQ ID NO: 78530 - DNA, 599 bp, Chicken  19866894368289_1
  misc_feature (1)..(206): n is any nucleotide
nnnnnnnnnnnnnnnnnnnnnnnnnnnnnnnnnnnnnnnnnnnnnnnnnnnnnnnnnnnnnnnnnnnnnnnnnnnnnnnnnnnnnnnnnnnnnnnnnnnnnnnnnnnnnnnnnnnnnnnnnnnnnnnnnnnnnnnnnnnnnnnnnnnnnnnnnnnnnnnnnnnnnnnnnnnnnnnnnnnnnnnnnnnnnnnnnnnnnnnnnnnnnncccagctgtacagcggagctgctgaatctcccaccaaagacttttgcccattccctctagcaaaaaagaaaaaaggagaaaaaaagaaaagaaragaaaaaaaaaactttcagaattatatattgggtctattttttcttctctccaataggcaaagtttaacaagaccaaagcctgctggacaaattaaataactaaagrattgaaagaacttgcagaaatagcagtttcaggcttctttaattatccatagatgccaaaaggcataacaaggaggagattcatatcaaatatgtgacaggttttttactctgtagtggtcctgtcagtaaaagaaatttaatatagactcttatcgctctgccatctcatttaagtgtgcaggtgactgag

SEQ ID NO: 78531 - DNA, 599 bp, Chicken  19866894368289_2
  misc_feature (1)..(205): n is any nucleotide
nnnnnnnnnnnnnnnnnnnnnnnnnnnnnnnnnnnnnnnnnnnnnnnnnnnnnnnnnnnnnnnnnnnnnnnnnnnnnnnnnnnnnnnnnnnnnnnnnnnnnnnnnnnnnnnnnnnnnnnnnnnnnnnnnnnnnnnnnnnnnnnnnnnnnnnnnnnnnnnnnnnnnnnnnnnnnnnnnnnnnnnnnnnnnnnnnnnnnnnnnnnnncccagctgtacagcggagctgctgaatctcccaccaaagacttttgcccattccctctagcaaaaaagaaaaaaggagaaaaaaagaaaagaaargaaaaaaaaaactttcagaattatatattgggtctattttttcttctctccaataggcaaagtttaacaagaccaaagcctgctggacaaattaaataactaaagrattgaaagaacttgcagaaatagcagtttcaggcttctttaattatccatagatgccaaaaggcataacaaggaggagattcatatcaaatatgtgacaggttttttactctgtagtggtcctgtcagtaaaagaaatttaatatagactcttatcgctctgccatctcatttaagtgtgcaggtgactgaga

SEQ ID NO: 78532 - DNA, 599 bp, Chicken  19866894368289_3
  misc_feature (1)..(204): n is any nucleotide
nnnnnnnnnnnnnnnnnnnnnnnnnnnnnnnnnnnnnnnnnnnnnnnnnnnnnnnnnnnnnnnnnnnnnnnnnnnnnnnnnnnnnnnnnnnnnnnnnnnnnnnnnnnnnnnnnnnnnnnnnnnnnnnnnnnnnnnnnnnnnnnnnnnnnnnnnnnnnnnnnnnnnnnnnnnnnnnnnnnnnnnnnnnnnnnnnnnnnnnnnnnncccagctgtacagcggagctgctgaatctcccaccaaagacttttgcccattccctctagcaaaaaagaaaaaaggagaaaaaaagaaaagaaaaraaaaaaaaaactttcagaattatatattgggtctattttttcttctctccaataggcaaagtttaacaagaccaaagcctgctggacaaattaaataactaaagrattgaaagaacttgcagaaatagcagtttcaggcttctttaattatccatagatgccaaaaggcataacaaggaggagattcatatcaaatatgtgacaggttttttactctgtagtggtcctgtcagtaaaagaaatttaatatagactcttatcgctctgccatctcatttaagtgtgcaggtgactgagaa

SEQ ID NO: 78533 - DNA, 599 bp, Chicken  19866894368289_4
  misc_feature (1)..(99): n is any nucleotide
nnnnnnnnnnnnnnnnnnnnnnnnnnnnnnnnnnnnnnnnnnnnnnnnnnnnnnnnnnnnnnnnnnnnnnnnnnnnnnnnnnnnnnnnnnnnnnnnnnncccagctgtacagcggagctgctgaatctcccaccaaagacttttgcccattccctctagcaaaaaagaaaaaaggagaaaaaaagaaaagaaaagaaaaaaaaaactttcagaattatatattgggtctattttttcttctctccaataggcaaagtttaacaagaccaaagcctgctggacaaattaaataactaaagrattgaaagaacttgcagaaatagcagtttcaggcttctttaattatccatagatgccaaaaggcataacaaggaggagattcatatcaaatatgtgacaggttttttactctgtagtggtcctgtcagtaaaagaaatttaatatagactcttatcgctctgccatctcatttaagtgtgcaggtgactgagaaatgcacgccaggaaaattcatctcctcagaatctgtactgttctgacacagaaaaacatactgggctggaagaaggaatgagragaagcagtaaagtatttctcc

SEQ ID NO: 78534 - DNA, 600 bp, Chicken  19866894368289_5
tggacaaattaaataactaaagrattgaaagaacttgcagaaatagcagtttcaggcttctttaattatccatagatgccaaaaggcataacaaggaggagattcatatcaaatatgtgacaggttttttactctgtagtggtcctgtcagtaaaagaaatttaatatagactcttatcgctctgccatctcatttaagtgtgcaggtgactgagaaatgcacgccaggaaaattcatctcctcagaatctgtactgttctgacacagaaaaacatactgggctggaagaaggaatgagragaagcagtaaagtatttctccagcatgtattatttgtaaatattgcaggaaaattatggaagtagtggtgttatgttgttaacgtgtttggtgaatggggagttttgcaagcttctatatacttatcttgtatggtgagacataaaaggagcgatattttccagcatgattcatttatttagacgctctataggaaagattcttcccttgaacagcccagttcatgactatgaagagagctgtagacagtgttggggaatacctggtgctgcacctaatgtgtgtctgtcactgtttcc

SEQ ID NO: 78535 - DNA, 599 bp, Chicken  19866894368291_1
  misc_feature (1)..(83): n is any nucleotide
nnnnnnnnnnnnnnnnnnnnnnnnnnnnnnnnnnnnnnnnnnnnnnnnnnnnnnnnnnnnnnnnnnnnnnnnnnnnnnnnnnnccagcttgctttattagggaaggcagatggttttatttctgtctttgaaggaagcttttagtgaagtgggtgaaaagtcaggagcagttaaaactactctattcctcagaggaggaggaaaagtcctagattttgttatctcactttgcactggtcagcagcagaactgaggcagcgcagtgagttgtgtcgcttcttggcggagggcattgggatragtgagaacatttcttccagtttaggagtttcaactgggttcaaaactgctactctgaggctggggctatcctgttctcatctaaatacctgttaacatgtcaaacagacaaagctctccttgtgcaccatttgggttttacaatagttagtttccagttttccatgatccagcaagtgcaggaaatttgttgggtttgtcttaagtcataaacaatttcaaagcatagattaagttttgacccagggtcttatctttctggggcattgtctgtgtctggcagcacagtggtggagtgt

SEQ ID NO: 78536 - DNA, 599 bp, Chicken  19866894368298_1
  misc_feature (1)..(74): n is any nucleotide
nnnnnnnnnnnnnnnnnnnnnnnnnnnnnnnnnnnnnnnnnnnnnnnnnnnnnnnnnnnnnnnnnnnnnnnnnnttttatacactttttccttaagaacttgggatattatagacactattgccttcatgtaatagatttgtaatgacacgacgctgggaaagctggtgtactaattaatttgtcccattccttctctctgcagtccactgtgatggtgcttcgcaacatggtggatccaaaggacattgatgatgacctggagggagaagtgacggaagagtgtggcaaatttggggcygtaaacagggtcatcatctaccaggagaagcagggagaagaggaggatgctgagatcattgtcaagatcttygtggaattctccatggcctcagagactcacaaagccattcaggctctgaacgggcgctggtttgctggcaggaaggtggtggcagaggtgtacgaccaggagagatttgataacagcgacctgtcagcatgaactctacaggaaggacttggcccctgtcccctctgcctgtctgtttttttagccatgtgtaaagaatgctcccaagtgggcacagatctctgtga

SEQ ID NO: 78537 - DNA, 599 bp, Chicken  19866894368298_2
  misc_feature (1)..(2): n is any nucleotide
nnttttatacactttttccttaagaacttgggatattatagacactattgccttcatgtaatagatttgtaatgacacgacgctgggaaagctggtgtactaattaatttgtcccattccttctctctgcagtccactgtgatggtgcttcgcaacatggtggatccaaaggacattgatgatgacctggagggagaagtgacggaagagtgtggcaaatttggggcygtaaacagggtcatcatctaccaggagaagcagggagaagaggaggatgctgagatcattgtcaagatcttygtggaattctccatggcctcagagactcacaaagccattcaggctctgaacgggcgctggtttgctggcaggaaggtggtggcagaggtgtacgaccaggagagatttgataacagcgacctgtcagcatgaactctacaggaaggacttggcccctgtcccctctgcctgtctgtttttttagccatgtgtaaagaatgctcccaagtgggcacagatctctgtgatgtactcgtagtttggataaaagcaccaagaaagttaacttgtgtttttgcgtgtattaaagggacgaatgc

SEQ ID NO: 78538 - DNA, 599 bp, Chicken  19866894368306_1
  misc_feature (1)..(31): n is any nucleotide
nnnnnnnnnnnnnnnnnnnnnnnnnnnnnnnctctggtagatatgactaatcttaaatcttgccagaaaaaaagcaaaaaaaaaaaaccaacccatgttttatgcgaacattaaaatagaccaaagtgcatcagaatgacagatctggtttaaaattgtgccacttcacccagacttcagctcagcaacatcatacagagatgatgctcagagagatggatcttaaaacagcaagcaaaattcttgtgaaaagaaaattgctcgcatccatatgatgtggatttagaagcagcagagtgrgaatttcgagctggtatggaaagctggagggcagtgcagaataaacacacagactgcatcccaattttggtacaaaccttttcaaaaaattgtcatgccctatcaaaaataaaagcacaaaatcaattccrtgttcacgaaacgagagagcatctcctgcaaacgcgatgcttggaactcgcctcagttttgctccacattttcaaaatgttatgtaacatttacttttgatttttcgcatacctacgccatgcaaactgtggaacagcagaattaagtaactcctcacaggatttcaa

SEQ ID NO: 78539 - DNA, 600 bp, Chicken  19866894368306_2
cagaatgacagatctggtttaaaattgtgccacttcacccagacttcagctcagcaacatcatacagagatgatgctcagagagatggatcttaaaacagcaagcaaaattcttgtgaaaagaaaattgctcgcatccatatgatgtggatttagaagcagcagagtgrgaatttcgagctggtatggaaagctggagggcagtgcagaataaacacacagactgcatcccaattttggtacaaaccttttcaaaaaattgtcatgccctatcaaaaataaaagcacaaaatcaattccrtgttcacgaaacgagagagcatctcctgcaaacgcgatgcttggaactcgcctcagttttgctccacattttcaaaatgttatgtaacatttacttttgatttttcgcatacctacgccatgcaaactgtggaacagcagaattaagtaactcctcacaggatttcaaagtttttctacsaggcctagcacaaatgctctgtggaaaagtacagtgttgttacctagcgaatgtctacaaaaaaagagcttctgtttaagtagagaaacaaatgaaatataaaccttctgcaagggcacg

SEQ ID NO: 78540 - DNA, 600 bp, Chicken  19866894368306_3
tggtatggaaagctggagggcagtgcagaataaacacacagactgcatcccaattttggtacaaaccttttcaaaaaattgtcatgccctatcaaaaataaaagcacaaaatcaattccrtgttcacgaaacgagagagcatctcctgcaaacgcgatgcttggaactcgcctcagttttgctccacattttcaaaatgttatgtaacatttacttttgatttttcgcatacctacgccatgcaaactgtggaacagcagaattaagtaactcctcacaggatttcaaagtttttctacsaggcctagcacaaatgctctgtggaaaagtacagtgttgttacctagcgaatgtctacaaaaaaagagcttctgtttaagtagagaaacaaatgaaatataaaccttctgcaagggcacgctcccctgggacagcaggttcctgaagattcagagggtaaaactgtcagaagcttttgttacaatctaggcagcacatcacagccacagagactgaagatattaaaaagaaaaacccttttagttcgggctcggtcagaactagctgtgtgcttccagatgctttgaccccagggagtta

SEQ ID NO: 78541 - DNA, 600 bp, Chicken  19866894368306_4
tattaaaaagaaaaacccttttagttcgggctcggtcagaactagctgtgtgcttccagatgctttgaccccagggagttattagtgacatttttttttaagtaatctttaacattttctgtcttttgtccttaatacattaagaaattacagcctaaggggaatggactcccaagtgccacatcactccctggagcagccagctggcagctccatctccccagccaagcctggcctccatgccaggaaatacatttcctacatctacatctacacctacatcctacatctgcatctacytcctaattagtattagattgtctttgggaagagattaatgggctgctttggcttttcgagttctcaacgcttctactgacaaattccttcaaaatcttttgtgtctccctgctgcccagtatctttcccaaatttcactttgcaagatggagacccagtgataatgtggctttagcctgtcactcatagcaaccagtgtagggccatgaatgtctacgaggggaatgtatttaatgaaaggaacaaagaataactttgagacagatgttcaaaagtggtgaccgtcacagcagcaagaag

SEQ ID NO: 78542 - DNA, 600 bp, Chicken  19866894368308_1
aatatcagatgcagacgtctgcattctgtttctatctctctacaagctgtgtcatactgtcaagaccagacttcaaactgaactttggaggagataggcttcatacattgccctgagaggcttctaacatgcctacgtgtttcttggaactgagagctacaagctatcatgtctgtacctatagctgaatgcatgggacttgaggcacatctgtttcacatgcacattgcctgatccttaagactctgaggtatcaccatagcttcatagaccactagatcagggagttagagtgaagcyggagtccagttccagtgactggataggtttgtccttctgagatgcaggatgacacagataagccgataagtagttaaagcagctttcttgttgatgaagcaggtattatatctccatgcagaacttcttcaactgttttcactaaggcaaaatattttcagtttacacaccgaacacaagtaactagaattaaggaggatcttgaggagagctggtaccagttttcttgttctttttcctatccatgagagatacgacactgcaggtgctcctttgtgacacacagctgagaataaacac

SEQ ID NO: 78543 - DNA, 600 bp, Chicken  19866894368308_2
cttctacagttttgcagaagtctacacaaaagtcagggatttcatcaatagattaatgctaaagtgcttgtttaactctgtttgcatataagacatcctaatgattattaaaataacagggccagaagagtctgtcacactcgtgtgttctttcttgtttgtttaagtataggtcttctaagtgaaaaatttaagtcacagaccttaaaactgagggtatatttgtgctcaaaaactgtggcctaacacagaagtgtaaaatggtggaatggggctctacttctcaactgcataacatgyaatggtttgagtgcacagtaacagatggaaatgtaagctgtagtatcaagaaaagatattccttcattttaatgtgggcaggcatgatgaacaagtgcaaataaacttcactcaaaatatgtcatggaatacttagaaagccaaaaatactctgcagaagaccacttgttccacagtatctatttaaaaggtaggtttgggctgatttagaaactcagcatttttctataacaaaatatccacactagaaacatgtttccctcactggtagggtactctatcaaaccacttactgaagtg

SEQ ID NO: 78544 - DNA, 600 bp, Chicken  19866894368308_3
tcatggaatacttagaaagccaaaaatactctgcagaagaccacttgttccacagtatctatttaaaaggtaggtttgggctgatttagaaactcagcatttttctataacaaaatatccacactagaaacatgtttccctcactggtagggtactctatcaaaccacttactgaagtgatgcacagcaataggctttgttacagtgatacccatatatgagaaataattcactaccctttctaaaatttaccatcagactcattgggcaagtgaagctctaaagtccctaaaaaaaaamccaaccaaacaaaacaaaacaaaccaagaaagaactttaaaaccacctgcaggtggtaaatgcaatcagatgctctgtatagattcatcacataattcccccaaggaaacagatgaaatcattacactgagcggctgtatgcttggaaagtactgtttgtaattgaactattccaaacactgccactaaaaatgcatccttcagatgtcaaaatctgctctgccaaggagtgtacgtgttcccctggaacaagccatggcagagcttggatgtaactgaatgagacatttgatcaaagtg

SEQ ID NO: 78545 - DNA, 600 bp, Chicken  19866894368323_1
aacaagtggagccagacctggacttctataaataagatttactctattggctaaataatgacatctaaactggtctgatttaactgactatggcagttcttagagcaaaatttaattacactttgtacttattacagttcctttgtgtgccttcttgcttcccagcaattttgaaatatagacttaagcctgctatacaatacatctccatacctgtagtgacatgtgctaacagatggcacggcgcgcggagcagcaggcgttgtcattggcggtggccagcttttccctgaagttatsgcactctgcrcaagatggcatggagcaatcgccggccgttcccgctggctggcgagagcatgactcagcaccagcgctttgtataatgcacaagggctctactttcctgaaatgctttcatatttgtggagtgcgttcattatggaagcgtgctaagtaatgggtgtgctgggatggtgctgctcagccctggaagcgctggcattttggaaccttgggtgggctgagcaacgccgctcctccagagcggaagaggtgaagaccgcctgtttgtggatgtgggatagtattgcactataa

SEQ ID NO: 78546 - DNA, 600 bp, Chicken  19866894368323_2
gccagacctggacttctataaataagatttactctattggctaaataatgacatctaaactggtctgatttaactgactatggcagttcttagagcaaaatttaattacactttgtacttattacagttcctttgtgtgccttcttgcttcccagcaattttgaaatatagacttaagcctgctatacaatacatctccatacctgtagtgacatgtgctaacagatggcacggcgcgcggagcagcaggcgttgtcattggcggtggccagcttttccctgaagttatsgcactctgcrcaagatggcatggagcaatcgccggccgttcccgctggctggcgagagcatgactcagcaccagcgctttgtataatgcacaagggctctactttcctgaaatgctttcatatttgtggagtgcgttcattatggaagcgtgctaagtaatgggtgtgctgggatggtgctgctcagccctggaagcgctggcattttggaaccttgggtgggctgagcaacgccgctcctccagagcggaagaggtgaagaccgcctgtttgtggatgtgggatagtattgcactataaaattatatta

SEQ ID NO: 78547 - DNA, 575 bp, Chicken  19866894368324_1
taacataaaaatagtttaattaaaattaattttgctgtcatctccttgtttttgttcagttcagttgtaggatgcaaaagcaaaggatcttattgatatatgtaacatttctgtattttctttaaaattttatatagtatttgtttattcctggccctctggaacttcacttcagtatactaagacatcttaaaaatcagtggttcagagaatactttttttttaatattctttccataatattaatcagttttgaaatatcaagcctaaaaatctgtgattctgtctctgcagtgtttytgaaaatactaaaaaagaatacagctttttagtatattgtacacttccagtaaagcacatgtatctatgtgtaacacaacaatggaatatgacccaaataatcatgtgatcttcaaattacattataatgtattttgcaagggctatgtccaattgagtgttgagtatttccatgaatgaatatcccacagcctctctagggaagctcttaaagtgtttgatctccctgatgctgtaaatgctcagaatttatggccttcaagtattttatagag

SEQ ID NO: 78548 - DNA, 600 bp, Chicken  19866894368337_1
actgcagatggaggccagagaagttggacagctggatctggcataaggatgtccaggtgcactctagctcctggaccaggactggcagacaagtacccccccagaaaagggagcagacaggaagggaaaaaaaccatcacataaagctgttagcattcttaagcctgtgcaatagcgatgtcacctgcctaaagtctcattttgtgaagataccactaagccgtaactgaaattgtcaaaactatgtccaagaagcaagatcacgtgtaatttcatgttgacaagttcatgagaatagcragaaattgaatttaaacacttactgtttgttggcattgcagctactccaatataattccttttctacttcaaaagatgaaaattagccttcagtaacaaccaaattaacaaaacattactgtatgtgaattagacatgcttataataatttttacattcacccttttaatctacagtgtcgtatttcatgtattaccgtaaatccttaagaaagaaaatgtaacccaagaactgattaggcaacaaaaacaagcaaattaattctgtatcacttcttaattctcagaaagagcgccgctg

SEQ ID NO: 78549 - DNA, 595 bp, Chicken  19866894368340_1
agtcccacactgggaagttcagaagcctagatttcccccaagtgttaaacagcattggggcagggcaagaaagtttagctcatttattttgccatcatgggaagattctcacattctggcagttgtgcctacctatggtttcaagatgacacatagcagatataagcaagtatgagttatgttattctgctatgccacagcatactgctcagtgctgttaggactagaaacacaacaaagaacatacaacacttaatgtattatcacctctttccctaacacttgtacacagaaaagcayctcaaacctgaaacaacactgaacaaaaccacagatgcataagtgtacctgcacttaatgtacaaattcaaaagtatgtgttctagacttattaagtgtttgtcattgctacaagcacccagtgtatatatcagaatttggctttgtttatttttagagcatttatttatttatttacagtacttcagtccaaatgtaataccttggtatagatacccatgtcttatgtaatcactggatcttccataccacactgattttcactgaagataccaaatggatatagtacagatgt

SEQ ID NO: 78550 - DNA, 600 bp, Chicken  19866894368351_1
accttctgtgctggttgaaaacaagccagtgtctcactcatgagatcttcctcacaacaccctgccccagggatgagaatcaacaaagaagagcacagcaatttaagggtgaaagaaaaggtatttctaagtccttctccaagagcactgaataatgtcttcccagaggagaaaggactttcagaccaaccatgagcaggatgagtttggactccccaaaatggaatgcaggtcacctgagaagcaaggtaagactaacgttttgcctgcccagaaggtaaaggaatgaaataatgcttytggcaaaacatagccttgaaggaaaacagtgtgttctgaattacaagraagaagaaagccccttgtgttgagactgtcagcctgcacccaaggcctgaagatttctaatgctgcggggaagaaactgttgaaagtcatgagaggaaagtgaagcctcacagaattcttgaacctgagacacagatgaaacccaatgtcaaaagcaaacaacaatgaaactctgcctctaccaaatacataataccctttcccaggtgattattaaccatacctatcagaacattaaggcctgaatgatag

SEQ ID NO: 78551 - DNA, 600 bp, Chicken  19866894368351_2
tcctcacaacaccctgccccagggatgagaatcaacaaagaagagcacagcaatttaagggtgaaagaaaaggtatttctaagtccttctccaagagcactgaataatgtcttcccagaggagaaaggactttcagaccaaccatgagcaggatgagtttggactccccaaaatggaatgcaggtcacctgagaagcaaggtaagactaacgttttgcctgcccagaaggtaaaggaatgaaataatgcttytggcaaaacatagccttgaaggaaaacagtgtgttctgaattacaagraagaagaaagccccttgtgttgagactgtcagcctgcacccaaggcctgaagatttctaatgctgcggggaagaaactgttgaaagtcatgagaggaaagtgaagcctcacagaattcttgaacctgagacacagatgaaacccaatgtcaaaagcaaacaacaatgaaactctgcctctaccaaatacataataccctttcccaggtgattattaaccatacctatcagaacattaaggcctgaatgatagtcataaattcctagggactctgagaaatgcaacaacccatgattaaga

SEQ ID NO: 78552 - DNA, 600 bp, Chicken  19866894368354_1
aatagcaacaggaggagcactgtctcgaaaggaactgttgcgcttttgttgtttgtctttctcttttgtgtggactccaagcatgaattccatggcgctgacaagcagggatttgacagctggatgtgcacccttacctgccaggaccaccacctctgtttctgagggctccctggcatcgcgctgcagttggcgtttggccacagaggatggatttctgggcttgaaacaggaacaccaactgcatgctggggattccttcaccctgctgggtggacttggtctggagggagaaaagarggagcggtgtgagtcgtgcatggtgcagggtgagggaagagctgccctgagctcttgccaacacttgcttgttcctagcactgcctgcttcctgctgaaacacaactttgaagctcgctctgattcacacagttgaggttccattcctagagctcagtcctggagttttgctggctacattcccctcagccatgtcaacccagatgcagagcatgcctgttagttgaacctcagagtccaaaggaaggggacattcagtacaccaccacacgcaccattggcgtcacgtagcttctgcaa

SEQ ID NO: 78553 - DNA, 600 bp, Chicken  19866894368358_1
agaactgtaggtttttttccatccatagggacagattatctgaatttgcagatgacttcatcgatgtcagtgctgttggcagctgagatgcttgtctgtgaaaatgctgcagaatgacttcacatcatcaggctcatgacttaatcttaccctagctagagaacaaggggtggtaaacatgccagttgcctacctaacgcaggtctctacctaatgatggtctctacctaatgagggtctttacctaacaaaggtctccataggcctgggaagtcagaccaaagcttcagtgaccacacygcttgggctcagagggatacatcctgcatttccaaggaaacgatacagcaaagcaggactccctttcttagggcatggcagatgtgcacaaataatgaagaaaaatgcattcagataaagtttcttttgattctgtggraaaagcaggttgagaatgaaaatgatcgtcaaagcaagaggaggagaaatacatatgtatatatagaaccgagaggcaggcttaaaaaatgaaaacaaaaggagcaaggagaaaaataaataagcctagagcaaaaacacaggaggaagaagaggaaacaa

SEQ ID NO: 78554 - DNA, 561 bp, Chicken  19866894368358_2
cttaatcttaccctagctagagaacaaggggtggtaaacatgccagttgcctacctaacgcaggtctctacctaatgatggtctctacctaatgagggtctttacctaacaaaggtctccataggcctgggaagtcagaccaaagcttcagtgaccacacygcttgggctcagagggatacatcctgcatttccaaggaaacgatacagcaaagcaggactccctttcttagggcatggcagatgtgcacaaataatgaagaaaaatgcattcagataaagtttcttttgattctgtggraaaagcaggttgagaatgaaaatgatcgtcaaagcaagaggaggagaaatacatatgtatatatagaaccgagaggcaggcttaaaaaatgaaaacaaaaggagcaaggagaaaaataaataagcctagagcaaaaacacaggaggaagaagaggaaacaaatgagacaaatagcaggaaaagggtcagcagtgaaagccctgattgcttgattcagtcaagccattgcatgtgctgcttggggcagggcgggaagccaat

SEQ ID NO: 78555 - DNA, 600 bp, Chicken  19866894368360_1
tttttcatgtaaatatatctgcatgctgtgtatttatatattcacaacagaaagctcacagctgctgtgatacaaacaagtcatacctcgcatgtcaaaagctttccagcagagatgcattggccatgggcactagatatttgcatagccacttaagttcaaagaatggaacaaaacttctaggctttcatgtggtattgattcaaaggtgccattcttagtgaagttggcttcactgtaaatcctaacgtccagaggtttcacactgatagacagtgaagttacaccatgccactagcwcctcaacagtatatgatgaaaaatctcagactaatataaataaagggacatcacttaccaattactgtcatgggcaaaacagattcagcatagagagattaatttaatttactgcctattactagaagactagatcagtaagaactaaagcaagctaattatagaatcatagaatatcctgagttggaaagggacccacaagaatcatcaagtccacctttttttctgaaagcactgtccaaattaggcttactgttaggcttactggcattaccacagccctggggatccttttctagt

SEQ ID NO: 78556 - DNA, 599 bp, Chicken  19866894368367_1
  misc_feature (1)..(65): n is any nucleotide
nnnnnnnnnnnnnnnnnnnnnnnnnnnnnnnnnnnnnnnnnnnnnnnnnnnnnnnnnnnnnnnnngagaagacaggtgaaaaaaggtgtggattaaaaagagatgatcaagcgctgacagtcatggctggagctttagtgctttgtggttacacagcaggaacagttttcacacacttgttgtggaaataaagggctgatggccaccctcatccttctgtctaagctacagaagccaagatccacccatgaatgcttccttttgagatgaaaagatgcttcctctccagctgagaaagcycagcacaccagaatctctcatcattcacatctttgcaaatctcactggagctagttgtaaccacactgtgctacacaagctacatcagactatttgtcagcatttattttgtcctcaattagaaacagaaaccaaaactctgtgtactaggtcttaaaagcaagcaaaaagcagcatacctaacactgagcggtgattcaactgagagacccagaagagcacaggcatctcttgtgaagatgtcacagatgtccgcccactgatttgcatctaatagatgaacgtacggcgagttctct

SEQ ID NO: 78557 - DNA, 536 bp, Chicken  19866894368367_2
tacatcagactatttgtcagcatttattttgtcctcaattagaaacagaaaccaaaactctgtgtactaggtcttaaaagcaagcaaaaagcagcatacctaacactgagcggtgattcaactgagagacccagaagagcacaggcatctcttgtgaagatgtcacagatgtccgcccactgatttgcatctaatagatgaacgtacggcgagttctctataccttgcctcagatacaccaggctgcccatcaaaacctgaatatctgtgagggaccaggaacagttagttgttttatgytatgaataaaagctggcgtcttcagttctagattgtacgagggaaacragcagaagtggaayatataccaaaacaacgacacatatcctcacctctacaacctacaattccagccaccacagagcagacactttcacctatgagagccccaatgtgctatgaaaataaatgaaaacaatgaccaaaaacacacttggaacatgacttgtacttaactaccacacgccacttccaag

SEQ ID NO: 78558 - DNA, 488 bp, Chicken  19866894368367_3
aaaccaaaactctgtgtactaggtcttaaaagcaagcaaaaagcagcatacctaacactgagcggtgattcaactgagagacccagaagagcacaggcatctcttgtgaagatgtcacagatgtccgcccactgatttgcatctaatagatgaacgtacggcgagttctctataccttgcctcagatacaccaggctgcccatcaaaacctgaatatctgtgagggaccaggaacagttagttgttttatgytatgaataaaagctggcgtcttcagttctagattgtacgagggaaacragcagaagtggaayatataccaaaacaacgacacatatcctcacctctacaacctacaattccagccaccacagagcagacactttcacctatgagagccccaatgtgctatgaaaataaatgaaaacaatgaccaaaaacacacttggaacatgacttgtacttaactaccacacgccacttccaag

SEQ ID NO: 78559 - DNA, 474 bp, Chicken  19866894368367_4
tgtactaggtcttaaaagcaagcaaaaagcagcatacctaacactgagcggtgattcaactgagagacccagaagagcacaggcatctcttgtgaagatgtcacagatgtccgcccactgatttgcatctaatagatgaacgtacggcgagttctctataccttgcctcagatacaccaggctgcccatcaaaacctgaatatctgtgagggaccaggaacagttagttgttttatgytatgaataaaagctggcgtcttcagttctagattgtacgagggaaacragcagaagtggaayatataccaaaacaacgacacatatcctcacctctacaacctacaattccagccaccacagagcagacactttcacctatgagagccccaatgtgctatgaaaataaatgaaaacaatgaccaaaaacacacttggaacatgacttgtacttaactaccacacgccacttccaag

SEQ ID NO: 78560 - DNA, 548 bp, Chicken  19866894368369_1
tcctcatgtcaaaaacaaagcaagtaaacaaaagcaataattaaaaaaactaaactaaacaaaaaaaaagtcttgccattgtagctggcatggatttagctgaggaaaaacattaagtaaaaattaaaatggagctgctcctgactgtctagtcaaaaagagtatcatctactgctcattcagcttgttcttagtacacaactagcgaattattttatgcttcatacacatcacatgctaaagaagcatgctcataaaaatgcagttacaggaaagtgcttttcaggaaaataaaatccmaaagtctgagaaggaggaagagctcctctcggtatccrcatttgtcacagacaaaataaataaataaataaataataaaaaataaaagattaagtcccaacattctatgaccttcacacaacaaattactgtttataaagacatttctacttcatgtgaccaagtgttgtttctagatggctgctccaaatgactgatggaacttttggctctgcgataaacaaagaggatgacccacagagcacagg

SEQ ID NO: 78561 - DNA, 510 bp, Chicken  19866894368369_2
aattaaaaaaactaaactaaacaaaaaaaaagtcttgccattgtagctggcatggatttagctgaggaaaaacattaagtaaaaattaaaatggagctgctcctgactgtctagtcaaaaagagtatcatctactgctcattcagcttgttcttagtacacaactagcgaattattttatgcttcatacacatcacatgctaaagaagcatgctcataaaaatgcagttacaggaaagtgcttttcaggaaaataaaatccmaaagtctgagaaggaggaagagctcctctcggtatccrcatttgtcacagacaaaataaataaataaataaataataaaaaataaaagattaagtcccaacattctatgaccttcacacaacaaattactgtttataaagacatttctacttcatgtgaccaagtgttgtttctagatggctgctccaaatgactgatggaacttttggctctgcgataaacaaagaggatgacccacagagcacagg

SEQ ID NO: 78562 - DNA, 600 bp, Chicken  19866894368373_1
ttggactccaaaaaggtcacatcagccacgagtgaagaaagaaaggaaaacactcagcaagatgaatattgctcagagcattaattttcccctacttcctcccacagcagggtcgtaagcaattaagagtcctcatagcaggagcacttttactgacatactttgctcttactcaaagttttttcagatctcttactttggacaggtggtcgatgtatgatccaacaaaactcactgctctttgccaattaacctagaaagtatattttctccgacaaaaggttggaatctttctttccktttatacttcttgttttgtrcgaggtgagcctcrctgggggtcggtctcttttcccaggtaattagtgataggaggagaggtaatggctttragctgtgctaggggaygttcaggtcgggtagtaggaaaaacttcttcttagaagtagttgggcactggagcaggctgcccaggraggtggtggagtcaccgtccctggaggtgtacaagaaccttggtgttgtgacactgagggacacggtttagtgatgtggtgatgatgggttggcagctggactagatgatcatagaattctttc

SEQ ID NO: 78563 - DNA, 600 bp, Chicken  19866894368373_2
atcagccacgagtgaagaaagaaaggaaaacactcagcaagatgaatattgctcagagcattaattttcccctacttcctcccacagcagggtcgtaagcaattaagagtcctcatagcaggagcacttttactgacatactttgctcttactcaaagttttttcagatctcttactttggacaggtggtcgatgtatgatccaacaaaactcactgctctttgccaattaacctagaaagtatattttctccgacaaaaggttggaatctttctttccktttatacttcttgttttgtrcgaggtgagcctcrctgggggtcggtctcttttcccaggtaattagtgataggaggagaggtaatggctttragctgtgctaggggaygttcaggtcgggtagtaggaaaaacttcttcttagaagtagttgggcactggagcaggctgcccaggraggtggtggagtcaccgtccctggaggtgtacaagaaccttggtgttgtgacactgagggacacggtttagtgatgtggtgatgatgggttggcagctggactagatgatcatagaattctttcccaacctgaatgattctaag

SEQ ID NO: 78564 - DNA, 600 bp, Chicken  19866894368373_3
aagaaagaaaggaaaacactcagcaagatgaatattgctcagagcattaattttcccctacttcctcccacagcagggtcgtaagcaattaagagtcctcatagcaggagcacttttactgacatactttgctcttactcaaagttttttcagatctcttactttggacaggtggtcgatgtatgatccaacaaaactcactgctctttgccaattaacctagaaagtatattttctccgacaaaaggttggaatctttctttccktttatacttcttgttttgtrcgaggtgagcctcrctgggggtcggtctcttttcccaggtaattagtgataggaggagaggtaatggctttragctgtgctaggggaygttcaggtcgggtagtaggaaaaacttcttcttagaagtagttgggcactggagcaggctgcccaggraggtggtggagtcaccgtccctggaggtgtacaagaaccttggtgttgtgacactgagggacacggtttagtgatgtggtgatgatgggttggcagctggactagatgatcatagaattctttcccaacctgaatgattctaagattcttctatgatt

SEQ ID NO: 78565 - DNA, 600 bp, Chicken  19866894368373_4
tacttcctcccacagcagggtcgtaagcaattaagagtcctcatagcaggagcacttttactgacatactttgctcttactcaaagttttttcagatctcttactttggacaggtggtcgatgtatgatccaacaaaactcactgctctttgccaattaacctagaaagtatattttctccgacaaaaggttggaatctttctttccktttatacttcttgttttgtrcgaggtgagcctcrctgggggtcggtctcttttcccaggtaattagtgataggaggagaggtaatggctttragctgtgctaggggaygttcaggtcgggtagtaggaaaaacttcttcttagaagtagttgggcactggagcaggctgcccaggraggtggtggagtcaccgtccctggaggtgtacaagaaccttggtgttgtgacactgagggacacggtttagtgatgtggtgatgatgggttggcagctggactagatgatcatagaattctttcccaacctgaatgattctaagattcttctatgattgtatgagtctatcagcagctttctgcccactgtccagcaccagcaaaatgcaatcaaa

SEQ ID NO: 78566 - DNA, 600 bp, Chicken  19866894368373_5
agggtcgtaagcaattaagagtcctcatagcaggagcacttttactgacatactttgctcttactcaaagttttttcagatctcttactttggacaggtggtcgatgtatgatccaacaaaactcactgctctttgccaattaacctagaaagtatattttctccgacaaaaggttggaatctttctttccktttatacttcttgttttgtrcgaggtgagcctcrctgggggtcggtctcttttcccaggtaattagtgataggaggagaggtaatggctttragctgtgctaggggaygttcaggtcgggtagtaggaaaaacttcttcttagaagtagttgggcactggagcaggctgcccaggraggtggtggagtcaccgtccctggaggtgtacaagaaccttggtgttgtgacactgagggacacggtttagtgatgtggtgatgatgggttggcagctggactagatgatcatagaattctttcccaacctgaatgattctaagattcttctatgattgtatgagtctatcagcagctttctgcccactgtccagcaccagcaaaatgcaatcaaaggattcacattggtat

SEQ ID NO: 78567 - DNA, 600 bp, Chicken  19866894368373_6
agttttttcagatctcttactttggacaggtggtcgatgtatgatccaacaaaactcactgctctttgccaattaacctagaaagtatattttctccgacaaaaggttggaatctttctttccktttatacttcttgttttgtrcgaggtgagcctcrctgggggtcggtctcttttcccaggtaattagtgataggaggagaggtaatggctttragctgtgctaggggaygttcaggtcgggtagtaggaaaaacttcttcttagaagtagttgggcactggagcaggctgcccaggraggtggtggagtcaccgtccctggaggtgtacaagaaccttggtgttgtgacactgagggacacggtttagtgatgtggtgatgatgggttggcagctggactagatgatcatagaattctttcccaacctgaatgattctaagattcttctatgattgtatgagtctatcagcagctttctgcccactgtccagcaccagcaaaatgcaatcaaaggattcacattggtattacacttgataaagggactgagaagtgggaatgataatgtgtgagaaacaccttcctgatcttgcgga

SEQ ID NO: 78568 - DNA, 567 bp, Chicken  19866894368376_1
aacagcagttttggtaaatgttagctgccttccagagctctgtatttcagcaaaaaataaactgaccgagtacagattcaggtctgtaagagcctggcttgcctccatccttgactctgtagaatgaaggcaggtaactccaggtgctttattccctcctgttctttactctaactgttctggcctccaaacggccaaaggagtaactctgtgtggccagactttatagcaaagtaaatccaggttattctctttgtggaattgctctgatagccgatgggctactttctgccttccagyatccacacgtgtttggctgaggttttggagaactgatgttatcgtgtggaattcaaatttctgccattaatggattccaaaggagttgaaattcgaggtatgatctaaacctgtgagtctgagctttccttttcaggggtgataaatctacgcttagcacagcaggttaaggaaagagatgctttttccttcgtaaaattcatccctctgcttttcttagcataatctgaattttgagtattccagcagtcctcgtgctctgagcat

SEQ ID NO: 78569 - DNA, 585 bp, Chicken  19866894368379_1
tacattttacactgttgctacacattggaaattacgaccagataccacagcagcggcagcgtggaggctggctgcgcgtgcatgtgaatacatgtttgtagcatgccgatttttatttcccctgcttcctcagccttgctgtatgactactgagggactgaggtctgcagctgaaagcctacccgctccgggcaccatgccctgtacctgtagtacctgagcagctttacatgcccacctcagctgcctctgtgggagcagattgctcagcctgggctaacacccacctcagcagcagarccaagcggcccttgtgtgctttgcatgtttgtggctgctgctggtactgagcctggttgtctgctgccacggttacagcactggtgctgtggattagcagaaagggcgcttgtatacccgagagaaggcrtgttgtcatttttgcaaactgtgacattttagatgttgcacagtggggcactgggtagggcttcagatctattccctgtgccccttatctagtgcaatggtacccaggagcttaggggtaccacccaaaacttctttgtacgcctgcagctacaa

SEQ ID NO: 78570 - DNA, 455 bp, Chicken  19866894368379_2
cagccttgctgtatgactactgagggactgaggtctgcagctgaaagcctacccgctccgggcaccatgccctgtacctgtagtacctgagcagctttacatgcccacctcagctgcctctgtgggagcagattgctcagcctgggctaacacccacctcagcagcagarccaagcggcccttgtgtgctttgcatgtttgtggctgctgctggtactgagcctggttgtctgctgccacggttacagcactggtgctgtggattagcagaaagggcgcttgtatacccgagagaaggcrtgttgtcatttttgcaaactgtgacattttagatgttgcacagtggggcactgggtagggcttcagatctattccctgtgccccttatctagtgcaatggtacccaggagcttaggggtaccacccaaaacttctttgtacgcctgcagctacaa

SEQ ID NO: 78571 - DNA, 600 bp, Chicken  19866894368381_1
taagggacataagcatctttcatataaagtaaaagtgagaaatctggggttgttcagcctggagaaggctccaggtgatttttatgatttataagcatgcataaatattggatggaaggtactaaaaggatggagccaggctcttagagatattaagtgactggacaaaagtcaacaagaacacactgaaattcggaaaattccttgtaatcataagaaaggaagaaaagccaacattattctatggttctgtgatttgtgattattccacaaataatggtaacttattaaaaacaaaayaacaacaaaaaataaggaagaggaaaaagaaaaaaaaagaaaaaaaaaaaggaaagaaaaagcaaaaacaagggaaaaggaaaaaggaaaaggaaaaaggaaaaaggagaaggaaaaaggaaaaaggaagaaggaaaaggaaaaaggacaagagaagaaaaaaatggcaaacctatgtgatatgcatcttttaacttaaattatactacagaaaattcataagaacagcttccaatctagtgaaaaatgcacaagatacaattgtctaaacatcagcatcatcttaggcagtatgtggca

SEQ ID NO: 78572 - DNA, 599 bp, Chicken  19866894368382_1
  misc_feature (1)..(127): n is any nucleotide
nnnnnnnnnnnnnnnnnnnnnnnnnnnnnnnnnnnnnnnnnnnnnnnnnnnnnnnnnnnnnnnnnnnnnnnnnnnnnnnnnnnnnnnnnnnnnnnnnnnnnnnnnnnnnnnnnnnnnnnnnnnnnnnccaatgtccatttcctcatcaaaagggcaggggttgcggaagttgtccttaccaagcactccctgatccccaccatattcctcttctcggcctggtgcttgagctcctgccagttcaggaactttgcacaagcaagaagggtttcccccgccgcctacggagcaacagatgcygggagatggtaccacagacacagatcccaagagctggaatgcatgctgccctcaccctccattctcagaccgcccctgaggtgtcagcacactcttgcctgcacaccggccaggtctgaaattcatacctctgcaacacttgaggtctcatcactgttcygaaagagcagagggagcaggccccggcrtacrttcttccgcatttttcccttttgccaccacaccacagcctccatcacatcttggaagaggaggatggaagactctcgtacttcacctgacacctgagggaggagtag

SEQ ID NO: 78573 - DNA, 600 bp, Chicken  19866894368382_2
ttgcggaagttgtccttaccaagcactccctgatccccaccatattcctcttctcggcctggtgcttgagctcctgccagttcaggaactttgcacaagcaagaagggtttcccccgccgcctacggagcaacagatgcygggagatggtaccacagacacagatcccaagagctggaatgcatgctgccctcaccctccattctcagaccgcccctgaggtgtcagcacactcttgcctgcacaccggccaggtctgaaattcatacctctgcaacacttgaggtctcatcactgttcygaaagagcagagggagcaggccccggcrtacrttcttccgcatttttcccttttgccaccacaccacagcctccatcacatcttggaagaggaggatggaagactctcgtacttcacctgacacctgagggaggagtagaggaggacctcagcaacactctcttgctgcgcatggtgagcacgagagyaggtgtggctgatgcaaagtgagccatgatgcttcagagtcacgttccgcatgaatgtgctgtgaattcatgcaaaccactgcaacaggtttccagcatgcagtgcctgygc

SEQ ID NO: 78574 - DNA, 600 bp, Chicken  19866894368382_3
cctgatccccaccatattcctcttctcggcctggtgcttgagctcctgccagttcaggaactttgcacaagcaagaagggtttcccccgccgcctacggagcaacagatgcygggagatggtaccacagacacagatcccaagagctggaatgcatgctgccctcaccctccattctcagaccgcccctgaggtgtcagcacactcttgcctgcacaccggccaggtctgaaattcatacctctgcaacacttgaggtctcatcactgttcygaaagagcagagggagcaggccccggcrtacrttcttccgcatttttcccttttgccaccacaccacagcctccatcacatcttggaagaggaggatggaagactctcgtacttcacctgacacctgagggaggagtagaggaggacctcagcaacactctcttgctgcgcatggtgagcacgagagyaggtgtggctgatgcaaagtgagccatgatgcttcagagtcacgttccgcatgaatgtgctgtgaattcatgcaaaccactgcaacaggtttccagcatgcagtgcctgygcctcagagtgctccctcagccaccctacc

SEQ ID NO: 78575 - DNA, 600 bp, Chicken  19866894368382_4
atccccaccatattcctcttctcggcctggtgcttgagctcctgccagttcaggaactttgcacaagcaagaagggtttcccccgccgcctacggagcaacagatgcygggagatggtaccacagacacagatcccaagagctggaatgcatgctgccctcaccctccattctcagaccgcccctgaggtgtcagcacactcttgcctgcacaccggccaggtctgaaattcatacctctgcaacacttgaggtctcatcactgttcygaaagagcagagggagcaggccccggcrtacrttcttccgcatttttcccttttgccaccacaccacagcctccatcacatcttggaagaggaggatggaagactctcgtacttcacctgacacctgagggaggagtagaggaggacctcagcaacactctcttgctgcgcatggtgagcacgagagyaggtgtggctgatgcaaagtgagccatgatgcttcagagtcacgttccgcatgaatgtgctgtgaattcatgcaaaccactgcaacaggtttccagcatgcagtgcctgygcctcagagtgctccctcagccaccctaccatgt

SEQ ID NO: 78576 - DNA, 588 bp, Chicken  19866894368382_5
ccctcaccctccattctcagaccgcccctgaggtgtcagcacactcttgcctgcacaccggccaggtctgaaattcatacctctgcaacacttgaggtctcatcactgttcygaaagagcagagggagcaggccccggcrtacrttcttccgcatttttcccttttgccaccacaccacagcctccatcacatcttggaagaggaggatggaagactctcgtacttcacctgacacctgagggaggagtagaggaggacctcagcaacactctcttgctgcgcatggtgagcacgagagyaggtgtggctgatgcaaagtgagccatgatgcttcagagtcacgttccgcatgaatgtgctgtgaattcatgcaaaccactgcaacaggtttccagcatgcagtgcctgygcctcagagtgctccctcagccaccctaccatgtcaaagaagctccgcaagcactggcccaaggaggagacagggctgccctttggcagtgcctccagggcacacgccgcctgcttaggctccacctctctgctacggcacctgggggagaatgcctggtgctggcagtaaaaggggc

SEQ ID NO: 78577 - DNA, 478 bp, Chicken  19866894368382_6
cygaaagagcagagggagcaggccccggcrtacrttcttccgcatttttcccttttgccaccacaccacagcctccatcacatcttggaagaggaggatggaagactctcgtacttcacctgacacctgagggaggagtagaggaggacctcagcaacactctcttgctgcgcatggtgagcacgagagyaggtgtggctgatgcaaagtgagccatgatgcttcagagtcacgttccgcatgaatgtgctgtgaattcatgcaaaccactgcaacaggtttccagcatgcagtgcctgygcctcagagtgctccctcagccaccctaccatgtcaaagaagctccgcaagcactggcccaaggaggagacagggctgccctttggcagtgcctccagggcacacgccgcctgcttaggctccacctctctgctacggcacctgggggagaatgcctggtgctggcagtaaaaggggc

SEQ ID NO: 78578 - DNA, 599 bp, Chicken  19866894368387_1
  misc_feature (1)..(175): n is any nucleotide
nnnnnnnnnnnnnnnnnnnnnnnnnnnnnnnnnnnnnnnnnnnnnnnnnnnnnnnnnnnnnnnnnnnnnnnnnnnnnnnnnnnnnnnnnnnnnnnnnnnnnnnnnnnnnnnnnnnnnnnnnnnnnnnnnnnnnnnnnnnnnnnnnnnnnnnnnnnnnnnnnnnnnnnnnnnnnnntttttagaatttccaacttcctcactggggaatccacaagtacagaggtattttcatatcactttcttacttaggccacctcagattaagcacagaccacacactgaagggctggtcactctcartccccttagattaaatgtgcccagaccattgctgtttatggccagaagaggttactgcagaaaaacagaaataataaaaacaatgtggagaaaaccttaaagataagaaatatggtctgccctttcagcagttatgtggggtctgcagaagtgcaataaataaaaaattagagccactagctctttctggcttacagtgtcaggtccaaaaccagattatgagctatccatccatcttcttgttaaaggggatctgttatcatcgtctataaacgaacagagacaagacagtttaccct

SEQ ID NO: 78579 - DNA, 600 bp, Chicken  19866894368402_1
aagttaacctcaccctcttcctcatctgatgggcatgaccctagtgcaagtattgactatcagccagggactaacccgtcatcactgaccccatgtgtgtgattggtataaagaaatgcaaagtaatgttagcataacttctcatacagcactgcttgttcactgcaaatctagattttagttctatgttagctgtaatgttttatttcctaaactgttttttactcccttataggtatagcaataaagttattttttaggtagcaaaaggtgattatttttttctgcctgaaaatacartggtgcattggaaacgtctggcaatatttttatctgacttgtttctgacttccctttcacattacatggaactgctaatcctcaaatgactgaatgatatcttacactgttctttgaaagaaaagtcattgtatcaaatagaactgtctgtgcacatcctgagtgtttaaagattttaagtactttttcagaggaaatctggcctttcttacgtttttatttagaagtgttacagtttattgcctcaactgtccagatgaagcaggaaatgatatgtactaatgcttgtgaaaggaccat

SEQ ID NO: 78580 - DNA, 599 bp, Chicken  19866894368416_1
  misc_feature (1)..(111): n is any nucleotide
nnnnnnnnnnnnnnnnnnnnnnnnnnnnnnnnnnnnnnnnnnnnnnnnnnnnnnnnnnnnnnnnnnnnnnnnnnnnnnnnnnnnnnnnnnnnnnnnnnnnnnnnnnnnnnntttgaaaaatgtaagtatgcttctgggttgggtttgttactaaacctagtactgagaactagcctcctagcacagagagcatttatcagaagtgttttagcaatccagagatgatcagaaggattgacacttgctatctaagttgtacctaagttacacaacttgtagccagggaaatggcataaatcrtggggaaaaaatgggagacaaaatagctttgaattatgtgctatatcaccttatcacacaatggcatttcaaggctcttttcacgaggtgttcattcacttagtggtgtggtctctagtgccgatcaaagtgactgaaagcacaaaggggaaataagtgagctttcagwtctgatttagggcaaagcagagttaatgttccaggatggtatctcagatccatgtagaaattaattatctatgtctgctgtgatcaaattctaaacctratgtctctattagaaacaagaggtaatctga

SEQ ID NO: 78581 - DNA, 600 bp, Chicken  19866894368416_2
ctagcctcctagcacagagagcatttatcagaagtgttttagcaatccagagatgatcagaaggattgacacttgctatctaagttgtacctaagttacacaacttgtagccagggaaatggcataaatcrtggggaaaaaatgggagacaaaatagctttgaattatgtgctatatcaccttatcacacaatggcatttcaaggctcttttcacgaggtgttcattcacttagtggtgtggtctctagtgccgatcaaagtgactgaaagcacaaaggggaaataagtgagctttcagwtctgatttagggcaaagcagagttaatgttccaggatggtatctcagatccatgtagaaattaattatctatgtctgctgtgatcaaattctaaacctratgtctctattagaaacaagaggtaatctgagttttggtgggtttgggggtgctttttggggaggaggcatggactttttttggttctttggttgcttggttgttttttttgtttttgtttttgttttttttgtcagtctgcagattaatgtctgtcaaacatgctagtgcttactgcacttttgtacttattcctatata

SEQ ID NO: 78582 - DNA, 600 bp, Chicken  19866894368416_3
acaacttgtagccagggaaatggcataaatcrtggggaaaaaatgggagacaaaatagctttgaattatgtgctatatcaccttatcacacaatggcatttcaaggctcttttcacgaggtgttcattcacttagtggtgtggtctctagtgccgatcaaagtgactgaaagcacaaaggggaaataagtgagctttcagwtctgatttagggcaaagcagagttaatgttccaggatggtatctcagatccatgtagaaattaattatctatgtctgctgtgatcaaattctaaacctratgtctctattagaaacaagaggtaatctgagttttggtgggtttgggggtgctttttggggaggaggcatggactttttttggttctttggttgcttggttgttttttttgtttttgtttttgttttttttgtcagtctgcagattaatgtctgtcaaacatgctagtgcttactgcacttttgtacttattcctatatattcagcactcaagcttgacttgtgaactaatacagaaaataataatttcaaacattcctttagcttataagggaggaatatctactctagaaaatatca

SEQ ID NO: 78583 - DNA, 600 bp, Chicken  19866894368417_1
cgggcagggagctgacctgtggccacacatgttctggttttgggggcactgagggatgctgatgctggagcacaagccctgttttcactgaggaatctcataatatttctttttccagatgatcgttggcttactttttgggtctgctcttgtcctgcgagcacaatgtgcagctgtgattgctcactcactcaaaatgcagtgactgatgcagtggaagtgccataaaatgcagttgtaggatgtgaaaagtaagggccaggtcctgctgctttgctgctgcttgacaagttgcctctwtgtcaccaaacagaaggagaagtggtagaagagtgagtggaggcattcaggagctcctcctggctgcctcctgatcatcttctacagagtgctgaggaaagcacctgcagtctcagctccaagaggtgatttgtgcctgataatgagggactcattgcagaataaagggagtgccagtgtgccccagccccatgggctgcagcctgcagggacactgcatgcctggggttgtgctggctgtgggttccctgctgctggctatgctctttatgggtgcagttgtgccctgggcaggaaggc

SEQ ID NO: 78584 - DNA, 600 bp, Chicken  19866894368422_1
ccttaggtattgaccttgccagcgtttgttcttacacttgaataggaatgtgtattttcctgcaaaaatttccatatttaaaaagtgtatatatatgtgctactgatttggcaatatatgcctcatgatagtagagacagacatgaaatgactgtgtgtgggtatgtttacccagcctaatctaaactatttctagtgatgacccctctgtccaggaggtcctgtaaactctcttaggcaatatgtataccaatcctttatgaatatgtgaatttcagtgacatcttgccaaagtctttygccaaaggtttagtcagcagtcttcacaactactgagagttaaattaagaaaagcaagtataaatgttgtcttgtggaagaaagaaaaaaaaaaatgaaatattcagaggagctcagaagtattcatagtaacaatgggacttcagatctaccacaagtataaatcaggactgagaagaaggacaatattctacaaaacatcaatttttgaaatgtgctcccatgaacagatgtaaggaaaacaagcatatgtatttatgtaagagaagtacattgtatgtatgagcatgatgcaaatgg

SEQ ID NO: 78585 - DNA, 600 bp, Chicken  19866894368424_1
caaagcaggccccctacagcaggctacacacataggtgtccagatgggttttgaatatctccagggcaggagaatccacagcctccctgggcaacctgttccagtgctctgtcacccttactgagaagaggttcctttgcatattggtgcagaatgtcctatgctcaaatttatggccatttccccttgtcctctccccacagaccgctgaaaagaggataatagtaataattgtccttacatatgttaatatctttaattacaatgaattaacttagtatgcatattggtgtcatgcaktactgttatagcccttttgtaatttgctagtagttaatataacgtcattgcagtgtagccactttctcaggtttattccccattgaggtttttccttttttcctactgctyaaaaataaaataggtgaaacattgaggttgtggttactttcatgccagaaaaatccttggtcgttttaattacattctgttctatcaaaatgtcaagtaatctctttttaaattttttggttactgtactgttaaacttttggctaattctgactgkttttggctgattgaatccgtgacctctagatc

SEQ ID NO: 78586 - DNA, 600 bp, Chicken  19866894368424_2
tcacccttactgagaagaggttcctttgcatattggtgcagaatgtcctatgctcaaatttatggccatttccccttgtcctctccccacagaccgctgaaaagaggataatagtaataattgtccttacatatgttaatatctttaattacaatgaattaacttagtatgcatattggtgtcatgcaktactgttatagcccttttgtaatttgctagtagttaatataacgtcattgcagtgtagccactttctcaggtttattccccattgaggtttttccttttttcctactgctyaaaaataaaataggtgaaacattgaggttgtggttactttcatgccagaaaaatccttggtcgttttaattacattctgttctatcaaaatgtcaagtaatctctttttaaattttttggttactgtactgttaaacttttggctaattctgactgkttttggctgattgaatccgtgacctctagatcatagagtcacataggtggcgggaacttctgcaagtttctggtccatgcctcaactcaaagcaggtccaattagagcaggttactcaaggctctgtcccatcatgttatgag

SEQ ID NO: 78587 - DNA, 600 bp, Chicken  19866894368424_3
attaacttagtatgcatattggtgtcatgcaktactgttatagcccttttgtaatttgctagtagttaatataacgtcattgcagtgtagccactttctcaggtttattccccattgaggtttttccttttttcctactgctyaaaaataaaataggtgaaacattgaggttgtggttactttcatgccagaaaaatccttggtcgttttaattacattctgttctatcaaaatgtcaagtaatctctttttaaattttttggttactgtactgttaaacttttggctaattctgactgkttttggctgattgaatccgtgacctctagatcatagagtcacataggtggcgggaacttctgcaagtttctggtccatgcctcaactcaaagcaggtccaattagagcaggttactcaaggctctgtcccatcatgttatgagtatctttaaggatggaggtcccataccttctctggttccccattcatgtgtttgacagccctcatggcaataagtgaataaataaataacatgatccctaattgatttcctgtattctgacttccatcgattccctttcatcctgtttctgcgcagt

SEQ ID NO: 78588 - DNA, 600 bp, Chicken  19866894368427_1
cagagtgcaacattaaagtctgccttattgaacgtgactcttcccagaaacagacgtgctcagaccagatttccatcttgggttttcagctcatgggatggttgaggctctgtgggtgggtttccttgcaaaccacagctctgggtcttttccaggccctcttttaagggctgtactgtaatgatgtccccagcctgtgtctcggtttccctacctttacaatagtaaggataggcattcttcctgtttcacatgtgaattctgtgagttttcccacctcactgtttttatcagtgttcyctctgtgcttctttgggaagcagtaattgctgaaatagatgagagtcctcttcagcctcaggtctgaggcagcaatgtgggcatcagtgctgtgtgctgccgcagagagcacactgaggaagggaagtaaaatgggcacaaaggaaagcaggaggggaagagaaccaaaccaacaggagcccaaaggctgctcctttactgcatagcttctaaaatgattgcttctttctggcacaaccctgatgttccaaagagctttgatgctgtattacttctatgttagcaaatgatcttggacaa

SEQ ID NO: 78589 - DNA, 600 bp, Chicken  19866894368428_1
cctactcttctatcagtctttcatgtcaaacatagctttaagttatcctgtcttcgttaacacttaattttcattgccatccttgcaccagaattttgccccatttgctgtgtcttctagtcagatttccccagattaacttgtttataactccaaaacagctctagttcttctcagtcctagacttcacccctagctagttccagtcaacgagtatgtgacaacgccctccccacctgctcagatttcacgccatttctccattgcttgtgttgtggtttaacccaacagcagctcagytccacacaaccgttagttcatcacactccctatcccaagtgcgattaaggagcgaaatggaaacaaaatagaacttgtgggctgagataaataccacttactaagacagaaaaggaaaacaggaaaaaaaaaaaaaaagagatgatatacacatatatgcccacaatgcaattactcacaacttgatgcccagctaacagaacaactgcctgctgaccgatgccccaccagcaacacaatgtctcaccatgcaatgactgacacctgcaagcagagcctgccctagccaactcctgacag

SEQ ID NO: 78590 - DNA, 600 bp, Chicken  19866894368440_1
aaatatatacacagaacagtttggcttagttctgaaggaataacagaacatcaacttgcaagggaaacaaaccacaagaagtcatccaataagaagatgagtaaggaagttgactacttgagctaatgtttatttgagcagagctgctgaataaggtcacacggcttgccaaattatgctggttttgcaacagtcttccctaagcagatcacttgtaatcaaatgtttaacacagcattcacaggtattcatctcaaagtgagaatgatgggataggagaagggatgcttaggaaaactwtttttttcccaagccgattgggtaagttcctaatgagtatgctcctagcagagctgaggtatagttcctgtgtttcaaaggaaaggagggaactagggaattacagatcaaatcattaaacttcaagtgatattaaatattgtagaaaataattacactgcaagtactcaggatrtatctgttaagaacaaataacattcattcagcctcctctatatctaaccagaagaagcactgagggtgagatacatcccacctaacttcatatactaataatctagatatagatttttagttgct

SEQ ID NO: 78591 - DNA, 591 bp, Chicken  19866894368440_2
atgctggttttgcaacagtcttccctaagcagatcacttgtaatcaaatgtttaacacagcattcacaggtattcatctcaaagtgagaatgatgggataggagaagggatgcttaggaaaactwtttttttcccaagccgattgggtaagttcctaatgagtatgctcctagcagagctgaggtatagttcctgtgtttcaaaggaaaggagggaactagggaattacagatcaaatcattaaacttcaagtgatattaaatattgtagaaaataattacactgcaagtactcaggatrtatctgttaagaacaaataacattcattcagcctcctctatatctaaccagaagaagcactgagggtgagatacatcccacctaacttcatatactaataatctagatatagatttttagttgcttaggttcccttctgagtaattgcagatgagaagacgcgcattttaaattcactaaagaaacatggtctaggtaaatccaaagccaggtacaattctcagtgggaaatcatattcagagaacagctacctgggggtcttctaaacaggagaatgcttcaagtgagct

SEQ ID NO: 78592 - DNA, 600 bp, Chicken  19866894368441_1
ctttctggagctttgcttaattccttagaaaaggactctcttttcatttccctttcccccagtgacctggaagatgagcagagctcttgtattttggggagggggggaaatgatgctcacctggtgtatttaattccctgctcctaccccccaaagagtatggaggccaaagaacgtcttcttccccgacagaggtagcagcattcagtacctacccggtgaagtccttgcaaagcagaagaggtctaagctggatatcacagggaggaaaaagtgtcttgtgaggctactgaggtaccrtgmtagctaacgccacacatgaagaaatagaaaagaataatgatgatgatgactgttgctttcttcagctgtgtgaacggtgaaggatgaaatgactatgcaaagtatgagcccggaagaaaccttgagaagctgttgggatttgtaaccccctgatgcaggggaagggtggatgcctatacagattgcagagtaacttcactgttacagaaagccaaacattcacctgacacaaactcccaaatctggagatagccatctgctataatgataaccatagcagaagtcttaattaaaata

SEQ ID NO: 78593 - DNA, 600 bp, Chicken  19866894368441_2
tctggagctttgcttaattccttagaaaaggactctcttttcatttccctttcccccagtgacctggaagatgagcagagctcttgtattttggggagggggggaaatgatgctcacctggtgtatttaattccctgctcctaccccccaaagagtatggaggccaaagaacgtcttcttccccgacagaggtagcagcattcagtacctacccggtgaagtccttgcaaagcagaagaggtctaagctggatatcacagggaggaaaaagtgtcttgtgaggctactgaggtaccrtgmtagctaacgccacacatgaagaaatagaaaagaataatgatgatgatgactgttgctttcttcagctgtgtgaacggtgaaggatgaaatgactatgcaaagtatgagcccggaagaaaccttgagaagctgttgggatttgtaaccccctgatgcaggggaagggtggatgcctatacagattgcagagtaacttcactgttacagaaagccaaacattcacctgacacaaactcccaaatctggagatagccatctgctataatgataaccatagcagaagtcttaattaaaataaaa

SEQ ID NO: 78594 - DNA, 600 bp, Chicken  19866894368451_1
aggattactctactggcaagagaagtgtgtagccactgctggtgctcttctgtcatgaggtggaattgtacatttctgagttttcacaaaaagagaacaacttcccccatcatctctaatagttggttaagtggcatagctgaatcctatctgaattcagtatcatgcagagtaagatttctatggagctacacataaaggagaatttcagagccagaaaggaggtgaaagacatgcagactggcttaatctgtttggattggtttagtctaattttattttgtgccaaatgagtcattkctctcggttggagatctccactctcagtagactttccatagtcaaaagccttggaaacataataaaaaaaagtaccagcatatcaaagataaacaccatgtttccttggatattaccatagctagagatattaatcatcactatgtaggagctgtgatgtttaaagtagttctaggtaacttgttttccttctgctgttgtakatttttgtttatttcttttgttgtgttttgggtttttttggtctaattttagtccacctgattcactactatgtaaattctgagacaaagcttccac

SEQ ID NO: 78595 - DNA, 600 bp, Chicken  19866894368451_2
aatttcagagccagaaaggaggtgaaagacatgcagactggcttaatctgtttggattggtttagtctaattttattttgtgccaaatgagtcattkctctcggttggagatctccactctcagtagactttccatagtcaaaagccttggaaacataataaaaaaaagtaccagcatatcaaagataaacaccatgtttccttggatattaccatagctagagatattaatcatcactatgtaggagctgtgatgtttaaagtagttctaggtaacttgttttccttctgctgttgtakatttttgtttatttcttttgttgtgttttgggtttttttggtctaattttagtccacctgattcactactatgtaaattctgagacaaagcttccacctttgatgaaattttgccatgtgcaactgaagggagaaagacaagatgaaaaagctggaatttaggagaagcagacgtgagactgctaaagcctgtgctgactcttgcttgtattcacccatacttctcttctgccagtattttgggagaattccttttctacttattcagggctcattttatgaaatcagtcttacttgcca

SEQ ID NO: 78596 - DNA, 531 bp, Chicken  19866894368473_1
gctgagcacatgccccttaaaagcaattaccaaattactccacgtgcgctgactcacattggcaggattcaccaggatgatttatgctcccttttttctttttttttaaccttatagttgcctggggaaaggcagcacccagaacaatccaagcctggaaatgctgtgagcactggggctgctgcccagtgatttaactctacctgcacatgcttttgcaggacacagaccccaggactctcacccactgtcccatggagacccaaactttccttccacttgtcttccatgctgagcacycaagacaaatggcatggatggatatggccctgctctccgtcctgctatgggctgtgagaggggctggggcacagtacagtgatggagggggcagtgcttcatcctgcaccctctgtactagaagactttcccagctgatacttattctgggacaaacaacagctcttgatcaactgagtgattccagcaagacacattctggctttctttctttctttttctttttttttt

SEQ ID NO: 78597 - DNA, 600 bp, Chicken  19866894368478_1
cgatcaaacagtgttactgtgatctttgtaactgttgtagtttccatggaaagaaataggaggcattactttcagagcgacctacatacagactaagtggaaaagctaactgtgccaaaagaaaaattaacccccaaagcaaagccaagatttgtttctgtagtcttggaaacaagcaagcaaacaagccctagctgtggaaatcttaattctctctcgcttttctgagatccttttctagggaatccttggctaaagaaggaattatatacatttgttttcactaagcatacggtattygaaatgaacatctctggcaacagactgcaacttaatgggaatgtttttaaggaatgtttcatgtcatatgagtaacatcattttaagctcttattatcctcagctcctagatgagagtgatgtgcaaattaatataacacttaaactgcaaagttataaaaaataacctgaagtattttttttcaccagaaaattagacaagagaatacctggattaaaagaaatggacgtcagagttggttacttgcacaaagataaacagaaagcaaaacacatataatcttgctccttaaaaatgat

SEQ ID NO: 78598 - DNA, 600 bp, Chicken  19866894368485_1
catccccccctaatgtcattttagataccttaaagtattcgacctcaccctcctgccagtactgcagcgaggagcaaaactcatctgtgttttgcatcacagctgccactgcccattggtgcctctactatgcatgagcttctcaaatgcaactaaaagtcagtgcacagtaaagtgtatcaaccccttcgtgtactattaatttatttgccagtaaagacagttggtctgaacattttcctgaatatttaatacgttttctgtgaaggggagtttgtgtctgccgctggtgcaactgaygtgctgttattttaaggatgtatttgtttaggggtttggtgctgtctttcctggactttgtccttaaactcttcaggagaatataattgcaaaactgagcagaagaatattttagctaaagatcaagagaagaatctattccagaccccaaggtctgtttgactggaattttctcccaagagaagtagtggaagcctcaatacttgaattatttaaaattggagtaggcaaagagttggagaatactgtaaggatcaattctatattgacaaggggatggactagctgaaccagcaaggc

SEQ ID NO: 78599 - DNA, 600 bp, Chicken  19866894368506_1
cacctcagcctcacagcactgagagaatgctgacctcccatcagtcctccaagtgaatcgccaataaatctatgagatagccatggactcatgaaaaactatgactcatccatttcataagcatttacttaagcaaattcttggcttccttgttacataaggttgagttataccttcacgttctcctgagccacaatgcatacccccaaattagagggaaataattcctaatcacatagcatcacattagtggtctgtattttcagatgctgtaatatcagcaatacaatttagcacagyactgcagttttttgtttatttgaacacagctgtatcagggcacagtcactaacacscagctagtggctcctcagaatcatcacagcttctcagggccagcacagcactgttttttaaatgttaccctgagcatttagtaaacacaacacatttggagatgtgcatcggctycatctctctttccttgtggctgaaatcctagctctgctgaaggctacgggagttttggcacatcctttggagaaccagttttcctttccaattcccacaattcatttccaataacttcttacactgatt

SEQ ID NO: 78600 - DNA, 600 bp, Chicken  19866894368506_2
atcgccaataaatctatgagatagccatggactcatgaaaaactatgactcatccatttcataagcatttacttaagcaaattcttggcttccttgttacataaggttgagttataccttcacgttctcctgagccacaatgcatacccccaaattagagggaaataattcctaatcacatagcatcacattagtggtctgtattttcagatgctgtaatatcagcaatacaatttagcacagyactgcagttttttgtttatttgaacacagctgtatcagggcacagtcactaacacscagctagtggctcctcagaatcatcacagcttctcagggccagcacagcactgttttttaaatgttaccctgagcatttagtaaacacaacacatttggagatgtgcatcggctycatctctctttccttgtggctgaaatcctagctctgctgaaggctacgggagttttggcacatcctttggagaaccagttttcctttccaattcccacaattcatttccaataacttcttacactgatttttggcctgataactttcactggataggatccttaatcggatcaagaaacatatct

SEQ ID NO: 78601 - DNA, 516 bp, Chicken  19866894368506_3
accttcacgttctcctgagccacaatgcatacccccaaattagagggaaataattcctaatcacatagcatcacattagtggtctgtattttcagatgctgtaatatcagcaatacaatttagcacagyactgcagttttttgtttatttgaacacagctgtatcagggcacagtcactaacacscagctagtggctcctcagaatcatcacagcttctcagggccagcacagcactgttttttaaatgttaccctgagcatttagtaaacacaacacatttggagatgtgcatcggctycatctctctttccttgtggctgaaatcctagctctgctgaaggctacgggagttttggcacatcctttggagaaccagttttcctttccaattcccacaattcatttccaataacttcttacactgatttttggcctgataactttcactggataggatccttaatcggatcaagaaacatatctgaacctcataattacaataataagaaaaatt

SEQ ID NO: 78602 - DNA, 600 bp, Chicken  19866894368517_1
gtgaggatttccaatgacaatgcatagcttgagtcatcctttcttgtgaaagtcttgcttgcgggtgggaaaggaaaatggagatgtgcaaggctgcgaggtgagcactgagcattgcatgcaatgtcccatcatcctgggacattttgcaagtagcagatctctttctcccattttccctctaacctgcacataagcaaggttactttctttgtgtaatcttgtatcagatgttggattgccccatagctactggatgcaccagtacgctgggctaacactaagtttcctactgcttarggacacttaggctccaaagggcagtgctgctcattttctgcaaaagccataaggcacaagctgcatgagactgtaaagatctccccaraacttgagaaggagagacgagacatgacgagaaagactacaagactatgtaggctagaagtttaggatgttcatcacagctttggaaacaccacataggcaatattgcttactacggtgctgctcttttcctcctagtggttgcatttaattccctgaaatctgagtgataagggtccttatgtccctgcctgtgtccctgttgccctcaca

SEQ ID NO: 78603 - DNA, 600 bp, Chicken  19866894368517_2
caaggctgcgaggtgagcactgagcattgcatgcaatgtcccatcatcctgggacattttgcaagtagcagatctctttctcccattttccctctaacctgcacataagcaaggttactttctttgtgtaatcttgtatcagatgttggattgccccatagctactggatgcaccagtacgctgggctaacactaagtttcctactgcttarggacacttaggctccaaagggcagtgctgctcattttctgcaaaagccataaggcacaagctgcatgagactgtaaagatctccccaraacttgagaaggagagacgagacatgacgagaaagactacaagactatgtaggctagaagtttaggatgttcatcacagctttggaaacaccacataggcaatattgcttactacggtgctgctcttttcctcctagtggttgcatttaattccctgaaatctgagtgataagggtccttatgtccctgcctgtgtccctgttgccctcacacactcttgatctttgacagttcataaagaatataataccctgcagacttgcctgcacaacaggaatgaaaggatagctcgtcttatta

SEQ ID NO: 78604 - DNA, 600 bp, Chicken  19866894368528_1
agagtcaggcttcttgtctccaggctttttccatctgcgctaaaaagttgagcctaatccaaaacttgggatctcaggcttctcatgtgctaagggtctctgtctctgaaattccagccaggatccaaatttgtgtatgagccttatatttataaaccaaccttctgaaaaccaccagctctactgttctgactaggttattgtgttgtccccttgggaacgaggattaacttggacatgtcatctcactccccagcacaggtgcttggtgaaagagtaactgcttggaaagcaaaaacraggtccttgaaaagagttaagattgggctgatatccaagttgggaaccattcgtgtcctgtttgtgctaattcatactcatttgatgggtattgaatgatggctgtttttttcaaaggtggctgagcacctctagtttccatcagtgtgagcaggaggtttgcatactcaatgtgcattacttaaggaaaaagccccactgactgtccattgggcagcccgcttaatcctgccacttgcaggagccatttgacaggttttctcctgctgttcttgggtagggttcttccttgaaggcaga

SEQ ID NO: 78605 - DNA, 599 bp, Chicken  19866894368531_1
  misc_feature (1)..(152): n is any nucleotide
nnnnnnnnnnnnnnnnnnnnnnnnnnnnnnnnnnnnnnnnnnnnnnnnnnnnnnnnnnnnnnnnnnnnnnnnnnnnnnnnnnnnnnnnnnnnnnnnnnnnnnnnnnnnnnnnnnnnnnnnnnnnnnnnnnnnnnnnnnnnnnnnnnnnnnnntagaaatgcagaatagagtatttctgctgtgcagctgtgtgatttctgacattgtaattaaaaagcaattacctttgctctgatggaatttgtcatgctgtacatctacagatcaaaatcatctcccaataattgatctctgtttcayttactttctggtaaaactttgagactgtgaacacaagtaacccaaacaaaaaagacatctgatattamgtagttttgttcatcttcttcgatcacgtttggcttcaatgttcagttatatgccacagtccatgtgtttgttccttccttctggtttacttatggggatctctacttcctggrggattgagcaaaatcttggcataagcaagaaaaaagaatagaattatggccagatggaatatgtatggcattggagcagggttggggggttaaagaggagcctagagcatcaacagc

SEQ ID NO: 78606 - DNA, 599 bp, Chicken  19866894368531_2
  misc_feature (1)..(84): n is any nucleotide
nnnnnnnnnnnnnnnnnnnnnnnnnnnnnnnnnnnnnnnnnnnnnnnnnnnnnnnnnnnnnnnnnnnnnnnnnnnnnnnnnnnntagaaatgcagaatagagtatttctgctgtgcagctgtgtgatttctgacattgtaattaaaaagcaattacctttgctctgatggaatttgtcatgctgtacatctacagatcaaaatcatctcccaataattgatctctgtttcayttactttctggtaaaactttgagactgtgaacacaagtaacccaaacaaaaaagacatctgatattamgtagttttgttcatcttcttcgatcacgtttggcttcaatgttcagttatatgccacagtccatgtgtttgttccttccttctggtttacttatggggatctctacttcctggrggattgagcaaaatcttggcataagcaagaaaaaagaatagaattatggccagatggaatatgtatggcattggagcagggttggggggttaaagaggagcctagagcatcaacagctstacagctatgtttacttgactttgtgtgcttcagtttagtatttacattaggagacatctcagatg

SEQ ID NO: 78607 - DNA, 600 bp, Chicken  19866894368531_3
gcagctgtgtgatttctgacattgtaattaaaaagcaattacctttgctctgatggaatttgtcatgctgtacatctacagatcaaaatcatctcccaataattgatctctgtttcayttactttctggtaaaactttgagactgtgaacacaagtaacccaaacaaaaaagacatctgatattamgtagttttgttcatcttcttcgatcacgtttggcttcaatgttcagttatatgccacagtccatgtgtttgttccttccttctggtttacttatggggatctctacttcctggrggattgagcaaaatcttggcataagcaagaaaaaagaatagaattatggccagatggaatatgtatggcattggagcagggttggggggttaaagaggagcctagagcatcaacagctstacagctatgtttacttgactttgtgtgcttcagtttagtatttacattaggagacatctcagatgacggtaagaatgtcattaacttgtcaggattgttgttattctcttggtaaattgaggtagtgatatgctgatgctggtgaggtctttttgctttataaataataaaagctaattt

SEQ ID NO: 78608 - DNA, 536 bp, Chicken  19866894368531_4
tactttctggtaaaactttgagactgtgaacacaagtaacccaaacaaaaaagacatctgatattamgtagttttgttcatcttcttcgatcacgtttggcttcaatgttcagttatatgccacagtccatgtgtttgttccttccttctggtttacttatggggatctctacttcctggrggattgagcaaaatcttggcataagcaagaaaaaagaatagaattatggccagatggaatatgtatggcattggagcagggttggggggttaaagaggagcctagagcatcaacagctstacagctatgtttacttgactttgtgtgcttcagtttagtatttacattaggagacatctcagatgacggtaagaatgtcattaacttgtcaggattgttgttattctcttggtaaattgaggtagtgatatgctgatgctggtgaggtctttttgctttataaataataaaagctaatttatatacataatttgcgttgtaagtatattgttatgtagaaatgctctttcttcag

SEQ ID NO: 78609 - DNA, 599 bp, Chicken  19866894368535_1
  misc_feature (1)..(108): n is any nucleotide
nnnnnnnnnnnnnnnnnnnnnnnnnnnnnnnnnnnnnnnnnnnnnnnnnnnnnnnnnnnnnnnnnnnnnnnnnnnnnnnnnnnnnnnnnnnnnnnnnnnnnnnnnnnnctgactcgcattacgatgccgcatccttattaaactgtatgcaactgtagccttacacgactagaaaatgtattttcaagactgcatttataggcagtgggatcctctgaggggttacaatgcccaacacaaggaattcagtgcatcctattgcccagctggtctgttattttccagctcacactgttttcycttaaaatgccaaaacaacgtggactcttttcaaatgacttgatacaagctcttaattctgatgcgtattcacgtattcacattgcaaatcatggtcatacatcaggagtcctcttgtgcccagcattataacgtccttatgtagaaacagcccccaacacccggggagctcagcccatggcaatggtcccgcagccgatcacagtgttggggctcagtcagaagccaggccagatcaacagaaacagacaatcctaatgtcaacagcacatggctttatgaaggaataagcagctgca

SEQ ID NO: 78610 - DNA, 600 bp, Chicken  19866894368537_1
acagaaacttcattgacaaatagctgggaaaatgcttattggtaggatgagattctggaaatgctttgtgaactgcaaaagtggagaaaatgagaaagcaaagagagttctgccccctccatcaggactggacaggatttatccccaggcagccatgcagaaatttaatgatagctgtagacttgggtgctgaagccttgggagaatattgaagagacatattctgttggcacatctgcttgctgaagtgaaaatcacccattatgagaagacaggactaaggatgcaggagacaagatrctcaaacagtagcacaccgctctgtctgagcattggtctccaggtgaaatgtgagatcagaggggctgagcagtgggatgggtgcaaggttttttgtgtcaccatgggaggaacagccctgcctaaggtgaattgaacaggagcattgtttgggttgtgaatacaaagcagcaataaatcctgcagctgctcattccttcattaagccatgtgctgttgacgttaggattgtctgtttctgttgatctggcctggcttctgactgagccccaacactgtgatcggctgcgggaccattgc

SEQ ID NO: 78611 - DNA, 600 bp, Chicken  19866894368539_1
gcgctgggatggaagccctgagaattcaccatcgtttcctaaatcagaagcccacagtggtggaaacaatcttgaaagtgaattcctgtaacagaattaacaaacctccagcaacagtgtgttttttttaacattataacagttcacatctcagggttactttctccccttgacacatttccccttacattcttggccaagggtccccagctctcctacaaaatttaagggaaggaaatccctactgcagttgagtaagtgctaaatgcaatctgactgccactgacgttctctagcgtycatagaatacacatgcagaactgtagattctataactgttttgcatgtgatgatttatagacaaccctctaytgataatttttaaacatttttcccccccagtgctgtgacctggggggtctggaagactgaaatattgctgcataaccataggttacttctagttaaaaaagtcttcacttttcaagggcatttacaagaaagacctttagttaaccattttgtgcaatcattctaaacatacccatgggtgacaaaaggatatagagtgatacataacataagaaattttagaataaa

SEQ ID NO: 78612 - DNA, 600 bp, Chicken  19866894368539_2
tgaaagtgaattcctgtaacagaattaacaaacctccagcaacagtgtgttttttttaacattataacagttcacatctcagggttactttctccccttgacacatttccccttacattcttggccaagggtccccagctctcctacaaaatttaagggaaggaaatccctactgcagttgagtaagtgctaaatgcaatctgactgccactgacgttctctagcgtycatagaatacacatgcagaactgtagattctataactgttttgcatgtgatgatttatagacaaccctctaytgataatttttaaacatttttcccccccagtgctgtgacctggggggtctggaagactgaaatattgctgcataaccataggttacttctagttaaaaaagtcttcacttttcaagggcatttacaagaaagacctttagttaaccattttgtgcaatcattctaaacatacccatgggtgacaaaaggatatagagtgatacataacataagaaattttagaataaacttaccagtctgtaactggttctgccttgttggctcctctaagatgctcgacaccagcccaaccatatcagg

SEQ ID NO: 78613 - DNA, 600 bp, Chicken  19866894368543_1
tcgctttgccaagataggcactcaagagacgtgacaaaaagaagactgggaatctcttttgttctttcctttttttaaatgacaaaattactctactttttgttctctgggctgctgagtttttttagctcagtcttggcagtaaatagaacagcaggtgtatttcaagcttacagcaaaccggaacagaaatacttgctaattctactatcaccatagacacaggggttcaagctttacagttttacacgagccacagattatgttctaccctacagcatcctcttctgtttctttttrtacagtcttgtaaatctgtggtcattctgacagttttggtatctgaaccttgtcacttcaatcagcatgtgccttcaggaggtcggaagtcccactgcaagtattcagaagatctggtaaatcctctccccccactgcacaaggggctcctgcagaatctcccatcattttatctgctgtgccacttagatggtggtagcttatccatattcctgccacactaagaggtttagagcacagaattaggagagaaaaagatgaggtgagagaacagcacaatgcgatgtgttccaccgggag

SEQ ID NO: 78614 - DNA, 599 bp, Chicken  19866894368544_1
  misc_feature (1)..(49): n is any nucleotide
nnnnnnnnnnnnnnnnnnnnnnnnnnnnnnnnnnnnnnnnnnnnnnnnnacgacagaggaggctagaactagaacaaaaagtcaatgaagtacttaaagcaaggtaagagaaatgtcttcaatgtatagctgaaagccacttgaggtcttggactctccgaatgaggagttttggtgaaaacatcaattaccagcctagactcttagatgagtacttcacagggagggaagccgtgttttcctgtaaaagtacatcaggaagctgtgagaagaaacaaaggctgaaacattaaggcaagrgctttaaagaggaatggcagagaaagtgaaaattagaacataaagtcaatgaagtacttaaagaaaggtaagagaaatgtctttgctgtatagctgaaagccacttgaggtctaaaactcactgaatgaggagtttgggtgaaaatatccatttycagcttagactcttaaaataaatgggtggttcacagcgagagaagccgtgctttcctataaaagtacatcttgcacagagaagtactcccatattacttgaccgtacgtactgtcatagcaacagagatgtactgacagttgtc

SEQ ID NO: 78615 - DNA, 600 bp, Chicken  19866894368544_2
ctccgaatgaggagttttggtgaaaacatcaattaccagcctagactcttagatgagtacttcacagggagggaagccgtgttttcctgtaaaagtacatcaggaagctgtgagaagaaacaaaggctgaaacattaaggcaagrgctttaaagaggaatggcagagaaagtgaaaattagaacataaagtcaatgaagtacttaaagaaaggtaagagaaatgtctttgctgtatagctgaaagccacttgaggtctaaaactcactgaatgaggagtttgggtgaaaatatccatttycagcttagactcttaaaataaatgggtggttcacagcgagagaagccgtgctttcctataaaagtacatcttgcacagagaagtactcccatattacttgaccgtacgtactgtcatagcaacagagatgtactgacagttgtctggttggaatgttcttcctatcaccatctctggagtctgacctacctggwgctatctgcatgcactgtgtgctgctgaatgccacagcctgtgccatgctgttagatatgtgttttctcttcaaacactgtcatctcctgattgcccagtcagtgc

SEQ ID NO: 78616 - DNA, 600 bp, Chicken  19866894368544_3
tgaagtacttaaagaaaggtaagagaaatgtctttgctgtatagctgaaagccacttgaggtctaaaactcactgaatgaggagtttgggtgaaaatatccatttycagcttagactcttaaaataaatgggtggttcacagcgagagaagccgtgctttcctataaaagtacatcttgcacagagaagtactcccatattacttgaccgtacgtactgtcatagcaacagagatgtactgacagttgtctggttggaatgttcttcctatcaccatctctggagtctgacctacctggwgctatctgcatgcactgtgtgctgctgaatgccacagcctgtgccatgctgttagatatgtgttttctcttcaaacactgtcatctcctgattgcccagtcagtgctactcctcttctggcgggtgtgaggacatcccagtaccacaccacagtccttgatgtgtgggagtggctgaaatttgagccttccttgccactgcagtgacaagtgactatgtccctcctcatactcctaaatttgttcagctttgaagacatttttcctcatgctactaagcatcacatttcatgttgtcact

SEQ ID NO: 78617 - DNA, 599 bp, Chicken  19866894368546_1
  misc_feature (1)..(82): n is any nucleotide
nnnnnnnnnnnnnnnnnnnnnnnnnnnnnnnnnnnnnnnnnnnnnnnnnnnnnnnnnnnnnnnnnnnnnnnnnnnnnnnnnngaaaaagaagtcttccttccatacacgggaaaattaagacaggcaaggttatgagcacaagttcatcgtatagttgcaagtatgtactgagccctgtgtgcgtgatctcgccacacaaagaataactgagcgttgcactttcagcatgcagcaatccttattgaatagaaatgttttccgtatgtgctaaaggtctacatggaattttctgtgtaacrggctcacatgctataaatttacagcctaacgtacagcacacaaactttcccatgtaggcaagtcactaaggaccaaacacttactaaagaaagctcagcatcaacttagacaagctgcccccagaatcactataattacactgttcacgtatcttctcataaaaagtaaagccagaaaccaacataaaaataggaaattagcaacagcaaagaaaaaaaaaaaagactgtctctcttactattatttctactactattataattgcaccacactgtattttagacttacaccgtcaact

SEQ ID NO: 78618 - DNA, 600 bp, Chicken  19866894368546_2
atacagccttcaaagaaatagccacagaattactcttctggggttacagaagattaaaaaaaaaacaaaacaccccaattccttcagtaaatatttctactttactcaaactttagaagtcttcagccataagaacagacatgttccagtattagtaccacaataactttcctcctgcactgatgagaaatagcctttaagaaaccacagactaccagactttcgacaacaaacctcctcccaagcaaaagcaatttcaggccaaaaataacttataaaagataatcagctggagtgagrgagggagatattttgcctcctgactatcttaacacaatctgaagttaaaaacaacgacgactctctagagtgaaaagagagacaaagagggcacagagatgataatatgaaagaagcaatcatttcaagacaaaaagcattggagtctccagcaaagccagcaggatttagtttcaaaaaccaaaggaggtgggcttttcatgcacactgtagctcaaccaaatattccttagagcacgaagtagtaggagactaaaggtaggcattgattattggagtcctcttctttcttccagtact

SEQ ID NO: 78619 - DNA, 600 bp, Chicken  19866894368557_1
aacaatatcacatccaggacgtgatctcctgcaactccaccacagttctatgccactgatgctgaccataaccttatcatacttcaaagacatttcttcacaaacccaactccccatgttgttacagttttctaatgccgacataatttttcaacggaaaagtatgagaaaaccacagaatcttaagttaaaacaactcaatttttccctaagaaagcaaacaagcagaaagataagcttacagagtgcagctaccatctgtcaaacctgcaatgacagtgtttcttgggaagatttttraaaacttctccagattttacttctggggaaaaaaaaatggcaagaagacaggtaaggctgagacgtataccactcagtcaagctcttcatcttcgcttaatataaattctctcctccccctcctttaggtaatttacaagtgatgactaatcacttacatactacaatacgtaagatacactcctggttgtttgggtgggtttccaaagggactcagatttctataaaatacttctagaaggatgtaaatagcaaaacgacatcaggtagaaaatagccattagaagtgaggcgttttga

SEQ ID NO: 78620 - DNA, 600 bp, Chicken  19866894368560_1
aatggctgggattgatcagcatctccactagacagttaaaaattgtttgataattattcttaaggaagagagtgtgttgcattctgtacccaatcaatactactttggcacctcatgttctgttttgccttttttaattgctgttctctctttgacttcgcttttccttatgcccagggttgagattgtgatcattctcttgaaaggcactgaatttattcactgtataaaatcaaaatgttgtggtggggactaggggaactgcactgcaaagtactacctctggtttaagcactgctyctcaggaggaggaggttaattgaatccatagtaaactgaatccatagctggaactctgttcttggtttttgaggttatgagttatttatcctcacggggctttgctgccatcctgttttgacttgaacagacatgcaaaggtggctaaaaaattcccttgtctgatatatttagtatctgtttggaactttgcaaatctgaagcactttaaataatcttcactctgtttacagagaggtaaaaacctgccagaagcctcttgcagtcttgcagtgagagttagggtatggatctagttat

SEQ ID NO: 78621 - DNA, 599 bp, Chicken  19866894368562_1
  misc_feature (1)..(164): n is any nucleotide
nnnnnnnnnnnnnnnnnnnnnnnnnnnnnnnnnnnnnnnnnnnnnnnnnnnnnnnnnnnnnnnnnnnnnnnnnnnnnnnnnnnnnnnnnnnnnnnnnnnnnnnnnnnnnnnnnnnnnnnnnnnnnnnnnnnnnnnnnnnnnnnnnnnnnnnnnnnnnnnnnnnnagcgctggatttgttcagcctgggagagaagactaccaagggaatctaccagctactttcagctcttagatgcgagctatgtgatgggcatttttagagaagatggagtcagatctcagaaactgcaattagttaytgagggaaaaaataccacgagaaacattaagacctgggacagccacacaaatggatacatactctgatcacccytggggacattcaaactcagaaagacaaggtaccaagcaacttgcttgagctctgagcagagcattagatgagatctcctgaggtccagaggagggccacaaagatgatcagagggatggagcacctcccctacaaagacaggctgagggagctgagttcgttcagcctggagaaaaggcggctgtggggtgacttaattgcagcctttcagtacctaaagggagc

SEQ ID NO: 78622 - DNA, 599 bp, Chicken  19866894368562_2
  misc_feature (1)..(90): n is any nucleotide
nnnnnnnnnnnnnnnnnnnnnnnnnnnnnnnnnnnnnnnnnnnnnnnnnnnnnnnnnnnnnnnnnnnnnnnnnnnnnnnnnnnnnnnnnnagcgctggatttgttcagcctgggagagaagactaccaagggaatctaccagctactttcagctcttagatgcgagctatgtgatgggcatttttagagaagatggagtcagatctcagaaactgcaattagttaytgagggaaaaaataccacgagaaacattaagacctgggacagccacacaaatggatacatactctgatcacccytggggacattcaaactcagaaagacaaggtaccaagcaacttgcttgagctctgagcagagcattagatgagatctcctgaggtccagaggagggccacaaagatgatcagagggatggagcacctcccctacaaagacaggctgagggagctgagttcgttcagcctggagaaaaggcggctgtggggtgacttaattgcagcctttcagtacctaaagggagcctataaacaggaagggagtcaactctttgaaagggtagataacaacaggatgaggggaaatggttttaagttga

SEQ ID NO: 78623 - DNA, 599 bp, Chicken  19866894368570_1
  misc_feature (1)..(51): n is any nucleotide
nnnnnnnnnnnnnnnnnnnnnnnnnnnnnnnnnnnnnnnnnnnnnnnnnnntatggtcgtattgtttcagagtgatgatgcttcttgttgggaggaaagtgattcagcactattgtttaattttaccttgaacaatgtcttcaaccagtcagcatctaaatgaattgtataaagtgtaactgcagcttattgagcagtaaagcttgtaaggcattgcagagaagaccaatattgtcagtatctagtggaaagtaagcataaagcatgaatctcagaagatgtattctgctctgctgaatytctcatcctgcatataaaatctgctggcagcctttttagtttgagttttgtcactatacaaaaccaagcagatgcctccagctaaactaaacattggtttactttgccaagggccacgatataagtgattcagaaaaagaggttcagtttttccaattaatgtatatagtcatggagatatataaatatacctggattgcttcaagagtattcattaaaatgtctctgtggaattttctttgtgtttattaaaaacttcagtgagttgtttagactctccagatggtttgctgagataa

SEQ ID NO: 78624 - DNA, 600 bp, Chicken  19866894368572_1
ttatgtagctctcttaatcaatgctctgccactggaaatcaagtcagaatgttattatggcctctccttctggatttaattacagtagtaactcatggctcaaagtctgagaaaacacaccatgcagtttatagctttgaagaacagctattaatcctgccgtctagctcccagtgcaagccaatgaaagcactttaaaaatctttatgcctgaagataaacacacaggcttaaggtggaggtgcagagagcccaggcactgtgtgtgctccgtacatgtgctgtatcgcattctctccwgggtgatgctctccaggtgtgcagatctctgatctgtttgccacccatcttgagtgattatcctgcactgttaacatttgtaaggatgctttcaggatgtcatctcctgtctgtggatagtctggagtcagaacagcatttttcccatagagataggcttgctacagatgcgcatctgtgcctcttgtgtgcttttggaatcgttttccatcgtgaatctccaacctgacaatcagctgcaaatgggaataatgcactcttccaagaacctgaattagtatcaggaaccgcttttagttt

SEQ ID NO: 78625 - DNA, 599 bp, Chicken  19866894368573_1
  misc_feature (1)..(255): n is any nucleotide
nnnnnnnnnnnnnnnnnnnnnnnnnnnnnnnnnnnnnnnnnnnnnnnnnnnnnnnnnnnnnnnnnnnnnnnnnnnnnnnnnnnnnnnnnnnnnnnnnnnnnnnnnnnnnnnnnnnnnnnnnnnnnnnnnnnnnnnnnnnnnnnnnnnnnnnnnnnnnnnnnnnnnnnnnnnnnnnnnnnnnnnnnnnnnnnnnnnnnnnnnnnnnnnnnnnnnnnnnnnnnnnnnnnnnnnnnnnnnnnnnnnnnnnnnnnnnnngtgggttgagtgctgctgggcactcttgccctgtcactggaaacwcttcatccctcagccaccaaaactgaggaagcagcaattaataataagctgatagatcagcgcagagctgtcattacctaccttctcctttcggctggggatattamacttattaaatttgttattgctaaatgatcccatgggagttcagaagattaatcttctttcgcccargaaatatratagtgaccttgtgacctagtaggacctctaccacttataatatacagcagcttggagaggactgagacccacatgtgtggaggcccactgtgcaagggaaggcccaggaagggtag

SEQ ID NO: 78626 - DNA, 599 bp, Chicken  19866894368573_2
  misc_feature (1)..(148): n is any nucleotide
nnnnnnnnnnnnnnnnnnnnnnnnnnnnnnnnnnnnnnnnnnnnnnnnnnnnnnnnnnnnnnnnnnnnnnnnnnnnnnnnnnnnnnnnnnnnnnnnnnnnnnnnnnnnnnnnnnnnnnnnnnnnnnnnnnnnnnnnnnnnnnnnnnnngtgggttgagtgctgctgggcactcttgccctgtcactggaaacwcttcatccctcagccaccaaaactgaggaagcagcaattaataataagctgatagatcagcgcagagctgtcattacctaccttctcctttcggctggggatattamacttattaaatttgttattgctaaatgatcccatgggagttcagaagattaatcttctttcgcccargaaatatratagtgaccttgtgacctagtaggacctctaccacttataatatacagcagcttggagaggactgagacccacatgtgtggaggcccactgtgcaagggaaggcccaggaagggtagggctgtgaagaaatgtggatgaagcagagaccaggcagaggtgacaagaagacaaagatgacaggacatyctaaattgattcattctgggcaaccctcctgacagat

SEQ ID NO: 78627 - DNA, 599 bp, Chicken  19866894368573_3
  misc_feature (1)..(81): n is any nucleotide
nnnnnnnnnnnnnnnnnnnnnnnnnnnnnnnnnnnnnnnnnnnnnnnnnnnnnnnnnnnnnnnnnnnnnnnnnnnnnnnnngtgggttgagtgctgctgggcactcttgccctgtcactggaaacwcttcatccctcagccaccaaaactgaggaagcagcaattaataataagctgatagatcagcgcagagctgtcattacctaccttctcctttcggctggggatattamacttattaaatttgttattgctaaatgatcccatgggagttcagaagattaatcttctttcgcccargaaatatratagtgaccttgtgacctagtaggacctctaccacttataatatacagcagcttggagaggactgagacccacatgtgtggaggcccactgtgcaagggaaggcccaggaagggtagggctgtgaagaaatgtggatgaagcagagaccaggcagaggtgacaagaagacaaagatgacaggacatyctaaattgattcattctgggcaaccctcctgacagatgattacagagggctactgaaatccttctaatagtaattgccctggagctacctgtgaaagtctcatc

SEQ ID NO: 78628 - DNA, 599 bp, Chicken  19866894368573_4
  misc_feature (1)..(73): n is any nucleotide
nnnnnnnnnnnnnnnnnnnnnnnnnnnnnnnnnnnnnnnnnnnnnnnnnnnnnnnnnnnnnnnnnnnnnnnnngtgggttgagtgctgctgggcactcttgccctgtcactggaaacwcttcatccctcagccaccaaaactgaggaagcagcaattaataataagctgatagatcagcgcagagctgtcattacctaccttctcctttcggctggggatattamacttattaaatttgttattgctaaatgatcccatgggagttcagaagattaatcttctttcgcccargaaatatratagtgaccttgtgacctagtaggacctctaccacttataatatacagcagcttggagaggactgagacccacatgtgtggaggcccactgtgcaagggaaggcccaggaagggtagggctgtgaagaaatgtggatgaagcagagaccaggcagaggtgacaagaagacaaagatgacaggacatyctaaattgattcattctgggcaaccctcctgacagatgattacagagggctactgaaatccttctaatagtaattgccctggagctacctgtgaaagtctcatcactgaggc

SEQ ID NO: 78629 - DNA, 600 bp, Chicken  19866894368573_5
gtcattacctaccttctcctttcggctggggatattamacttattaaatttgttattgctaaatgatcccatgggagttcagaagattaatcttctttcgcccargaaatatratagtgaccttgtgacctagtaggacctctaccacttataatatacagcagcttggagaggactgagacccacatgtgtggaggcccactgtgcaagggaaggcccaggaagggtagggctgtgaagaaatgtggatgaagcagagaccaggcagaggtgacaagaagacaaagatgacaggacatyctaaattgattcattctgggcaaccctcctgacagatgattacagagggctactgaaatccttctaatagtaattgccctggagctacctgtgaaagtctcatcactgaggcagatgggccctcccttggatagcctgcaaggatacttctctcccttctttccttgactatagaagaaaataaaagacttaggaggattgaatcatgagagtgcataagagatgtatagattatattgagtgaattttttgttctgtgctataggactgaacaggcatggttatcaatcgacttaatat

SEQ ID NO: 78630 - DNA, 600 bp, Chicken  19866894368577_1
caagtcttttcattgggacagtagtcaaacgctggagcaacttgcagagacagactgtgagatttacatcctcagagatacttagagctgtacaggctcctgaatgattaggtatagttagaccttattcaagcaagggttgatggaaaagacttctcttcaaagacaaacctaaattcttgtatgagttcgtggcattggaggtacatccatgaataaaaatatccattaattctatgtagtcattgccaatgttagccctctgaaaattgaaaagcaatgtcaacccatgactcacargagatgtgccattattgacattcacgtggtgtggctaggcacctctagagccctcgctcttctcagatgctgttcccattctcttccccatgaccccgaggtgactgcagatgctgtttatagacttcctcatccaaattctttcaaatactgtgtcaccagtgcrttgaggtcagaggccaaaggcttttcacatattctcaggaaagggaagctgccaggagctcaaaacatttcaagataatttggtcttatacagatacgatgctcatcattttcctttatttgtctttttctgtt

SEQ ID NO: 78631 - DNA, 483 bp, Chicken  19866894368577_2
caaacctaaattcttgtatgagttcgtggcattggaggtacatccatgaataaaaatatccattaattctatgtagtcattgccaatgttagccctctgaaaattgaaaagcaatgtcaacccatgactcacargagatgtgccattattgacattcacgtggtgtggctaggcacctctagagccctcgctcttctcagatgctgttcccattctcttccccatgaccccgaggtgactgcagatgctgtttatagacttcctcatccaaattctttcaaatactgtgtcaccagtgcrttgaggtcagaggccaaaggcttttcacatattctcaggaaagggaagctgccaggagctcaaaacatttcaagataatttggtcttatacagatacgatgctcatcattttcctttatttgtctttttctgttacaggaaatttagccagaacaccgttgcccagctctggtattttgtgaa

SEQ ID NO: 78632 - DNA, 600 bp, Chicken  19866894368588_1
cacagggcaggtgagtgtgagcagcccacgtgcagcacatctctcggtgctgtcagctgcagagcacaccctgtggtgctgagcaggagcagtgctgtttggctttcatgagggattggggtgagaggaggactgagtcaccgcaaacccaacagcctcggtaacctgggccatctgcttgcctttcaccactcctctgtaagaaaaaaacagcctgcgaggcattgtgagcgattgaggatgaactggaagccactcaaactcaaaaccaaattcctatttaaagcaaatacaaagttwctcaagacatttgattccaactccgcgctcccttattgttgtagtaggtgtttgttggagttcttgactgtccactatgtaaacaaatatacatcttgtgtctgagagatgagaccatggctcctaagcctgtgggaactcactgcttcagaaacatttgtctctgtctctgcgttttctacaggaggaaggagacagacaggcttcagcctctggagcagcagctgggaggctctctgcctgggctcactgcagcagctgccccgtgggacaccagcaggtctgggatctttccccagc

SEQ ID NO: 78633 - DNA, 599 bp, Chicken  19866894368588_2
gcaatattttcagcaatggtgcagtcaaacaggattggctcctgtgagacgatgccaatctgagctctcagccattggatatttagcgtctttgtgtttcggccatccagaagctaaaaggtcagaaagaagatattatgttcacagtactttatctgtggctttattactattaatcgtatatttcaattttttttttttatctatctagcaacactgcagcctttagcagccagggcaacgagggcattttatgccttcagtgttggcttacgcacttccatggagcagcagaggtgrgcagatgagtgttaaagcttatctacatttacaatcagaatataatcagaaatctctataaacctagacaaactccagctgtatgaaagccatttcactgctccctgcttgtctatcacaccatctagaagagctgatacggatctactttagctgccaacatactatcgctactacagagatttggtactgcagtggtgacagaaatatctatttcagaaaccaaaagaaaatccacaccacatacatagtgcttctgctccctttattagcagctttatcccatctctggtttccta

SEQ ID NO: 78634 - DNA, 484 bp, Chicken  19866894368591_1
agctggccaggacctactggaagtcccagagggctcttgttgcccacgccaagcacgccaagccactgtcccaagcagaaggtgctgtacatgatcttcagcatcgtgctcgcctactgggcttgctttgtgcccttctggctgtggcagcttttcagcctctactggcacgagcgtggggagcggggcagctccaccgtcgtccccatcaacttcctggtgacctgcttggcctacagcaacagctgcgtcaaccccttcctctacacgctgctctccaagaactacagtgagtacctrcggagacaccaccgggctgcccagcggggctcctccgcacagccgccagcccccgtcccacccctggggggctccggagaggatgactgtggtctgtgagaggtgggtgcccaccgggcaggtggcagagatgcggatgctttttcctccgttgggttcagtggctcagcccttttgctgaggg

SEQ ID NO: 78635 - DNA, 600 bp, Chicken  19866894368633_1
ctcactcaggagacagcagtaggagagagcaaacacctgcaggggatcagagcaagcttgcaagagggagctgagtgcctgacattacctcacctgccagccctcccaatggggctggcacacgggagcagatgaggaaggcaccaagccatcaggctgagagccagggaagccattttgtgcacccacagctgagggagggtgtctcatgcctttgcaagtacaacacagaatatctgagccagacaacaaaagctttgccaaaataagtttcccacccataggattatttgttgttaytattttaagtgcaaaagcatacttgtatttagacayaaggaaagtagggggagggggaaagaagaaaaatacagaaaaataatacagacacctaagtgggaacccagcattgcctcaagtaacctggcctggggaggcactgctgggtaacaaygatacaaacaatgcaggcagaattttaaaaatagtaacatggcaattattagcacacccatttgctattcccctccagctccgtaacccgagagagagctctgcttctgccaagcaaaatgtaaggcatgtactgtaggtagcatt

SEQ ID NO: 78636 - DNA, 600 bp, Chicken  19866894368633_2
ctgcaggggatcagagcaagcttgcaagagggagctgagtgcctgacattacctcacctgccagccctcccaatggggctggcacacgggagcagatgaggaaggcaccaagccatcaggctgagagccagggaagccattttgtgcacccacagctgagggagggtgtctcatgcctttgcaagtacaacacagaatatctgagccagacaacaaaagctttgccaaaataagtttcccacccataggattatttgttgttaytattttaagtgcaaaagcatacttgtatttagacayaaggaaagtagggggagggggaaagaagaaaaatacagaaaaataatacagacacctaagtgggaacccagcattgcctcaagtaacctggcctggggaggcactgctgggtaacaaygatacaaacaatgcaggcagaattttaaaaatagtaacatggcaattattagcacacccatttgctattcccctccagctccgtaacccgagagagagctctgcttctgccaagcaaaatgtaaggcatgtactgtaggtagcattagccttgtaagtacagcccttcccatactgttaaaa

SEQ ID NO: 78637 - DNA, 600 bp, Chicken  19866894368633_3
ggctgagagccagggaagccattttgtgcacccacagctgagggagggtgtctcatgcctttgcaagtacaacacagaatatctgagccagacaacaaaagctttgccaaaataagtttcccacccataggattatttgttgttaytattttaagtgcaaaagcatacttgtatttagacayaaggaaagtagggggagggggaaagaagaaaaatacagaaaaataatacagacacctaagtgggaacccagcattgcctcaagtaacctggcctggggaggcactgctgggtaacaaygatacaaacaatgcaggcagaattttaaaaatagtaacatggcaattattagcacacccatttgctattcccctccagctccgtaacccgagagagagctctgcttctgccaagcaaaatgtaaggcatgtactgtaggtagcattagccttgtaagtacagcccttcccatactgttaaaaataactttccctagctctgcatgccagacctcagggccggttttgttctcygtgttaaaacactggcactgttttgaggctatctgagaaagttatgtggcccattcgctgcccccaa

SEQ ID NO: 78638 - DNA, 600 bp, Chicken  19866894368633_4
acacctaagtgggaacccagcattgcctcaagtaacctggcctggggaggcactgctgggtaacaaygatacaaacaatgcaggcagaattttaaaaatagtaacatggcaattattagcacacccatttgctattcccctccagctccgtaacccgagagagagctctgcttctgccaagcaaaatgtaaggcatgtactgtaggtagcattagccttgtaagtacagcccttcccatactgttaaaaataactttccctagctctgcatgccagacctcagggccggttttgttctcygtgttaaaacactggcactgttttgaggctatctgagaaagttatgtggcccattcgctgcccccaacgcaggacagccaggtgccaccatggtgctctcctgcctcaacccactgaccctggcagcaccctcaacacaaagtcagccctgcgtatagccaggaggggaccgaggcacagaaggggctccgcaaagccagacctggatctgcaagctcagcagcaagctgaaagctcagtgtgtggtgctggcgtgatccctctgccagccgtgatttccttccttccagccaagtccac

SEQ ID NO: 78639 - DNA, 599 bp, Chicken  19866894368654_1
  misc_feature (1)..(77): n is any nucleotide
nnnnnnnnnnnnnnnnnnnnnnnnnnnnnnnnnnnnnnnnnnnnnnnnnnnnnnnnnnnnnnnnnnnnnnnnnnnnnctagggtttgtgtcactttttaaagattattttaaattatttcttctttcagactgagattatgacaacaacaaactattttgtttgtttcctctccaaaaaggacttgagtgtcaatctggcctttcctgttgtatggaagaacaactggtaagcaagagattatggttcatttttgtttagatgctgagaattcggaaccatttatttcaacctgttattwctcagtccttaaaacaaacaagcaaataaaggataccacactaaaggatagcagtttttgctggctttaaggatgatctctcagcttaccttctgaaccaggttgctcctttgcttctgactgagtttcatcagactttacttcagtgccatctgcttgtgttgccaaattctgttctggtgctggacttgaattgctactgttttcttgttttattggagaagcatcagctattgaactctggttgctattgtcatctgttaacaaaaaagatttaaacaagagagtccaatttgaca

SEQ ID NO: 78640 - DNA, 600 bp, Chicken  19866894368654_2
accaggcttactccagaacatcacaacttctgctcttgcagcatatgctgtaattacatgagttttctaaatgctgtaaataatattatacaataaaactgaatgtttacctagatctcctttaaagaacccagaattttataatgcgagtaaaacaggctaactgaagccacctcattttacagatcagctaacaaagggccaattaaatattcatgctacaattttcctttgtattactacagtgctctgatgagcaggtggttttaaaagtgtatcccacaggtcaaaaagcctacrgtgctatcaaagcatagtatagtagcctgtcctaaaagcaacagcatcttagagataattcttcagaatactctctagactcaagaagctcagtgataaaaactttctgcaacacagatcaggaaacgtcctgcttgtgccctctttttgtgaaaaccaattacaatggtttaaatatctcagctcatacgttatggatagcagtgaagcttgctgtaatctttaaaccagtctaactgggggaactgagacagaagccccgatccccatagagaagtaacccagcaaaatattaattaa

SEQ ID NO: 78641 - DNA, 600 bp, Chicken  19866894368666_1
gccctccgagaaaccctttgatttgaaatctgttcctttggcaacagctcctatcatcgagcaaagagcaggtgagaatcagtctgctgtgtgctgatctaaattgctgacagttccctagcagatccagcccttgatctgcattggccttgctgggaattgctgagatccatcctcttcaaattttgtgggattatatcttctgtaaagacaaaggccagcaaatcttgttactcccactctagtgtttcagttagtccaactgctaataatagtaattgtttgaattgcagtagcttsaatgaggattaccaaaggcatttaggaagctaaaaatgggtgtctgctctatagcaagaatgagaaatgagctctcctttacttagtcaatgatctgtttttcgatttggttactattcctggttgcacttgattattttcattgttggtttttctttttcccttgcagaaaatgcccctgttgctgtagccaaacagccagagaaagtggcagcaacacggcaagagatattccaaggtaaactratgcgaggcctctcctacacctgtacgtgagaactgtacctcttctagctgagc

SEQ ID NO: 78642 - DNA, 600 bp, Chicken  19866894368666_2
gtttcagttagtccaactgctaataatagtaattgtttgaattgcagtagcttsaatgaggattaccaaaggcatttaggaagctaaaaatgggtgtctgctctatagcaagaatgagaaatgagctctcctttacttagtcaatgatctgtttttcgatttggttactattcctggttgcacttgattattttcattgttggtttttctttttcccttgcagaaaatgcccctgttgctgtagccaaacagccagagaaagtggcagcaacacggcaagagatattccaaggtaaactratgcgaggcctctcctacacctgtacgtgagaactgtacctcttctagctgagcctgcctatccactccagttttccccatctcccctcaaagagtggcatgggcatctgaattggttgtttgctcttggggatgcttgcagtagatgtgggcagttggcagatgtgtgcraaaggaagacgagactgcctttaattttagaagttcctactgaatgctgtggctgctcgatggatgactacacttgctgcagcagcttccagctgtttaactgaaggctttgagaaagttgacagtttt

SEQ ID NO: 78643 - DNA, 600 bp, Chicken  19866894368666_3
tcctggttgcacttgattattttcattgttggtttttctttttcccttgcagaaaatgcccctgttgctgtagccaaacagccagagaaagtggcagcaacacggcaagagatattccaaggtaaactratgcgaggcctctcctacacctgtacgtgagaactgtacctcttctagctgagcctgcctatccactccagttttccccatctcccctcaaagagtggcatgggcatctgaattggttgtttgctcttggggatgcttgcagtagatgtgggcagttggcagatgtgtgcraaaggaagacgagactgcctttaattttagaagttcctactgaatgctgtggctgctcgatggatgactacacttgctgcagcagcttccagctgtttaactgaaggctttgagaaagttgacagttttctgtggctggggaaagcaattgtttctacatcctctgtttcagaacaactgggagcgatcccagagttccggggactgggcccactcttcaagtcttccccagagcctgttgccctaacagagctggaaacagagtatgtggttcgttgcaccaagcacacatttgtcagc

SEQ ID NO: 78644 - DNA, 600 bp, Chicken  19866894368670_1
gaccatatacatattaaaaagttttgtaaatagtttctctacggtatgatagctctttgcccttggcttgtggaacacaagtacttgtgattaagtgattaaagtaacttgcaagtaacacacaatatcatcaaaattgaaagtgtgggaacgatttgaatttaacattaatgttgcatttataaataattttcttggaatttaactgaagcaccaaaccagagggtctcagattttgcaggaagttaaattaataaccagaaacgttcagcagatccattctaaggagaccagtttggwttaaagaaagaaagaatgtttttcagtctctgcacgttctgaggtatttccttgtatacagtaaacctcagaggccttttatttttaagttctctttatactgattttggttctgtttgaagacttccatgtatagaattgaccttcactgtacaggagtcttgaaaaagtctgctgttcatactgtgtttttcttcagttgttgtatatccttaygagacacgaacttgttgggctttcagttctccccatgctttttgcattgcgtgctgacgcaattttgttcaccttgagagggtc

SEQ ID NO: 78645 - DNA, 512 bp, Chicken  19866894368670_2
aaccagagggtctcagattttgcaggaagttaaattaataaccagaaacgttcagcagatccattctaaggagaccagtttggwttaaagaaagaaagaatgtttttcagtctctgcacgttctgaggtatttccttgtatacagtaaacctcagaggccttttatttttaagttctctttatactgattttggttctgtttgaagacttccatgtatagaattgaccttcactgtacaggagtcttgaaaaagtctgctgttcatactgtgtttttcttcagttgttgtatatccttaygagacacgaacttgttgggctttcagttctccccatgctttttgcattgcgtgctgacgcaattttgttcaccttgagagggtcttttcataataattctgaagaacacaaccatattttggaataagttcatatccaaaacatgcgtttttgatcgttttttccattagatttgaatggatttgtttaatagtattagtttttaaaaggta

SEQ ID NO: 78646 - DNA, 599 bp, Chicken  19866894368671_1
  misc_feature (1)..(48): n is any nucleotide
nnnnnnnnnnnnnnnnnnnnnnnnnnnnnnnnnnnnnnnnnnnnnnnnacagtgcatcatcccctttcacagagtgcaaggagagtgttttggggggatatcaaagcatgcctggactccccttttcttcccttgcctcaacacatccttcgttctcatgtccataagatctgcaacatggtggactcaaaggggctgctcagtgaggcgggagggtgaggagtggagatctcaagcactgtcctgaggagcagagaacgtctccagagccccacagggataccacaggacaggaaaacygatgtcgttttccataagyattgccatgagattccccagactcattttwtcttttcctcaccatccagataagaaagaygtggcgttagaaattcacgagtccattgctcggcaagtctcgtgcctgctcttgcagtacaatgtgctgggatcctttgggggcgcttgttgtactcttaacacagttttgtcccagctgatgaagcacttccacttattaccagtctgcgtatttgccttacctgtttaaccctatctgttgtttgtgccaactgtaacttaaagagctctctactccc

SEQ ID NO: 78647 - DNA, 599 bp, Chicken  19866894368671_2
  misc_feature (1)..(29): n is any nucleotide
nnnnnnnnnnnnnnnnnnnnnnnnnnnnnacagtgcatcatcccctttcacagagtgcaaggagagtgttttggggggatatcaaagcatgcctggactccccttttcttcccttgcctcaacacatccttcgttctcatgtccataagatctgcaacatggtggactcaaaggggctgctcagtgaggcgggagggtgaggagtggagatctcaagcactgtcctgaggagcagagaacgtctccagagccccacagggataccacaggacaggaaaacygatgtcgttttccataagyattgccatgagattccccagactcattttwtcttttcctcaccatccagataagaaagaygtggcgttagaaattcacgagtccattgctcggcaagtctcgtgcctgctcttgcagtacaatgtgctgggatcctttgggggcgcttgttgtactcttaacacagttttgtcccagctgatgaagcacttccacttattaccagtctgcgtatttgccttacctgtttaaccctatctgttgtttgtgccaactgtaacttaaagagctctctactccccactgcatatctacagata

SEQ ID NO: 78648 - DNA, 600 bp, Chicken  19866894368671_3
cagtgcatcatcccctttcacagagtgcaaggagagtgttttggggggatatcaaagcatgcctggactccccttttcttcccttgcctcaacacatccttcgttctcatgtccataagatctgcaacatggtggactcaaaggggctgctcagtgaggcgggagggtgaggagtggagatctcaagcactgtcctgaggagcagagaacgtctccagagccccacagggataccacaggacaggaaaacygatgtcgttttccataagyattgccatgagattccccagactcattttwtcttttcctcaccatccagataagaaagaygtggcgttagaaattcacgagtccattgctcggcaagtctcgtgcctgctcttgcagtacaatgtgctgggatcctttgggggcgcttgttgtactcttaacacagttttgtcccagctgatgaagcacttccacttattaccagtctgcgtatttgccttacctgtttaaccctatctgttgtttgtgccaactgtaacttaaagagctctctactccccactgcatatctacagatagtaaccgcatttctcctcccagtcctcattt

SEQ ID NO: 78649 - DNA, 600 bp, Chicken  19866894368671_4
ggagagtgttttggggggatatcaaagcatgcctggactccccttttcttcccttgcctcaacacatccttcgttctcatgtccataagatctgcaacatggtggactcaaaggggctgctcagtgaggcgggagggtgaggagtggagatctcaagcactgtcctgaggagcagagaacgtctccagagccccacagggataccacaggacaggaaaacygatgtcgttttccataagyattgccatgagattccccagactcattttwtcttttcctcaccatccagataagaaagaygtggcgttagaaattcacgagtccattgctcggcaagtctcgtgcctgctcttgcagtacaatgtgctgggatcctttgggggcgcttgttgtactcttaacacagttttgtcccagctgatgaagcacttccacttattaccagtctgcgtatttgccttacctgtttaaccctatctgttgtttgtgccaactgtaacttaaagagctctctactccccactgcatatctacagatagtaaccgcatttctcctcccagtcctcattttccctgattaaacagggaagcttcatctat

SEQ ID NO: 78650 - DNA, 600 bp, Chicken  19866894368671_5
ccactgcatatctacagatagtaaccgcatttctcctcccagtcctcattttccctgattaaacagggaagcttcatctatatggtaagctccacaggctcctggtcatcccaatcctcagcttcttcctttattctcgctgtagtaaacagactaattgtgttaaatgaaacaggaccattgtgggcagaagtgccaccttaaggctgtgctatcagttgctaaagcaagatagcatatcttgagtcacaagagtagggtgaaatcacagaagccatgggaaagcaattgcaatgggaygttgcatttgttcccaagtaaatgttatctcaggacaagatgctgacactgtgctttgrgacctcatcgatgtttacgttacaatacagctatctgggaactcagmgtaggaaaagcagcttttggcttcttcctgagcagtacacagtcattatggttcgtaatgatgtaaggcacaaattgcaagaggtataaaaagtaatactcaggaatactctgtggggttaatgcatggtcgatgggcaagctaagaggattcctctgcattggtgtttaccatgcaggagattgggatggctg

SEQ ID NO: 78651 - DNA, 600 bp, Chicken  19866894368671_6
taaacagggaagcttcatctatatggtaagctccacaggctcctggtcatcccaatcctcagcttcttcctttattctcgctgtagtaaacagactaattgtgttaaatgaaacaggaccattgtgggcagaagtgccaccttaaggctgtgctatcagttgctaaagcaagatagcatatcttgagtcacaagagtagggtgaaatcacagaagccatgggaaagcaattgcaatgggaygttgcatttgttcccaagtaaatgttatctcaggacaagatgctgacactgtgctttgrgacctcatcgatgtttacgttacaatacagctatctgggaactcagmgtaggaaaagcagcttttggcttcttcctgagcagtacacagtcattatggttcgtaatgatgtaaggcacaaattgcaagaggtataaaaagtaatactcaggaatactctgtggggttaatgcatggtcgatgggcaagctaagaggattcctctgcattggtgtttaccatgcaggagattgggatggctgccccaaacccacctttatacagaatgagagaatgagtctcacattgaaacctatgtaga

SEQ ID NO: 78652 - DNA, 600 bp, Chicken  19866894368671_7
catcccaatcctcagcttcttcctttattctcgctgtagtaaacagactaattgtgttaaatgaaacaggaccattgtgggcagaagtgccaccttaaggctgtgctatcagttgctaaagcaagatagcatatcttgagtcacaagagtagggtgaaatcacagaagccatgggaaagcaattgcaatgggaygttgcatttgttcccaagtaaatgttatctcaggacaagatgctgacactgtgctttgrgacctcatcgatgtttacgttacaatacagctatctgggaactcagmgtaggaaaagcagcttttggcttcttcctgagcagtacacagtcattatggttcgtaatgatgtaaggcacaaattgcaagaggtataaaaagtaatactcaggaatactctgtggggttaatgcatggtcgatgggcaagctaagaggattcctctgcattggtgtttaccatgcaggagattgggatggctgccccaaacccacctttatacagaatgagagaatgagtctcacattgaaacctatgtagaagaagttagaaaatatatcagcaaaaccacttaacattaacatctac

SEQ ID NO: 78653 - DNA, 600 bp, Chicken  19866894368688_1
atgcagctataactgaacgtccttcgataattcagtgggtattttaaacctagcaatgataggctttcataaaaccgcacatccctgttttcagaaggatgctaataagatggttagcttccctttcatgctcaacgtgtttatgggtgcacttacccattcagttgcatctctgaatgtaatgccccgctctgatttcacagtaattgtcaggagtcattttttcttttcgtgtgtccccactcactgtctggaaagtgccgtctccttgttgctgaccccatcggtctgtcttctcayggtgctttaaagaaagccctctccaccaargataatgatgttttyaaacaagccaacctgacatagaacacgtagtttgcttaaccctgagatgaccgagcggcggtcgctggctggccatgccctgccttgagttgctccctatggctgcccttctccaaaggctgtacgcgctgccatgctgtgctgctcatgacccaaacagcatccgcagttcccttctctgttacagatgccgcagcctgcttagcttgtgcaaatgccacgctgcccttgcactcctgcagccatccctgcagc

SEQ ID NO: 78654 - DNA, 600 bp, Chicken  19866894368688_2
ttcagtgggtattttaaacctagcaatgataggctttcataaaaccgcacatccctgttttcagaaggatgctaataagatggttagcttccctttcatgctcaacgtgtttatgggtgcacttacccattcagttgcatctctgaatgtaatgccccgctctgatttcacagtaattgtcaggagtcattttttcttttcgtgtgtccccactcactgtctggaaagtgccgtctccttgttgctgaccccatcggtctgtcttctcayggtgctttaaagaaagccctctccaccaargataatgatgttttyaaacaagccaacctgacatagaacacgtagtttgcttaaccctgagatgaccgagcggcggtcgctggctggccatgccctgccttgagttgctccctatggctgcccttctccaaaggctgtacgcgctgccatgctgtgctgctcatgacccaaacagcatccgcagttcccttctctgttacagatgccgcagcctgcttagcttgtgcaaatgccacgctgcccttgcactcctgcagccatccctgcagctcctctgccaggacccgtcctgctcctcgc

SEQ ID NO: 78655 - DNA, 600 bp, Chicken  19866894368688_3
aaacctagcaatgataggctttcataaaaccgcacatccctgttttcagaaggatgctaataagatggttagcttccctttcatgctcaacgtgtttatgggtgcacttacccattcagttgcatctctgaatgtaatgccccgctctgatttcacagtaattgtcaggagtcattttttcttttcgtgtgtccccactcactgtctggaaagtgccgtctccttgttgctgaccccatcggtctgtcttctcayggtgctttaaagaaagccctctccaccaargataatgatgttttyaaacaagccaacctgacatagaacacgtagtttgcttaaccctgagatgaccgagcggcggtcgctggctggccatgccctgccttgagttgctccctatggctgcccttctccaaaggctgtacgcgctgccatgctgtgctgctcatgacccaaacagcatccgcagttcccttctctgttacagatgccgcagcctgcttagcttgtgcaaatgccacgctgcccttgcactcctgcagccatccctgcagctcctctgccaggacccgtcctgctcctcgccccacgtgtgctccc

SEQ ID NO: 78656 - DNA, 600 bp, Chicken  19866894368689_1
acgtgtaaccctataacaacaaaaggtcttcttccccttctcttcatgtaattcattctctccacataagtatttctaggggaccgttattattttaatagccctctttgtgctcttttaatcataccttactaggaaaatagcactcattactgtttgttcatgtcttacaggaataggactcaagatcattacataattactcccctgttttaacagagaagccaaaccagtatttctctcaccattacacagtgagaagcttctgtcggcttctcttgtcaagctgtgagagtgatkttaaaattaagaggaatgtaaattatataaaacatttctcatttgtcctgtccatgagaagccagcatgcattcatacatgctgtggacaggtttgaaaatctcttgtttgctcacctaggcactacaactactgtttctttctgagcataagcttatgaataacttggtgtaaataagaacatttaagcctgaatcacaggctttcatgcaattagtaaatctcttggtcactaagtgatacacataagggaacgacctccaaatgtcacagactcaaaaccgaaagcaagtatgaagt

SEQ ID NO: 78657 - DNA, 599 bp, Chicken  19866894368694_1
  misc_feature (1)..(177): n is any nucleotide
nnnnnnnnnnnnnnnnnnnnnnnnnnnnnnnnnnnnnnnnnnnnnnnnnnnnnnnnnnnnnnnnnnnnnnnnnnnnnnnnnnnnnnnnnnnnnnnnnnnnnnnnnnnnnnnnnnnnnnnnnnnnnnnnnnnnnnnnnnnnnnnnnnnnnnnnnnnnnnnnnnnnnnnnnnnnnnnnnctccctctagacatgctgctcaaacccatatatgtgtgtgtgcgtatatatatagatatagatatatttatgttagtaaatagctaaatgctggtaggcctctgtaattaggaccattaacayaagaagtaaacagctgcacaaacattttaacattgatccttgtttattctgcagttctggctgcgttcttttgacataaataatgctaaaagaaaacccaaaccaaaaccacctagagagccctctttgatgcagtggggacccagagctccctttacacgcccatgggcaggtgctgtttcaacaaagcatctcacccctaaaatctactgctgaaggagtagagttgctcagagtgcccccagagccattgtagtatacggaggagcagtttagcagaggaagggatgctgccttga

SEQ ID NO: 78658 - DNA, 600 bp, Chicken  19866894368694_2
tgggcaggtgctgtttcaacaaagcatctcacccctaaaatctactgctgaaggagtagagttgctcagagtgcccccagagccattgtagtatacggaggagcagtttagcagaggaagggatgctgccttgattatttttgcctctctcttgggtggggaggaagcaaaggatgaggcaaagagatgagcattgttatatccagaaatcctaattgctcgtcaagggtgatgcttagcagagggagcgagcagagcctggcctctcatggtgggcattgggttaccagtgatgattgraagtgtctttggcagcccgccgcagcctcgcttatggtgttggggaacgcaaagggttctatttgacttccctttcagtaaggctgtgtaataaggctgaattattgcgtgccaggttttagtgagttagctccaagtagaagctttgcttcgttacagcggggcctgaatacatcttagcacgccttgagcaacttgcattgctctccaggttctttgtagcatcaaatcgtgctcgttttctagaagcttcaccctctgtgtgtatactcttcatgtgtaaggttttgcttgttcaga

SEQ ID NO: 78659 - DNA, 600 bp, Chicken  19866894368702_1
gcacacttctaaaatagccttctgaagcggactccatactgccaataaacactttgcaagtttatatctgatttcctttgtacttaattattacagttctacttcccaaaaatcctaagtgagctgcatggatcacttcagactgtagcttttctattcttaagcaacaaccgcaactcagaagacactcttctcacagggatgaccccactgacaagagttctcatgagaggtttgtagtgaggtcaacggactggcatgagaaagggctttgaggacctgagcccttgaaatattcaycctaatcaacaaaatatgattttttccatattgcttttttgtgccctcagtatctgtctgccttccacctgatttgggatatttgcacaccacaatgatcacttgcatctaaatggcaaaaatagccttggtatccaaacttacagaatattaattcttcagggattattatttgaaaattgttataaaaaaaggacatttgtaattaagaacaaaatttaaccttcttctgaagagtaaatctgtttaccatatacttaatgatagttgcatctcccacatgcatcctgaatctcctcc

SEQ ID NO: 78660 - DNA, 599 bp, Chicken  19866894368707_1
  misc_feature (1)..(98): n is any nucleotide
nnnnnnnnnnnnnnnnnnnnnnnnnnnnnnnnnnnnnnnnnnnnnnnnnnnnnnnnnnnnnnnnnnnnnnnnnnnnnnnnnnnnnnnnnnnnnnnnnntaaaattctgagatggcagcatgatgaattgtattgttaagcatatttaaggacagaaatctagtacacataatgcgtttgaactctgtaagtaagcgataatggaaaacatacaacccttccaggcaaagaaaatctatttgtgatccttatttaccactccaaaatcaaatgaaaggataaaatatgcccatataaaaayacactgacaagccataactacagaaatcacttcagcataatttctgaagattctgcataagactgggaattataaataagcatgtgtttagtagtcaatggtattttttgatattattttgaaatgtcagatacacccaatagaagcaaaatggaaaaacatgataacatctggtggtgttggaagcaatcrttttcttgaataccacaatcaacatgcctgaacactcagcatttctaacctgccttctctgttgaaacactgaaataattcacaaatatgtaatgtaattatgtatt

SEQ ID NO: 78661 - DNA, 600 bp, Chicken  19866894368707_2
agcgataatggaaaacatacaacccttccaggcaaagaaaatctatttgtgatccttatttaccactccaaaatcaaatgaaaggataaaatatgcccatataaaaayacactgacaagccataactacagaaatcacttcagcataatttctgaagattctgcataagactgggaattataaataagcatgtgtttagtagtcaatggtattttttgatattattttgaaatgtcagatacacccaatagaagcaaaatggaaaaacatgataacatctggtggtgttggaagcaatcrttttcttgaataccacaatcaacatgcctgaacactcagcatttctaacctgccttctctgttgaaacactgaaataattcacaaatatgtaatgtaattatgtattagcaacatccaagtatgttcacaattgtatttccaacactgacatgtatagaagcatccatcaaagtctggccccatgcaaggttctattcaaagaaaagagaaaaaagaatgctatcaacctaagtaagacaagatgtaataagggcatgaaaagaatagtgcagccaaatgagagaagcactatgataaac

SEQ ID NO: 78662 - DNA, 600 bp, Chicken  19866894368715_1
tctttgcggcgagcgtcactttcatctgggggcaaaagggggcccaacgtcaggggtgggggctgcagcacatcccgcacccaaccagatgagctccatcccctgcccccttccgtccctccccacaaccacccaggaacgcggggactcacagtgcagagcgggcacaaagtactccagagctttgcagtagagactgagcgcagcagacgcatccccctcctgatccttcttcactgcctccaccaccaggttggtctggaggtaacgggggctcaggaccagggcttggtcccaccrcgtcccatcgccatccagccatcactcaccgccttgcagaagctctcggggccgggcatgtgctccatgtccacaaagggatgggcgaagaactcctygaaggagatgcgcttcaaggggtccctctccaggaggcgttgcaggagatctcggcactctggggacagcgggggccggctgggcagctgggcagggacagcggtggcaccaggtggcacaacccagcggccctaccccatgccagctcaacattacctcgatggctcggtcgctgcggatcttctcctccagctcagcaaa

SEQ ID NO: 78663 - DNA, 600 bp, Chicken  19866894368715_2
tcccctgcccccttccgtccctccccacaaccacccaggaacgcggggactcacagtgcagagcgggcacaaagtactccagagctttgcagtagagactgagcgcagcagacgcatccccctcctgatccttcttcactgcctccaccaccaggttggtctggaggtaacgggggctcaggaccagggcttggtcccaccrcgtcccatcgccatccagccatcactcaccgccttgcagaagctctcggggccgggcatgtgctccatgtccacaaagggatgggcgaagaactcctygaaggagatgcgcttcaaggggtccctctccaggaggcgttgcaggagatctcggcactctggggacagcgggggccggctgggcagctgggcagggacagcggtggcaccaggtggcacaacccagcggccctaccccatgccagctcaacattacctcgatggctcggtcgctgcggatcttctcctccagctcagcaaacgagcgggaggcaaaggggggtcgtccaaaaagtgcctctgcaaagaggagagcggtgaggggggtcgctcgggggagcaccccgtagtcctcttggt

SEQ ID NO: 78664 - DNA, 600 bp, Chicken  19866894368723_1
catttgaagagaggccagcaaaagaaacaagtaactatttttccagcttcagagaattcagttccactcagtatgttattaagggaggttaaaaaattcattctctggaagccatctaactagagtactataatataacagacaatagtataataaaatatagttgctaaatgttgaagttagaaaatatttagtccttatgaaactaaagatactctacacacaaattgcacatgacttcagtttactgaactataactcaaaacctaaaagttaatttagtagcataactctttgaarttgattctgcacttcaatagtcaccagtatgatttatttattcaaattagaagggtcacttatttcttatcattgttctgttacttgtacattaaagcacaaaataaatgtattaccgcatcataaatatacaagttgctgtagagaatgcagcacagttctaatatcttgtattcctcttctacaaaggaggggtagtattctgtacaacaattttatacaaaatactggtagcgagaggtaggaaaatcaggaacatcttatctggcctggtaaatccaaactctgtcccttccacgc

SEQ ID NO: 78665 - DNA, 590 bp, Chicken  19866894368723_2
gttctgttacttgtacattaaagcacaaaataaatgtattaccgcatcataaatatacaagttgctgtagagaatgcagcacagttctaatatcttgtattcctcttctacaaaggaggggtagtattctgtacaacaattttatacaaaatactggtagcgagaggtaggaaaatcaggaacatcttatctggcctggtaaatccaaactctgtcccttccacgctaaactacataattgagtatttcactgaaaaattgacacggctcaatcctttttaattaatataacaagaactygctctggcacaagtttgtataaggagcatggaatcaaacataagcaaggtacaaaagaaatctataacattcagcatattatcaaaatctgaggatagtgaaagttcagatcataagtgtggcaaagtgaatagtccatacaaagacagtttgaaattgcctgttgtttctatttcctgagtgattagcttttattaatgaatatgcagcagtgttctgctgttgcttctgccagctctttctataaaatctataataattaaaaattttacatttcattttttaattta

SEQ ID NO: 78666 - DNA, 600 bp, Chicken  19866894368725_1
tccagcttcaaccactctgtgtttctgtgatttaattacgcataactcattggtaaagtaggggattcatcatgagttattttaataacattttgaaaagctacaaacatttgactatgatgtttacacttggggattttagcattttccattacaccatgacaaatcgaagcattcattctgcacagatcagttgggtcacattaaagcagtcaaggaactgaaatatatttttgacattagcaagggtttatgataaattttaaattccctagaagttattaggaataaaggtatcayaaatacctactctgtaataaagctgaactctccaaagagatttatttgctcttcccaggctataggtgtcttagcctaatattgcrtttgtacaactatttagataggggaaatctaaatgagaaactgtcctctctgttttttaatattttgttaatatttctaatattattttccatggaagatgcattcatttactgaagtcccttggtatttaattgtaccttaaaattgaactttaaaacaaattgtggtcaaaagttcaaactgaagattatatttgatatacgtacatgtcag

SEQ ID NO: 78667 - DNA, 600 bp, Chicken  19866894368725_2
aacattttgaaaagctacaaacatttgactatgatgtttacacttggggattttagcattttccattacaccatgacaaatcgaagcattcattctgcacagatcagttgggtcacattaaagcagtcaaggaactgaaatatatttttgacattagcaagggtttatgataaattttaaattccctagaagttattaggaataaaggtatcayaaatacctactctgtaataaagctgaactctccaaagagatttatttgctcttcccaggctataggtgtcttagcctaatattgcrtttgtacaactatttagataggggaaatctaaatgagaaactgtcctctctgttttttaatattttgttaatatttctaatattattttccatggaagatgcattcatttactgaagtcccttggtatttaattgtaccttaaaattgaactttaaaacaaattgtggtcaaaagttcaaactgaagattatatttgatatacgtacatgtcagaarcttcttacaatatttatttacactctgtccagtacagatatctaagataaatgttcatattgcagaaacaacctactaccctc

SEQ ID NO: 78668 - DNA, 502 bp, Chicken  19866894368725_3
tacctactctgtaataaagctgaactctccaaagagatttatttgctcttcccaggctataggtgtcttagcctaatattgcrtttgtacaactatttagataggggaaatctaaatgagaaactgtcctctctgttttttaatattttgttaatatttctaatattattttccatggaagatgcattcatttactgaagtcccttggtatttaattgtaccttaaaattgaactttaaaacaaattgtggtcaaaagttcaaactgaagattatatttgatatacgtacatgtcagaarcttcttacaatatttatttacactctgtccagtacagatatctaagataaatgttcatattgcagaaacaacctactaccctccagctaccttgatttagaagaagcaataaatgttttgtcaaaaccgtctaataaaaggctattgaaagttcacattgattcattttttctattaaaaaaaaaaaatatatatatatata

SEQ ID NO: 78669 - DNA, 600 bp, Chicken  19866894368728_1
tatgacatagatcatagtaacttctgacccagatgacaggtttaatttagagcctattttttaggctgagtcttttcagagaagctaattccagttgaaagagagtatgtgtgaatgaacatttgaaatatatcctctacattatgtcatacacagcctaacttgagggctgtaaatcaccccacctctacacactatgcaagcaaatgcatagaaagccagcctcctcaaattactgcaatttgaaatatatatatatacataaatgatttgaacactgaaagcagagataatttatayctatctccagattccaactattttctcacctccaaaagaatatatacacctctccaatgtcttttacacayaaaaagaggaattatgtaacaagtttagtagagcagaaagaccaccattacatttcatttcactctgagaagtgaaaagagaaaatttggcatctagagaaaattaaaaatataaaaaacaatctaacacttggtcatgaccacaaagcctaaaccacttacatgtttaaacaactaaaatatatgaacagacctagaagaattcattgagagcagccctgcagagaaa

SEQ ID NO: 78670 - DNA, 558 bp, Chicken  19866894368728_2
cttttcagagaagctaattccagttgaaagagagtatgtgtgaatgaacatttgaaatatatcctctacattatgtcatacacagcctaacttgagggctgtaaatcaccccacctctacacactatgcaagcaaatgcatagaaagccagcctcctcaaattactgcaatttgaaatatatatatatacataaatgatttgaacactgaaagcagagataatttatayctatctccagattccaactattttctcacctccaaaagaatatatacacctctccaatgtcttttacacayaaaaagaggaattatgtaacaagtttagtagagcagaaagaccaccattacatttcatttcactctgagaagtgaaaagagaaaatttggcatctagagaaaattaaaaatataaaaaacaatctaacacttggtcatgaccacaaagcctaaaccacttacatgtttaaacaactaaaatatatgaacagacctagaagaattcattgagagcagccctgcagagaaaacttggtgactctgatagacaaaaagctg

SEQ ID NO: 78671 - DNA, 600 bp, Chicken  19866894368733_1
caatgccttacactgggacaacttaacttcagtggaaacctggacacagctacaagctagttaacatataagtaatacatgacagtaagtgaaatcaggccttacaagcatttcaatttcccgaggtataagaaaaaaataaatcactagtttttgttttaggtagtttgataaaacaatttacaaccaaagataaaaatgcacacagcgaggaaggtgaatggacagagattacagactaacgctcaagtttaaaggcgctgcaaggccgatagaaaagttcacctgcttgctcagcaytaagccgcacctcagaggaacaactaaatgctgcacttgctcaaaagtggcttccttggcttcctgagggcggcagaagggggcacacacaattctggaaggccgggcagacgcgggcagaatgagcagctgtagatttctctgggctttcgccaggtcagaacatgaaatcctatcacactttcagaaaatacagaagttatttctgtcgggatattatctgcagaggaatatcttttgcaaacttctatatatgatcagtgaggttttctgaagagcgttccactgctggctgaaaac

SEQ ID NO: 78672 - DNA, 600 bp, Chicken  19866894368737_1
ctctcccgagctgctgttgggatttcagtgctacagtttcttttacaacatccttattaacctttctgacattgtgcggaagttcaggacctctccaggcgctgcaggaggaggccgggtggcccaaatcccacagtgccctctagtgacacctggcatgtcgggaggaaggccgtccaaaaaggagcccaaagagtgcccgcggaccgccctgcactgactcatgtaacgtccgctgtatgtgctggcacaaacgttttcaccctcctgcttaacactggtgtgactggagaagctctrctgcccgctgtggcgtatttcggcacacagagcacacacagcagggcacgttgccttgcartgctgcagttcrtatcttcaggtgctcttcgtttatgcttcgcgttataatttccggtgtgtaatcagaaagcattacttaagagacaaggctcatctttgtttcatacttttattgacactgtctgccatattactgctatgtctaaatggtaaaatttattattagcaatagtgtcacaaaagtctgagacagcgattttcctttcaataaaagtagttaaaaaccttttagaaaat

SEQ ID NO: 78673 - DNA, 560 bp, Chicken  19866894368737_2
ctttctgacattgtgcggaagttcaggacctctccaggcgctgcaggaggaggccgggtggcccaaatcccacagtgccctctagtgacacctggcatgtcgggaggaaggccgtccaaaaaggagcccaaagagtgcccgcggaccgccctgcactgactcatgtaacgtccgctgtatgtgctggcacaaacgttttcaccctcctgcttaacactggtgtgactggagaagctctrctgcccgctgtggcgtatttcggcacacagagcacacacagcagggcacgttgccttgcartgctgcagttcrtatcttcaggtgctcttcgtttatgcttcgcgttataatttccggtgtgtaatcagaaagcattacttaagagacaaggctcatctttgtttcatacttttattgacactgtctgccatattactgctatgtctaaatggtaaaatttattattagcaatagtgtcacaaaagtctgagacagcgattttcctttcaataaaagtagttaaaaaccttttagaaaatccataattttgattgctggta

SEQ ID NO: 78674 - DNA, 548 bp, Chicken  19866894368737_3
gtgcggaagttcaggacctctccaggcgctgcaggaggaggccgggtggcccaaatcccacagtgccctctagtgacacctggcatgtcgggaggaaggccgtccaaaaaggagcccaaagagtgcccgcggaccgccctgcactgactcatgtaacgtccgctgtatgtgctggcacaaacgttttcaccctcctgcttaacactggtgtgactggagaagctctrctgcccgctgtggcgtatttcggcacacagagcacacacagcagggcacgttgccttgcartgctgcagttcrtatcttcaggtgctcttcgtttatgcttcgcgttataatttccggtgtgtaatcagaaagcattacttaagagacaaggctcatctttgtttcatacttttattgacactgtctgccatattactgctatgtctaaatggtaaaatttattattagcaatagtgtcacaaaagtctgagacagcgattttcctttcaataaaagtagttaaaaaccttttagaaaatccataattttgattgctggta

SEQ ID NO: 78675 - DNA, 600 bp, Chicken  19866894368748_1
ggtaagagaaaagctgtgcaagaaagagtccatgtgttggcatcgctaatttcttacctatggactggctcagtgctcagctcagaaaattcatcttttcacaattgtattgcttctgttttacacagaactgaaacaaaacaaacaaataaataaaagcttatgcaatgacattaatatttccctgtgtttcatgtgtttaactttatgttaccatatctgtcttccacaacaatgtcacatttgtggctcttgtttattttctcatctgttaatgataattttgcttttcattgcccygcttctaagaaatcacatcataaratggagataatcaagttttctttgagcatgtaaccttttgtgtaggaaagtgtcatactgtatttatttgagccctcttcaaattcaggtcgttattattatgatgtggtggtttcagtttatacaactgtgccatctgccactttcattaatgcatcactgtttcccataccagggtcattaatacagatgtgaaatgagagaaccatccatttagaacttcatttcttacttttcaacagtaaggactttccttatgagaaaataaatacatcc

SEQ ID NO: 78676 - DNA, 600 bp, Chicken  19866894368748_2
agagtccatgtgttggcatcgctaatttcttacctatggactggctcagtgctcagctcagaaaattcatcttttcacaattgtattgcttctgttttacacagaactgaaacaaaacaaacaaataaataaaagcttatgcaatgacattaatatttccctgtgtttcatgtgtttaactttatgttaccatatctgtcttccacaacaatgtcacatttgtggctcttgtttattttctcatctgttaatgataattttgcttttcattgcccygcttctaagaaatcacatcataaratggagataatcaagttttctttgagcatgtaaccttttgtgtaggaaagtgtcatactgtatttatttgagccctcttcaaattcaggtcgttattattatgatgtggtggtttcagtttatacaactgtgccatctgccactttcattaatgcatcactgtttcccataccagggtcattaatacagatgtgaaatgagagaaccatccatttagaacttcatttcttacttttcaacagtaaggactttccttatgagaaaataaatacatccaaatattcatgctgctgactgctt

SEQ ID NO: 78677 - DNA, 599 bp, Chicken  19866894368751_1
  misc_feature (1)..(25): n is any nucleotide
nnnnnnnnnnnnnnnnnnnnnnnnnttatgaaactggagtaggtctctcctatgtgtgcacgagcagcatctcattgcaacagagtgcagtaccttgacttcacacgactgagagagtgtcctgggaagtactgtgctgggcacagcatatttctgtgctcttctccatcaaaggtgagctgaacaggcctctgggcagagcaaatcaagctgttttacgagcatctggacctgggttctgcagggagatctccagggcatctctagtagggtttgcaggaagcaaaggagcaggaataygcagcccggtcctttgtgagccttgctgaacagctggcatctctccaggagccctgtctcagaggtgggtatcaccttgaaaaacaaactggagctgtcagaggcaggaagaacatcaaagagctgctaaacagctgctgttgaaggcttagcctgcagctgtgcatctcatagcattagtattgacaaggatgcgtggaggagcgctgctgagaagggtgggtgtactccagcattcatagatggcataggagcttcgggcaaaacccaggcagcctggctgctgccacttgaagtca

SEQ ID NO: 78678 - DNA, 600 bp, Chicken  19866894368755_1
ttgaaatctggtggctctgaactacccactcactgttattcacacaattaccagccaatatgtgcatttctatttctcatttctccctggaactcatctctgggctgaatcaccaccacatgaaagatgacttttccaagacagcagcatttcaaaatttactgtgtagatcaaacattgcttgcttagttttatcctactgcttttactgaaacctctctgaattacagaactactcagccatctctgctgtacctctagctggaggattccccacagaccacttcatgatgaagaaasaggaaagggtttggtcaaaaagtacattttgtaaagtttgtcaccttccttcagcttcagcaagcaaacctgattctacgtgttstcttcacagtctcaaccatgtcatgaaaaagatactggttatgatgttttcaaggcagtagtgaaaatgcttattatttggaaaaggaatgccaatattttaaaagaaatccaaatgttccagttgggaaaaaaccttattctgaggtatcaaagtctctgctttgacaaacccacttgcatttcccacccagccactccatccttctactgagt

SEQ ID NO: 78679 - DNA, 587 bp, Chicken  19866894368755_2
cctggaactcatctctgggctgaatcaccaccacatgaaagatgacttttccaagacagcagcatttcaaaatttactgtgtagatcaaacattgcttgcttagttttatcctactgcttttactgaaacctctctgaattacagaactactcagccatctctgctgtacctctagctggaggattccccacagaccacttcatgatgaagaaasaggaaagggtttggtcaaaaagtacattttgtaaagtttgtcaccttccttcagcttcagcaagcaaacctgattctacgtgttstcttcacagtctcaaccatgtcatgaaaaagatactggttatgatgttttcaaggcagtagtgaaaatgcttattatttggaaaaggaatgccaatattttaaaagaaatccaaatgttccagttgggaaaaaaccttattctgaggtatcaaagtctctgctttgacaaacccacttgcatttcccacccagccactccatccttctactgagtcagaaaaacaatgcttraagttcaggcaggcagcatccaaagccagttccaatatccctctgcatttccact

SEQ ID NO: 78680 - DNA, 355 bp, Chicken  19866894368755_3
aaaagtacattttgtaaagtttgtcaccttccttcagcttcagcaagcaaacctgattctacgtgttstcttcacagtctcaaccatgtcatgaaaaagatactggttatgatgttttcaaggcagtagtgaaaatgcttattatttggaaaaggaatgccaatattttaaaagaaatccaaatgttccagttgggaaaaaaccttattctgaggtatcaaagtctctgctttgacaaacccacttgcatttcccacccagccactccatccttctactgagtcagaaaaacaatgcttraagttcaggcaggcagcatccaaagccagttccaatatccctctgcatttccact

SEQ ID NO: 78681 - DNA, 600 bp, Chicken  19866894368760_1
ttcccacaaagcacagcagcatagagccccatctctgtctggagacagaggaagagcacagcagccagtgcgagttgagctgtgcagtgtgtgatttcccaagttggacaccggccaagatgacgctgtcagattgcttgctttctgaaaaacactgccgtggtgtccacagtgatcacacgatatgaggacctcccacctttgcctccctgtcccctgttgcttggatgctagcaaagaacacagaaagcccagcagaatgagcatccctcctcctgtaatcggagaggagaagccacrtttgtggctgcctgtccccaggttacctagcaggcatggtgaaaagagcaagggagctgtacgtgcttctctgattgggaataatgacgtcagagccaggcacagggggctggtgctgctaccacatggcatatcacatgcggcatggttgtcttcacatcctcctccaaaaggctgtgtttactcatgcgctgcagcacgctgctgctcagtacaaataaaacacatctctctgggatgaatggggatcagggtgcatgtgtggatgggtatgcatctatgcatgcacacaggcagtat

SEQ ID NO: 78682 - DNA, 600 bp, Chicken  19866894368761_1
tctggagctaccattcagagttggtagtgacttattggcatctatccattagtcagttcttaatctgtttggctattgcagagctctcatttttctaactgcctaagcagaaaaggcaaacaagtgtatttgaacgctaaaagaatagacttagaacataaatcctgcaaagagtttaatccccactggtgcctaaatgtttataagcatgtggatttatgagactggctttaggtccgctgttaggaaacctcatgctttgtatatttttctgttaatattagtttctcttatctttgraagacaaaactccaaaatcatggctgttgaagggaccacagtagttttgtgtgttgtttttgttttgtttttctagtcacacatagctttccttttgctcctctgcatccctacaggtaactattgttttccaaaaatacttggcaacggcagtgtaaatctgctagataatatctgtaatatcactatgtgcagattatrcctttttagcaactctcatacatacattcagatatcctaagtattccctcatctgtttctatcaataggatttatttattcgtgtcacagtgtttcttt

SEQ ID NO: 78683 - DNA, 600 bp, Chicken  19866894368761_2
tataagcatgtggatttatgagactggctttaggtccgctgttaggaaacctcatgctttgtatatttttctgttaatattagtttctcttatctttgraagacaaaactccaaaatcatggctgttgaagggaccacagtagttttgtgtgttgtttttgttttgtttttctagtcacacatagctttccttttgctcctctgcatccctacaggtaactattgttttccaaaaatacttggcaacggcagtgtaaatctgctagataatatctgtaatatcactatgtgcagattatrcctttttagcaactctcatacatacattcagatatcctaagtattccctcatctgtttctatcaataggatttatttattcgtgtcacagtgtttctttcttgttaattgcttcaagttattttatgtaattaaagacagatggtaaagcaaagttcagtatctcatccatttgctaatcagtggcttatgcagtgctataaatgtagcagagatgttataattttgttttytcatgtcctgtgctttaaattaaatactgggaccaattcctatttacactgaagccaataacaaaaaa

SEQ ID NO: 78684 - DNA, 600 bp, Chicken  19866894368761_3
aaaatacttggcaacggcagtgtaaatctgctagataatatctgtaatatcactatgtgcagattatrcctttttagcaactctcatacatacattcagatatcctaagtattccctcatctgtttctatcaataggatttatttattcgtgtcacagtgtttctttcttgttaattgcttcaagttattttatgtaattaaagacagatggtaaagcaaagttcagtatctcatccatttgctaatcagtggcttatgcagtgctataaatgtagcagagatgttataattttgttttytcatgtcctgtgctttaaattaaatactgggaccaattcctatttacactgaagccaataacaaaaaactgccattgaccaggatctcacagtgggagaccatggatggagaagctgcgagccaattcagtgtggtgtttgtgttgtacagaggcacacagccctccctcccttaggcccaggtcctgccttgatcttcacatctatagcttccgtgacgtgtctgtgggaaamaagtggacaggtcaggacattaacaaagggtttttttctcctgtctttgtggaaacccatttgtga

SEQ ID NO: 78685 - DNA, 600 bp, Chicken  19866894368761_4
tccatttgctaatcagtggcttatgcagtgctataaatgtagcagagatgttataattttgttttytcatgtcctgtgctttaaattaaatactgggaccaattcctatttacactgaagccaataacaaaaaactgccattgaccaggatctcacagtgggagaccatggatggagaagctgcgagccaattcagtgtggtgtttgtgttgtacagaggcacacagccctccctcccttaggcccaggtcctgccttgatcttcacatctatagcttccgtgacgtgtctgtgggaaamaagtggacaggtcaggacattaacaaagggtttttttctcctgtctttgtggaaacccatttgtgatctcaacattctttgggtttattctattttgtggtgttggttttttttccccatatgcaagggagcaaaacatctgttttcattaaggacatcttgtttttcagattagagaaaaccaccacgaaagggagaataaacaaaagcctccagaggaggagacccatcatgtgctcccctcgagctgccatcttgccctgactgagcacagcatgcagctgtggccaagccccacca

SEQ ID NO: 78686 - DNA, 600 bp, Chicken  19866894368761_5
caaggggtgtgctgggaatcacaaatcagcctaaagatttatgtgttacaccaaattatcgtaactgacacaacacttccagcaagccagtttggaaataccagaatctccccctgcccctctcctcccccccttacgtgagaaggccaaattagagagagcagggatttctcagcgctaccatgagtcatgctcacatcaagcacatggtggtgaggtcagtgacaagggttactgggcttggactatacagaaaatggattctgctaaatgacagagcagtgagaataccaagaaagmaaaaaaaaaagaagaagaggaatgcagaagccaccaaggttcctaaaccacaggcggaagggaagtggagacagactcatgcttcttggaagaatgagcagacaggtggcatgggacacttggctcttttattcacctaaccttttggcccctaacatcagctgcttccctcccagccatggaagttcacaaaaacaactaattcacctattgtatttagcctaggatgggattttttaactgcattagcactactctttctcaggaatacgcagcgaggcatatttaaaataaacaggc

SEQ ID NO: 78687 - DNA, 600 bp, Chicken  19866894368762_1
tctgttccatgctgtaagacttaataaattaagaaactgggttttttttctggccacattaaatttctaggcaatttattttaactatgattgaaatgctttgctttatatatttgctctcaatatctaagatacaagatatttttatatttccaatttttagaagtcaccctttcctccacataaacaaatcaggcctactccctcccgttttcactttcgttcctcgagataaggaatgcggagttctgcttagtacataacacattggacaggaaaataaataattaaataaataawtaaataaataatcttttcttagtgaagcgtacatttaaggatgaataggccattttaaaacttcaaaaacatcacttagacaagaatgcagagattggtagtttctcaaaaaattaagagtattttaggacatatttggttaacaaaatatctcaggtttcccacccagcctcaacagttggcttttgctgtgctaaccactgctgttaaattatatagtgcatgctacacttatgatggacatggacaattggctatagcggacaaaaacagatatcccaaaccaaacacattaagttc

SEQ ID NO: 78688 - DNA, 600 bp, Chicken  19866894368769_1
gctatccagtgaatggatttttaaagaagtatttgagatgaagaattatggggacttgaaggaataagtataatataccatcaccaactgttttcaccatttgatgtagacacttttaaatttagtgggactgggatgctggctgtatgagtcatctgatattcatgaagcttctttgtctttctatctacaaaaaatatcagggagagatttattctctcatcaagagagttttggacttggaaaattagttgatcgttattacataataaccaaaatcttggattttgtattttgcartaagcagcacaggggacaccatctataatttcagctaagagttgattataagagataagataaaggcagttttgaagttgcatttaagtgctgacttaaaatggttcacttgaagcattcacaaattatgttgcagagtcaaaggtgtcctttgtgttaaatgaatgtaatctaaaatgttatagagagctaaatgatttattgatgtctttttctgaggcatttacctgcacctgtagccagcccattccatttattttggctcactgacaaattagcaagctatttgtatgtcaaatt

SEQ ID NO: 78689 - DNA, 600 bp, Chicken  19866894368770_1
ttggcgcactgcagtgtggtgccacgaagctcctgatgcagagcctgcccaggggctggcaggtagcagcaagctgggagcctggcccttgctgagccgcgcttctgctagtgagcatgacttggggaaagcctgaacgaatcaatttgttcaaggaaaataatccccaaaccaaaaccaagccttcagtcaagaacaaaggatgcacttcgactgactttggtcacctgggtgcaaacggtttgctttctctcaagacctgtgcaattagaattatccagagccacaacaaggcaatayggaaaagttacagtgcaattaaaatgaaagctgctgtatacaagtaaaataaacagctccaaatagcttcagcatgacagagctcaaaatacctggttgatcttctgacttgaaaccaattccctacagcagttacccgtctccctgtcccctgctgagttcaaaggcagtctcctctccgttgtaacaagcccggctgaaagctgccaagtgccccacactctactgtggaaacaccgtttcatattacacaaacatttccagcacctttaaaagccaaatcgcattcacctcacattt

SEQ ID NO: 78690 - DNA, 600 bp, Chicken  19866894368770_2
tgaaaccaattccctacagcagttacccgtctccctgtcccctgctgagttcaaaggcagtctcctctccgttgtaacaagcccggctgaaagctgccaagtgccccacactctactgtggaaacaccgtttcatattacacaaacatttccagcacctttaaaagccaaatcgcattcacctcacatttagacctcttgtctcagcactcatgtttctgattcttttacacctcttaaacatttaccaatctcatagcccctagcttacacagttagaaaactttcatttctagaacamggggaaaaaatatcaatacttggttccttgccacacattaatccttctctgtcccacattgcctaacataacatctttatgtgaggatgtgctctgcttagttaagagccatggcaatcttccctgcattagtcatggagcctggtaccaagtgctaacctttatggcatgccaagaactacttgggaacaaacacagactttgcyggtacggtggagttccagctatactggcaccaaccatgttgacaggtgtcctccaatgttcaaatatcaaggcactgttaattgcaatttatca

SEQ ID NO: 78691 - DNA, 600 bp, Chicken  19866894368770_3
cactcatgtttctgattcttttacacctcttaaacatttaccaatctcatagcccctagcttacacagttagaaaactttcatttctagaacamggggaaaaaatatcaatacttggttccttgccacacattaatccttctctgtcccacattgcctaacataacatctttatgtgaggatgtgctctgcttagttaagagccatggcaatcttccctgcattagtcatggagcctggtaccaagtgctaacctttatggcatgccaagaactacttgggaacaaacacagactttgcyggtacggtggagttccagctatactggcaccaaccatgttgacaggtgtcctccaatgttcaaatatcaaggcactgttaattgcaatttatcatgcctttcctgtctgcaaatgtctgctattcaaaggagaatataaaatgtgcctacaaagaagagttatcgctttgcaaaaaaaaaaaggcaggaaagtcayctccccctgaagscacaccagcacctagcaacagctgagctgcctccttttaatcagcctaaaacagtaaaaaataaattgtaccagactactaaacctgctcg

SEQ ID NO: 78692 - DNA, 600 bp, Chicken  19866894368770_4
taagagccatggcaatcttccctgcattagtcatggagcctggtaccaagtgctaacctttatggcatgccaagaactacttgggaacaaacacagactttgcyggtacggtggagttccagctatactggcaccaaccatgttgacaggtgtcctccaatgttcaaatatcaaggcactgttaattgcaatttatcatgcctttcctgtctgcaaatgtctgctattcaaaggagaatataaaatgtgcctacaaagaagagttatcgctttgcaaaaaaaaaaaggcaggaaagtcayctccccctgaagscacaccagcacctagcaacagctgagctgcctccttttaatcagcctaaaacagtaaaaaataaattgtaccagactactaaacctgctcgggagaaggaaatgagcgcccagccatgctgcaaggtggctgcgtggtcttttaaataacaattgaggaacgcaaagctcattactgtgacaggctgacagcactgaaaggtagaaatctgccatgtctgctggaacgcagagagatgaaaactcgtgctgtttcttgtcagtaccagagaatctttctgttcacca

SEQ ID NO: 78693 - DNA, 600 bp, Chicken  19866894368770_5
aatcttccctgcattagtcatggagcctggtaccaagtgctaacctttatggcatgccaagaactacttgggaacaaacacagactttgcyggtacggtggagttccagctatactggcaccaaccatgttgacaggtgtcctccaatgttcaaatatcaaggcactgttaattgcaatttatcatgcctttcctgtctgcaaatgtctgctattcaaaggagaatataaaatgtgcctacaaagaagagttatcgctttgcaaaaaaaaaaaggcaggaaagtcayctccccctgaagscacaccagcacctagcaacagctgagctgcctccttttaatcagcctaaaacagtaaaaaataaattgtaccagactactaaacctgctcgggagaaggaaatgagcgcccagccatgctgcaaggtggctgcgtggtcttttaaataacaattgaggaacgcaaagctcattactgtgacaggctgacagcactgaaaggtagaaatctgccatgtctgctggaacgcagagagatgaaaactcgtgctgtttcttgtcagtaccagagaatctttctgttcaccaagaacagacaacc

SEQ ID NO: 78694 - DNA, 600 bp, Chicken  19866894368785_1
ataattaatcctgacacagaccctcatactcaaaacatatctaaataaagccctcataataaatcaggatttattattctaatctcatttaggtcatacagtggcactcaacagtacaaatgtagggtcctaacctataatccttgaggcagccaaaacttccactggcttccaatgaagtaatgcttatgcaccaagtgcggaacctcacccttacatactatatcagagtaattacagtagctctaaagcaagaaatctgtggtttgataacttcatttggtactataccagagaaayaaatttctaggagaattctacatgttattcagcaagtagaaactagaaagggayggattccatgaactagatgtatcagaacttccaagcctttgttttatgttggacttttgcctctattagctgattataaactgattttggtctcttctgcagaattccccattgcatgacatgcaataagagcagactcaatctcatagatgaaatcttcatttgaagttagtaagaagtctttagaactctgaaatttctgtgtatgctgtgcattccttggagattaagagaatgctcaacaat

SEQ ID NO: 78695 - DNA, 600 bp, Chicken  19866894368785_2
cataataaatcaggatttattattctaatctcatttaggtcatacagtggcactcaacagtacaaatgtagggtcctaacctataatccttgaggcagccaaaacttccactggcttccaatgaagtaatgcttatgcaccaagtgcggaacctcacccttacatactatatcagagtaattacagtagctctaaagcaagaaatctgtggtttgataacttcatttggtactataccagagaaayaaatttctaggagaattctacatgttattcagcaagtagaaactagaaagggayggattccatgaactagatgtatcagaacttccaagcctttgttttatgttggacttttgcctctattagctgattataaactgattttggtctcttctgcagaattccccattgcatgacatgcaataagagcagactcaatctcatagatgaaatcttcatttgaagttagtaagaagtctttagaactctgaaatttctgtgtatgctgtgcattccttggagattaagagaatgctcaacaatctgcagagctaaggctaaaaagccctgaaaaagatttcttccttttcactgttg

SEQ ID NO: 78696 - DNA, 600 bp, Chicken  19866894368785_3
agaaatctgtggtttgataacttcatttggtactataccagagaaayaaatttctaggagaattctacatgttattcagcaagtagaaactagaaagggayggattccatgaactagatgtatcagaacttccaagcctttgttttatgttggacttttgcctctattagctgattataaactgattttggtctcttctgcagaattccccattgcatgacatgcaataagagcagactcaatctcatagatgaaatcttcatttgaagttagtaagaagtctttagaactctgaaattyctgtgtatgctgtgcattccttggagattaagagaatgctcaacaatctgcagagctaaggctaaaaagccctgaaaaagatttcttccttttcactgttgaaatagttcttcccagccttcagtttctgtaacacagaggcattaaatcagtagctcaastagtacatacatcctccccctctgctagccttcagcacttcctctgccttagtgtttaccccttgtttacacccccacataggaaaaacacctaaaagaggaactacagaaactaggtacttctctgcagtgggaattc

SEQ ID NO: 78697 - DNA, 600 bp, Chicken  19866894368785_4
gaaatctgtggtttgataacttcatttggtactataccagagaaayaaatttctaggagaattctacatgttattcagcaagtagaaactagaaagggayggattccatgaactagatgtatcagaacttccaagcctttgttttatgttggacttttgcctctattagctgattataaactgattttggtctcttctgcagaattccccattgcatgacatgcaataagagcagactcaatctcatagatgaaatcttcatttgaagttagtaagaagtctttagaactctgaaatttytgtgtatgctgtgcattccttggagattaagagaatgctcaacaatctgcagagctaaggctaaaaagccctgaaaaagatttcttccttttcactgttgaaatagttcttcccagccttcagtttctgtaacacagaggcattaaatcagtagctcaastagtacatacatcctccccctctgctagccttcagcacttcctctgccttagtgtttaccccttgtttacacccccacataggaaaaacacctaaaagaggaactacagaaactaggtacttctctgcagtgggaattcc

SEQ ID NO: 78698 - DNA, 600 bp, Chicken  19866894368785_5
ctctattagctgattataaactgattttggtctcttctgcagaattccccattgcatgacatgcaataagagcagactcaatctcatagatgaaatcttcatttgaagttagtaagaagtctttagaactctgaaatttctgtgtatgctgtgcattccttggagattaagagaatgctcaacaatctgcagagctaaggctaaaaagccctgaaaaagatttcttccttttcactgttgaaatagttcttcccagccttcagtttctgtaacacagaggcattaaatcagtagctcaastagtacatacatcctccccctctgctagccttcagcacttcctctgccttagtgtttaccccttgtttacacccccacataggaaaaacacctaaaagaggaactacagaaactaggtacttctctgcagtgggaattcccttagatatttcagtcagctggctatgaggtgactggaaaagagagaccagatgtggcctgaaaaaagggggagatagagcagtgctaaggattgcttattcttctgtctggcatttcctatcacctacaacacatgctggcagagaacatctcttcata

SEQ ID NO: 78699 - DNA, 600 bp, Chicken  19866894368785_6
taaactgattttggtctcttctgcagaattccccattgcatgacatgcaataagagcagactcaatctcatagatgaaatcttcatttgaagttagtaagaagtctttagaactctgaaatttctgtgtatgctgtgcattccttggagattaagagaatgctcaacaatctgcagagctaaggctaaaaagccctgaaaaagatttcttccttttcactgttgaaatagttcttcccagccttcagtttctgtaacacagaggcattaaatcagtagctcaastagtacatacatcctscccctctgctagccttcagcacttcctctgccttagtgtttaccccttgtttacacccccacataggaaaaacacctaaaagaggaactacagaaactaggtacttctctgcagtgggaattcccttagatatttcagtcagctggctatgaggtgactggaaaagagagaccagatgtggcctgaaaaaagggggagatagagcagtgctaaggattgcttattcttctgtctggcatttcctatcacctacaacacatgctggcagagaacatctcttcataaaagcctttaaaaaga

SEQ ID NO: 78700 - DNA, 600 bp, Chicken  19866894368788_1
ccagtcctgacacgtgttaggcctgcaagagctctggctgtgcaggctgatgcatttccagcctcctgtgctgggtaattagctttgaaacaaggtgggtgttaactcaagggaatgggctggtgccaacaggaaggggccgtgccatggctcagctgtgcgtgcctctgcaggagctgagcgcccagcgttacaggggacagaacagacactggtcctgaatctccctgctctgcacagctgtgaggtggcattctgctggtcctgagctgccgacctcctgggcgtttctctgcaggygttgtgctgcctgctgcattagccagctggtgctgcaggtcacagttgctgcttctgaggctcccgttggtcaccaacactgcgcagcgacaaacggcgctcrttccacccttcctggcccccaggcacggattgtatgggagtttaacaaatgcaagaacttcaggagttttcacctgaaatatttcaaaccctttcttccctgccctcgttagacaggttcaaagccaggtgtgtgtcacttctgttagatcctcttgccctctgcacttgctgcagtattaagtgttactgttagct

SEQ ID NO: 78701 - DNA, 600 bp, Chicken  19866894368788_2
aactcaagggaatgggctggtgccaacaggaaggggccgtgccatggctcagctgtgcgtgcctctgcaggagctgagcgcccagcgttacaggggacagaacagacactggtcctgaatctccctgctctgcacagctgtgaggtggcattctgctggtcctgagctgccgacctcctgggcgtttctctgcaggygttgtgctgcctgctgcattagccagctggtgctgcaggtcacagttgctgcttctgaggctcccgttggtcaccaacactgcgcagcgacaaacggcgctcrttccacccttcctggcccccaggcacggattgtatgggagtttaacaaatgcaagaacttcaggagttttcacctgaaatatttcaaaccctttcttccctgccctcgttagacaggttcaaagccaggtgtgtgtcacttctgttagatcctcttgccctctgcacttgctgcagtattaagtgttactgttagctaaagcaagctttgaactgcagctctttttaatcaagctccgttttcaagtaggactttctcgtttccatatgacctgaagtgctgctcctgggggactgcaca

SEQ ID NO: 78702 - DNA, 600 bp, Chicken  19866894368789_1
cccaaaatcccgaggaagttaagaaccccccccagtctctcgccctggtagggcagcccgcggtgctggagaagaggagaaggagcggggcttaccgcgggaggcgaggaaggagagcagccccagcagcagtcccagcggcgctcctcggggatcctccatcgccgcgcagcaccggcgcagcgcagcgcagccccgccgcgcccgcccgagccgcgcacgcaggaaatttcgttcgagccggggagagaagtgcgagcacccccaggaggccagatggggcacggagcggtgcccagycctgcccgattcgcttcarcagagcgcgtacctcgcttggaattagtttctctcccgtgcgaatggggtgggcaggtagccaacggcttgaccagrctggtgctgcagaagggatgagcaggaggggaggaaaaaagggctactcgaggaaatgccgtaccccatagyacatcctctccagagcatcacctgtgcacatcctgagcaccacgctgcttcaagcatcttggtgaggagagtgagatgtggttgtggttttacagtaaatgcttccacaaagctctcatcagaaatgtaacy

SEQ ID NO: 78703 - DNA, 600 bp, Chicken  19866894368789_10
tacctaacccctaaccactactggatgctgccttgtgctggaggtgtttctgcagctccacatcactttggtttagggcaatgtttcactcatcctgcctgccgctcttggcagggctgaccatgtgttgctcaytgacccaggcaggtcaaactttgctcaccacaggccttaacatgctgtccccaygtcccacaggccaccaccaaagtgttcgtcaccatcctggaygagaatgacaatgctccagtgttccagcagcagctgtatgaggtgacgttggacgagggccccgccacmctcaatgccacacttgtcaccgtgcaggccctggaccgggatgaagggcccaacagcacagtcacatatgctatcaccgaaggcaacatcttgggtactttctacatcaacagcaccacggtcagtcaggatgctgtccccarcccaggcatcccctcctcctgtgtccctcactcccagctgctgtccccttgccttgcagggacagatccgcaccctgaaggagctggactacgagatcagccacgggcgctacaccttggtggtcactgccaccgaccagtgccccatcgcctcgcg

SEQ ID NO: 78704 - DNA, 508 bp, Chicken  19866894368789_11
gcaggtcaaactttgctcaccacaggccttaacatgctgtccccaygtcccacaggccaccaccaaagtgttcgtcaccatcctggaygagaatgacaatgctccagtgttccagcagcagctgtatgaggtgacgttggacgagggccccgccacmctcaatgccacacttgtcaccgtgcaggccctggaccgggatgaagggcccaacagcacagtcacatatgctatcaccgaaggcaacatcttgggtactttctacatcaacagcaccacggtcagtcaggatgctgtccccarcccaggcatcccctcctcctgtgtccctcactcccagctgctgtccccttgccttgcagggacagatccgcaccctgaaggagctggactacgagatcagccacgggcgctacaccttggtggtcactgccaccgaccagtgccccatcgcctcgcgtcggctgacgtcaaccaccacggtagggttgcgacagtatgctgtctttgt

SEQ ID NO: 78705 - DNA, 600 bp, Chicken  19866894368789_2
taagaaccccccccagtctctcgccctggtagggcagcccgcggtgctggagaagaggagaaggagcggggcttaccgcgggaggcgaggaaggagagcagccccagcagcagtcccagcggcgctcctcggggatcctccatcgccgcgcagcaccggcgcagcgcagcgcagccccgccgcgcccgcccgagccgcgcacgcaggaaatttcgttcgagccggggagagaagtgcgagcacccccaggaggccagatggggcacggagcggtgcccagycctgcccgattcgcttcarcagagcgcgtacctcgcttggaattagtttctctcccgtgcgaatggggtgggcaggtagccaacggcttgaccagrctggtgctgcagaagggatgagcaggaggggaggaaaaaagggctactcgaggaaatgccgtaccccatagyacatcctctccagagcatcacctgtgcacatcctgagcaccacgctgcttcaagcatcttggtgaggagagtgagatgtggttgtggttttacagtaaatgcttccacaaagctctcatcagaaatgtaacycttgtctgatagagaggaa

SEQ ID NO: 78706 - DNA, 600 bp, Chicken  19866894368789_3
gcgggaggcgaggaaggagagcagccccagcagcagtcccagcggcgctcctcggggatcctccatcgccgcgcagcaccggcgcagcgcagcgcagccccgccgcgcccgcccgagccgcgcacgcaggaaatttcgttcgagccggggagagaagtgcgagcacccccaggaggccagatggggcacggagcggtgcccagycctgcccgattcgcttcarcagagcgcgtacctcgcttggaattagtttctctcccgtgcgaatggggtgggcaggtagccaacggcttgaccagrctggtgctgcagaagggatgagcaggaggggaggaaaaaagggctactcgaggaaatgccgtaccccatagyacatcctctccagagcatcacctgtgcacatcctgagcaccacgctgcttcaagcatcttggtgaggagagtgagatgtggttgtggttttacagtaaatgcttccacaaagctctcatcagaaatgtaacycttgtctgatagagaggaacttgtcattgggggaggtataggcacaacgtttggagggttttttgtgacagtcgtgacctcggagggagttgcacc

SEQ ID NO: 78707 - DNA, 600 bp, Chicken  19866894368789_4
gcagcaccggcgcagcgcagcgcagccccgccgcgcccgcccgagccgcgcacgcaggaaatttcgttcgagccggggagagaagtgcgagcacccccaggaggccagatggggcacggagcggtgcccagycctgcccgattcgcttcarcagagcgcgtacctcgcttggaattagtttctctcccgtgcgaatggggtgggcaggtagccaacggcttgaccagrctggtgctgcagaagggatgagcaggaggggaggaaaaaagggctactcgaggaaatgccgtaccccatagyacatcctctccagagcatcacctgtgcacatcctgagcaccacgctgcttcaagcatcttggtgaggagagtgagatgtggttgtggttttacagtaaatgcttccacaaagctctcatcagaaatgtaacycttgtctgatagagaggaacttgtcattgggggaggtataggcacaacgtttggagggttttttgtgacagtcgtgacctcggagggagttgcacccagcctggttgcagtatggcagatcttctgtgcaaacctctgtcctggaatcagtgtcccatatcccactcc

SEQ ID NO: 78708 - DNA, 600 bp, Chicken  19866894368789_5
cctgcccgattcgcttcarcagagcgcgtacctcgcttggaattagtttctctcccgtgcgaatggggtgggcaggtagccaacggcttgaccagrctggtgctgcagaagggatgagcaggaggggaggaaaaaagggctactcgaggaaatgccgtaccccatagyacatcctctccagagcatcacctgtgcacatcctgagcaccacgctgcttcaagcatcttggtgaggagagtgagatgtggttgtggttttacagtaaatgcttccacaaagctctcatcagaaatgtaacycttgtctgatagagaggaacttgtcattgggggaggtataggcacaacgtttggagggttttttgtgacagtcgtgacctcggagggagttgcacccagcctggttgcagtatggcagatcttctgtgcaaacctctgtcctggaatcagtgtcccatatcccactccaacgggacaagtggaagagctggcattggtagggcagactccagccatcctgctgcccagcctcttacaaggaaatatctcatttgctcctcatcctcctccaaaaaaatttctcatccatcctaagacact

SEQ ID NO: 78709 - DNA, 600 bp, Chicken  19866894368789_6
ttgtctgatagagaggaacttgtcattgggggaggtataggcacaacgtttggagggttttttgtgacagtcgtgacctcggagggagttgcacccagcctggttgcagtatggcagatcttctgtgcaaacctctgtcctggaatcagtgtcccatatcccactccaacgggacaagtggaagagctggcattggtagggcagactccagccatcctgctgcccagcctcttacaaggaaatatctcatttgctcctcatcctcctccaaaaaaatttctcatccatcctaagacactsctgaaggggtcccatggccagctgagccattaggcatggtggcatgctcttgtcacctccccgccctgacctgtgtgtccatgggtgacatgagcagaagacaaggttgtctgagatgctcatttttgttcttcctctgagccacagcagcagcaatccagggtattttccatctcagtaatcatgaccaaggtgtccctagtgtcacagtgaggacctgcaaagacctactccacaggcagcaaggcacagtggggttcagtgtctggcttttcctctgtcacaggctcctgcctggag

SEQ ID NO: 78710 - DNA, 600 bp, Chicken  19866894368789_7
aaggcacagtggggttcagtgtctggcttttcctctgtcacaggctcctgcctggagttagcagagatgggaaaagcaggagaaactgagatgttactgagctgtgttgtgtttgaaacaagtttgtgattttatatgtgatttaatatgcatgctttaactctgtacctaacccctaaccactactggatgctgccttgtgctggaggtgtttctgcagctccacatcactttggtttagggcaatgtttcactcatcctgcctgccgctcttggcagggctgaccatgtgttgctcaytgacccaggcaggtcaaactttgctcaccacaggccttaacatgctgtccccaygtcccacaggccaccaccaaagtgttcgtcaccatcctggaygagaatgacaatgctccagtgttccagcagcagctgtatgaggtgacgttggacgagggccccgccacmctcaatgccacacttgtcaccgtgcaggccctggaccgggatgaagggcccaacagcacagtcacatatgctatcaccgaaggcaacatcttgggtactttctacatcaacagcaccacggtcagtcaggatgct

SEQ ID NO: 78711 - DNA, 600 bp, Chicken  19866894368789_8
gagttagcagagatgggaaaagcaggagaaactgagatgttactgagctgtgttgtgtttgaaacaagtttgtgattttatatgtgatttaatatgcatgctttaactctgtacctaacccctaaccactactggatgctgccttgtgctggaggtgtttctgcagctccacatcactttggtttagggcaatgtttcactcatcctgcctgccgctcttggcagggctgaccatgtgttgctcaytgacccaggcaggtcaaactttgctcaccacaggccttaacatgctgtccccaygtcccacaggccaccaccaaagtgttcgtcaccatcctggaygagaatgacaatgctccagtgttccagcagcagctgtatgaggtgacgttggacgagggccccgccacmctcaatgccacacttgtcaccgtgcaggccctggaccgggatgaagggcccaacagcacagtcacatatgctatcaccgaaggcaacatcttgggtactttctacatcaacagcaccacggtcagtcaggatgctgtccccarcccaggcatcccctcctcctgtgtccctcactcccagctgctgtcc

SEQ ID NO: 78712 - DNA, 600 bp, Chicken  19866894368789_9
ctgagctgtgttgtgtttgaaacaagtttgtgattttatatgtgatttaatatgcatgctttaactctgtacctaacccctaaccactactggatgctgccttgtgctggaggtgtttctgcagctccacatcactttggtttagggcaatgtttcactcatcctgcctgccgctcttggcagggctgaccatgtgttgctcaytgacccaggcaggtcaaactttgctcaccacaggccttaacatgctgtccccaygtcccacaggccaccaccaaagtgttcgtcaccatcctggaygagaatgacaatgctccagtgttccagcagcagctgtatgaggtgacgttggacgagggccccgccacmctcaatgccacacttgtcaccgtgcaggccctggaccgggatgaagggcccaacagcacagtcacatatgctatcaccgaaggcaacatcttgggtactttctacatcaacagcaccacggtcagtcaggatgctgtccccarcccaggcatcccctcctcctgtgtccctcactcccagctgctgtccccttgccttgcagggacagatccgcaccctgaaggagctgga

SEQ ID NO: 78713 - DNA, 599 bp, Chicken  19866894368792_1
  misc_feature (1)..(107): n is any nucleotide
nnnnnnnnnnnnnnnnnnnnnnnnnnnnnnnnnnnnnnnnnnnnnnnnnnnnnnnnnnnnnnnnnnnnnnnnnnnnnnnnnnnnnnnnnnnnnnnnnnnnnnnnnnntcctctagagctttcttactgttactttgttttccccaaatggttgaattatattgccaagagatataaaatgcaggagcaagaaccttggtttttactccttgtttggaggacagtgacacttggagaggtagatacatttgtcactgaattaaaattgttctgacaacttcatgctaactcacttgcgacwgaaagtaggtaggacatctggtgcttcagaaaattatccaaaagaccttcagttcaaagccttcttccccaaatgggatttccaccctgcattctttcgctgtgggaatgcactagggtagttgttgccagtggcttcttgcagtggaakcaaaaaataagttcaatcctgtaagaactgttggaaaacctgagatgtgagtgtacagagctgcactgcaatcctggcagyatggggtatttgtcattgccagcagaaatctcaccttgcagtccaacccacaggctgtcctgtgctta

SEQ ID NO: 78714 - DNA, 600 bp, Chicken  19866894368792_2
ttgaattatattgccaagagatataaaatgcaggagcaagaaccttggtttttactccttgtttggaggacagtgacacttggagaggtagatacatttgtcactgaattaaaattgttctgacaacttcatgctaactcacttgcgacwgaaagtaggtaggacatctggtgcttcagaaaattatccaaaagaccttcagttcaaagccttcttccccaaatgggatttccaccctgcattctttcgctgtgggaatgcactagggtagttgttgccagtggcttcttgcagtggaakcaaaaaataagttcaatcctgtaagaactgttggaaaacctgagatgtgagtgtacagagctgcactgcaatcctggcagyatggggtatttgtcattgccagcagaaatctcaccttgcagtccaacccacaggctgtcctgtgcttacagatgcctccttcccacagctggctcttggcaccatcttctttaagcctttggcttagggcagagggcaaggcaggttttgtggctttctttcctctcgctccccagcggtggattcttcacagagaaagggaagaaagatgcaggctca

SEQ ID NO: 78715 - DNA, 600 bp, Chicken  19866894368792_3
ggagaggtagatacatttgtcactgaattaaaattgttctgacaacttcatgctaactcacttgcgacwgaaagtaggtaggacatctggtgcttcagaaaattatccaaaagaccttcagttcaaagccttcttccccaaatgggatttccaccctgcattctttcgctgtgggaatgcactagggtagttgttgccagtggcttcttgcagtggaakcaaaaaataagttcaatcctgtaagaactgttggaaaacctgagatgtgagtgtacagagctgcactgcaatcctggcagyatggggtatttgtcattgccagcagaaatctcaccttgcagtccaacccacaggctgtcctgtgcttacagatgcctccttcccacagctggctcttggcaccatcttctttaagcctttggcttagggcagagggcaaggcaggttttgtggctttctttcctctcgctccccagcggtggattcttcacagagaaagggaagaaagatgcaggctcacagctctactcatatgcaggccccataaaggatccccctcttggggtaggggcaaagaaccccatgctgagcagaggggct

SEQ ID NO: 78716 - DNA, 600 bp, Chicken  19866894368792_4
agcagctgttctgtctctgaatgaaaacgaactgctatgggttttgtcctcattgtgaggctggcagcattcctcaggaggcagtgaggaaattcctggtgttggtcagctctgacagtaaggtgggtgctcacttctactgccaggcttggagtgacatacacacagcccattgcttttcatcagctcctactttattgtgggaaagtcctttttcctcaccaagtgcctagcatttatccctggattagtgggagaatatataactagagtttacatgtgacactgcactcgtgaatrcaaaaccaactatttgtacaggaaaaagaagtaaaaccaagatcaggtaaagagaaaaaatgaggatttgtggtatgcraaacaaagtgatctcagcagaagcagcaattatgtaaatttattagtgggcaatctgcctatggatgaatccccytctcgggggtctgagagtaaaagcagtgcgtgttatcttgccaacaaatttattgctagcttttgtggacaaaaacaaaacaactgaggctcctcttggcattggaccaggttttttcttaaagtactggtttaatttgcttgatg

SEQ ID NO: 78717 - DNA, 535 bp, Chicken  19866894368792_5
ggcagtgaggaaattcctggtgttggtcagctctgacagtaaggtgggtgctcacttctactgccaggcttggagtgacatacacacagcccattgcttttcatcagctcctactttattgtgggaaagtcctttttcctcaccaagtgcctagcatttatccctggattagtgggagaatatataactagagtttacatgtgacactgcactcgtgaatrcaaaaccaactatttgtacaggaaaaagaagtaaaaccaagatcaggtaaagagaaaaaatgaggatttgtggtatgcraaacaaagtgatctcagcagaagcagcaattatgtaaatttattagtgggcaatctgcctatggatgaatccccytctcgggggtctgagagtaaaagcagtgcgtgttatcttgccaacaaatttattgctagcttttgtggacaaaaacaaaacaactgaggctcctcttggcattggaccaggttttttcttaaagtactggtttaatttgcttgatgtatgtgtatgaatg

SEQ ID NO: 78718 - DNA, 460 bp, Chicken  19866894368792_6
tgacatacacacagcccattgcttttcatcagctcctactttattgtgggaaagtcctttttcctcaccaagtgcctagcatttatccctggattagtgggagaatatataactagagtttacatgtgacactgcactcgtgaatrcaaaaccaactatttgtacaggaaaaagaagtaaaaccaagatcaggtaaagagaaaaaatgaggatttgtggtatgcraaacaaagtgatctcagcagaagcagcaattatgtaaatttattagtgggcaatctgcctatggatgaatccccytctcgggggtctgagagtaaaagcagtgcgtgttatcttgccaacaaatttattgctagcttttgtggacaaaaacaaaacaactgaggctcctcttggcattggaccaggttttttcttaaagtactggtttaatttgcttgatgtatgtgtatgaatg

SEQ ID NO: 78719 - DNA, 600 bp, Chicken  19866894368798_1
tgtcactgacgagaacacacaccaaacacctccacccaatatccgccttgacaaagcagagcttccacattgctcccagtgccatcactcatcttgtcaaactctgcctttgccccgccagccacaccatgatgtcattttaaggcagcagtggatgcatcccaattgtttacagagacacctttttaacaaacaatacaaatatcctctcctttcaaagaacactttgttgttgacagtatcgacaggaggaatgagtgagaaccaatctgtgggccgtgttaggctgattagaaatayggatttataaaacccttgattttgttcaaggagcttcccaaatactgttgacrctgctggtttggatgtgtagattttgcatataatatccagtctyaagaagaatagtagaagyatagaatatccggagtttgaagggaccacagagtcaaagtcctggctccaacagtcaagacaggcaaaaaagcagcacctgatcagctgtaggcatccctgttcagtgcagggagttgggccatagggccttgaagggtcccttccaactcacacgattctacgataaaatttcctgaattaaga

SEQ ID NO: 78720 - DNA, 598 bp, Chicken  19866894368798_2
aagcagagcttccacattgctcccagtgccatcactcatcttgtcaaactctgcctttgccccgccagccacaccatgatgtcattttaaggcagcagtggatgcatcccaattgtttacagagacacctttttaacaaacaatacaaatatcctctcctttcaaagaacactttgttgttgacagtatcgacaggaggaatgagtgagaaccaatctgtgggccgtgttaggctgattagaaatayggatttataaaacccttgattttgttcaaggagcttcccaaatactgttgacrctgctggtttggatgtgtagattttgcatataatatccagtctyaagaagaatagtagaagyatagaatatccggagtttgaagggaccacagagtcaaagtcctggctccaacagtcaagacaggcaaaaaagcagcacctgatcagctgtaggcatccctgttcagtgcagggagttgggccatagggccttgaagggtcccttccaactcacacgattctacgataaaatttcctgaattaagaagactcacaggatctgccctttggtagatccacaacagccaagaaggcaga

SEQ ID NO: 78721 - DNA, 554 bp, Chicken  19866894368798_3
caaactctgcctttgccccgccagccacaccatgatgtcattttaaggcagcagtggatgcatcccaattgtttacagagacacctttttaacaaacaatacaaatatcctctcctttcaaagaacactttgttgttgacagtatcgacaggaggaatgagtgagaaccaatctgtgggccgtgttaggctgattagaaatayggatttataaaacccttgattttgttcaaggagcttcccaaatactgttgacrctgctggtttggatgtgtagattttgcatataatatccagtctyaagaagaatagtagaagyatagaatatccggagtttgaagggaccacagagtcaaagtcctggctccaacagtcaagacaggcaaaaaagcagcacctgatcagctgtaggcatccctgttcagtgcagggagttgggccatagggccttgaagggtcccttccaactcacacgattctacgataaaatttcctgaattaagaagactcacaggatctgccctttggtagatccacaacagccaagaaggcaga

SEQ ID NO: 78722 - DNA, 536 bp, Chicken  19866894368798_4
cgccagccacaccatgatgtcattttaaggcagcagtggatgcatcccaattgtttacagagacacctttttaacaaacaatacaaatatcctctcctttcaaagaacactttgttgttgacagtatcgacaggaggaatgagtgagaaccaatctgtgggccgtgttaggctgattagaaatayggatttataaaacccttgattttgttcaaggagcttcccaaatactgttgacrctgctggtttggatgtgtagattttgcatataatatccagtctyaagaagaatagtagaagyatagaatatccggagtttgaagggaccacagagtcaaagtcctggctccaacagtcaagacaggcaaaaaagcagcacctgatcagctgtaggcatccctgttcagtgcagggagttgggccatagggccttgaagggtcccttccaactcacacgattctacgataaaatttcctgaattaagaagactcacaggatctgccctttggtagatccacaacagccaagaaggcaga

SEQ ID NO: 78723 - DNA, 600 bp, Chicken  19866894368806_1
agaatcttgagacatgcttcatccatcaggagatcatatttcacagactttgggcacacaacttagtgaacaaatggtggcagggtaaataggataaatattgtcagttcttttgagtgggggagaaatcatccagttcggggaaagaaatctgtccaagcttgatctatgcagtagggaaatccagtgcacaggtttgaaaagagtccttataatcctgttccctatacaagtcacagaacaatactaagagcagctcaagaggtagtgctcatcagttccactcagccagatgcacartgctctgccatattaaggttgaggataactgatcaaaccaaaactgcattgatcatgcagtggtggattacacactcctgagatatatgagacagacraaaactataatcaggatgctaaattttagcaaagccagctgctagctctttagagaggcctagacaggcttaagcaggtgaatctcattaggttcaacatagtcaagtgcaagacactgcatttgggtcaaagcagctcccactctcagtataggctggatgtcaaaaggattagagcacagccctaaaaggacttggtggt

SEQ ID NO: 78724 - DNA, 600 bp, Chicken  19866894368806_2
tattgtcagttcttttgagtgggggagaaatcatccagttcggggaaagaaatctgtccaagcttgatctatgcagtagggaaatccagtgcacaggtttgaaaagagtccttataatcctgttccctatacaagtcacagaacaatactaagagcagctcaagaggtagtgctcatcagttccactcagccagatgcacartgctctgccatattaaggttgaggataactgatcaaaccaaaactgcattgatcatgcagtggtggattacacactcctgagatatatgagacagacraaaactataatcaggatgctaaattttagcaaagccagctgctagctctttagagaggcctagacaggcttaagcaggtgaatctcattaggttcaacatagtcaagtgcaagacactgcatttgggtcaaagcagctcccactctcagtataggctggatgtcaaaaggattagagcacagccctaaaaggacttggtggtactggtggatggcaagctgaacatgagccagcagtgtgccctcacagctgagaaagtcaactgtattctggactgcactcaaagaagcgtcgccagca

SEQ ID NO: 78725 - DNA, 600 bp, Chicken  19866894368806_3
cagtatcttaaggggagctataataaaagaagaggacagattctttagcagggtttattgtgataggataaagggaaatagttttcaaactaaaagaggaggattttgattggatataagaagttgttttttttacaataagagtggtgaggcactggaacaggttgcccagagaagcagtggaagctgaatctctgcagatgttcaagacaaggctggaccaggctctaagcaacctgatctagctgcacgtgtccctgttcattacaggggattctgactagatgatcttaaaggtcycttgaaactcatgattctatgwtgaaaatgaaggatgattatgataactccatagagcataaagggacttctgtcccctttctttyttgatataaaggggtccatatcttcatttcatataaactgagataattccaccacctaacctagagacatgctgatttttcgtcagcaaagcagcaggttgcgtaaaccttttttcaaggagaaacaaaccaaaccaggaagtcaacctgtgaggctcaaattttcattctgtgcataactatgtctttggcatacaattaaatggaggcgtga

SEQ ID NO: 78726 - DNA, 600 bp, Chicken  19866894368806_4
ataaaagaagaggacagattctttagcagggtttattgtgataggataaagggaaatagttttcaaactaaaagaggaggattttgattggatataagaagttgttttttttacaataagagtggtgaggcactggaacaggttgcccagagaagcagtggaagctgaatctctgcagatgttcaagacaaggctggaccaggctctaagcaacctgatctagctgcacgtgtccctgttcattacaggggattctgactagatgatcttaaaggtcycttgaaactcatgattctatgwtgaaaatgaaggatgattatgataactccatagagcataaagggacttctgtcccctttctttyttgatataaaggggtccatatcttcatttcatataaactgagataattccaccacctaacctagagacatgctgatttttcgtcagcaaagcagcaggttgcgtaaaccttttttcaaggagaaacaaaccaaaccaggaagtcaacctgtgaggctcaaattttcattctgtgcataactatgtctttggcatacaattaaatggaggcgtgaactgaaaaacagcttattctgt

SEQ ID NO: 78727 - DNA, 600 bp, Chicken  19866894368806_5
aaactaaaagaggaggattttgattggatataagaagttgttttttttacaataagagtggtgaggcactggaacaggttgcccagagaagcagtggaagctgaatctctgcagatgttcaagacaaggctggaccaggctctaagcaacctgatctagctgcacgtgtccctgttcattacaggggattctgactagatgatcttaaaggtcycttgaaactcatgattctatgwtgaaaatgaaggatgattatgataactccatagagcataaagggacttctgtcccctttctttyttgatataaaggggtccatatcttcatttcatataaactgagataattccaccacctaacctagagacatgctgatttttcgtcagcaaagcagcaggttgcgtaaaccttttttcaaggagaaacaaaccaaaccaggaagtcaacctgtgaggctcaaattttcattctgtgcataactatgtctttggcatacaattaaatggaggcgtgaactgaaaaacagcttattctgttgcttgtttgaaaacaggtcctgtcttaggtcaggcaataagatttctatatattagaagactc

SEQ ID NO: 78728 - DNA, 600 bp, Chicken  19866894368806_6
catacaattaaatggaggcgtgaactgaaaaacagcttattctgttgcttgtttgaaaacaggtcctgtcttaggtcaggcaataagatttctatatattagaagactcaatcagaagtctacaaaatctttttctaaaaccattcctctcctccaaaatatattgcctctgtctcattccaaactacaaaatgatttcattggtttagtttctgtttcctgactggacaggtaacatgaaatattaagcttttaagttgcaaacacatctaggatgcatttgaaacataatgacacatktatcaagagaaaggaaaggctgacaaatgggcttgtagttttattggcataatgccattaacaaaccacaaagatgtgtaaaaagattgctctccttgtgaggacagcccaaagaagagctgccctacgaagctctgacttggccttcagaaacgttgggagattcagctggtcagtgccatgcacaaacccaggtacgtcaatcactgaactgtggcccactactatagagcataacccttctttcatggctctttttcagattacctaaaaatcagtcctttttgagttacttttcat

SEQ ID NO: 78729 - DNA, 600 bp, Chicken  19866894368806_7
ttcagctggtcagtgccatgcacaaacccaggtacgtcaatcactgaactgtggcccactactatagagcataacccttctttcatggctctttttcagattacctaaaaatcagtcctttttgagttacttttcatgagaagacaactaattttgcaaatactatcttgtgaacacattgtcctgaattgaaaaatggcatacaattatttagttaccttgcaacaaaattaccacacagttacagagattaagaatacaatctgccccaaaataagaacacaaaaactaggttcaacmcacaaaactgactgaaattgccactgagagaacacagctggggcaggaacagcagttcataaaaggtcatctcagttcttcagatccattagtcacacatgagattcctcacagagctrgtcacaaactcacagaagctgactatatgtgacagaaacctatgagctgcctcactagtactcagcagacctgaaactggggctttacagagtaatcagctgaagctatctctractgttttactactcccagtttttgtagaatggtagccatagagagattaggaccgaagatctttca

SEQ ID NO: 78730 - DNA, 600 bp, Chicken  19866894368806_8
ttttgagttacttttcatgagaagacaactaattttgcaaatactatcttgtgaacacattgtcctgaattgaaaaatggcatacaattatttagttaccttgcaacaaaattaccacacagttacagagattaagaatacaatctgccccaaaataagaacacaaaaactaggttcaacmcacaaaactgactgaaattgccactgagagaacacagctggggcaggaacagcagttcataaaaggtcatctcagttcttcagatccattagtcacacatgagattcctcacagagctrgtcacaaactcacagaagctgactatatgtgacagaaacctatgagctgcctcactagtactcagcagacctgaaactggggctttacagagtaatcagctgaagctatctctractgttttactactcccagtttttgtagaatggtagccatagagagattaggaccgaagatctttcatagtctcagctattagaactacattagcgctgataatgattttcttccagtctttaattttgcttccttgattatgaagaccatatgttcgtagcaaatgctagactcttcttcttggg

SEQ ID NO: 78731 - DNA, 600 bp, Chicken  19866894368806_9
ccacacagttacagagattaagaatacaatctgccccaaaataagaacacaaaaactaggttcaacmcacaaaactgactgaaattgccactgagagaacacagctggggcaggaacagcagttcataaaaggtcatctcagttcttcagatccattagtcacacatgagattcctcacagagctrgtcacaaactcacagaagctgactatatgtgacagaaacctatgagctgcctcactagtactcagcagacctgaaactggggctttacagagtaatcagctgaagctatctctractgttttactactcccagtttttgtagaatggtagccatagagagattaggaccgaagatctttcatagtctcagctattagaactacattagcgctgataatgattttcttccagtctttaattttgcttccttgattatgaagaccatatgttcgtagcaaatgctagactcttcttcttgggttcatccacctctcccagctaacataagcatcaacagttacattacttgaaagcaattgcgttatttagaagcttaaaccaattggttttgttgtatgccagatgcactgtggt

SEQ ID NO: 78732 - DNA, 600 bp, Chicken  19866894368811_1
aggttgcatccctaacttacacgtgcacaaaattagatgagttagatcctactgaggttgtccaacaaagctaggaagagactgaggtgcacagaagcatattgcagcaattacaaaacctgcagaatgtactggcacacatttggttaacctctgtgccaggagaaccaggtccctgattacagtccagcagacaattaactgcactttaagttccttcctcgttaatatttccaaacataggaagtgtcactacaatgccattttttaatgttgatttaaatgattcatagtatttaygtattactgagactgttttgtccttgccgttattgaccagtgttatgtctatcgcactaccactgccctttaaaagatcacaaaggtttttattgttaatgaaaacaggctttaaaaagattcttggagaacgtttcactttccttaatgcagacagctgaaaacacccagacttctcagatatgcccatttctgatttccccattctcccctcccttgctgggtcagggtaagactcgaggcgagtgtgtgtgctgcacagggtggttggggctgtcagccccactgtgtgacatggtg

SEQ ID NO: 78733 - DNA, 600 bp, Chicken  19866894368814_1
ctttaatttaacactttctcacagcactctcaaagtttttctgtccagatttatgttccttctgttaaataagtgcaatccacacctctgatcattgctttgtgtttcagtaaaggtttagttctccagaaacagagatggtcagattattatatagctggtatgatctggagagtaatgcaatactaaatggcttaatgatctggaagaaagcaagctttgtttaactattgtttttgtaggtctgctaaaagttataattcacccaaataactggcagataaagtatagcagccaagwaattctgcccattcccacctgagtagtaaaaaaagccaaaaatctgtatgaatctgtaggtagcaataaatccatcttgtgtgttggtacaggatctgagctagtaaagcctatggagaccagggacactctacactgggtagaactcagcaggccaatctgaggttgggctggcaggtcaagtagctacaaacctaccctcagaaaagagtaggtgacagaaaataaaacaccagccttaaagagatggtctcacacccttgcttttacacagctgccatcaagatagggggtgtgtag

SEQ ID NO: 78734 - DNA, 599 bp, Chicken  19866894368819_1
  misc_feature (1)..(104): n is any nucleotide
nnnnnnnnnnnnnnnnnnnnnnnnnnnnnnnnnnnnnnnnnnnnnnnnnnnnnnnnnnnnnnnnnnnnnnnnnnnnnnnnnnnnnnnnnnnnnnnnnnnnnnnnatgccgtgacattcccctttttgtttttacaatcagtcactggtagaaatttggcatatcgtttctgaagcaatcatggcaaacacgatatttttttctttactggagaaatataaacatatttttacctcagcgttgcttaaaatcttggttttgattcaagcatctcaaaatattgagaataattgcaacactytgtgcygccagcatctgcagtacaaaactctttgtgtttttctcacactttatgtgaaaaaagaacattttgcacctcagtagatggctgtggttttggatcacgaagcaccaaaggttttgatctgttctgattcctacccttgtgtctcatgtttctcatggctcagaamaaaatattaatgtgactcatctgtcataagtaattctcatatcctcaactgtattttagtacgtggggttttgtaaaagtgtctgtgtgctttgaataagggaggatgggaatcaaaggtgcttgaa

SEQ ID NO: 78735 - DNA, 599 bp, Chicken  19866894368819_2
  misc_feature (1)..(98): n is any nucleotide
nnnnnnnnnnnnnnnnnnnnnnnnnnnnnnnnnnnnnnnnnnnnnnnnnnnnnnnnnnnnnnnnnnnnnnnnnnnnnnnnnnnnnnnnnnnnnnnnnnatgccgtgacattcccctttttgtttttacaatcagtcactggtagaaatttggcatatcgtttctgaagcaatcatggcaaacacgatatttttttctttactggagaaatataaacatatttttacctcagcgttgcttaaaatcttggttttgattcaagcatctcaaaatattgagaataattgcaacactytgtgcygccagcatctgcagtacaaaactctttgtgtttttctcacactttatgtgaaaaaagaacattttgcacctcagtagatggctgtggttttggatcacgaagcaccaaaggttttgatctgttctgattcctacccttgtgtctcatgtttctcatggctcagaamaaaatattaatgtgactcatctgtcataagtaattctcatatcctcaactgtattttagtacgtggggttttgtaaaagtgtctgtgtgctttgaataagggaggatgggaatcaaaggtgcttgaaacaaaa

SEQ ID NO: 78736 - DNA, 600 bp, Chicken  19866894368819_3
agcaatcatggcaaacacgatatttttttctttactggagaaatataaacatatttttacctcagcgttgcttaaaatcttggttttgattcaagcatctcaaaatattgagaataattgcaacactytgtgcygccagcatctgcagtacaaaactctttgtgtttttctcacactttatgtgaaaaaagaacattttgcacctcagtagatggctgtggttttggatcacgaagcaccaaaggttttgatctgttctgattcctacccttgtgtctcatgtttctcatggctcagaamaaaatattaatgtgactcatctgtcataagtaattctcatatcctcaactgtattttagtacgtggggttttgtaaaagtgtctgtgtgctttgaataagggaggatgggaatcaaaggtgcttgaaacaaaacaaacaaaaaaaatgaacaatggcagcagaaaacagtgaatataaataaaagcaacttttatgtactgtaattaaacataataaatactttaaaacacactatttcaatttagtacttcccagctttaaaaatcacagctgtcagttcctggaacactggaaacgga

SEQ ID NO: 78737 - DNA, 600 bp, Chicken  19866894368819_4
tcatatcctcaactgtattttagtacgtggggttttgtaaaagtgtctgtgtgctttgaataagggaggatgggaatcaaaggtgcttgaaacaaaacaaacaaaaaaaatgaacaatggcagcagaaaacagtgaatataaataaaagcaacttttatgtactgtaattaaacataataaatactttaaaacacactatttcaatttagtacttcccagctttaaaaatcacagctgtcagttcctggaacactggaaacggaaacaataaatggcaaaacaatacatatttagacttygtggactggcgtgtccaaagtgagtcccaagtgtgatacttaaacatttacaacaacactaattatacctggaaagctgcgatttgaaattgcaaatgtcagttccaggacgtcaacattttctggtattgtttaggaaatcccgcgtagtgtgctactttcaaaaggcataattatgtgtgcacattcctgtgactttgctccagacccagccttgtattccccgatagttctctctcacaaaaattttaacaattcagtagaaaatagcccaaacaatgagtacagcagcaattctgc

SEQ ID NO: 78738 - DNA, 600 bp, Chicken  19866894368819_5
gaaattgcaaatgtcagttccaggacgtcaacattttctggtattgtttaggaaatcccgcgtagtgtgctactttcaaaaggcataattatgtgtgcacattcctgtgactttgctccagacccagccttgtattccccgatagttctctctcacaaaaattttaacaattcagtagaaaatagcccaaacaatgagtacagcagcaattctgctacagaagcacttgcagcaattgaccggattcctcttttctccaccaaaccagactgaaatacttcagtaaatagatccagctcrttgcaaacctcattccacaaaagtcatttgcatttgggctgaatattgaatcagaggaactcaggtctacgcttaaaatagagtttgtatttatataaccgaactagggatcgtgctgcttttgtgttcaagagagttgaccgcgattttctacatttctactgttgcctttctgcacttgtgttgaaaacacaaatgctgttttccacacctggctaagacctgcagccaacaaagtgggagagagaagagaatgcatgccacctcctatatttaaagattttgcacacagaaaacaaa

SEQ ID NO: 78739 - DNA, 599 bp, Chicken  19866894368824_1
  misc_feature (1)..(39): n is any nucleotide
nnnnnnnnnnnnnnnnnnnnnnnnnnnnnnnnnnnnnnnatacctctaattttattttatttggagaacgaatagaacagagttttgaagctgctggaggaaggctgtctgtaactgtgtcttccaacatcttgaatccttcagaaataatacttctcgtggctggatgtctgcagctgcagaaaataaacattttgtaatgcaaattttattctccatttttaataattttaacagcaatattgcatgatgttagctattcttctattttaatgccctgcttctgctaaggactgaaaygatacttttcagaagaagacacacaggatcttttggtggcaagcagtagctgaagtagaacaccataagcagtacttggcatcttcctatcctggaggtgtagtcagaaggcctctccagagggcagacactcagacttctccatttacagaggtaagccacgctgctctctgctatgcyggctcaccgggtagtgctttagaagacaytggaagtcatccatgcccagatcttttgctgccctgtgggactcaaacagagataacatgagatgttgtacatgttcctttcattttctt

SEQ ID NO: 78740 - DNA, 519 bp, Chicken  19866894368824_2
agaaaataaacattttgtaatgcaaattttattctccatttttaataattttaacagcaatattgcatgatgttagctattcttctattttaatgccctgcttctgctaaggactgaaaygatacttttcagaagaagacacacaggatcttttggtggcaagcagtagctgaagtagaacaccataagcagtacttggcatcttcctatcctggaggtgtagtcagaaggcctctccagagggcagacactcagacttctccatttacagaggtaagccacgctgctctctgctatgcyggctcaccgggtagtgctttagaagacaytggaagtcatccatgcccagatcttttgctgccctgtgggactcaaacagagataacatgagatgttgtacatgttcctttcattttcttaaaaaataaaaatccttccaactcttctgtaaaacttcagatgaaaaactccaagactcaatggacaagagtgctgacaagaggtgccagtgacactgca

SEQ ID NO: 78741 - DNA, 490 bp, Chicken  19866894368824_3
tattctccatttttaataattttaacagcaatattgcatgatgttagctattcttctattttaatgccctgcttctgctaaggactgaaaygatacttttcagaagaagacacacaggatcttttggtggcaagcagtagctgaagtagaacaccataagcagtacttggcatcttcctatcctggaggtgtagtcagaaggcctctccagagggcagacactcagacttctccatttacagaggtaagccacgctgctctctgctatgcyggctcaccgggtagtgctttagaagacaytggaagtcatccatgcccagatcttttgctgccctgtgggactcaaacagagataacatgagatgttgtacatgttcctttcattttcttaaaaaataaaaatccttccaactcttctgtaaaacttcagatgaaaaactccaagactcaatggacaagagtgctgacaagaggtgccagtgacactgca

SEQ ID NO: 78742 - DNA, 599 bp, Chicken  19866894368826_1
  misc_feature (1)..(55): n is any nucleotide
nnnnnnnnnnnnnnnnnnnnnnnnnnnnnnnnnnnnnnnnnnnnnnnnnnnnnnntaggaagttttataagaaaaggtgccagactcttcacctagaatgaggcaaccctatatacatacagactggcggattagaagctggagaacagccctgcagaaaagaacctgggggttctgactgcaggttaagtgatttagtggtgtgccttggcggccaaaagccagctgtgccctggaatgccccaggcccagcagtgccatggggcgagggaagggattgtcctgctgtgctgtgcgctktgaggcctcacctcgagtgctcggtgtggctttgagcaccacaatataaggatgtaaggttgttagggagcatccaaatgagggatacgaagatggtgaagggtctggagggcaaggtgtatgaggatcagctgagtccctgcgtgtgctcagcccagagcagagcaggctgagggaaggcgtcatggcggcctgcagatcctcactgggagcagaggggcagcgctgagctctggattgacatttctaatgagtatagacttggtctggatcgagagcaaaatcaagtccttgatttc

SEQ ID NO: 78743 - DNA, 600 bp, Chicken  19866894368827_1
acatcctgcaagcctttagtgtcttggagcactggtggtggcacatcatatacaccttctcttccctctgaggctagactttcattgagtcctgtctgttgtcctgggaaagcaattcccctcggggtatcataaacatctttctgaggtgcaatttgctgtccaagaaaatggttttgatggtttacagggatgtcataaacgctctgtttgtgtggcgctccatcagtcaatgcaagcccctcagaagagaatttcttaatcagttctttcccagttgctttggtgataggaggaggratatcatacactccttcttgtcttgcattgtgccccgctggagatgaaaaatcctgcaaattatccctcaggcctacatcatctcggcatgtagacgggggtgtagcatacatctgaaacacaggaagcaaaccatgaaaactctggctagactagcaaaacaattttacattttccgtatggcaaataaaatgcttggatagaagatctgccattgaattccatggagtcagacacttatctcaagtttgaaggagcatcagctttaatacttcacttttcaatttccatttcttgatg

SEQ ID NO: 78744 - DNA, 599 bp, Chicken  19866894368834_1
  misc_feature (1)..(95): n is any nucleotide
nnnnnnnnnnnnnnnnnnnnnnnnnnnnnnnnnnnnnnnnnnnnnnnnnnnnnnnnnnnnnnnnnnnnnnnnnnnnnnnnnnnnnnnnnnnnnnncggcagacgcagctgctgtgcactgggatgggatgcccacccgagccccgcgcctggcccgctgcacgtacctgggatggtgttgtccaggatgaaggcgagggtaccccccacaaacatctcggtggtcagcagcactgtcaggatctgatccagctcggggacacctgcaggagggacaggctgagcaggacagggagtgccrcgatgggaagcacggggctcactgtgtgctgcatcccacgtygggcacatggtgttcagaggtgccgctgcccactcgcaagctctcctgtgctgctttgagcttcattgagctgcatcttgggagctgccttcccaacttaagtcacatttgccctacaagtgcacttaccactgcaggtkagcaagcagrgccacattaaggtgcacagaccgagacctgccctgctcaccctaatcgccatcgcaccgggatgctgctggcaaacagtgtgaggggctcgtggtacctgtgttaat

SEQ ID NO: 78745 - DNA, 599 bp, Chicken  19866894368834_2
  misc_feature (1)..(53): n is any nucleotide
nnnnnnnnnnnnnnnnnnnnnnnnnnnnnnnnnnnnnnnnnnnnnnnnnnnnncggcagacgcagctgctgtgcactgggatgggatgcccacccgagccccgcgcctggcccgctgcacgtacctgggatggtgttgtccaggatgaaggcgagggtaccccccacaaacatctcggtggtcagcagcactgtcaggatctgatccagctcggggacacctgcaggagggacaggctgagcaggacagggagtgccrcgatgggaagcacggggctcactgtgtgctgcatcccacgtygggcacatggtgttcagaggtgccgctgcccactcgcaagctctcctgtgctgctttgagcttcattgagctgcatcttgggagctgccttcccaacttaagtcacatttgccctacaagtgcacttaccactgcaggtkagcaagcagrgccacattaaggtgcacagaccgagacctgccctgctcaccctaatcgccatcgcaccgggatgctgctggcaaacagtgtgaggggctcgtggtacctgtgttaatggccttggggtgggcgtccaggtagttgggcagcgtcagccc

SEQ ID NO: 78746 - DNA, 600 bp, Chicken  19866894368834_3
caggatgaaggcgagggtaccccccacaaacatctcggtggtcagcagcactgtcaggatctgatccagctcggggacacctgcaggagggacaggctgagcaggacagggagtgccrcgatgggaagcacggggctcactgtgtgctgcatcccacgtygggcacatggtgttcagaggtgccgctgcccactcgcaagctctcctgtgctgctttgagcttcattgagctgcatcttgggagctgccttcccaacttaagtcacatttgccctacaagtgcacttaccactgcaggtkagcaagcagrgccacattaaggtgcacagaccgagacctgccctgctcaccctaatcgccatcgcaccgggatgctgctggcaaacagtgtgaggggctcgtggtacctgtgttaatggccttggggtgggcgtccaggtagttgggcagcgtcagcccaaaaaacatggagaagcccaacacgaagaggttgcgggaagagttcatgtcaacgaactgcaggttggagaggccgacggctgtgatcatgcctgcaagsagaratgtggccaagtgctgtgggrcaggaaagccctcagc

SEQ ID NO: 78747 - DNA, 600 bp, Chicken  19866894368834_4
gcgagggtaccccccacaaacatctcggtggtcagcagcactgtcaggatctgatccagctcggggacacctgcaggagggacaggctgagcaggacagggagtgccrcgatgggaagcacggggctcactgtgtgctgcatcccacgtygggcacatggtgttcagaggtgccgctgcccactcgcaagctctcctgtgctgctttgagcttcattgagctgcatcttgggagctgccttcccaacttaagtcacatttgccctacaagtgcacttaccactgcaggtkagcaagcagrgccacattaaggtgcacagaccgagacctgccctgctcaccctaatcgccatcgcaccgggatgctgctggcaaacagtgtgaggggctcgtggtacctgtgttaatggccttggggtgggcgtccaggtagttgggcagcgtcagcccaaaaaacatggagaagcccaacacgaagaggttgcgggaagagttcatgtcaacgaactgcaggttggagaggccgacggctgtgatcatgcctgcaagsagaratgtggccaagtgctgtgggrcaggaaagccctcagcgcagctccag

SEQ ID NO: 78748 - DNA, 600 bp, Chicken  19866894368834_5
aagtcacatttgccctacaagtgcacttaccactgcaggtkagcaagcagrgccacattaaggtgcacagaccgagacctgccctgctcaccctaatcgccatcgcaccgggatgctgctggcaaacagtgtgaggggctcgtggtacctgtgttaatggccttggggtgggcgtccaggtagttgggcagcgtcagcccaaaaaacatggagaagcccaacacgaagaggttgcgggaagagttcatgtcaacgaactgcaggttggagaggccgacggctgtgatcatgcctgcaagsagaratgtggccaagtgctgtgggrcaggaaagccctcagcgcagctccagtgccacccgctgctccctgggcagtgcggttaccgaacagcgtgcagaacatcccgccgaggatggggtcgggcagtgaggcgaacagcgcggtgaactttccgatggtgcccaggatgagcatgatcccagcgccgtactgaatcaccctcctgctccccacctgcacggggggacacaggcagtgcgtggaggtggctgtgaccccctggggatgaggagcacacaggtcgggtggtaccttggtga

SEQ ID NO: 78749 - DNA, 600 bp, Chicken  19866894368834_6
cacatttgccctacaagtgcacttaccactgcaggtkagcaagcagrgccacattaaggtgcacagaccgagacctgccctgctcaccctaatcgccatcgcaccgggatgctgctggcaaacagtgtgaggggctcgtggtacctgtgttaatggccttggggtgggcgtccaggtagttgggcagcgtcagcccaaaaaacatggagaagcccaacacgaagaggttgcgggaagagttcatgtcaacgaactgcaggttggagaggccgacggctgtgatcatgcctgcaagsagaratgtggccaagtgctgtgggrcaggaaagccctcagcgcagctccagtgccacccgctgctccctgggcagtgcggttaccgaacagcgtgcagaacatcccgccgaggatggggtcgggcagtgaggcgaacagcgcggtgaactttccgatggtgcccaggatgagcatgatcccagcgccgtactgaatcaccctcctgctccccacctgcacggggggacacaggcagtgcgtggaggtggctgtgaccccctggggatgaggagcacacaggtcgggtggtaccttggtgatgcc

SEQ ID NO: 78750 - DNA, 600 bp, Chicken  19866894368834_7
cttaccactgcaggtkagcaagcagrgccacattaaggtgcacagaccgagacctgccctgctcaccctaatcgccatcgcaccgggatgctgctggcaaacagtgtgaggggctcgtggtacctgtgttaatggccttggggtgggcgtccaggtagttgggcagcgtcagcccaaaaaacatggagaagcccaacacgaagaggttgcgggaagagttcatgtcaacgaactgcaggttggagaggccgacggctgtgatcatgcctgcaagsagaratgtggccaagtgctgtgggrcaggaaagccctcagcgcagctccagtgccacccgctgctccctgggcagtgcggttaccgaacagcgtgcagaacatcccgccgaggatggggtcgggcagtgaggcgaacagcgcggtgaactttccgatggtgcccaggatgagcatgatcccagcgccgtactgaatcaccctcctgctccccacctgcacggggggacacaggcagtgcgtggaggtggctgtgaccccctggggatgaggagcacacaggtcgggtggtaccttggtgatgcccagcaccccgatgttggggct

SEQ ID NO: 78751 - DNA, 600 bp, Chicken  19866894368836_1
tttttatctcaactcatgacttttctcaattttgccttagagattctctcccccatcctactgtgaacagagcgagtggctgtgcagtgctgagctgccagccacagctaaaccacaataggaagattttaagtagatgcctgtgtatgctgtcactgatatagccctgaccatcttgcataagtcatgggtccccactgaaatgagctgagcaagagatagcacttagagaagatcttgtaacacagaagatgagtgtcatccattagctgtagggaaaggctatacaaagaacaagcrtgttgcaaagcaaacaactggatatggcataatggccaggaagcttataagaagttacatatatacggatgtctgtaacttcatctacttttcttctctatccttctctcctaatattcctttcttccaatttctttcttaatttctttccttttctccctttctttctctctttttccattttttccttctttctctctttttccctttctctctttctttcaccattgggagatttcccaccagcatctatcttataaaatgtcaccaacagtttgaatttatgtacatatcctcttg

SEQ ID NO: 78752 - DNA, 599 bp, Chicken  19866894368848_1
  misc_feature (1)..(112): n is any nucleotide
nnnnnnnnnnnnnnnnnnnnnnnnnnnnnnnnnnnnnnnnnnnnnnnnnnnnnnnnnnnnnnnnnnnnnnnnnnnnnnnnnnnnnnnnnnnnnnnnnnnnnnnnnnnnnnnnaatatcttttgtgcacccaaagttacaactgcttagattaacagtagttcagattaaagcaattttataatattgtttgtgctatgaagtctatgtttggctactaagcagaatagttcctcaccttctctcattggaaatgaaagaaaaaataaaataaaataaactaccaaaccctcaagaacatygcatgccaggaaatagaatgtgttgtcatagctatcatcaattttcatttgtgtgactacagcatacagctctgcggaaatctaagtgaattgaacaaacttcagttcctaggtacaaaaaaatcagcatatctagttaaaagggaactggttctgtagcaacttgtttgtatgacaaaatgttttcaatatatgagaaaatcaggtcttaggtttaagccatcgattgcatggatgaaatatgaaatataatagcggaaagataaatacaacagtatataaaatacgctgttatcttt

SEQ ID NO: 78753 - DNA, 600 bp, Chicken  19866894368851_1
ttcagagaatagacaacttaaaacaaaccttagagaagctacattctttaacaatcactcctggctaaaacaaagcatttttgtacctgttatgctgtcagttagcattaagctggatgtgcagaagcacaacgaatgtctgttctgcctaccacatttgtactttataggggccatatttttaaaaccgaaacagtaaatacacatttgattgaatagctgtcctgtccagcaggagcttcaggatgtaaccgtatcatatggatgaaggtaaatgaactgagaccatttgtgtgttgkgaaagggaggtgctggctttgtcttttccttttttttctttcratagttctgatggccctgaactgcaatggatgtccataaaatcagcacaaaatgggtgtcttacacactgttctcatttctcagtataaaacacatcagcaataggtttttagcctttcatcttcgtattttagacactgcacttctttggacgtaaatgagctcagctaaccatctgcttttacaacttcagcaaagggaaatgtatcactcagcacagccattttctgtaacactgggatactatctgcacagtc

SEQ ID NO: 78754 - DNA, 600 bp, Chicken  19866894368851_2
ttctttaacaatcactcctggctaaaacaaagcatttttgtacctgttatgctgtcagttagcattaagctggatgtgcagaagcacaacgaatgtctgttctgcctaccacatttgtactttataggggccatatttttaaaaccgaaacagtaaatacacatttgattgaatagctgtcctgtccagcaggagcttcaggatgtaaccgtatcatatggatgaaggtaaatgaactgagaccatttgtgtgttgkgaaagggaggtgctggctttgtcttttccttttttttctttcratagttctgatggccctgaactgcaatggatgtccataaaatcagcacaaaatgggtgtcttacacactgttctcatttctcagtataaaacacatcagcaataggtttttagcctttcatcttcgtattttagacactgcacttctttggacgtaaatgagctcagctaaccatctgcttttacaacttcagcaaagggaaatgtatcactcagcacagccattttctgtaacactgggatactatctgcacagtccgtygggttttgcacacgtgagctgccagttgcactcagaggg

SEQ ID NO: 78755 - DNA, 600 bp, Chicken  19866894368851_3
gggaggtgctggctttgtcttttccttttttttctttcratagttctgatggccctgaactgcaatggatgtccataaaatcagcacaaaatgggtgtcttacacactgttctcatttctcagtataaaacacatcagcaataggtttttagcctttcatcttcgtattttagacactgcacttctttggacgtaaatgagctcagctaaccatctgcttttacaacttcagcaaagggaaatgtatcactcagcacagccattttctgtaacactgggatactatctgcacagtccgtygggttttgcacacgtgagctgccagttgcactcagagggaagagatttcattatagttatgatagaggtggttaaaacgcttcagatcttaaattgaaactacagtgccagctgattcacagtgtgtcttctgattcytatagcacatgtgcttagtttactaacaaactggaagaaaaaaaacgcaagagtctattcacaagactactgtacctgcatttccaartaactccacagtgacactgaaaaaagaaaagggccttcaaggctgcagcattcatgagaacgcttaaagaatgt

SEQ ID NO: 78756 - DNA, 600 bp, Chicken  19866894368851_4
caataggtttttagcctttcatcttcgtattttagacactgcacttctttggacgtaaatgagctcagctaaccatctgcttttacaacttcagcaaagggaaatgtatcactcagcacagccattttctgtaacactgggatactatctgcacagtccgtygggttttgcacacgtgagctgccagttgcactcagagggaagagatttcattatagttatgatagaggtggttaaaacgcttcagatcttaaattgaaactacagtgccagctgattcacagtgtgtcttctgattcytatagcacatgtgcttagtttactaacaaactggaagaaaaaaaacgcaagagtctattcacaagactactgtacctgcatttccaartaactccacagtgacactgaaaaaagaaaagggccttcaaggctgcagcattcatgagaacgcttaaagaatgtcttaatttttgtttttctgtawgtgtattgttttgacacatccctggatgcttcagaaagacgtttgtttcgccaagtaaagcatgttgatgacgaagcccaatgttctcacttacaaaaacttttaggaaggactgc

SEQ ID NO: 78757 - DNA, 600 bp, Chicken  19866894368851_5
ctgcacttctttggacgtaaatgagctcagctaaccatctgcttttacaacttcagcaaagggaaatgtatcactcagcacagccattttctgtaacactgggatactatctgcacagtccgtygggttttgcacacgtgagctgccagttgcactcagagggaagagatttcattatagttatgatagaggtggttaaaacgcttcagatcttaaattgaaactacagtgccagctgattcacagtgtgtcttctgattcytatagcacatgtgcttagtttactaacaaactggaagyaaaaaaacgcaagagtctattcacaagactactgtacctgcatttccaartaactccacagtgacactgaaaaaagaaaagggccttcaaggctgcagcattcatgagaacgcttaaagaatgtcttaatttttgtttttctgtawgtgtattgttttgacacatccctggatgcttcagaaagacgtttgtttcgccaagtaaagcatgttgatgacgaagcccaatgttctcacttacaaaaacttttaggaaggactgctaaagggaaggctttctgtttcgtatcatggaagttta

SEQ ID NO: 78758 - DNA, 600 bp, Chicken  19866894368851_6
cttcagcaaagggaaatgtatcactcagcacagccattttctgtaacactgggatactatctgcacagtccgtygggttttgcacacgtgagctgccagttgcactcagagggaagagatttcattatagttatgatagaggtggttaaaacgcttcagatcttaaattgaaactacagtgccagctgattcacagtgtgtcttctgattcytatagcacatgtgcttagtttactaacaaactggaagaaaaaaaacgcaagagtctattcacaagactactgtacctgcatttccaartaactccacagtgacactgaaaaaagaaaagggccttcaaggctgcagcattcatgagaacgcttaaagaatgtcttaatttttgtttttctgtawgtgtattgttttgacacatccctggatgcttcagaaagacgtttgtttcgccaagtaaagcatgttgatgacgaagcccaatgttctcacttacaaaaacttttaggaaggactgctaaagggaaggctttctgtttcgtatcatggaagtttaaatgaaattcaatagtttgcaacaaaaatgcatttcttcctttatgtaca

SEQ ID NO: 78759 - DNA, 522 bp, Chicken  19866894368851_7
cagttgcactcagagggaagagatttcattatagttatgatagaggtggttaaaacgcttcagatcttaaattgaaactacagtgccagctgattcacagtgtgtcttctgattcytatagcacatgtgcttagtttactaacaaactggaagaaaaaaaacgcaagagtctattcacaagactactgtacctgcatttccaartaactccacagtgacactgaaaaaagaaaagggccttcaaggctgcagcattcatgagaacgcttaaagaatgtcttaatttttgtttttctgtawgtgtattgttttgacacatccctggatgcttcagaaagacgtttgtttcgccaagtaaagcatgttgatgacgaagcccaatgttctcacttacaaaaacttttaggaaggactgctaaagggaaggctttctgtttcgtatcatggaagtttaaatgaaattcaatagtttgcaacaaaaatgcatttcttcctttatgtacaacagaattcctcacaaaa

SEQ ID NO: 78760 - DNA, 599 bp, Chicken  19866894368859_1
  misc_feature (1)..(59): n is any nucleotide
nnnnnnnnnnnnnnnnnnnnnnnnnnnnnnnnnnnnnnnnnnnnnnnnnnnnnnnnnnnttttgtttgccctgttaactccacagaaatcaatagttactcctgcaagcaaaactagtcccaaactactcaaagctcacatgatgcacacaactgagcactttggcagataagctgagagacagattaatcaacagataacctgcaaatggtattcgggaacagaaatctgacttgtggagcctgttacctcttcctgcactaaccctgtggggcacactacttgctgtttactttaacrttctgcattaactactgaactcacaagtccacctacttacaccatatgccattttaatgtacgccaacatcaagccacttgagatcctctgttttttcaacataagagatgtctttagggcatccccacaacaacacaaagagcacttcatgagaacccagagatactcagtgggggaaaaaaaaaacagaaatgttttgcagtcagagaaatgcaatgagatcatcaggagcataatgcacttttttgctgtgaggcctacccagtggcacggggaaataggcaagtttagaacagta

SEQ ID NO: 78761 - DNA, 600 bp, Chicken  19866894368861_1
aaggtttcagcttcagaattaggacctgcttcaaaaaatagataccgtcagagtcaaactctgtccctctgctttgcagttcccaggagaaatctatactccatagctgggcttacctcaatagaagtactacccagggattagtatgtacaagcaattgtgcacatttgaaaatttacaaacagacagcaatctctttctttttctaataaagaaactggcattccttggagcctgagccacgttttaaacacagaagtgctgaaaaagcattgtgcaagcctcaacaagatctcaccrcaaggtggggaactgcagccagcggaggagcaaagcctgcagacagcttaggagaactgcaactacaccttcttgcatcagacagataacaattccaatttggtttaagaaaatacagttaggctcacttattaaaagctctactgacattcactttggacacaaccaaatatcttgattgaaaactttttcctaacagagtcagtcagctttataaaacatccttccttatgaatacgccacattttactttcaggtataagtatggcgaatgccattattttcagtaaaagcaataca

SEQ ID NO: 78762 - DNA, 600 bp, Chicken  19866894368881_1
accaggtggcttggcttcctttttcacttttctctactcactgaacttgcctgcagtactgctgaaatgatttaatcctactttcagagattggatgatgcataaaaataaggaaacaaagagccaacaaacaacattttcattaacaaatcagccagctgccttgggcacctttcctctcatggaacctctctggtgactccttcagtatttccttaccaaatcaaagcctgagatccttaggtccttagtccaaaccgcagctcacctttccagtgctagtgtggatgctgaccttgytcactatgactgccatctaagaccttatctgataccaatttttttttctgtctgtgagcagcaggttgtataaggcattatttgtcactagcactaccagcattggcattagagagtagttactaatatagttttggaatttctctcattatggctgttcttcctcccagcagrtgcttaaatggcctctctcaacatgtatttcccctttatctggactgcttcctcacttacttctgtatttwgatcattattatttgctcatgaatcctctttaaagctttcttctcttggtagcaa

SEQ ID NO: 78763 - DNA, 600 bp, Chicken  19866894368881_2
ctgaacttgcctgcagtactgctgaaatgatttaatcctactttcagagattggatgatgcataaaaataaggaaacaaagagccaacaaacaacattttcattaacaaatcagccagctgccttgggcacctttcctctcatggaacctctctggtgactccttcagtatttccttaccaaatcaaagcctgagatccttaggtccttagtccaaaccgcagctcacctttccagtgctagtgtggatgctgaccttgytcactatgactgccatctaagaccttatctgataccaatytttttttctgtctgtgagcagcaggttgtataaggcattatttgtcactagcactaccagcattggcattagagagtagttactaatatagttttggaatttctctcattatggctgttcttcctcccagcagrtgcttaaatggcctctctcaacatgtatttcccctttatctggactgcttcctcacttacttctgtatttwgatcattattatttgctcatgaatcctctttaaagctttcttctcttggtagcaagcttgttttcaaagatgtacttcctctctatgtgaagttt

SEQ ID NO: 78764 - DNA, 524 bp, Chicken  19866894368881_3
tcctctcatggaacctctctggtgactccttcagtatttccttaccaaatcaaagcctgagatccttaggtccttagtccaaaccgcagctcacctttccagtgctagtgtggatgctgaccttgytcactatgactgccatctaagaccttatctgataccaatttttttttctgtctgtgagcagcaggttgtataaggcattatttgtcactagcactaccagcattggcattagagagtagttactaatatagttttggaatttctctcattatggctgttcttcctcccagcagrtgcttaaatggcctctctcaacatgtatttcccctttatctggactgcttcctcacttacttctgtatttwgatcattattatttgctcatgaatcctctttaaagctttcttctcttggtagcaagcttgttttcaaagatgtacttcctctctatgtgaagtttgtcttttcctcttagttttgaggattttttatcttctatcaaaacctttgagaatggg

SEQ ID NO: 78765 - DNA, 453 bp, Chicken  19866894368881_4
ccttagtccaaaccgcagctcacctttccagtgctagtgtggatgctgaccttgytcactatgactgccatctaagaccttatctgataccaatttttttttctgtctgtgagcagcaggttgtataaggcattatttgtcactagcactaccagcattggcattagagagtagttactaatatagttttggaatttctctcattatggctgttcttcctcccagcagrtgcttaaatggcctctctcaacatgtatttcccctttatctggactgcttcctcacttacttctgtatttwgatcattattatttgctcatgaatcctctttaaagctttcttctcttggtagcaagcttgttttcaaagatgtacttcctctctatgtgaagtttgtcttttcctcttagttttgaggattttttatcttctatcaaaacctttgagaatggg

SEQ ID NO: 78766 - DNA, 600 bp, Chicken  19866894368885_1
cagtactttatataaagattattaaatcaggaaaatattgaatgtctctttctttttgttactcaatggtgaaaacatcatttaaccttccattctctcttctatacaactgaagaaaacaggacatacttcattcaactaagccatgcacacatgtaccttgttctgtagacatgataattggaattacattaatctcttttgctcagggctatgctaagctgacttatctcacatttgcagcacactgagttcaggtatgagtagttaccatgcctcagtgcctgccggaaaacttcytctgacacattaacctaccacgggtctgagatctcagtcccagcacagcatcacagaatggttgaggctgacagggacctctgggtccatcagctgccctgctccagcagggacacccagaggagggtgcccagggccacgtccaggcagctttagaagatctccaaggaggagaccccacagcctctaggcagactgtgccaatgctccatcactccatcagctggtgctcagagggaacccgctgtgctccagtttgtgcccactgcctctttgtcttggcactgagcagaacctggc

SEQ ID NO: 78767 - DNA, 599 bp, Chicken  19866894368893_1
  misc_feature (1)..(198): n is any nucleotide
nnnnnnnnnnnnnnnnnnnnnnnnnnnnnnnnnnnnnnnnnnnnnnnnnnnnnnnnnnnnnnnnnnnnnnnnnnnnnnnnnnnnnnnnnnnnnnnnnnnnnnnnnnnnnnnnnnnnnnnnnnnnnnnnnnnnnnnnnnnnnnnnnnnnnnnnnnnnnnnnnnnnnnnnnnnnnnnnnnnnnnnnnnnnnnnnnnnnnnttgcacatttgaacaaagcatccccttcctgtgccagaagaagggggacatcagaatcccaagagatttgagcctcccttccacacacaggctgcagactaygggtctgcaaaggagcatgaggcgccaccagcagctgccacagatgctcatggaggaaaaaagagtgaaatagagaatatatgggaaaataaggagtgcatacagacagggcatggggcagtrgtgatggctatctgcaatagggcacagcaagacccaggaaagggctgctgaagctgtggggtggcaatggatcatggwgaaaaatcatgtttggattggaaagccatgcccaggaaaacaccttaaaagctgctttggcatcctgccttgttccatgagacatacaggacatcgcc

SEQ ID NO: 78768 - DNA, 599 bp, Chicken  19866894368893_2
  misc_feature (1)..(75): n is any nucleotide
nnnnnnnnnnnnnnnnnnnnnnnnnnnnnnnnnnnnnnnnnnnnnnnnnnnnnnnnnnnnnnnnnnnnnnnnnnnttgcacatttgaacaaagcatccccttcctgtgccagaagaagggggacatcagaatcccaagagatttgagcctcccttccacacacaggctgcagactaygggtctgcaaaggagcatgaggcgccaccagcagctgccacagatgctcatggaggaaaaaagagtgaaatagagaatatatgggaaaataaggagtgcatacagacagggcatggggcagtrgtgatggctatctgcaatagggcacagcaagacccaggaaagggctgctgaagctgtggggtggcaatggatcatggwgaaaaatcatgtttggattggaaagccatgcccaggaaaacaccttaaaagctgctttggcatcctgccttgttccatgagacatacaggacatcgccttccagaggcagcaaaggggactggctgatttctcctctcctgctctgtgctgtttgaaacctctgtgtgaagcagtgagaaggaagtcatagaagcaacagagactgatcaacagtcaatgt

SEQ ID NO: 78769 - DNA, 600 bp, Chicken  19866894368893_3
cacatttgaacaaagcatccccttcctgtgccagaagaagggggacatcagaatcccaagagatttgagcctcccttccacacacaggctgcagactaygggtctgcaaaggagcatgaggcgccaccagcagctgccacagatgctcatggaggaaaaaagagtgaaatagagaatatatgggaaaataaggagtgcatacagacagggcatggggcagtrgtgatggctatctgcaatagggcacagcaagacccaggaaagggctgctgaagctgtggggtggcaatggatcatggwgaaaaatcatgtttggattggaaagccatgcccaggaaaacaccttaaaagctgctttggcatcctgccttgttccatgagacatacaggacatcgccttccagaggcagcaaaggggactggctgatttctcctctcctgctctgtgctgtttgaaacctctgtgtgaagcagtgagaaggaagtcatagaagcaacagagactgatcaacagtcaatgtcttactcagaaaatggatggcaattacctaagaagtgtagcacggagagaccaaggaaggagcaaccaacattactttt

SEQ ID NO: 78770 - DNA, 600 bp, Chicken  19866894368897_1
acctttgtttttgagggttgtttttttttttttttgtcattgttgtccaaatatcaataaaacatcctcttaggttcaatgaaaattcaaaacttcagttttcttgtaacttaggataacagtctggaaaacagatggttgtaacctttatgtatcttgattagaataaattgtgatgcatatgtctgattttagagaggggatacaaatttatctggtgtattgtatgcagaactttgaaggctgaaactgagtatgctctatgctacatatttaatacattctgtatttacttattcrtataccaaccttgttacrattaaattcccatacgttctctaaagaaagagatgcatttttttacttcataaagaggatctgggcagcactatcagtagtgattccatagcaaatgtttcaagactgtaaatacatgttgtcccttctccagttgcacatcttctgattcaattcagatgttttatcagtaatggcaatacattgtgtgtttttcagcatagctcatttactataagacaaggaatattaaagagggaagttttgcctatcagtaaacctgtggatcataatgttctcaca

SEQ ID NO: 78771 - DNA, 600 bp, Chicken  19866894368897_2
tgtttttttttttttttgtcattgttgtccaaatatcaataaaacatcctcttaggttcaatgaaaattcaaaacttcagttttcttgtaacttaggataacagtctggaaaacagatggttgtaacctttatgtatcttgattagaataaattgtgatgcatatgtctgattttagagaggggatacaaatttatctggtgtattgtatgcagaactttgaaggctgaaactgagtatgctctatgctacatatttaatacattctgtatttacttattcrtataccaaccttgttacrattaaattcccatacgttctctaaagaaagagatgcatttttttacttcataaagaggatctgggcagcactatcagtagtgattccatagcaaatgtttcaagactgtaaatacatgttgtcccttctccagttgcacatcttctgattcaattcagatgttttatcagtaatggcaatacattgtgtgtttttcagcatagctcatttactataagacaaggaatattaaagagggaagttttgcctatcagtaaacctgtggatcataatgttctcacacttctttataaatagaaa

SEQ ID NO: 78772 - DNA, 600 bp, Chicken  19866894368901_1
tatgggagaaccctaacaactgtgtcaaaaatctagaagcattgaatcatacctgaatctgaaagagaatatgcctttttaactcaatatcccttttttaaattaaccctaggatacctaaaagtataacgcaagaaaacagaacgtagaaaattgaccttcctctaatttatttcaatctttctaatatttttaaaatttaataggtaaaacttcagtaataagaagccatgacaattttcaaactctaacaatctacagaaaagtccatccaaagatattgcttttagattttagtawaaaatgaatgttcagatagtgagccctctaaaaaacccaaacaaataactggaaaatgaactccaaaaatcaaacctgctttggcagaagggtgacctgaatgatctcatatatctctaattccagcatgattatgtctactgctcttcatcttttagtacatttggttgaccttttacagtcactgtatcatgccttactcttcagctgattaaacagcatgatattcaaaaccgaccagtagtttttagaaaaataaatatccaatatgcttaaatcagagagataaaaaactattaa

SEQ ID NO: 78773 - DNA, 600 bp, Chicken  19866894368901_2
tttcattaagaatttgcaaaagtgtacttctagttattctgagcaatgtattgctacatgagctacatttccattgtaagtttaactatttcctcttcaacaggtgtgtttgggtagacatgcaggataacccttagaaccttttgaaattgagaaaagtaaaataattttgcagatgtaattagactgaataaatagctgccagaagaagataatttcacaaaactgagtagtagcacctgcacatctgaacagctctcttcaatccatgagtttctcaagagtctgatctagttcagwcatttagcaaatgagttaatcactctgccattcctactggttttacaagagaaaataacttatgtaaactcagctaagtagctagagcaacttcttattaacaaattatttctttctgaattattttccctttggtcccttttaagtaatcactccaacactgaattttgttggagttaaaaacttctgctgaataatcatgaaaatatgatttttaataaaattatattaaaatatattwaaaaaaaaacacacacacacaaagccgtgcttcactatcacatctaactctttctgaag

SEQ ID NO: 78774 - DNA, 600 bp, Chicken  19866894368901_3
gcacatctgaacagctctcttcaatccatgagtttctcaagagtctgatctagttcagwcatttagcaaatgagttaatcactctgccattcctactggttttacaagagaaaataacttatgtaaactcagctaagtagctagagcaacttcttattaacaaattatttctttctgaattattttccctttggtcccttttaagtaatcactccaacactgaattttgttggagttaaaaacttctgctgaataatcatgaaaatatgatttttaataaaattatattaaaatatattwaaaaaaaaacacacacacacaaagccgtgcttcactatcacatctaactctttctgaagtgcatctgtggccccatgtaatgtgtagactcaatgcaggcatggaatgcacataaaatcattccctatgttttgctgattatatgtgtgctcatctctatttctctcaagccagaacatatttacttatattttaacactgtttaggaaggaggattatgtgttttatggacttttatgtatgacaaaatgcccctattaggtatgtaaacagttgttaaaatcaataggtttaaatatg

SEQ ID NO: 78775 - DNA, 600 bp, Chicken  19866894368913_1
tgatggccacccacacgtgagtgtgccaagtcctattaacacagtctttagaactggaaagctgtcaggagccacagagtagagctttaatagatatagtgggaatctgtggtgacagatcaacacaaaagaggaaaacaagacaacaggtcaggtacataaaagaaaacttttcaactaatattcttgtttcagccttcagcagctgcaagatttgagtctttcacaagactgttgccaggatctcagattagaactgctttttatgacacttggctttaatttcctcaactcctccawtatctgagattagtttggaattagcccttactagcataaacagacttctttctcagccataaagcaaatctgggcttgctgggcaggcagaagggtaactgaccctgtgccctcagtcagaaatacaaagcagaaggacatgcaaccctacaagggatagcagcacacagcaatgagtaaaaataaaactctgcagcaaatctttagtgctcaaagtaacaattcaaaacaactctcgacctgttggcacagaacattttatccctgaacattttatctttgtttctgtataggataaat

SEQ ID NO: 78776 - DNA, 600 bp, Chicken  19866894368913_2
cctgttggcacagaacattttatccctgaacattttatctttgtttctgtataggataaatccttctgatcactgcatgccatgggttgccttccaaagtggccgaagaatattttgcagagccctcagtgccatgaaaaaaattactattttgtaaatagaactaacagaaagaagggaaccttcctagaagctgaaattccctcacaggtaaaaatcgtttttcccctcatccatgttgggaatgctgacagtgcaaaaagtattccttccctttaaagtgagacagacccatactgyggcacttctgttctgccatgcattcccataaacttcttcagctgtccattttgcagctgcagcagcctaggcctagcactgaaatggacttctgtcacaacagaaagtgcttggtgcacaatctttgcacagtttgttttatggggagagatatcatgcaagtcggaccagaaaatgctttgcgtgtcgagctggcagggaatgtctgccccaagacacaacacagggcagaccctgccaacacagcccaccgtgctcacttccccagcaccttcatcatgctttggattcaacttctac

SEQ ID NO: 78777 - DNA, 599 bp, Chicken  19866894368927_1
  misc_feature (1)..(74): n is any nucleotide
nnnnnnnnnnnnnnnnnnnnnnnnnnnnnnnnnnnnnnnnnnnnnnnnnnnnnnnnnnnnnnnnnnnnnnnnnngttcggttctgccttttgtggcctggtgctgaatgaagatggtgcagagctgagtgcattgatcttttacatggcttagcccaaaaaggcaagcagaagcagtcactgctcgcagggagtccggagccctcagtctgaccctgtgccacctgacagagtcgtgacatttcccattcactgaggctcttgtgccttgctctatccctacagggcatagacgtcctcyycaagtcccaatcccattcaatccaccttcttcatcatttggccacttgcattatcatcaaatcctgcgctgtcaaggggagaagcaatgcatggagagctctgtctgctcaagttttcctccaagatctcctctgtgaaagcgaaggtttgatagtgacaggttgtagtaaatcactcagctcaggaacagtactgtatggcttttaagaacaaagagaatgagagcctaatgtcttacaagggaccagagagaaaatcaatctaggcaattcccagactatttctgtaactcccttw

SEQ ID NO: 78778 - DNA, 599 bp, Chicken  19866894368927_2
  misc_feature (1)..(73): n is any nucleotide
nnnnnnnnnnnnnnnnnnnnnnnnnnnnnnnnnnnnnnnnnnnnnnnnnnnnnnnnnnnnnnnnnnnnnnnnngttcggttctgccttttgtggcctggtgctgaatgaagatggtgcagagctgagtgcattgatcttttacatggcttagcccaaaaaggcaagcagaagcagtcactgctcgcagggagtccggagccctcagtctgaccctgtgccacctgacagagtcgtgacatttcccattcactgaggctcttgtgccttgctctatccctacagggcatagacgtcctcyycaagtcccaatcccattcaatccaccttcttcatcatttggccacttgcattatcatcaaatcctgcgctgtcaaggggagaagcaatgcatggagagctctgtctgctcaagttttcctccaagatctcctctgtgaaagcgaaggtttgatagtgacaggttgtagtaaatcactcagctcaggaacagtactgtatggcttttaagaacaaagagaatgagagcctaatgtcttacaagggaccagagagaaaatcaatctaggcaattcccagactatttctgtaactcccttwa

SEQ ID NO: 78779 - DNA, 528 bp, Chicken  19866894368927_3
yycaagtcccaatcccattcaatccaccttcttcatcatttggccacttgcattatcatcaaatcctgcgctgtcaaggggagaagcaatgcatggagagctctgtctgctcaagttttcctccaagatctcctctgtgaaagcgaaggtttgatagtgacaggttgtagtaaatcactcagctcaggaacagtactgtatggcttttaagaacaaagagaatgagagcctaatgtcttacaagggaccagagagaaaatcaatctaggcaattcccagactatttctgtaactcccttwaagtcaggttccagaaggctctgcacaatttaaaacatattttgcagggaaaagtaatcacaaccatggaattaatgggaaaatgggataaaattggtagatttttctttaataaggaactgatcgtgtggatgattgaattcttacagatcatagatctcatctacctagacttcaatgaactgattgatgggagaacaaaagggaaattatttgttgaaatgggaa

SEQ ID NO: 78780 - DNA, 600 bp, Chicken  19866894368932_1
gagcttgaacatgtccttaaaaaatctttgttgcttttgaaaatgttggtattggttgctattggagcgaattatggatgaaagagctactttccactaggcaattcaagattagcatatgaagaaatagcagccatactctgcccacaggagcaattaaaacttacaacatacctaatattgcagcaagctacttgtattggcagtaagactgcgtcttcaggggcaaaggttaccctaggtgtccaagttattcagatcatgcctgggcactgcactggctaggaatatagcccatargctggcagaaatggagcagacataatggctgtacaatgcatggcagtgctcatgtatccagcatgcctygtgtgctgtccacaaggttggtttcaaatgggaatctcatccaaccaggatcaagtacctcggatatgctgcaagatgggagatggtggagcagctgaaaagtygggttttggaaaaatgatgtccactgtgagcatacaggtggagaatagggttggaaggactcctttagaaatgttctagaaaagcaggacaggcaaatgcwtatttaagaataattatggatgttgc

SEQ ID NO: 78781 - DNA, 600 bp, Chicken  19866894368932_2
aattatggatgaaagagctactttccactaggcaattcaagattagcatatgaagaaatagcagccatactctgcccacaggagcaattaaaacttacaacatacctaatattgcagcaagctacttgtattggcagtaagactgcgtcttcaggggcaaaggttaccctaggtgtccaagttattcagatcatgcctgggcactgcactggctaggaatatagcccatargctggcagaaatggagcagacataatggctgtacaatgcatggcagtgctcatgtatccagcatgcctygtgtgctgtccacaaggttggtttcaaatgggaatctcatccaaccaggatcaagtacctcggatatgctgcaagatgggagatggtggagcagctgaaaagtygggttttggaaaaatgatgtccactgtgagcatacaggtggagaatagggttggaaggactcctttagaaatgttctagaaaagcaggacaggcaaatgcwtatttaagaataattatggatgttgcctctagatattgtttggggaccastttttaataaatctaccctagcttccaccatgtgctgccagaaaa

SEQ ID NO: 78782 - DNA, 600 bp, Chicken  19866894368932_3
cctaatattgcagcaagctacttgtattggcagtaagactgcgtcttcaggggcaaaggttaccctaggtgtccaagttattcagatcatgcctgggcactgcactggctaggaatatagcccatargctggcagaaatggagcagacataatggctgtacaatgcatggcagtgctcatgtatccagcatgcctygtgtgctgtccacaaggttggtttcaaatgggaatctcatccaaccaggatcaagtacctcggatatgctgcaagatgggagatggtggagcagctgaaaagtygggttttggaaaaatgatgtccactgtgagcatacaggtggagaatagggttggaaggactcctttagaaatgttctagaaaagcaggacaggcaaatgcwtatttaagaataattatggatgttgcctctagatattgtttggggaccastttttaataaatctaccctagcttccaccatgtgctgccagaaaagctcctctaaggcacatctgatcactgcrttcaagctgtcctaaaagtaatccagcaaatgggctaaaagacacacactccagagagatcactgaagccagcat

SEQ ID NO: 78783 - DNA, 600 bp, Chicken  19866894368932_4
gcactggctaggaatatagcccatargctggcagaaatggagcagacataatggctgtacaatgcatggcagtgctcatgtatccagcatgcctygtgtgctgtccacaaggttggtttcaaatgggaatctcatccaaccaggatcaagtacctcggatatgctgcaagatgggagatggtggagcagctgaaaagtygggttttggaaaaatgatgtccactgtgagcatacaggtggagaatagggttggaaggactcctttagaaatgttctagaaaagcaggacaggcaaatgcwtatttaagaataattatggatgttgcctctagatattgtttggggaccastttttaataaatctaccctagcttccaccatgtgctgccagaaaagctcctctaaggcacatctgatcactgcrttcaagctgtcctaaaagtaatccagcaaatgggctaaaagacacacactccagagagatcactgaagccagcattccccagcacaacaggacacaggtttgcagcacacgttcctcctccacacgctctgcataaccccctgcaggcctggacctgcagagatgcacctggggac

SEQ ID NO: 78784 - DNA, 600 bp, Chicken  19866894368932_5
atggctgtacaatgcatggcagtgctcatgtatccagcatgcctygtgtgctgtccacaaggttggtttcaaatgggaatctcatccaaccaggatcaagtacctcggatatgctgcaagatgggagatggtggagcagctgaaaagtygggttttggaaaaatgatgtccactgtgagcatacaggtggagaatagggttggaaggactcctttagaaatgttctagaaaagcaggacaggcaaatgcwtatttaagaataattatggatgttgcctctagatattgtttggggaccastttttaataaatctaccctagcttccaccatgtgctgccagaaaagctcctctaaggcacatctgatcactgcrttcaagctgtcctaaaagtaatccagcaaatgggctaaaagacacacactccagagagatcactgaagccagcattccccagcacaacaggacacaggtttgcagcacacgttcctcctccacacgctctgcataaccccctgcaggcctggacctgcagagatgcacctggggacgcttggcactgggctgcaagtacagcagcctggctgaggcacacgcagtg

SEQ ID NO: 78785 - DNA, 600 bp, Chicken  19866894368932_6
gggaatctcatccaaccaggatcaagtacctcggatatgctgcaagatgggagatggtggagcagctgaaaagtygggttttggaaaaatgatgtccactgtgagcatacaggtggagaatagggttggaaggactcctttagaaatgttctagaaaagcaggacaggcaaatgcwtatttaagaataattatggatgttgcctctagatattgtttggggaccastttttaataaatctaccctagcttccaccatgtgctgccagaaaagctcctctaaggcacatctgatcactgcrttcaagctgtcctaaaagtaatccagcaaatgggctaaaagacacacactccagagagatcactgaagccagcattccccagcacaacaggacacaggtttgcagcacacgttcctcctccacacgctctgcataaccccctgcaggcctggacctgcagagatgcacctggggacgcttggcactgggctgcaagtacagcagcctggctgaggcacacgcagtgcactatggctgcaataacacatccacgcagtcttgagcaattcacactacgcgtaccacacagcattaacacat

SEQ ID NO: 78786 - DNA, 600 bp, Chicken  19866894368937_1
catcctgttggcagcagcctgcccactggttgtgagtggtagtgcgtagggttgggtaagggaagtgagctgctgtcatctgcgtggtgaaatggttctaaagattgtaggaaatattcagcgattgtgtgaatgccgtaattactgtctgtaatgttgttttgaaattcaatgtagagcttccttctcctcatttaaaagctctttcttgttcttctaaacgctttaatccaatctgccatagtctctctcagtgagtagcatcattttactttatcgaatcgtaactatttgtttaartaaccgaygtagaaaccaattctccttatccttattccgctgytacagagctggtgcttatgaaattaccaagggggggggggaggtggttttagagaatagcrgcttttctgtggtagtgttcttgtaaagctgaatgtaagagtgaatttgaagtaggccagcagcagaaacttgctaatcccttcagcactcatcttcaaacccagcgatcactcagagcagcctgagtgcttttctcagccaacagcttcatgggattttaatgaagcaccgtattgtcaaaaatattatattaag

SEQ ID NO: 78787 - DNA, 600 bp, Chicken  19866894368937_2
tggcagcagcctgcccactggttgtgagtggtagtgcgtagggttgggtaagggaagtgagctgctgtcatctgcgtggtgaaatggttctaaagattgtaggaaatattcagcgattgtgtgaatgccgtaattactgtctgtaatgttgttttgaaattcaatgtagagcttccttctcctcatttaaaagctctttcttgttcttctaaacgctttaatccaatctgccatagtctctctcagtgagtagcatcattttactttatcgaatcgtaactatttgtttaartaaccgaygtagaaaccaattctccttatccttattccgctgytacagagctggtgcttatgaaattaccaagggggggggggaggtggttttagagaatagcrgcttttctgtggtagtgttcttgtaaagctgaatgtaagagtgaatttgaagtaggccagcagcagaaacttgctaatcccttcagcactcatcttcaaacccagcgatcactcagagcagcctgagtgcttttctcagccaacagcttcatgggattttaatgaagcaccgtattgtcaaaaatattatattaagcatacatt

SEQ ID NO: 78788 - DNA, 600 bp, Chicken  19866894368937_3
gcgtagggttgggtaagggaagtgagctgctgtcatctgcgtggtgaaatggttctaaagattgtaggaaatattcagcgattgtgtgaatgccgtaattactgtctgtaatgttgttttgaaattcaatgtagagcttccttctcctcatttaaaagctctttcttgttcttctaaacgctttaatccaatctgccatagtctctctcagtgagtagcatcattttactttatcgaatcgtaactatttgtttaartaaccgaygtagaaaccaattctccttatccttattccgctgytacagagctggtgcttatgaaattaccaagggggggggggaggtggttttagagaatagcrgcttttctgtggtagtgttcttgtaaagctgaatgtaagagtgaatttgaagtaggccagcagcagaaacttgctaatcccttcagcactcatcttcaaacccagcgatcactcagagcagcctgagtgcttttctcagccaacagcttcatgggattttaatgaagcaccgtattgtcaaaaatattatattaagcatacatttgctacactgttgtctcacaataagctagtttgtc

SEQ ID NO: 78789 - DNA, 600 bp, Chicken  19866894368937_4
ttgtaggaaatattcagcgattgtgtgaatgccgtaattactgtctgtaatgttgttttgaaattcaatgtagagcttccttctcctcatttaaaagctctttcttgttcttctaaacgctttaatccaatctgccatagtctctctcagtgagtagcatcattttactttatcgaatcgtaactatttgtttaartaaccgaygtagaaaccaattctccttatccttattccgctgytacagagctggtgcttatgaaattaccaagggggggggggaggtggttttagagaatagcrgcttttctgtggtagtgttcttgtaaagctgaatgtaagagtgaatttgaagtaggccagcagcagaaacttgctaatcccttcagcactcatcttcaaacccagcgatcactcagagcagcctgagtgcttttctcagccaacagcttcatgggattttaatgaagcaccgtattgtcaaaaatattatattaagcatacatttgctacactgttgtctcacaataagctagtttgtcatgttactgactgctgtatttgttaacttcagcatgctgagattctttatttgtcatgtgt

SEQ ID NO: 78790 - DNA, 600 bp, Chicken  19866894368939_1
aaattgctgcttctttccatcccctatgtagacagacattgctcatggatgcagaattatatatttttctatttaatctggtaagcttttcagatgattcttatgtcagaggtagattccttggcactgagctagctgaaaggttgccttatttccttctatcttattcagtgacagtctgagtccttcaaaagaaacagcaatttagaaagaggagttactgcacagtactcacctcaatacctggcattgattcagtgactggtcttgattttaaagtagctgtctctatgaacaatygtagaggaatgttcatacccagatgggaaaagattcactgacacaagggtaaactctcttcagaacagtacagttttgttggaggtatgagattttatttgtggttttaagacagggtgaatctcwaatatagaattagccacagaaaaaagccggtgattttagtcatgctgcttctctaatttatttaacagaatgatggatccctgatgccaaatgtcttaacaattatgggttagatctgactacagaaggcagtactggtggataaagtatctaaatatcgtatactccgtatcc

SEQ ID NO: 78791 - DNA, 600 bp, Chicken  19866894368939_2
ctgagctagctgaaaggttgccttatttccttctatcttattcagtgacagtctgagtccttcaaaagaaacagcaatttagaaagaggagttactgcacagtactcacctcaatacctggcattgattcagtgactggtcttgattttaaagtagctgtctctatgaacaatygtagaggaatgttcatacccagatgggaaaagattcactgacacaagggtaaactctcttcagaacagtacagttttgttggaggtatgagattttatttgtggttttaagacagggtgaatctcwaatatagaattagccacagaaaaaagccggtgattttagtcatgctgcttctctaatttatttaacagaatgatggatccctgatgccaaatgtcttaacaattatgggttagatctgactacagaaggcagtactggtggataaagtatctaaatatcgtatactccgtatccctcattcacatctctctcagtgatctggttttccatttacaccctaacagataagagaatcaccagatcccaagaaaggacaaaccattccatactatcagatatgatacaaatttctcaaatgaa

SEQ ID NO: 78792 - DNA, 600 bp, Chicken  19866894368946_1
tcccacgcttatcaagaactgaagccaatagtgattgtctaatcactcatacgccctctctgttctgcaacagcgttgtcagagttttctatctatggcaattcttttgtttgtttcatttttcctgatgtctatgctgagttagttttaggaacaaaagtctgcttttaatcagtatcctaaaaaataagtttttcctggaagtaactcaaggaatggtatcactggcgtcactagctccttgagacaagccttcagctgctgtgaaacacaaagatctgctggctctcctgcagagtyccaggcatgtagataatgtatgttttgcttgttccaggcagcccagccgcccttcaacacgcaagggttcatgtgtggagtgggcagtaccattctgagtgtgagcttcatgtaaatgctttaacaatatatacccttttatctgaaaaaaggtaaaaacaatcttattcacctgctttttatgaatttcatgaatgcttttccttctaccaatccatatgggtacakccagcttgtgatttttctctataaggttttgcgaggtacgtcaagggatgcttcaagtgaagtgctacctca

SEQ ID NO: 78793 - DNA, 600 bp, Chicken  19866894368946_2
cgtcactagctccttgagacaagccttcagctgctgtgaaacacaaagatctgctggctctcctgcagagtyccaggcatgtagataatgtatgttttgcttgttccaggcagcccagccgcccttcaacacgcaagggttcatgtgtggagtgggcagtaccattctgagtgtgagcttcatgtaaatgctttaacaatatatacccttttatctgaaaaaaggtaaaaacaatcttattcacctgctttttatgaatttcatgaatgcttttccttctaccaatccatatgggtacakccagcttgtgatttttctctataaggttttgcgaggtacgtcaagggatgcttcaagtgaagtgctacctcaatgaatatgccttgcaaacctgcaaartgacttatttcactctgttaaactcacttaagcaaaagcatttcctatctaaaagaagggtgtaccctctgtatctttcacgccacaaatttataagtgcctcttttttttcttccttttggttcactctccttgttgctgagccttcaaatattgtgatcagaatacggaaaggtctatcgtgttgcacatgtaagagtg

SEQ ID NO: 78794 - DNA, 600 bp, Chicken  19866894368946_3
cttgttccaggcagcccagccgcccttcaacacgcaagggttcatgtgtggagtgggcagtaccattctgagtgtgagcttcatgtaaatgctttaacaatatatacccttttatctgaaaaaaggtaaaaacaatcttattcacctgctttttatgaatttcatgaatgcttttccttctaccaatccatatgggtacakccagcttgtgatttttctctataaggttttgcgaggtacgtcaagggatgcttcaagtgaagtgctacctcaatgaatatgccttgcaaacctgcaaartgacttatttcactctgttaaactcacttaagcaaaagcatttcctatctaaaagaagggtgtaccctctgtatctttcacgccacaaatttataagtgcctcttttttttcttccttttggttcactctccttgttgctgagccttcaaatattgtgatcagaatacggaaaggtctatcgtgttgcacatgtaagagtgtaaaactagaaatattgatctgattgttctttcagcttgtaagagttcatctaatagccacattgaagtcctgcttttctactgcttactgagtgaaaa

SEQ ID NO: 78795 - DNA, 600 bp, Chicken  19866894368949_1
agagatgttccgggctaatgcatcactatctttggggttccctctttttgttaaagttttcacaaaatacaaaattaaatgtcttttctacatacagaacaaagtagaatcaagcaactgattagagtatgtacaaaaacttacacatcgcctcgttctttaaaaaacataaatatcaataatgttcagtaggatgggttggttttatttttaaggcttcattcttttagatccttcattatttaatgaggtgccaggtaggcaggaaaagcaggaaagagaggacgtgatttttttttwattaaaagtaacgtgtttaattctcatgagtctcttcttcatctctgttaggaggagacacaatttagtttcsttccctccagagtgatttaagtttccaggaagcagtggtggaaggaaagaaaaataaaacccttattattgctatttgtttcctccaccgaaatcttgttttaaacctgtctctgttcattgtcactgtagagaaccatctgcgcagtactcggattaaatagactcaagcaggaagactttgccccaggtccacatgggaaaggttagagtgaggatgagactgct

SEQ ID NO: 78796 - DNA, 600 bp, Chicken  19866894368949_2
attaaatgtcttttctacatacagaacaaagtagaatcaagcaactgattagagtatgtacaaaaacttacacatcgcctcgttctttaaaaaacataaatatcaataatgttcagtaggatgggttggttttatttttaaggcttcattcttttagatccttcattatttaatgaggtgccaggtaggcaggaaaagcaggaaagagaggacgtgatttttttttwattaaaagtaacgtgtttaattctcatgagtctcttcttcatctctgttaggaggagacacaatttagtttcsttccctccagagtgatttaagtttccaggaagcagtggtggaaggaaagaaaaataaaacccttattattgctatttgtttcctccaccgaaatcttgttttaaacctgtctctgttcattgtcactgtagagaaccatctgcgcagtactcggattaaatagactcaagcaggaagactttgccccaggtccacatgggaaaggttagagtgaggatgagactgctggaagtgttttaccgttgactccagcagaggtagcaagtgctgcagctagggcagctgctgctgttgcatccc

SEQ ID NO: 78797 - DNA, 600 bp, Chicken  19866894368955_1
gttcttctgacttcagatgttccatctcttgtctatttcttttttatcgtggaagtagcttgagaagaagttccacagaagtctaaatggaaatgcagacatgggcaatggtctccatctgggatgacctatggtcaggcacctacctgacagcagcttctcatcacattaaatctgcatcccaagcaagagttggaagacaaatgacatggaaacagagtggactgtgactactgtttggtcctttttaaaaaaggtatgtgagagtatagaggatataccagtacatgaacatacacrgtcactgaatgatcccagacagacctgaaataaatctggtcctagctatgtggagtcctaaagcaaagtttctcattccacatgactgagacttttggacagtcccttcacaaccagcaaatcagggaaggcaattaaaccacagctgctcacatggctcaaatatacctatttggcacaggatactcaagatattttgctgtggccgcagtggtgatgctgtgtggccaaccagggaacccatttggcatcagtctctcacaatcatggttttccttccatcgtcttggcaaatttgta

SEQ ID NO: 78798 - DNA, 600 bp, Chicken  19866894368955_2
agacctgaaataaatctggtcctagctatgtggagtcctaaagcaaagtttctcattccacatgactgagacttttggacagtcccttcacaaccagcaaatcagggaaggcaattaaaccacagctgctcacatggctcaaatatacctatttggcacaggatactcaagatattttgctgtggccgcagtggtgatgctgtgtggccaaccagggaacccatttggcatcagtctctcacaatcatggttttccttccatcgtcttggcaaatttgtactgtgttggccagcagctawtgttaacccactacatgcataacatgccaggtaaatcagtgccattgrgctactcgaagctggtcatctgctgagaatgaaacagtgcaacaaaagagaccaaaaaagcacagtgacattaattggaatgtcttgcattgcatgatggcgtaaaagaacagacactacgtatgtgtaggcaagatcagtgagatgcttcatatgcaacacactctaaagctgagagactgactatatatggaagtatggctgaaaatatggctgaaaagagagaaagttagcaaattcagggtctgtata

SEQ ID NO: 78799 - DNA, 600 bp, Chicken  19866894368955_3
tttctcattccacatgactgagacttttggacagtcccttcacaaccagcaaatcagggaaggcaattaaaccacagctgctcacatggctcaaatatacctatttggcacaggatactcaagatattttgctgtggccgcagtggtgatgctgtgtggccaaccagggaacccatttggcatcagtctctcacaatcatggttttccttccatcgtcttggcaaatttgtactgtgttggccagcagctawtgttaacccactacatgcataacatgccaggtaaatcagtgccattgrgctactcgaagctggtcatctgctgagaatgaaacagtgcaacaaaagagaccaaaaaagcacagtgacattaattggaatgtcttgcattgcatgatggcgtaaaagaacagacactacgtatgtgtaggcaagatcagtgagatgcttcatatgcaacacactctaaagctgagagactgactatatatggaagtatggctgaaaatatggctgaaaagagagaaagttagcaaattcagggtctgtatatatatctgcagaggaatcagtacagataatagtaccaggctgtacaat

SEQ ID NO: 78800 - DNA, 600 bp, Chicken  19866894368960_1
agaaccagcaacaacactgcttttcctgctgcaccacaaatgcccttcatgttccatcgctcccctctttggatctgggctgtctgctagatacttcaaagcaatacaacagggaacaagtgaagcacacaaggaggtcgagtcaatgcaatgcagttggctttccaaaggtggtcagaacctgcaattgattctcagcagctcagttttccagtacctccattatcactagcttcctaaaaaaacagctttctccaaagaacccctttgatggactgccctgtggaaaacccctaaacraactctgacaggtaaaaagtgcaaaccacagttgttcctataagcaaaggtgaaggctcagctaccggtgtgcaaagcctattccaactttgcaatccccacatagaagtcttcattcaagttgttcaataattaaggtcagggttaaaaacaaaaatcctcagagcttttttcccccttgccacaccataaagactcctagtaacactaatcaaaagtatggaaataaatatatatatgtatatatagttaatataagataaatggctttgatgttttctcttgtggccccagaatctt

SEQ ID NO: 78801 - DNA, 600 bp, Chicken  19866894368961_1
ttaaatgcctaggtggtgagaaagtacagtgctgcattctagattctgataacaaatgccttgtttggggaatgtttatatccaaaaggctcattcgcccaggatatagatagctatgatttaaacttcagactgtgaaattcctcctcggactaaaatatacacacacacccttgaaagaaaaattgtggaggactgggtattaacttttcttacaagatagtttgcaaagacagaaaagggaaataagtggaaattccagtgtctcaggtgaaaaaatgctaatactgcttttggacrtggttttaagctttgccaaagaggaaatggaaaattaagaggttcttggaaaacgaagaggttttgactgaagatcaagacagtgactcaagagagcctgaaattctacaaagactattgccagcttgcgtcagtgagaacaagtggaaaaaaccaacaaaattcatcaagttacattggcaactgaatctaaaagagaaagaaaagtgygtttattcttaaattttgcaattacaaggcctcagcagctttcctctctcagtattactgtggctttgtttctaagttcttctaaaacat

SEQ ID NO: 78802 - DNA, 600 bp, Chicken  19866894368961_2
tcttacaagatagtttgcaaagacagaaaagggaaataagtggaaattccagtgtctcaggtgaaaaaatgctaatactgcttttggacrtggttttaagctttgccaaagaggaaatggaaaattaagaggttcttggaaaacgaagaggttttgactgaagatcaagacagtgactcaagagagcctgaaattctacaaagactattgccagcttgcgtcagtgagaacaagtggaaaaaaccaacaaaattcatcaagttacattggcaactgaatctaaaagagaaagaaaagtgygtttattcttaaattttgcaattacaaggcctcagcagctttcctctctcagtattactgtggctttgtttctaagttcttctaaaacatttttattctcctcttattttctttcccatagtttttgcattatccagggggtccaaaagtctctttgttttaatttatgtaacaaagaggttaatattactgatgttttctctgctgtgatgccaaacagggtcaccagatgtgattcataagttgttcttgcatgctgcttagcaaaagcacagctgtggttacacaccaggggtggag

SEQ ID NO: 78803 - DNA, 600 bp, Chicken  19866894368961_3
agaagccctactccccaagctgcataagaatttcatagtaataacccaaattcaagccactacataactagacaagacattttcaatgttttgaagttcagtgaataaaataatctttggcacttacataggacaattcatccaagcatctcaaggaactttggaggcaccaaatacggaaaaagttgcctttgggaccaactggagaactgtaaaaagaaagcagttcaagccattgtaaaaaggtattaaaataaagaaaaacaacttgctttcagtggaactgttatgctctaatgygttgtattcttgcagctacactactgatgtttagaaatcacacaatgtgcacctccttctttattgtattcattatgcctctgtatgggcaaacacaatattttttttgttactttgcactctgaaaacttacagaacaattatatatcacaaaatcttttttctgaaatgttcataggagaggacagtgcaaaagaatttgagacattgtccatcagcctgatatctgtgtgcatcatggagatttggagtgcagaatgaggaaatacttccctgtccattcatatggggtagatgtat

SEQ ID NO: 78804 - DNA, 600 bp, Chicken  19866894368962_1
agtgacagttaatttcctccatctggaaaggaaccactaaaggtgtaataaacctgttaatattacttttcagcgtctagttagagcatcactcaccttgaagtcaccgtgtttgcaacttacgtactttttgccctacagcacaacttggatttaaagagtgatgcagtaccagctgcagtgcgctgctctgaggagcgtctctcagaaggaggagccttcattctggccaacggtctgagcatgttcctgtggctgggggtcagcacaccccctgagctcatccaggggcttttcaaygtgccgtcttttgcacacatcagcacagaagctgtgagtatatggaggaaaaccagtccrtttttcagaattcattattcagtaagaccaggccactaattagagaaaygagggagggaactcagagcattcatcattcaaccaaaagcaaaaatgggtgccagcagaaggtgttaagacaccaaaagaaatgcataaaactgtcgtaaactttctctctgaacaattacaagacagaagctttcaccaagttttcagagtatcttaaacatgttatgacagatattaaaatcctactga

SEQ ID NO: 78805 - DNA, 600 bp, Chicken  19866894368962_2
tattacttttcagcgtctagttagagcatcactcaccttgaagtcaccgtgtttgcaacttacgtactttttgccctacagcacaacttggatttaaagagtgatgcagtaccagctgcagtgcgctgctctgaggagcgtctctcagaaggaggagccttcattctggccaacggtctgagcatgttcctgtggctgggggtcagcacaccccctgagctcatccaggggcttttcaaygtgccgtcttttgcacacatcagcacagaagctgtgagtatatggaggaaaaccagtccrtttttcagaattcattattcagtaagaccaggccactaattagagaaaygagggagggaactcagagcattcatcattcaaccaaaagcaaaaatgggtgccagcagaaggtgttaagacaccaaaagaaatgcataaaactgtcgtaaactttctctctgaacaattacaagacagaagctttcaccaagttttcagagtatcttaaacatgttatgacagatattaaaatcctactgaatatgcattgctgaaactgcaacaaagcattctatgatagctaaagcttctcctgtagcc

SEQ ID NO: 78806 - DNA, 600 bp, Chicken  19866894368962_3
tgtttgcaacttacgtactttttgccctacagcacaacttggatttaaagagtgatgcagtaccagctgcagtgcgctgctctgaggagcgtctctcagaaggaggagccttcattctggccaacggtctgagcatgttcctgtggctgggggtcagcacaccccctgagctcatccaggggcttttcaaygtgccgtcttttgcacacatcagcacagaagctgtgagtatatggaggaaaaccagtccrtttttcagaattcattattcagtaagaccaggccactaattagagaaaygagggagggaactcagagcattcatcattcaaccaaaagcaaaaatgggtgccagcagaaggtgttaagacaccaaaagaaatgcataaaactgtcgtaaactttctctctgaacaattacaagacagaagctttcaccaagttttcagagtatcttaaacatgttatgacagatattaaaatcctactgaatatgcattgctgaaactgcaacaaagcattctatgatagctaaagcttctcctgtagcctgaacttcccctgataatgaattttaatgtagtgattattttaaactga

SEQ ID NO: 78807 - DNA, 600 bp, Chicken  19866894368975_1
atggacagaaagctctgaacacagtgcttgttttccagtggtactgtcaacagcaagagctctcgagatggtgaattactcactgtcagcaagttcacatgcagttcagatattttggttgtgtttctcgtagctgagcttgtgaaatctgcttctcgttttctgaagttctttgaacgtgctggactggcattggagtatcagtggtcacctggaagctgcaggtactaacacgaggagattaagggaagattcctttggagaacatctaattgagttttaaagagaaatcatttgtgygagtactatttgaaataagtggccttgaaacttgcacagaattgcaaactacctgagctctaccaggctaaaatgaccagaggtcattgcacagagatgtgccttaaatgagagatgcaatttaaatgaaacaaacaatttcttacaagtaataactgtgcttcttcccattcctcttgccaatttttttcattaaaatgtctagactgtaattgtgagacatgctggtgcaaaatagaattatttgtacttaaaacttaattctgtacccagacgcattggctctcagttatcacctgc

SEQ ID NO: 78808 - DNA, 600 bp, Chicken  19866894368985_1
aaaatgtggttctaaagggtctaaggaaaagtgctgcagagtagctattgtggtggtctatggcatatctagtcaccaggttataataactgcctgcacatctccagaattattattcagaattattattaagtgggttaatgatttaataatcagaattattattaagtgggtaaataaccaggaatcgttgcttttttcttgtaaagattctttttgcataggcaatcagaatttatagcaactggtacttagaatctattttgttttcagttatctgaaattgtctacctctgctcwtgagcatattcagcctctacattccctgcatttaacatagaaaattctccctcctaaacaacttttgtgtctatttacccagtttaggaaaataacagcaaatattcagaataattctgtttccttctgttctgttctgaatcatgacrcaatacttctgtgggatttaaggtctcacatgaacaaaacactttagtggaatttctttccatgctaatcatcatagccatcacatgctatctgtacacagcaaagtatgtgccctccctctgaacctcaaacacatgcttataatttgaa

SEQ ID NO: 78809 - DNA, 600 bp, Chicken  19866894368985_2
taatcagaattattattaagtgggtaaataaccaggaatcgttgcttttttcttgtaaagattctttttgcataggcaatcagaatttatagcaactggtacttagaatctattttgttttcagttatctgaaattgtctacctctgctcwtgagcatattcagcctctacattccctgcatttaacatagaaaattctccctcctaaacaacttttgtgtctatttacccagtttaggaaaataacagcaaatattcagaataattctgtttccttctgttctgttctgaatcatgacrcaatacttctgtgggatttaaggtctcacatgaacaaaacactttagtggaatttctttccatgctaatcatcatagccatcacatgctatctgtacacagcaaagtatgtgccctccctctgaacctcaaacacatgcttataatttgaaaggaaacactgtaaatggctttacaattactctagttctgcaaagacaagagctctacttgaagaatgttagatgtttttttttttttttccatacagtaagggtataagcattcacaacacatttgtgtctgcacctttggcttagtt

SEQ ID NO: 78810 - DNA, 599 bp, Chicken  19866894368986_1
  misc_feature (1)..(34): n is any nucleotide
nnnnnnnnnnnnnnnnnnnnnnnnnnnnnnnnnnttttaatttgaatgattttgtaaggtaggcaggtgtctaaatgacttagagcttctgttgacttttaggaggaattttgctcttgagggagagcatcttttaaaaaatcagatccaggttcctgtataacttcgacaatctcagcctttgtctcgataacagcttatttctgttttggaaattattggaaaagtaagtaaagtattggaaaagcatccaactgaaaagttcccatatcaaaccataagagcaaatccaagtttaaytgatgctacaaaaggttagccagaccttttgaagtgatgttatatgagctctactatatcttacattttttctccatctctttatctgttaaaagatacgagttttgttgcttaaaataaacagaaataatgataatgtctactttgggttgtgagtgcagggaagggcaggaatctttagctaggtactgcagagtcctgtttcacataccccatggtatctttgggtttttttttttcctcttcaaaacaggagaaaaatccaaaacaagtgaaatgtttgtgtggtctgatcccta

SEQ ID NO: 78811 - DNA, 600 bp, Chicken  19866894368995_1
ttccaccaacagcattctttttacagtcatctttacagctttactgcatcatttccatcataaacacagtaggtctccagaagacaacagataagcatgcaatgaaaaggattaagctagcaatacaaacaaaaataaaaacccagcattaatttcattaacactgcccaaagctctcaaatgcgttacagtaaataccggctcatgggatggcagaataaaaacaagaagataccaagtaagtcaaagcactgattcattacttcaccagaattctgtttgaacctctggctttataarttgaatttaacatgcacaaagaagtctgcccaatcactttctttcatgcaggaattatagcatcacagaatcccacagtgtcagggattggaagggacctcagaagatcaccaagcccaatcaccctgctgtagcacgaacaccaatcatagaatggctcgggttggaagggayatttargatcatgtagttccaaccccgtgctataggcagggacacctccctctagaccaggttgctcaagattctatgattctatgaaaatttaagtaagagcatcttacattcttattcatgata

SEQ ID NO: 78812 - DNA, 487 bp, Chicken  19866894368995_2
tctcaaatgcgttacagtaaataccggctcatgggatggcagaataaaaacaagaagataccaagtaagtcaaagcactgattcattacttcaccagaattctgtttgaacctctggctttataarttgaatttaacatgcacaaagaagtctgcccaatcactttctttcatgcaggaattatagcatcacagaatcccacagtgtcagggattggaagggacctcagaagatcaccaagcccaatcaccctgctgtagcacgaacaccaatcatagaatggctcgggttggaagggayatttargatcatgtagttccaaccccgtgctataggcagggacacctccctctagaccaggttgctcaagattctatgattctatgaaaatttaagtaagagcatcttacattcttattcatgataagcagtttcccactgttgaaaattcaatagcaaaagtgagggctatgaatcctaggaatgt

SEQ ID NO: 78813 - DNA, 481 bp, Chicken  19866894368995_3
atgcgttacagtaaataccggctcatgggatggcagaataaaaacaagaagataccaagtaagtcaaagcactgattcattacttcaccagaattctgtttgaacctctggctttataarttgaatttaacatgcacaaagaagtctgcccaatcactttctttcatgcaggaattatagcatcacagaatcccacagtgtcagggattggaagggacctcagaagatcaccaagcccaatcaccctgctgtagcacgaacaccaatcatagaatggctcgggttggaagggayatttargatcatgtagttccaaccccgtgctataggcagggacacctccctctagaccaggttgctcaagattctatgattctatgaaaatttaagtaagagcatcttacattcttattcatgataagcagtttcccactgttgaaaattcaatagcaaaagtgagggctatgaatcctaggaatgt

SEQ ID NO: 78814 - DNA, 411 bp, Chicken  19866894369004_1
  misc_feature (1)..(128): n is any nucleotide
nnnnnnnnnnnnnnnnnnnnnnnnnnnnnnnnnnnnnnnnnnnnnnnnnnnnnnnnnnnnnnnnnnnnnnnnnnnnnnnnnnnnnnnnnnnnnnnnnnnnnnnnnnnnnnnnnnnnnnnnnnnnnnnnttctcgccccgccccgccacgcttgcacgcctcacctcgccctgttccgccttgcttcgccttaccacgccccaccccgcctctcctcgccccgcctcgccctgcctcgtcccgccttgcttcccctcaacccgcctcgccccgcctcacctgccatgcctcacctcgcccygcctcgccctgcctcaccctgccacgcctagcctcgccctgccccacctcgccccgcctcgctccacctcgcctagccccgcctcgcttcccctcaccccgccccgcccca

SEQ ID NO: 78815 - DNA, 600 bp, Chicken  19866894369026_1
catggatccaaacaagtgtctctgagtgagttgcacgaaatgaagatcttgcaaatgcttcctgagcacagcaacatagaatccaggagacataaaatcaaaagagctaaaaactgagtttcgacaagcaaacctctgtatactggagggggcaggattcaggtttggggagcttagttcatttctccacctttccagcgatttatcaagggatcatggacaggtcactgactcagactcacccccagctaactctagaccgtttaaggatgatgcctaaatttagggcatcagcatctyaggcctctttctatcgtcaaaggaaagccaggagttttctagagggcaattcaggtgagctaaggtattcatctactttagaaactatagcagaatatctctcgttaggctgagtgctggtctccttgtttcaaatcccaactctgattatgaggatgaattcttcaacaaaaaggtagaagaggtgcttgcattaatgaccctgaaatgctccaatgaagatgatccatcggatagttgtgcactgctgttagtgatttgcttaggaagattttccaaattgatgctttgtttttgact

SEQ ID NO: 78816 - DNA, 599 bp, Chicken  19866894369038_1
  misc_feature (1)..(45): n is any nucleotide
nnnnnnnnnnnnnnnnnnnnnnnnnnnnnnnnnnnnnnnnnnnnncttgttatattcctagaatcctgctgcttattttctccaggatctggggctgatggcacgtgaacctctcagagcttcaggtgtagtgtaaatgtaaactaaatatgcagatggacctttctctaggggagcagcattcacagattgcaccacttcactcatctctcactgcttctgtccttatgtgtgtaaatatatcactttaaattattggtgatcactgtaacgtattgaagatgacacgttagcaaatgygatttagtaaatgcaattatatacaaatgttgacaaaattcatgctttagtaatcacctttacatcaagtattgttgatacctggaagcaggttttgtgtctctagtaaatcttctgctgcagctgtgttgcaagggaggtggcaaaaggcacagtagttaagtttccaatatctgcacagtttatctattgagtgcttagaaaacaaaattcttgaactttttatgttaaagaaattgttacagaaatttttgttcaagtacatttagaaggattgtatgtttcaaaaatcactgtat

SEQ ID NO: 78817 - DNA, 547 bp, Chicken  19866894369050_1
taatataaataagtattattctatgctaattaaattgtagctctcgttaaagtgctctttagattaggatttttcattagttatgtgaaaaaggtcagtacgaaacaaaaatgtagtacaagctccaccttccctatgctaccaatttttctaatgaaatacaatcagtactaattggtaaaactacattggttttctcattatcagtgctggtgaattggtcccagatgtggttttatggttgcaagtgatagtggctcagtgaaggagaaagatttcttctatcatattacctcttaygtctgggtgccattgcacccaaaaaayagtgactgtgttttaagaaagggaaggcctaggtgccagccctgagcattggcagggtcaggtctcagctattttagggctgcttttctcgagccatcatcatcgttagtggttcagaattaatcaaaataattattcttctcatygcgtatctgttcttgaaagcacacttacgaggcaagcttctcttcaaagcaatcaccttattctaaacagaatg

SEQ ID NO: 78818 - DNA, 520 bp, Chicken  19866894369050_2
aattaaattgtagctctcgttaaagtgctctttagattaggatttttcattagttatgtgaaaaaggtcagtacgaaacaaaaatgtagtacaagctccaccttccctatgctaccaatttttctaatgaaatacaatcagtactaattggtaaaactacattggttttctcattatcagtgctggtgaattggtcccagatgtggttttatggttgcaagtgatagtggctcagtgaaggagaaagatttcttctatcatattacctcttaygtctgggtgccattgcacccaaaaaayagtgactgtgttttaagaaagggaaggcctaggtgccagccctgagcattggcagggtcaggtctcagctattttagggctgcttttctcgagccatcatcatcgttagtggttcagaattaatcaaaataattattcttctcatygcgtatctgttcttgaaagcacacttacgaggcaagcttctcttcaaagcaatcaccttattctaaacagaatg

SEQ ID NO: 78819 - DNA, 374 bp, Chicken  19866894369050_3
attggtaaaactacattggttttctcattatcagtgctggtgaattggtcccagatgtggttttatggttgcaagtgatagtggctcagtgaaggagaaagatttcttctatcatattacctcttaygtctgggtgccattgcacccaaaaaayagtgactgtgttttaagaaagggaaggcctaggtgccagccctgagcattggcagggtcaggtctcagctattttagggctgcttttctcgagccatcatcatcgttagtggttcagaattaatcaaaataattattcttctcatygcgtatctgttcttgaaagcacacttacgaggcaagcttctcttcaaagcaatcaccttattctaaacagaatg

SEQ ID NO: 78820 - DNA, 600 bp, Chicken  19866894369052_1
gtggtgtgagaatcgaagtccgtttgaagtctttctagtgtattcaaggttccctttgactttcatggcctttggattgcttacatcagaggctgaaatatgactttaattatttccccaacagccattggtaagaacatagaaagtacgtagttttattgatggagaacatcatgctaaggtgattttaaatgtagaatagttcaaagaggacaaagaagataatgttcaagatcatacaaattcaaaattaagattctgcgctctcatgaccttgataaactgaagaggtgggcccaygtgaacctaattatattcaacaaagcgaagtgccaggttttgcacttgggttggggtaatcccagatatgtatacagactggaagaagaaatccttgagagtagccctgcaggaagggacttgggggtcctggtagatgaaaagctaaacatgagacagcagtgtggacttgtagccgagtatcctgggctgcatcagaagaggggtggtcagcagggagagggaccgtgatgttccctctattctgccattctgaggcaycatctggagtattgcaaccaggtctggggcctccaacag

SEQ ID NO: 78821 - DNA, 545 bp, Chicken  19866894369052_2
cgctctcatgaccttgataaactgaagaggtgggcccaygtgaacctaattatattcaacaaagcgaagtgccaggttttgcacttgggttggggtaatcccagatatgtatacagactggaagaagaaatccttgagagtagccctgcaggaagggacttgggggtcctggtagatgaaaagctaaacatgagacagcagtgtggacttgtagccgagtatcctgggctgcatcagaagaggggtggtcagcagggagagggaccgtgatgttccctctattctgccattctgaggcaycatctggagtattgcaaccaggtctggggcctccaacagtggaaaaatagctgagcttttggagggggtccagaggagggccacaaaggtgatcagagagctggaatgcatctcctgtgaagacaggctgaaagagctgggcttgttcagactggagaagagaagtgtgcagggagacctcattatgaccctccagtatttaaagaaaaattataaacgggagagaaatcaactttttacaggga

SEQ ID NO: 78822 - DNA, 600 bp, Chicken  19866894369054_1
tgctcaacccttgggttttccagcttgatttccagctctctgtatctgcagaggggcgaaggaacctgtaccagcacaaacagaacacgtaactgtgactcgcagccccgtccccagctccgtcagcggccggccaagcccgagtcagatgagacgcgatgtgctgccagcacgcgggctttgaagagctcctatcctcaaggtcacctgcctgggggcttaggagtgtccttaaatacagccctgagctgccatcgtgcagaaagagaaggaaatgcatcccaacaccacctgcagacrgccaagatcttccaccagcgctggaggaggagagctgaccccaaacacagccgttttcaggaggaaatgtggaattcacggctctgcccaactcacagctcatctgtattcaggagcgtgagcagaacrtccagctcgcctctggcaaagccacagcaaaggggtggagagcagatcgtcttgtcctgccccggggagtgtttggacgtgcatgtgagacgcggtgtgatgattcctgatgcggagaagcgatgctgtgctcttgggatggagcagaatttgctccgaggcaggatttgg

SEQ ID NO: 78823 - DNA, 537 bp, Chicken  19866894369054_2
ccggccaagcccgagtcagatgagacgcgatgtgctgccagcacgcgggctttgaagagctcctatcctcaaggtcacctgcctgggggcttaggagtgtccttaaatacagccctgagctgccatcgtgcagaaagagaaggaaatgcatcccaacaccacctgcagacrgccaagatcttccaccagcgctggaggaggagagctgaccccaaacacagccgttttcaggaggaaatgtggaattcacggctctgcccaactcacagctcatctgtattcaggagcgtgagcagaacrtccagctcgcctctggcaaagccacagcaaaggggtggagagcagatcgtcttgtcctgccccggggagtgtttggacgtgcatgtgagacgcggtgtgatgattcctgatgcggagaagcgatgctgtgctcttgggatggagcagaatttgctccgaggcaggatttggagcaggaatgccatgagggctattgaggattgatgctgtgcccttgcgatgagagagtccacccga

SEQ ID NO: 78824 - DNA, 599 bp, Chicken  19866894369056_1
  misc_feature (1)..(14): n is any nucleotide
nnnnnnnnnnnnnnatcctgggggatatatcctcatcccagcgataatgaggtggatgtacaaagccatgccagataatggaaataaagatttctgtgtgtggagggaacaggggcagatacagtctgagtatgtgggacagtagctgctttctttgcggcataggacgctgtttggccacttggcaagtgttgagctcaactaagctcaaacagagctgttggtttgttgatactctaagtcatatgcaaaattaaaatataggcagtttaaaaacatcatcttcattacattaatatygtgacctgcaagtttaaatgccttctgagggctgaatttcagagctacaatttgggatcctcaagaatttctttttattttcttttacttgtactttttacccccctttctggtaattatgtaattactttttacttcatgctttgaatgatacatctggcctcacaaatgatattgtctgtctataaacattcaatgtaacccaacattctttttttactcttgaaatttaatactttcattaaatggttgtaaaaattgacctgaagtaaatggagatatgtgaaatcttaatataa

SEQ ID NO: 78825 - DNA, 599 bp, Chicken  19866894369070_1
  misc_feature (1)..(184): n is any nucleotide
nnnnnnnnnnnnnnnnnnnnnnnnnnnnnnnnnnnnnnnnnnnnnnnnnnnnnnnnnnnnnnnnnnnnnnnnnnnnnnnnnnnnnnnnnnnnnnnnnnnnnnnnnnnnnnnnnnnnnnnnnnnnnnnnnnnnnnnnnnnnnnnnnnnnnnnnnnnnnnnnnnnnnnnnnnnnnnnnnnnnnnnntttgcatgagtaagatgcattttgtgcttatggtattagatacaaacactcggggatatgtgcacattccattacagcttttagttaaggtagggtatatcccttgttctacaaayaatatatatatcatataagtattccgggtgcataagagcaattcaaaatgctaattgcccattttttgtcatctcaggctgytacatccactctccctttggacccatcttcacatccctttctactctaacaaacacaagctacttgtcctcacaagctrtatttgcactttcccatcagcttcatattcaagaaagagaaaaaaaaggggggctttcagcaaaacgttcagtatctggaacttgtctggatgatgagccctggctctctaagacaagccaggagagggttttgcttg

SEQ ID NO: 78826 - DNA, 599 bp, Chicken  19866894369070_2
  misc_feature (1)..(102): n is any nucleotide
nnnnnnnnnnnnnnnnnnnnnnnnnnnnnnnnnnnnnnnnnnnnnnnnnnnnnnnnnnnnnnnnnnnnnnnnnnnnnnnnnnnnnnnnnnnnnnnnnnnnnntttgcatgagtaagatgcattttgtgcttatggtattagatacaaacactcggggatatgtgcacattccattacagcttttagttaaggtagggtatatcccttgttctacaaayaatatatatatcatataagtattccgggtgcataagagcaattcaaaatgctaattgcccattttttgtcatctcaggctgytacatccactctccctttggacccatcttcacatccctttctactctaacaaacacaagctacttgtcctcacaagctrtatttgcactttcccatcagcttcatattcaagaaagagaaaaaaaaggggggctttcagcaaaacgttcagtatctggaacttgtctggatgatgagccctggctctctaagacaagccaggagagggttttgcttgttttgaagcagtatactggtatccctatccaggcccctcatgatgactatcagaatcctcttccattaactgggatcagaaa

SEQ ID NO: 78827 - DNA, 599 bp, Chicken  19866894369070_3
  misc_feature (1)..(23): n is any nucleotide
nnnnnnnnnnnnnnnnnnnnnnntttgcatgagtaagatgcattttgtgcttatggtattagatacaaacactcggggatatgtgcacattccattacagcttttagttaaggtagggtatatcccttgttctacaaayaatatatatatcatataagtattccgggtgcataagagcaattcaaaatgctaattgcccattttttgtcatctcaggctgytacatccactctccctttggacccatcttcacatccctttctactctaacaaacacaagctacttgtcctcacaagctrtatttgcactttcccatcagcttcatattcaagaaagagaaaaaaaaggggggctttcagcaaaacgttcagtatctggaacttgtctggatgatgagccctggctctctaagacaagccaggagagggttttgcttgttttgaagcagtatactggtatccctatccaggcccctcatgatgactatcagaatcctcttccattaactgggatcagaaagcccaaaactaggttcaatttgcttggttgcttcaggtgttttccagtcagacaactgaagactatgggcagattgctg

SEQ ID NO: 78828 - DNA, 600 bp, Chicken  19866894369073_1
tttcaattctccatgttgctgctaattttttgtcggtggtggaaagtatgatgtgcttccagctcaattgcttgtgattgatgttggatacaggaccttaaagatatgttagatgtgtcaagtcttactgaggtatttattcagatgcataaatagagaacaatgtcaaacatcagggttttcattttataaattatgcaaattacatgaactgtagctccctggatgcttaatgttcactaaaagaatgtggaaatatatgtatccattttactcttgagtttaggaattagttttttktttgtttgtttgttttttaattgcatatatatatatataatttttttttaataggtgctgcacaatgaacttgtgatggaaatggatcatccaatagctgggagaatagctgttccaggttagatgtttaattcttttttctaaatggagcttgaaattaaatgttacatgacatcctgaatagttctggaactcagctgaggacatgacacatcttcacatttcactcaaatgaacaaaagtttaaacaggaagacatttgtgctcacattcattccagaagcagaaaaattggttaaa

SEQ ID NO: 78829 - DNA, 600 bp, Chicken  19866894369077_1
ttgtttagcagtccagcagtgatgtaggctctctcagcaattctctaggcaggcaataagaggaacacaggcaaaaacaatcaggaattatccgtcctcttttctaagctcttcatgtcactcttggcgcacttcgctttaaatgcttcagtatccgcagaagaatagttgacattcagggtttagatggtgactgctgtttgttttgttactgtctcaggatgaattgtcttgcttctgccttccaaatgttcaggaaagtagtgtttgagaaaatgggttactgagctagtgatgacrttggaaaatactgggcaagtaagaataaattgaaacaccatttttaagaacacctacattagtacaataagtattattgtttgctctttaaaatcaatccttcttaaaaatagaacaaaactcagtgtatattttgtgagcctgctcaatatatattaactgcttggggtacctgtgaatatktagtgccagaaaataacagcccaattgaattagcctaattattattatgttttgttcagctttgtcctgatacccagactaaattgaatgcagcttatgtatttggaacgacttacg

SEQ ID NO: 78830 - DNA, 600 bp, Chicken  19866894369077_2
tagatggtgactgctgtttgttttgttactgtctcaggatgaattgtcttgcttctgccttccaaatgttcaggaaagtagtgtttgagaaaatgggttactgagctagtgatgacrttggaaaatactgggcaagtaagaataaattgaaacaccatttttaagaacacctacattagtacaataagtattattgtttgctctttaaaatcaatccttcttaaaaatagaacaaaactcagtgtatattttgtgagcctgctcaatatatattaactgcttggggtacctgtgaatatktagtgccagaaaataacagcccaattgaattagcctaattattattatgttttgttcagctttgtcctgatacccagactaaattgaatgcagcttatgtatttggaacgacttacgaacaaagtgtaagtaagagagaaaatgcttttctgaatatttgaattaaactgcgttacgtatcatcagtacctcagtgctaagcagtcccagctttcccagcctttccttataggagaggtgctccagtcccttcatcaccttcatggccctgcactgggctatatcaagtagctgtgtacc

SEQ ID NO: 78831 - DNA, 600 bp, Chicken  19866894369084_1
tggaggaatcccctgaacagtttgcaaagcagacaagctttgaatcataggaggatttacgttgctagtaacttctggaggtcatctaatccaactgcacactcaaagcaaggctaaatttaaaatatgatcagcttgctcatattgttgtccaaatgaattttgaaatcctccaataagagaaattctacaacctctgggagcaactgctttggtgcttaacatgctcatggagagttttctttgcaaaacgggacttcccttgttgtcacttgtatccattgcctcttgccctttcayagttcatttctggctttatcttgttgcaatttacactggaaacagatgtccattaacaatcctatgcatgtacaattggcatagaaatccctctgcacttattcaatcaaaatgacatatttgactatcatacaaataacaataaaaggctttccttcttatggaagggggaaccgtacttatggatcacgtatattgcaataacttctgtacactcagaaggtgcagtcagagatgaatataaataactgtgttcagatgggcagggaggcattcctaattcacagaagctttttaaca

SEQ ID NO: 78832 - DNA, 600 bp, Chicken  19866894369085_1
caggcaaggtaatcaaatgacagaaagacatagctcggctttggccacgcaccgaaactttcacagtgttcctgggtgaattagaagaaaatgcactcctaggctaaggacttgtgaactgttctgcacccaaaattactttctcagagaggtatccaaccctgcaaacatagtacagaattaaaatgcttaaacaaccattacagcagagatgtgaatatgctcctgtaattatacagctgtttgttcattaaaggagaaatttaatgcaattaaaatatttacaatcctgcacactawaaactaaaacaaaattagtttgtaccagagatgcaggctgtgttgcctcccctccaaactggcctttagataccagggcttacaatggacaatctgcttaaggagttagcagaactttcccccttcagatgatgcaatccagagttaagaactgagctggtgactgggtctctaataatctttaagacagcagatttgtcccaggcatgccatgtaaagttctttggatcagacaccaaaggagagaggaccttgggacagtcacacggaaggggcactggagctgcactgcttgctgtg

SEQ ID NO: 78833 - DNA, 600 bp, Chicken  19866894369090_1
tttaatttgtggttaatcaaaaggatgtttcttctcaccacagcatcacaggtacctgcaaaaatgttgtattttaatcaaatacatatacatcttgggcaaaattaatcaatggtgaaatagcagatcaactagattcaactaccaataagatttttctgaagtgtatagaagcagtaagatttgcactaagtggcaatttgtagtttatataaagatcataaagacactaatcatgcaaaccgtggcttcaagcactctttatcccagcatcattcattccagcgttgagcccatccyaagccattaccagcagctctttgttaaagtaagcagatcctgccagatttgaagcatttcaaagctcttttggactggatggaccaactgtccagacatgggtgcttccactgcttttacttatcttttttcagaactttactgatacgtttaggattgctggtttcatctctattgccgccaacaggcacacatgcttactttcttcatgtgatagggatattttttctataacctcaaacttctatcttttatttcagccctttgagcatttctaaacaaaataggtgagtatttgaa

SEQ ID NO: 78834 - DNA, 600 bp, Chicken  19866894369094_1
ttttcatgtgtctttcagccagtacagcaataggcttggagtcagtattcattttaatactttcaacatatagtcacatttattgtgaaagttttctttttttcctctctgattgtacttttgcatccctttgtgtgcagttgcactacacacccatctatgaacttgggcctactgccaacaaatagaacagctccctccttaattttctgtattaaaacatacataacctgaacattgttcagtttactaatctctaaacgcatattatctgttggaaactggctttccctcagcatrttatttatttctaggtaatctcagctaagaatctactggtgctgtgactatggccagctttatattacatattttcctcaatgcagatgtgtagctatttaatgccttttctttacttctctgtaaatgccatatggacagaaatcattgagtcaccagatcatacatttattttcattatatattatgctctttgatgtcatgttgacatctaattgatgttatttttgctttttatttttttgtctttgttttgtttcttggtttcaataaaaagagaatttaaaaaaggctgaagaa

SEQ ID NO: 78835 - DNA, 599 bp, Chicken  19866894369098_1
  misc_feature (1)..(122): n is any nucleotide
nnnnnnnnnnnnnnnnnnnnnnnnnnnnnnnnnnnnnnnnnnnnnnnnnnnnnnnnnnnnnnnnnnnnnnnnnnnnnnnnnnnnnnnnnnnnnnnnnnnnnnnnnnnnnnnnnnnnnnnnnnataaacaaaattggcaatgaaacatagtagattgtagctatattaactacattaagacgtaaaacttctttcccttctcattttactgatgttcaactgccaaaaggcagacggatgctcacgtcttaacttacccttagtttagccttcttttctgagataaggagatggcatgatwgtgctgcttgataaaagccctccacagtttctagtaggtaatttcaacaaaatttgacagagaggcacaagtctcaatgataccaatttgatgtatcttgctatatgttttggaaatagcagccatatacagaagaggaacagctatttacgagggtggatagtgataggacaaggaggaatggttttaaactgagacaagggaggtttaggttagatattaggaagaagtttttcacacagagggtggtgacgcactggaacaggttgcccaaggaggttgtggatgccccatccctg

SEQ ID NO: 78836 - DNA, 599 bp, Chicken  19866894369100_1
  misc_feature (1)..(158): n is any nucleotide
nnnnnnnnnnnnnnnnnnnnnnnnnnnnnnnnnnnnnnnnnnnnnnnnnnnnnnnnnnnnnnnnnnnnnnnnnnnnnnnnnnnnnnnnnnnnnnnnnnnnnnnnnnnnnnnnnnnnnnnnnnnnnnnnnnnnnnnnnnnnnnnnnnnnnnnnnnnnnnccaaagaacactttgaagcctatcatcttcccacttcctatctgctgcaaaactccaaagtgactttagcagcccaccagctaaaattgcctagttcattggactaggcaattgtcgctttgtaccctctgaacattatgaytttggactgtatgaagaataggctgttatatctaattgttcctgacaaaaaggacagcaaaagcatgttaaaatctgaataaagatgacaaatattatctatacatacatagataaagacctttatttgtataagtttagtaccctcagatgttatagagctagaatattgtttggatactgctgcaacagtataatcttggcgttcccatgggatacagcatgtgtttctatcccgggtgatttatgaactattggaccttaaaactctcactgcttctttcctctagcaatgttttg

SEQ ID NO: 78837 - DNA, 600 bp, Chicken  19866894369100_2
acagcaaaagcatgttaaaatctgaataaagatgacaaatattatctatacatacatagataaagacctttatttgtataagtttagtaccctcagatgttatagagctagaatattgtttggatactgctgcaacagtataatcttggcgttcccatgggatacagcatgtgtttctatcccgggtgatttatgaactattggaccttaaaactctcactgcttctttcctctagcaatgttttgctggcacaggtccagctctgaatacagcaagtcctcagcctttgactgttaggygtacttcwtgcctcctcattttgaagtaatggacccggaaagtctgtaccaagtgactctgtaaggtcaacttctggatgtgcgtgtgctgttacagcttcaccatgttcaacagagctgtactggttagaatcccttcaatatctacaccacaatcccaattttggtgctccttcaacatattaagaataaacaaacaaatcaactctgaattcccattaagataaaactgcgaaatcaccatgaaatgaagggagataccgctgtcacttccagaagtaaggattaaaggattcctgt

SEQ ID NO: 78838 - DNA, 600 bp, Chicken  19866894369100_3
agcatgttaaaatctgaataaagatgacaaatattatctatacatacatagataaagacctttatttgtataagtttagtaccctcagatgttatagagctagaatattgtttggatactgctgcaacagtataatcttggcgttcccatgggatacagcatgtgtttctatcccgggtgatttatgaactattggaccttaaaactctcactgcttctttcctctagcaatgttttgctggcacaggtccagctctgaatacagcaagtcctcagcctttgactgttaggygtacttcwtgcctcctcattttgaagtaatggacccggaaagtctgtaccaagtgactctgtaaggtcaacttctggatgtgcgtgtgctgttacagcttcaccatgttcaacagagctgtactggttagaatcccttcaatatctacaccacaatcccaattttggtgctccttcaacatattaagaataaacaaacaaatcaactctgaattcccattaagataaaactgcgaaatcaccatgaaatgaagggagataccgctgtcacttccagaagtaaggattaaaggattcctgtctcatcag

SEQ ID NO: 78839 - DNA, 600 bp, Chicken  19866894369101_1
caacacgtcaaggtgatagttaaaactgagttaaactagtgcagcttcagtatgtagccaaagtagttaaagctgcaacatttggcttcatagcgggagacaggcgtgaatgtaatcactgaaaactgtaagtgtgcaagagttaacaaaacctctttttatcatcctccccatcacacttgtggtgcagataatccgaaatatggaggaggataggatagttgaaccttgacttctgtgatgtttgtccaattagttgccttcaccccacctctctttgttgctttcagcagtggatcygatatgcaagacaaatatctgggattgcaattgtgcttgcacccttagtactaagcctttgaagtgctgcaaatgcttttgttattccctgccttacggagcatacactcagctacagttgctaaaggctgaacagctagtggtgtcgtaaaactcaaaatacttagaaatgatgagcttattatttgagaataagactttaaagtccacaaattttgaatcaggaggagaagctgtccacaagtgctaggtggaggagctgttcttcaggcacctcgttaactctagaatgagagaaac

SEQ ID NO: 78840 - DNA, 600 bp, Chicken  19866894369102_1
cccattttaaggaccaatacataacgggaataattaatctttgtgctggcactgagcccagttcaagaaactaatggcaagcactcagctgctcttgagccttccaaggttactctggatctttgacacaaagcagaacaaatccaaggctaatctaactcactacgtggagcacccccaccacatctctgctgttgctattggcacatagcagctgggaacaagaaattcagcctggatatctcctgctctagggatccccaaagaggggaggcagaaggttaaagacagcagctactrttctatcactatcccaccccaagatgtcatcaacaaaagtgacagattcttcagccaagtgaaagctggtaacaccagaataggttaacatgtcacaatgaggtgttgagacagacaacaggagagcatttgaacatcagaatacagtttatagacacgatatattgtacttcacatcttatagttcagtactgtggcacagctgcccaaagagctatttccaggtgggaaaacagctgtccatgacgttgaataygtggccctactcgcacatactattacattgctggtccmattagg

SEQ ID NO: 78841 - DNA, 600 bp, Chicken  19866894369102_2
atccccaaagaggggaggcagaaggttaaagacagcagctactrttctatcactatcccaccccaagatgtcatcaacaaaagtgacagattcttcagccaagtgaaagctggtaacaccagaataggttaacatgtcacaatgaggtgttgagacagacaacaggagagcatttgaacatcagaatacagtttatagacacgatatattgtacttcacatcttatagttcagtactgtggcacagctgcccaaagagctatttccaggtgggaaaacagctgtccatgacgttgaataygtggccctactcgcacatactattacattgctggtccmattaggaaaaacttgtctttaagaccagctgaccttaacgtttactatcagataccaaaggctagtaatctgaggcctatacagatggtcyactgtacagcctttgttggctataatcctataacagtgaatgttaaaataaaattgttttggataggttatttggccaagaatgatggcaaatacccatcagtaacaaacacggcagcaactgcaattattttaattgatctgctgaactctgcaaatcaaaatatagaca

SEQ ID NO: 78842 - DNA, 600 bp, Chicken  19866894369102_3
ctactrttctatcactatcccaccccaagatgtcatcaacaaaagtgacagattcttcagccaagtgaaagctggtaacaccagaataggttaacatgtcacaatgaggtgttgagacagacaacaggagagcatttgaacatcagaatacagtttatagacacgatatattgtacttcacatcttatagttcagtactgtggcacagctgcccaaagagctatttccaggtgggaaaacagctgtccatgacgttgaataygtggccctactcgcacatactattacattgctggtccmattaggaaaaacttgtctttaagaccagctgaccttaacgtttactatcagataccaaaggctagtaatctgaggcctatacagatggtcyactgtacagcctttgttggctataatcctataacagtgaatgttaaaataaaattgttttggataggttatttggccaagaatgatggcaaatacccatcagtaacaaacacggcagcaactgcaattattttaattgatctgctgaactctgcaaatcaaaatatagacactctgagagctataactacaagctcatcatgaaatcaa

SEQ ID NO: 78843 - DNA, 600 bp, Chicken  19866894369102_4
taacatgtcacaatgaggtgttgagacagacaacaggagagcatttgaacatcagaatacagtttatagacacgatatattgtacttcacatcttatagttcagtactgtggcacagctgcccaaagagctatttccaggtgggaaaacagctgtccatgacgttgaataygtggccctactcgcacatactattacattgctggtccmattaggaaaaacttgtctttaagaccagctgaccttaacgtttactatcagataccaaaggctagtaatctgaggcctatacagatggtcyactgtacagcctttgttggctataatcctataacagtgaatgttaaaataaaattgttttggataggttatttggccaagaatgatggcaaatacccatcagtaacaaacacggcagcaactgcaattattttaattgatctgctgaactctgcaaatcaaaatatagacactctgagagctataactacaagctcatcatgaaatcaatccttttagggttcaattattgcaagtaagatataaaaaataccatatgatccaaataacagactgtttgtcctattacattaattactgg

SEQ ID NO: 78844 - DNA, 599 bp, Chicken  19866894369106_1
  misc_feature (1)..(51): n is any nucleotide
nnnnnnnnnnnnnnnnnnnnnnnnnnnnnnnnnnnnnnnnnnnnnnnnnnnacgtctcaccaccatcttttatcagtggaacttgaaatgctttgcttggaaacgctgtaagagcaacagtttggcagaaatacatgtctgtgtctgtttgcatgccagcggtgaaatatggtgtattttcaacttagcatgcttcatgtatagtatatctacagttcttcagtatttcagatggccaggcagagaaacagtcacaatctgcaaagctggaagggtttaaaatgttttagaaaatattcygcattataccaggccaggaaagggataggaacagaagatttcatttagattacaaattctctagagtgtgggctgcctttgcctgtgtttctgaatggtatttgacataatatactctctgaatgcatatccacgaaccttcatataattcagagcagagatccccaaatggaactacaagggcttgaaattctgtttgtggtggtgtatcatgggggaaaaaaagatccaggagtctcagttacagaaaactacagatgaactcttcatccttgcatgtagagagcaatggttatttt

SEQ ID NO: 78845 - DNA, 600 bp, Chicken  19866894369107_1
aggcagcagagaaagaaggtgatgcagccagttagtttcagtaggtgcatgcaacatggatggactgtctctggttttggtacaggacattatatgcacatgtgtaaaaacaaatcagcgttttcctgagtaaacacccttggtcgtgcagagcttgcgtggtccataccaacatgtagaatttccattgggtgcagtttttgatgctgatgtaagactgtttgcgttcaagatttctagagcagtgtaaatcatgagagcaaagctcaagtgatttgcatgtttcacattaacccagcrtctagaatatgcttctaaaacacacttctgcaggttaaagtcagccatcatcacacacagagcagtcattccttcctcaccttgggacaaacatattacagaaaaagtcagtaaaagattacatctggactacagcatctcatgtttgggggtctatgaaccagaggcttaagaatagaaacggacaagcctagagtctgcttcaaacttcacttacatttctcaattctgtgttctctcttttggatgtgtgctgtgttcctacccagcagctccctctcctactgagggaagacatga

SEQ ID NO: 78846 - DNA, 600 bp, Chicken  19866894369109_1
caatttcacaaccacggtagctgaaactactgtgaaacatttgacaggccatttgagggtctgctctttctctgctagcatcagggtcctatcttgttgcacaagaaagacctagtaagcaagtcttcttagccactgtggctattcatcatagaaggcagaaataacttttttaaaacaacaacaacaacaaaaatcacaacagcaacatgattttgttgttgtttgtttttaagtgtatgctttatgtttcccttctattactgaatgtagttagagcctgctcagttaccacactgytttttaagggtggagatcaaaatcctaaaagaaggttcccaactgcaaattagactggtccctggagttcagaaatctgcatgcaagaacacccgtgtggatccatcrgtgactctccaaatcagctctactaaatcacatgcaagatattcttgaaaaggttttgttttgttttgttttacaaaaataaatctagtttatagtcataatttctaccactgaagagttgcctttactaaactcttaagttttacaaaagtctcacacctgggttacaataattaagagtactatatgcat

SEQ ID NO: 78847 - DNA, 600 bp, Chicken  19866894369109_2
gacctagtaagcaagtcttcttagccactgtggctattcatcatagaaggcagaaataacttttttaaaacaacaacaacaacaaaaatcacaacagcaacatgattttgttgttgtttgtttttaagtgtatgctttatgtttcccttctattactgaatgtagttagagcctgctcagttaccacactgytttttaagggtggagatcaaaatcctaaaagaaggttcccaactgcaaattagactggtccctggagttcagaaatctgcatgcaagaacacccgtgtggatccatcrgtgactctccaaatcagctctactaaatcacatgcaagatattcttgaaaaggttttgttttgttttgttttacaaaaataaatctagtttatagtcataatttctaccactgaagagttgcctttactaaactcttaagttttacaaaagtctcacacctgggttacaataattaagagtactatatgcattaaatattggaatggagaaaactgtcaccagaaattactgcgagtccactgacactaaagtatgtacgagttaatccatttcaaattacagaccttttattcatggca

SEQ ID NO: 78848 - DNA, 547 bp, Chicken  19866894369111_1
agtgggtgcaattttatccataaggagcaattcagtaacactcctctacttcctatgcactcccatgtcagatgccattcagtcagactgcccctctgctgccatctctcacacggcagcaaaatgtaccagaatattggcaggaaggttcaaacactacttccatgccaccaacatccgcctctgacagtgtggccaacacaacacaataaaacaggaagcattactgttggagcagcttgcatgtgtgattgctccttctgataacagtgctctttcatttttcataaaaattaaatmcatttaagttttcctttcttgatttactatttgtagttaaatatgtgatgttctgatcttgtatccagacacaatcaaggcacagaactcaaactttatcatctctgcccactctggtataatgtctgtgaagggtgctagttaatgtaaattggtttttgtaattttttttttaattatacagactttttttttttttactttaaaaatctttataaatgtcaaagacttgagtcatgtcacgtca

SEQ ID NO: 78849 - DNA, 599 bp, Chicken  19866894369114_1
  misc_feature (1)..(171): n is any nucleotide
nnnnnnnnnnnnnnnnnnnnnnnnnnnnnnnnnnnnnnnnnnnnnnnnnnnnnnnnnnnnnnnnnnnnnnnnnnnnnnnnnnnnnnnnnnnnnnnnnnnnnnnnnnnnnnnnnnnnnnnnnnnnnnnnnnnnnnnnnnnnnnnnnnnnnnnnnnnnnnnnnnnnnnnnnnnaaacctttgccctgtgagcagcacagggaggtttggtttcccatctgtttgagcccatgtgttggattctcctgtgtctcataaggcgttggtctggcagatgctttccctgtaggctgggcactcatygtgacctttgctgtggattctccagtgtctggaaaggttcagagcagatgccctactcctggctttctcctctccctcgttgcagttggtatctttgaggtcttcagcaccagtgtgacgtgggtgaactggccagagagcccagatgctgcygctcacaagcatggactgtgatcacatatgctatgctgctttagcaaaacaagcttgtggtgccttgaagttaaggtttcagggtgcaaaggggagagactaaggctgctcctaagctcttcaccattccccgcaggcacggccca

SEQ ID NO: 78850 - DNA, 599 bp, Chicken  19866894369114_2
  misc_feature (1)..(18): n is any nucleotide
nnnnnnnnnnnnnnnnnnaaacctttgccctgtgagcagcacagggaggtttggtttcccatctgtttgagcccatgtgttggattctcctgtgtctcataaggcgttggtctggcagatgctttccctgtaggctgggcactcatygtgacctttgctgtggattctccagtgtctggaaaggttcagagcagatgccctactcctggctttctcctctccctcgttgcagttggtatctttgaggtcttcagcaccagtgtgacgtgggtgaactggccagagagcccagatgctgcygctcacaagcatggactgtgatcacatatgctatgctgctttagcaaaacaagcttgtggtgccttgaagttaaggtttcagggtgcaaaggggagagactaaggctgctcctaagctcttcaccattccccgcaggcacggcccagcctgggctgatagcacctttgagactacagctctccacccaggcargcaaacaaatggggctgattatcccyctgtaaagctgataacgctgatgatagcagatgaagactgttagctgaaggtcacccagacctgcagtaaagcctgcctg

SEQ ID NO: 78851 - DNA, 600 bp, Chicken  19866894369114_3
gatgccctactcctggctttctcctctccctcgttgcagttggtatctttgaggtcttcagcaccagtgtgacgtgggtgaactggccagagagcccagatgctgcygctcacaagcatggactgtgatcacatatgctatgctgctttagcaaaacaagcttgtggtgccttgaagttaaggtttcagggtgcaaaggggagagactaaggctgctcctaagctcttcaccattccccgcaggcacggcccagcctgggctgatagcacctttgagactacagctctccacccaggcargcaaacaaatggggctgattatcccyctgtaaagctgataacgctgatgatagcagatgaagactgttagctgaaggtcacccagacctgcagtaaagcctgcctgagatcccccccgagactgctcaggagagcagggagctgtgtggytgggacattgctttcatgggggctgccccaggggagagctttgtactcttcttagataaccactcagcgaaattagttctgcttcgagcaggagttgggacctgaaacctccacagtccttccaacctctgtgattctgatttctgcagg

SEQ ID NO: 78852 - DNA, 595 bp, Chicken  19866894369114_4
tccctcgttgcagttggtatctttgaggtcttcagcaccagtgtgacgtgggtgaactggccagagagcccagatgctgcygctcacaagcatggactgtgatcacatatgctatgctgctttagcaaaacaagcttgtggtgccttgaagttaaggtttcagggtgcaaaggggagagactaaggctgctcctaagctcttcaccattccccgcaggcacggcccagcctgggctgatagcacctttgagactacagctctccacccaggcargcaaacaaatggggctgattatcccyctgtaaagctgataacgctgatgatagcagatgaagactgttagctgaaggtcacccagacctgcagtaaagcctgcctgagatcccccccgagactgctcaggagagcagggagctgtgtggytgggacattgctttcatgggggctgccccaggggagagctttgtactcttcttagataaccactcagcgaaattagttctgcttcgagcaggagttgggacctgaaacctccacagtccttccaacctctgtgattctgatttctgcaggtcctacagtaaacaagaagaa

SEQ ID NO: 78853 - DNA, 471 bp, Chicken  19866894369114_5
gcaaaacaagcttgtggtgccttgaagttaaggtttcagggtgcaaaggggagagactaaggctgctcctaagctcttcaccattccccgcaggcacggcccagcctgggctgatagcacctttgagactacagctctccacccaggcargcaaacaaatggggctgattatcccyctgtaaagctgataacgctgatgatagcagatgaagactgttagctgaaggtcacccagacctgcagtaaagcctgcctgagatcccccccgagactgctcaggagagcagggagctgtgtggytgggacattgctttcatgggggctgccccaggggagagctttgtactcttcttagataaccactcagcgaaattagttctgcttcgagcaggagttgggacctgaaacctccacagtccttccaacctctgtgattctgatttctgcaggtcctacagtaaacaagaagaa

SEQ ID NO: 78854 - DNA, 600 bp, Chicken  19866894369115_1
caggatagaatcatccacctttttataatacagaaaaagcaaaattaagagttagctttgcatctgcaatcatcttgattatgattcacaacactgcttgcataaatagaaaagacttacctattgctttttggctagcacactactctgctcaagaggaaatgaagcccttagcactgtgttgtctctcgtgctgacatgacattttcagaatcagagaagacagtttatgcaactgaaatctgctccccgtcatacagagcaccgaaactgttctcctgtacctcgacacgcaagaaytgcttcactccgttccttctctcacctccagtataaaggcactccttcaaaaaacaacaaaaaaagtagcatttatgccagctcttccttactaacaattttatttttttgcccattgctatttactgctactgatgaacagtctttctaaaagctgtcttgcagagcccttctgccctgcatagcagagcatgcacagcagaaggaaattgtacttactggaaacaattcagccctcaatgccatgattattctgattatctcatatacaagctccctctgcaggcagtaagaagaatt

SEQ ID NO: 78855 - DNA, 600 bp, Chicken  19866894369122_1
atgcaacagctactctctaagattacagaattgttcgcaaacaggaccactttctattttacagcttaagagcaaataccagaacgacctgttcaccaaagcacacaaaacctattaaaatacattcagtgcttttcataccataattttgaccttttcattttccaattatttctttcggcaaccaaagagatttgtcttatgacactcataatttaggggaccttggcaagtatgtgaagtacctttcaccactgccaccatacaacttgttttaaagcaataaatcaagacataacygtcctctgctgataaacaaaattactagcaacacatgctctatagcttaaamatagtagttatttgagtaatttaagtcctactgtcacctgcaagaaacatacataaawacaaacaaagcagcagtgatgtgttgcacaaacattgctcataattttaccagtctcyttcccattgtcatttggaagaactttactggctagcaattgcaagcaacagtatacttcactcaaaagaaaaaatagtagaaaakcagttttattattcatcaggacrcagcctactcctttcctaccgttt

SEQ ID NO: 78856 - DNA, 600 bp, Chicken  19866894369122_2
tctattttacagcttaagagcaaataccagaacgacctgttcaccaaagcacacaaaacctattaaaatacattcagtgcttttcataccataattttgaccttttcattttccaattatttctttcggcaaccaaagagatttgtcttatgacactcataatttaggggaccttggcaagtatgtgaagtacctttcaccactgccaccatacaacttgttttaaagcaataaatcaagacataacygtcctctgctgataaacaaaattactagcaacacatgctctatagcttaaamatagtagttatttgagtaatttaagtcctactgtcacctgcaagaaacatacataaawacaaacaaagcagcagtgatgtgttgcacaaacattgctcataattttaccagtctcyttcccattgtcatttggaagaactttactggctagcaattgcaagcaacagtatacttcactcaaaagaaaaaatagtagaaaakcagttttattattcatcaggacrcagcctactcctttcctaccgtttgtgggttttctttcagctgcttgaactttggtaaagcaaatgctttcataaa

SEQ ID NO: 78857 - DNA, 600 bp, Chicken  19866894369122_3
cctattaaaatacattcagtgcttttcataccataattttgaccttttcattttccaattatttctttcggcaaccaaagagatttgtcttatgacactcataatttaggggaccttggcaagtatgtgaagtacctttcaccactgccaccatacaacttgttttaaagcaataaatcaagacataacygtcctctgctgataaacaaaattactagcaacacatgctctatagcttaaamatagtagttatttgagtaatttaagtcctactgtcacctgcaagaaacatacataaawacaaacaaagcagcagtgatgtgttgcacaaacattgctcataattttaccagtctcyttcccattgtcatttggaagaactttactggctagcaattgcaagcaacagtatacttcactcaaaagaaaaaatagtagaaaakcagttttattattcatcaggacrcagcctactcctttcctaccgtttgtgggttttctttcagctgcttgaactttggtaaagcaaatgctttcataaattggctcaagggtgctgcagtgtccttgacatctatgtaatcctgatggcaaggtcca

SEQ ID NO: 78858 - DNA, 600 bp, Chicken  19866894369122_4
ttatttctttcggcaaccaaagagatttgtcttatgacactcataatttaggggaccttggcaagtatgtgaagtacctttcaccactgccaccatacaacttgttttaaagcaataaatcaagacataacygtcctctgctgataaacaaaattactagcaacacatgctctatagcttaaamatagtagttatttgagtaatttaagtcctactgtcacctgcaagaaacatacataaawacaaacaaagcagcagtgatgtgttgcacaaacattgctcataattttaccagtctcyttcccattgtcatttggaagaactttactggctagcaattgcaagcaacagtatacttcactcaaaagaaaaaatagtagaaaakcagttttattattcatcaggacrcagcctactcctttcctaccgtttgtgggttttctttcagctgcttgaactttggtaaagcaaatgctttcataaattggctcaagggtgctgcagtgtccttgacatctatgtaatcctgatggcaaggtccagtcctgcagatgctttctcctctgtgcaatctgaggacaggaaacacagcaaagtact

SEQ ID NO: 78859 - DNA, 600 bp, Chicken  19866894369122_5
actgccaccatacaacttgttttaaagcaataaatcaagacataacygtcctctgctgataaacaaaattactagcaacacatgctctatagcttaaamatagtagttatttgagtaatttaagtcctactgtcacctgcaagaaacatacataaawacaaacaaagcagcagtgatgtgttgcacaaacattgctcataattttaccagtctcyttcccattgtcatttggaagaactttactggctagcaattgcaagcaacagtatacttcactcaaaagaaaaaatagtagaaaakcagttttattattcatcaggacrcagcctactcctttcctaccgtttgtgggttttctttcagctgcttgaactttggtaaagcaaatgctttcataaattggctcaagggtgctgcagtgtccttgacatctatgtaatcctgatggcaaggtccagtcctgcagatgctttctcctctgtgcaatctgaggacaggaaacacagcaaagtactgctgtaggtacttcaagtcactggcacccacataaagggttgggggggggaaaaaacccaccactgaatacactgccatgacagg

SEQ ID NO: 78860 - DNA, 600 bp, Chicken  19866894369122_6
aaagcaataaatcaagacataacygtcctctgctgataaacaaaattactagcaacacatgctctatagcttaaamatagtagttatttgagtaatttaagtcctactgtcacctgcaagaaacatacataaawacaaacaaagcagcagtgatgtgttgcacaaacattgctcataattttaccagtctcyttcccattgtcatttggaagaactttactggctagcaattgcaagcaacagtatacttcactcaaaagaaaaaatagtagaaaakcagttttattattcatcaggacrcagcctactcctttcctaccgtttgtgggttttctttcagctgcttgaactttggtaaagcaaatgctttcataaattggctcaagggtgctgcagtgtccttgacatctatgtaatcctgatggcaaggtccagtcctgcagatgctttctcctctgtgcaatctgaggacaggaaacacagcaaagtactgctgtaggtacttcaagtcactggcacccacataaagggttgggggggggaaaaaacccaccactgaatacactgccatgacaggatgtatttcaagtgccatcagga

SEQ ID NO: 78861 - DNA, 600 bp, Chicken  19866894369132_1
atcaaaaactgaatgctgtcgtgctaggctctattaatgacaactgtttgacaaacacagagggaataacctctgaagaaaatgattcttcaaggaatgctgtggagaaaagtgttgtaatgttaaaaactcttctcttgtgtcacaggttttagtttatagtccaggtagatatttagaatctcaaactgctgaatcctttaagctgggcttccttttttgtttaagagatactgtttttaggtaatcatagaatgctttgggttgaaggcaccttaaaagcccacttagtaccaaccmctgccatggactgattgccagcctatgatgaggctgccccatccaacctggccttgagcacctccagggatggggcacccacagctctctgggcagctgtgccagtgcctcaccaccctctaagtaaagaatttcctcctgacatctaacctaaatatcccctcttttagtttaaaatcattcccccttgtactatcactgtcaaactgtcaaaagtcgatccccctcgttcttacaagctcccttgaagtactggaagaccacagtgaggtggagagccttctcttctccaggctgaac

SEQ ID NO: 78862 - DNA, 600 bp, Chicken  19866894369139_1
aggggggaaaatactaacatcttcaaagaacagataaatttatgcttagaaattagattagctatctgttatcgtgttttagaggttaacatgaaactgaagttctaccatcaactgtaaaggctgaagctgaaggttttttattgctttactattattactagttgacctgacctgtaaattaggccacacataatgcaatacacactcttaatttaatggttgtagtttctaagtgttcattaaatgatgaatagatgcctctgacagactaataccataatagttttgtttgcagayagtttacttcagaacaaacatttcaagacttaaggtaattcttgagtcgactacatcaggttgtttgatgtattggctctttctttccctttccatcttaactggaaaatatttgactacatcaacataatttttctttgtaatgcctttgccagctgcaaagttttcttctgttgtttgcaagctgagtcagagaagcacatggcagtaattgacacagatttattctgctgcatttggtcttctcttcttgcttaaggcaatttaatctatcaaggaaaggctgggatttctggcata

SEQ ID NO: 78863 - DNA, 600 bp, Chicken  19866894369142_1
cttttcagtgcctcttgggaaacatggctatagctgggaaacgttttaaattctgctttataactcacaccttccccctaagggagaaagtagtgaaaagtctcagccttctgtagttgggttaggtcactgaagtcattgttggcacacagtgatacagcacattgtgtagtgctacaacttggcaactaaatatgtctggaaagcatcatttcaaattacaaagtgctaatgagtattatcaggaggggaaaattataggaagagatctaaaaatgtcttgaatttttaactgtacawttttttttatttgttgtgagcctattaacatctatgactgttgtttctgagggatccactcagctgagtctggaatcatgttgttttgacgcatctcatatttttctaagattaaaatgcattttacctgtagtgttgtttagtactgataatttttgtgctaactgaaactgaactgctgttatgtttaaatttgtctccagactgcttgacttattccagccaagaaaaatacatgcctgtattttactgtgctcatatatattgctgctagtgctatggaaggtacttagcattgac

SEQ ID NO: 78864 - DNA, 600 bp, Chicken  19866894369142_2
tggttttaaagaagtgaggaaatatgacaataaaagtaagcagacatgcaagcgacttggagctgcatttcttgttctgtttggtggagttcacaattgcatcaacagggggaaaaggtaccagccagcacaatgaaagaggtagatgaggaggctgaatagttggacttgtttttggaagcaatatacttttactgttgttatacgtctttgaatgggtaaacatatgtatgtgatcaacaagattactatttagtccaatactgatgatgaattgttacaggtttggtgaaaaagtcygttagtattttcaaaggagtacatttgacatcactgtgagttggtgctgcccttctcaactgtcacaggagcatgcagcacaggatttgaaagcacctgaggctcctcagtaagtccagccttgcatatgcactgagaagaaaaggactcttataagcctgagtagcaataagaagcaagtaaagagggttacagttctttaggaaattactttcaccattcattcttacaccttatttatgaccctttcagctcaaagctatttaaagtgaggtaagcaaaactgaaatgctctcttgt

SEQ ID NO: 78865 - DNA, 600 bp, Chicken  19866894369152_1
tctggtggctgtgctgtcacaccacctggtttgccgtattcatgctgctggaaccttgagcaggaggtgggcacgtgcctaacgtgggcgaccttatcgctgtgagctgtgacagctggcagggcttgtggctcggatcttccactgatggagaagagttgtttcccccaggggaggcacacaaaccttgcactgaactaggaaagcttgtacctgtaatctcttatttgcctgatgatagcggtcagtcatattttaatccatattagaacccggaggtctccttggctttccctgctrtgagaaaaaaataaggcgtggaaagacaatttcatacttattttctgcatcaataaaaacaaacagaaaaacccccaaagaccccaaattttccaaatctttgaattttctttttcaatttcaaactgtagtttacatgttggtcatatctttttttctttttcctcttttgcaggagggggtagaaagctgaagggaataacttcctcaaaactggtaagtacttcctgcctgagctgggatggtttacctaaaaatagctgatacgaagagctggcatccattcctggaaaagtttga

SEQ ID NO: 78866 - DNA, 600 bp, Chicken  19866894369156_1
tgatatatatttaaatgggaatctgtatctcctgacaaacaggttcatttatagtatccaacggtgccctccctttccccaaactgagacatagtacctgcagatgtttttctaaacaccttgcttaaagtattttctgttgcatagtccagttgcgctggtttagagctctggtacatccctatgaaatctgcctctcagttttgtgggcttttaatttgtcagcagatgccggatgaggcaaaaaagactgcaaccagtttccccactgatgggaaaccattttgctatcactgcacraaggacaagcagagaagccagcacaaaccttgctggaaaacacaaaaagamagggcagagtccacagacaagctagagggaaaatctatggtgttccaaagaaatgcccaaatacaaaaaaccattattcttttaactttagttgggcaaactgtaatatattggaaacattgaccaactcttaagcgctgctcgactaacaactgtgaaatgaaaaaaacaactaactctttataaaatgattaaggtcattctttgctggaatagtagatgccaaagaaaagcagtcagaaagggtga

SEQ ID NO: 78867 - DNA, 600 bp, Chicken  19866894369156_2
tagtatccaacggtgccctccctttccccaaactgagacatagtacctgcagatgtttttctaaacaccttgcttaaagtattttctgttgcatagtccagttgcgctggtttagagctctggtacatccctatgaaatctgcctctcagttttgtgggcttttaatttgtcagcagatgccggatgaggcaaaaaagactgcaaccagtttccccactgatgggaaaccattttgctatcactgcacraaggacaagcagagaagccagcacaaaccttgctggaaaacacaaaaagamagggcagagtccacagacaagctagagggaaaatctatggtgttccaaagaaatgcccaaatacaaaaaaccattattcttttaactttagttgggcaaactgtaatatattggaaacattgaccaactcttaagcgctgctcgactaacaactgtgaaatgaaaaaaacaactaactctttataaaatgattaaggtcattctttgctggaatagtagatgccaaagaaaagcagtcagaaagggtgacttccagaaacactagcaaaaagatatcatatttagaagctggtctctgtt

SEQ ID NO: 78868 - DNA, 600 bp, Chicken  19866894369164_1
agtttaagatactttcaatctgtgttgttcaatcaggaatgagaaacttagtaagtgtcacaattttaataactgaattctttttgcctgcatatacagccttaacccttaagtgccaccaaaagatctcttacagaaaatgcaatgggaaaacaattactaataatttaatagaggaaactgcatgatgtgaaagagtaactaactgtaagcaaaacagcttcatgatagaacaaagaaaacctgaaaggatcacacaaaaagcaacactgagaagtggtacaaaggaacaatgactayacaaacaaccacaacaaattaatactcaatcattttacaaagaaagtctgtccttacttttccactgaaaggtattatttatagcttaagttaagattttagttttggttcaattctacagtttctgaagagaagagtaaatctgaacaaaagttctgctcagaatacagcagttaatcactaaacattttttccagaaggctacagaagacctgcaagtgatcaagaatggctaattataattaatggttagttataccaactcattcccataaaatgcaaaaacagctccataattta

SEQ ID NO: 78869 - DNA, 599 bp, Chicken  19866894369166_1
  misc_feature (1)..(26): n is any nucleotide
nnnnnnnnnnnnnnnnnnnnnnnnnnatctgaataggtttgcaagcaagatgttaccctgtctgcccaggaggggcatttcaaaggtgtcttcgtattgaaggctaaccaacactatgcaagaacagggaagatgcattgtggccccttgactgtattagtagtgcaagaaaaggggatgcttgcccggcatttgttagatctacatgttctctgactcactgatccaatgacaaactcttcactggctcttgctgagctgggtttctgctggagcagtgagctagtccaactggtggcytgctggattgaacacaggaaatggcaaaagttatatttgaggcaggtggattcatagcaaatggacctactcttcwcattatctgctatcagtagtaacgggctaagcataaccaaacgctactctcagcctcatacatcctgtgcagtctcaagggttccaaaagtctttgcgatacatcagcaaggagttagggcccagagataagccagttacaggagattccaaaagagactcactgagtcagcatggcaggtgctgatccaagcacagaagagcagaggaaaaaacctcagacc

SEQ ID NO: 78870 - DNA, 600 bp, Chicken  19866894369166_2
atttcaaaggtgtcttcgtattgaaggctaaccaacactatgcaagaacagggaagatgcattgtggccccttgactgtattagtagtgcaagaaaaggggatgcttgcccggcatttgttagatctacatgttctctgactcactgatccaatgacaaactcttcactggctcttgctgagctgggtttctgctggagcagtgagctagtccaactggtggcytgctggattgaacacaggaaatggcaaaagttatatttgaggcaggtggattcatagcaaatggacctactcttcwcattatctgctatcagtagtaacgggctaagcataaccaaacgctactctcagcctcatacatcctgtgcagtctcaagggttccaaaagtctttgcgatacatcagcaaggagttagggcccagagataagccagttacaggagattccaaaagagactcactgagtcagcatggcaggtgctgatccaagcacagaagagcagaggaaaaaacctcagacctcggggtcactcaactcttctaccatcagccggtgctgagacatgtcctgtctgagcaacttcgtttgcacttgaga

SEQ ID NO: 78871 - DNA, 600 bp, Chicken  19866894369166_3
gtagtaacgggctaagcataaccaaacgctactctcagcctcatacatcctgtgcagtctcaagggttccaaaagtctttgcgatacatcagcaaggagttagggcccagagataagccagttacaggagattccaaaagagactcactgagtcagcatggcaggtgctgatccaagcacagaagagcagaggaaaaaacctcagacctcggggtcactcaactcttctaccatcagccggtgctgagacatgtcctgtctgagcaacttcgtttgcacttgagaatcttttggaacgtractctgttatagtggcataggacacagmagcatttttttgagggactgaccaggaatttaaaataaataartaaataaakaaagtacaaccccaaaggaaaacacataaatgttctgcagtctggctggtgcagtagcagcaaccagtgagatctgcccatgtgctgactggggacagatatccaaggggcatagggatgggtagctgatatgagagtgtactgagacccagagaagatggtgtttgtgcagcgagcaaactgccctttcagatatttctggagccactgatgcagttag

SEQ ID NO: 78872 - DNA, 600 bp, Chicken  19866894369166_4
ctactctcagcctcatacatcctgtgcagtctcaagggttccaaaagtctttgcgatacatcagcaaggagttagggcccagagataagccagttacaggagattccaaaagagactcactgagtcagcatggcaggtgctgatccaagcacagaagagcagaggaaaaaacctcagacctcggggtcactcaactcttctaccatcagccggtgctgagacatgtcctgtctgagcaacttcgtttgcacttgagaatcttttggaacgtractctgttatagtggcataggacacagmagcatttttttgagggactgaccaggaatttaaaataaataartaaataaakaaagtacaaccccaaaggaaaacacataaatgttctgcagtctggctggtgcagtagcagcaaccagtgagatctgcccatgtgctgactggggacagatatccaaggggcatagggatgggtagctgatatgagagtgtactgagacccagagaagatggtgtttgtgcagcgagcaaactgccctttcagatatttctggagccactgatgcagttaggcaaattctcctctgctgaatcacattt

SEQ ID NO: 78873 - DNA, 600 bp, Chicken  19866894369166_5
aaagtctttgcgatacatcagcaaggagttagggcccagagataagccagttacaggagattccaaaagagactcactgagtcagcatggcaggtgctgatccaagcacagaagagcagaggaaaaaacctcagacctcggggtcactcaactcttctaccatcagccggtgctgagacatgtcctgtctgagcaacttcgtttgcacttgagaatcttttggaacgtractctgttatagtggcataggacacagmagcatttttttgagggactgaccaggaatttaaaataaataartaaataaakaaagtacaaccccaaaggaaaacacataaatgttctgcagtctggctggtgcagtagcagcaaccagtgagatctgcccatgtgctgactggggacagatatccaaggggcatagggatgggtagctgatatgagagtgtactgagacccagagaagatggtgtttgtgcagcgagcaaactgccctttcagatatttctggagccactgatgcagttaggcaaattctcctctgctgaatcacatttaaatgtttcgctctacattctgtgatcatcgctgttatcatta

SEQ ID NO: 78874 - DNA, 600 bp, Chicken  19866894369166_6
gcgatacatcagcaaggagttagggcccagagataagccagttacaggagattccaaaagagactcactgagtcagcatggcaggtgctgatccaagcacagaagagcagaggaaaaaacctcagacctcggggtcactcaactcttctaccatcagccggtgctgagacatgtcctgtctgagcaacttcgtttgcacttgagaatcttttggaacgtractctgttatagtggcataggacacagmagcatttttttgagggactgaccaggaatttaaaataaataartaaataaakaaagtacaaccccaaaggaaaacacataaatgttctgcagtctggctggtgcagtagcagcaaccagtgagatctgcccatgtgctgactggggacagatatccaaggggcatagggatgggtagctgatatgagagtgtactgagacccagagaagatggtgtttgtgcagcgagcaaactgccctttcagatatttctggagccactgatgcagttaggcaaattctcctctgctgaatcacatttaaatgtttcgctctacattctgtgatcatcgctgttatcattagcaagcaaa

SEQ ID NO: 78875 - DNA, 545 bp, Chicken  19866894369179_1
gtacaacttcttattccttctaccattagtatatattctacttgggacccatggggtaagactttgaatgaccctcataagatggcgtgctatgagttgaccagtagacagtactagttgcaatggaatgatgtctagtgacacttgttcatgaattccaaaaagacttagttcagaagtagatttttcagagatcagagcactgcacttgtgcttgcaatcacatctgcaatctctccaaattattcttgacatagtctatcagaggactataattccctgggactgtacaaactcctycttttcctccaacaggcatgtctcgcagtgctgcggaaatggaacagggcaaggttgatctctccagtttctcctctccatactccacgagggaggtgtcactgaaagcagaagatttcaacaaactccagaagctgactacttacaacatcatgaacaatgagaacgtgattcttcaggccttgcgcatggctgggctcggaagaagcaggctctgagccagcctgtatcacaggcacaggcca

SEQ ID NO: 78876 - DNA, 600 bp, Chicken  19866894369182_1
ttgaccagcctggtgttccattgtgccttatttctaacttattctttctgaggacctctaattgtggcttacatcattccagccagttgttcaaattcatcatcagataaaagcaatcactttgttcagtgcattgagcacacactgggttctgagaatggtgaaacagtggatttcattcatgagctccatcaacagagctccgtcaggtgaaagcaaaggccagcagtcactgtaggaaatgcttcttgttgttgctctgaatttcatataattctttcagagattccacgactctaytttytgcatctctgacttggatatcaacagcaataagggcagtcagatcatctaccccaaatagcatagtattttatatagggcaggcttttgttgtcagtggaaaccactgcacagtggatttatgagactgtaaacaagctttctatccagaaatgagaacactgtgggagctgtggtgttgaaatgagagcaaacaatctattcttcaaaagtctgatgtgaaagatccatgcatttaaactgcacttaatgatgaaaggctgaatcagtccttcagcccaagtcctggcatttggg

SEQ ID NO: 78877 - DNA, 600 bp, Chicken  19866894369182_2
ccagcctggtgttccattgtgccttatttctaacttattctttctgaggacctctaattgtggcttacatcattccagccagttgttcaaattcatcatcagataaaagcaatcactttgttcagtgcattgagcacacactgggttctgagaatggtgaaacagtggatttcattcatgagctccatcaacagagctccgtcaggtgaaagcaaaggccagcagtcactgtaggaaatgcttcttgttgttgctctgaatttcatataattctttcagagattccacgactctaytttytgcatctctgacttggatatcaacagcaataagggcagtcagatcatctaccccaaatagcatagtattttatatagggcaggcttttgttgtcagtggaaaccactgcacagtggatttatgagactgtaaacaagctttctatccagaaatgagaacactgtgggagctgtggtgttgaaatgagagcaaacaatctattcttcaaaagtctgatgtgaaagatccatgcatttaaactgcacttaatgatgaaaggctgaatcagtccttcagcccaagtcctggcatttgggatct

SEQ ID NO: 78878 - DNA, 599 bp, Chicken  19866894369183_1
  misc_feature (1)..(37): n is any nucleotide
nnnnnnnnnnnnnnnnnnnnnnnnnnnnnnnnnnnnntattgcttggcagaaagacaaagactctctggaaagtaaacttattcttttaatttacagctagcctaaggaatcagtacagaatccaacagacccagcacagatatggattgtgtgatggattctgcgaataaaatgttcaatgagtgacatcttggaaacacacttacatgaattaatatttaatatgttatggacaacaaagtattcagcacttttacaacctgatccaacttcttatgaagacaaaagaaatattcccstttacttgtgtgagtgctggaccagatcaatgctgagaaaataacccatatgtttccaattccatggatctcaygatggcaaagagcagccacaatctgcctaaggaagcactaagggtctcacaagacagcgattgcactgcctgctctgataagccctgatttgcaccattctgggagcagagtctggcccacccttgagtccatgccttcttaaccccttagcacatggcagtatgtaaatcctgcagaaaagctgctgaccttgcacatgcagtaactcctaaagtaaactctac

SEQ ID NO: 78879 - DNA, 600 bp, Chicken  19866894369183_2
aaacttattcttttaatttacagctagcctaaggaatcagtacagaatccaacagacccagcacagatatggattgtgtgatggattctgcgaataaaatgttcaatgagtgacatcttggaaacacacttacatgaattaatatttaatatgttatggacaacaaagtattcagcacttttacaacctgatccaacttcttatgaagacaaaagaaatattcccstttacttgtgtgagtgctggaccagatcaatgctgagaaaataacccatatgtttccaattccatggatctcaygatggcaaagagcagccacaatctgcctaaggaagcactaagggtctcacaagacagcgattgcactgcctgctctgataagccctgatttgcaccattctgggagcagagtctggcccacccttgagtccatgccttcttaaccccttagcacatggcagtatgtaaatcctgcagaaaagctgctgaccttgcacatgcagtaactcctaaagtaaactctacagctgccaaaaagcatatgagaagtcagaaataacttacaatatggcaggtgttacagtgcaataagggcacatc

SEQ ID NO: 78880 - DNA, 564 bp, Chicken  19866894369185_1
gcaccaacaccaacaaagaggtaggcgtaccctgcagcatttatcgtttgcttctcagagaggtgaaaaacacagagcatgggttttgtatcaccagagctcttctaatgtgttttgaataacacttctacttcaaagtgtgtatacagcgtccattaaaagaggaacagtttgcaatgctgctttttttttttcctctacggagtgattttcttctgttgaaatagatgccattacatgagtgtgactgaagcaatacccaaacattgctaaagaaatttttcttgttattaaatagarcattgctttcaaagctgttctgagaaggactggtcttgtatcataggctgcactgctcacaaagcagagtgattctgctggagacattccacgtaattaagtttactttatttcctttgttaacacacattctctgcaccaacccaagctcttttgagttatccatatcgacggaaagcatttaggtagagttaaataaacttatctctatgtatgtaaattattgcatgaatgctcacttgtaaacatgcaaaaacgttgaat

SEQ ID NO: 78881 - DNA, 600 bp, Chicken  19866894369189_1
ttgcacccaccaagtgagagacattccttagttctggagtagggactgtatgggtaagcaggacatgcatagctcaaaaccatgttactttttatagaataccttggctaacttgaatagttattcaggttttgttttcctttattaaagtcttaatccagaataaagtcaggattatgcatttatatctatgattttaaaaataagcatctgacaattttgcatagtaggttatgctttctgctccatattctggttttaaaaaaaggctgaaatccgaagctgtgagtgccattttgrtagaattttagcaagtacagtcgttaccaaattaaaaatagatacaggtgggtagtctgtgtttttagctcctttaaaaaaacacaaagcaaaataaaccaacccaaagtacccgtactgtcccactaactgtgtacgagcagcagcagtktatcacactgttccacttaaaattatggcagaccagcagtgttgttaccagccaaggggtagatgtacttttatcaccagtgtgttggaaatgtttaattccctcactgcaacgtctttgtctcaagttcttaatttcttgagagcctc

SEQ ID NO: 78882 - DNA, 474 bp, Chicken  19866894369189_2
cttaatccagaataaagtcaggattatgcatttatatctatgattttaaaaataagcatctgacaattttgcatagtaggttatgctttctgctccatattctggttttaaaaaaaggctgaaatccgaagctgtgagtgccattttgrtagaattttagcaagtacagtcgttaccaaattaaaaatagatacaggtgggtagtctgtgtttttagctcctttaaaaaaacacaaagcaaaataaaccaacccaaagtacccgtactgtcccactaactgtgtacgagcagcagcagtktatcacactgttccacttaaaattatggcagaccagcagtgttgttaccagccaaggggtagatgtacttttatcaccagtgtgttggaaatgtttaattccctcactgcaacgtctttgtctcaagttcttaatttcttgagagcctcatttcaatcaaatcactgaaatata

SEQ ID NO: 78883 - DNA, 600 bp, Chicken  19866894369191_1
actccttgcagtgagcagggacacccacagccccagcagtgctcagagttcagcctggctgtgggtgtgtgcagggatggggcaccgccacctctccgggcaccctgtgggcctcgctgcccttagcataaacaactttttccttatatatagcctgaatctcccctcttttagtttgaaaccatttccccttgttccatcacaacagatcctgctatggagtctattcccttctttcttacagcccccctttaggtaccgaaaggctactctcaagtctttcagaaaggatgctgtgcygtgcrggcatcagctgttttccagaagctttgggtgatgcctgtacatctttggtccctggctgcagggcacgatgcaggtcccgctggtggggccagatccctgtcctggcagctgtgcagagcccaagcccagacgcagtgcccctgwggcacagagcgttgcaaatggagtaggaagcaaaggtccccggtgcgtgcagctgggcagcagcgtgtgcctgcaggtggcagcatgggcacgcgcaggagctgaggagcgccgtgcttctggttttgcaccgatttaaatttacagggc

SEQ ID NO: 78884 - DNA, 600 bp, Chicken  19866894369191_2
ttgcagtgagcagggacacccacagccccagcagtgctcagagttcagcctggctgtgggtgtgtgcagggatggggcaccgccacctctccgggcaccctgtgggcctcgctgcccttagcataaacaactttttccttatatatagcctgaatctcccctcttttagtttgaaaccatttccccttgttccatcacaacagatcctgctatggagtctattcccttctttcttacagcccccctttaggtaccgaaaggctactctcaagtctttcagaaaggatgctgtgcygtgcrggcatcagctgttttccagaagctttgggtgatgcctgtacatctttggtccctggctgcagggcacgatgcaggtcccgctggtggggccagatccctgtcctggcagctgtgcagagcccaagcccagacgcagtgcccctgwggcacagagcgttgcaaatggagtaggaagcaaaggtccccggtgcgtgcagctgggcagcagcgtgtgcctgcaggtggcagcatgggcacgcgcaggagctgaggagcgccgtgcttctggttttgcaccgatttaaatttacagggcttggc

SEQ ID NO: 78885 - DNA, 600 bp, Chicken  19866894369191_3
tagcctgaatctcccctcttttagtttgaaaccatttccccttgttccatcacaacagatcctgctatggagtctattcccttctttcttacagcccccctttaggtaccgaaaggctactctcaagtctttcagaaaggatgctgtgcygtgcrggcatcagctgttttccagaagctttgggtgatgcctgtacatctttggtccctggctgcagggcacgatgcaggtcccgctggtggggccagatccctgtcctggcagctgtgcagagcccaagcccagacgcagtgcccctgwggcacagagcgttgcaaatggagtaggaagcaaaggtccccggtgcgtgcagctgggcagcagcgtgtgcctgcaggtggcagcatgggcacgcgcaggagctgaggagcgccgtgcttctggttttgcaccgatttaaatttacagggcttggcaacgtgtttttttttttctctgcctgctttctcagcttctttttctttgtaatgatatttttttttccctccaactgggagaacgaagctttttgattaaacagcacgtgttgtttaacctgaagggcttcgatcagcgggcaac

SEQ ID NO: 78886 - DNA, 600 bp, Chicken  19866894369201_1
catcacttcattacattagctgaaaaagcagatggtaatacccctcaagagatcaattgggctcttgttgaaaaagacttaaaatagcagaaaagagatcaacattaagaaattgtatgcactaaaatctaacttctagtggtatatgattactattcttcactagacttagataatttgcattgtcaaatgcttttaatgtcaaccagtatcacttcaagaattgataattagttagctaacactacaaaaggaacataaactgaacatataatatgtacttttctaagtaaaataagragaataattcttctccattgcttcaacatcctaatgccaatgagagaataggctctgaaagacgatctaaaacagggtaaacagaagacattcatcagaagtaatcttctcattttaaattctaacttccacaagaggttgaatttttttctgagacgttcagttctacccacactctccacctgaactctgtcctgaacaggttcaacagattgttttttacaaagatccatgcagattacctcaagaccaattttaaaaaagtttaaacatcaagaatttaggcttactgtgttttta

SEQ ID NO: 78887 - DNA, 371 bp, Chicken  19866894369201_2
agtaatcttctcattttaaattctaacttccacaagaggttgaatttttttctgagacgttcagttctacccacactctccacctgaactctgtcctgaacaggttcaacagattgttttttacaaagatccatgcagattacctcaagaccaattttaaaaaagtttaaacatcaagaatttaggcttactgtgtttttagacttcttgtttcgccataataagtttttcattagatcctactgtttttgtacttattgcatttacaaagcctactaaatgcagcttagttttccttgmtctaaacagtctgcttagcctatttcagaaataatgatttgctagatctgtagtgaagaataaactaaatt

SEQ ID NO: 78888 - DNA, 600 bp, Chicken  19866894369207_1
gcatggaaagcattaaccaaagtgcatttcagcatgccacaaggcagtagggagagtgcctgaaaacccaggtggttgtcttgaaattgcaatgttatctcttgtgttttttcactgatgtcttcagtgtgtattgcttacatcgagccagtcactgcattattctctgacatctgtgggtcattttgttcttgtttttctataatctttccctattcataagtcttccacatgtttatgggttagcagatagcctctggcagagccatagattccagaaaggagttcttctccaggctytgtttgatgtccaatgccactgaccttcaacagctttgctcctgggataatttcactgaagtttagcaaggcttgaagcacagccttagcacataagagtaaggaactgcttcttctccatccccttggactggtttcaaagcactgaactgtaggcagtcttcagtgcgttcaactggaaaagtcaccaatgagtcataacatccaccaacatactgatgttcaaggacatgttgaggtaggataacactgcactgatgtcctcttacttgcatagaactgaaagctggattgccctat

SEQ ID NO: 78889 - DNA, 600 bp, Chicken  19866894369220_1
agagctttaaaactcaaatcaaggatcttggtgtgagcaaaagactccaaaggccaagcaaaagctgccagctagtggctactaagtgcaggtttgctttctggctctataaacagctctggaaattctagaacagactcatttttatagattgaaaacttcctttcaaaattcttatttttgtctgctttttttttttttttttttaggacacacttttccatcatgcaaaattctcaaagttctctccagtcctaaaatgaggcatctcggctggacagaagataacaagattgtctyacttcgatggacacttatcatttgagggaaatgatttcaggtgtgctccttgggaaacattggcctggttaaagcctctccctccttgaattttttataagatgttttccagtcagtacgtctcccctgtacagcataacccagccactgcctctttctccagacaactgcatttatctgcttccctttttctatggtctccctctcctctcatcagcaccatttcctcagagcacttacacatatgcacaagcgaaagcgcatcaaagttaaagcatgtgttttaagtgccatgacttg

SEQ ID NO: 78890 - DNA, 599 bp, Chicken  19866894369223_1
  misc_feature (1)..(20): n is any nucleotide
nnnnnnnnnnnnnnnnnnnnaatgtattattttattctctagagcattttagatgctctaatgaatcccatttggcctcatggatgctattgccttaccaggataacatcctttagaattgttccatactcaccaagcctccagagatagcacagagcatctaatatgtcagtagggtcctttgacagtagtctcctctgtgagagaagatgactgatgtaaattatgccatgagcaagagacctcaaggctaagttactactgggcagcacgctttctccctaagctccactcactttkggaaatgactcactttgtcaaaaagtcttgtctgaaattaattaggtgacttgaactccagaaatgtttatttccttcaattctccacaaggagagaggactaagacaagtgtagatgttgtgtattgtatatatctaaaattatatgagatgaattttcctccattgtacaaatattaactcccaggtcactcggtattttcactccatcacaaataatggtctagatgtaagaagtacagattgaaattctgtgaccaatgctaaaaaggtcagaccataaatcccgtttattctta

SEQ ID NO: 78891 - DNA, 600 bp, Chicken  19866894369223_2
aaagtcttgtctgaaattaattaggtgacttgaactccagaaatgtttatttccttcaattctccacaaggagagaggactaagacaagtgtagatgttgtgtattgtatatatctaaaattatatgagatgaattttcctccattgtacaaatattaactcccaggtcactcggtattttcactccatcacaaataatggtctagatgtaagaagtacagattgaaattctgtgaccaatgctaaaaaggtcagaccataaatcccgtttattcttataacctaatctttataagctayatctacyggtacagtattccaagaaacttcttgaactctgatagaatcaccattacacgataaagaagtaataaataatgaaaatagcacgcctgttgtgaaggtaatataatttatcaaaaccaaagaaaggaaaattttaccgggttattcattcaacagagaargcaacaactgcactttaatatggttatacctggtattttatctgtatattgtattttaagtctcactgtgaaaaacattcaagaaggtaaaatgaagaccatatttcagcaaaaagcaaaatgttctctgttt

SEQ ID NO: 78892 - DNA, 600 bp, Chicken  19866894369223_3
tgtctgaaattaattaggtgacttgaactccagaaatgtttatttccttcaattctccacaaggagagaggactaagacaagtgtagatgttgtgtattgtatatatctaaaattatatgagatgaattttcctccattgtacaaatattaactcccaggtcactcggtattttcactccatcacaaataatggtctagatgtaagaagtacagattgaaattctgtgaccaatgctaaaaaggtcagaccataaatcccgtttattcttataacctaatctttataagctayatctacyggtacagtattccaagaaacttcttgaactctgatagaatcaccattacacgataaagaagtaataaataatgaaaatagcacgcctgttgtgaaggtaatataatttatcaaaaccaaagaaaggaaaattttaccgggttattcattcaacagagaargcaacaactgcactttaatatggttatacctggtattttatctgtatattgtattttaagtctcactgtgaaaaacattcaagaaggtaaaatgaagaccatatttcagcaaaaagcaaaatgttctctgtttctaaaaa

SEQ ID NO: 78893 - DNA, 600 bp, Chicken  19866894369223_4
tcactcggtattttcactccatcacaaataatggtctagatgtaagaagtacagattgaaattctgtgaccaatgctaaaaaggtcagaccataaatcccgtttattcttataacctaatctttataagctayatctacyggtacagtattccaagaaacttcttgaactctgatagaatcaccattacacgataaagaagtaataaataatgaaaatagcacgcctgttgtgaaggtaatataatttatcaaaaccaaagaaaggaaaattttaccgggttattcattcaacagagaargcaacaactgcactttaatatggttatacctggtattttatctgtatattgtattttaagtctcactgtgaaaaacattcaagaaggtaaaatgaagaccatatttcagcaaaaagcaaaatgttctctgtttctaaaaattgaaaaattcatccacattaattggccatccacctagcaggaaataatttgaagtatttccaatttgtatgtttcagcttcatatttgctttgagggagggagaagaatatagaaaagaaagcaaaccattgtttctctgcagaaatttggtgtcagct

SEQ ID NO: 78894 - DNA, 600 bp, Chicken  19866894369224_1
ctcagtcaggacactgagaagaggccatagcaccaacagtggccaataccagtgttatcagcaaggatgccatagtgtaacaccattctaattaacattatctagatcatattcaaagcctgtaagatatggtctgacattttttttctccactgactcctcaaagccgaagtctttggtagaagagatcaccttgtcctacattttaagtgtaggtaggaaaactatttatttttcagtaaagttgcacacgtaggaaggaggatagaggagatttaatgactatttaaaaaaaacaawgtactacagttaagtaatgcagtcacattaaactcaggctacctaaaatggcagtgctccaacttcagccaggaaaataaaatgcctcagaaaaagcccagatactaaggctgctagctccacacaacatttcctttagttttgtttgcaacaaatacaatatgagcctcacaatcatctgactggagatgcctgcagtggttaagaagccttacactctaaattaccttgcttttgttaggcaggtgaaacatccatgatgttctttgagaagagaggtttttcccttcagaatttaat

SEQ ID NO: 78895 - DNA, 600 bp, Chicken  19866894369233_1
cactcacagctaaccacaacgctatctcccagtctacctgagccactatggcctgcttcctaccacattcattctaaccttttggaaagcttctgttagaaagcatctccaccttatggtagcagcaattccctgttccacaactgccagttagcacctccagccatctttagttctgctggatgcagccattaccctgatccttcacaccaacgcaacaccacacttaactgaatgtggaaaggggtgaggtgactgactctttctctgccttactagagaaagacaagcccaggatgmtgctggctgattgatatttggtggctctcattcaatgagatttagcagcaaggtgagaaatttagttgattcccaccgggctagtaatatgcccaggacaaatatagttttattccccactgtggctttttaagaataatgatatatcattttttagttttcaagacaagtaagaaagtggctgaaatgctgaggctttaaaatctgatttaaattcaataaataaatgagagtaaaagaccatgcatagaccatagagttaagcttaaaagctttgcattaaagcaatagcatagcatc

SEQ ID NO: 78896 - DNA, 600 bp, Chicken  19866894369233_2
agctgatcattcaaagatgacatttcatcatagacctctgcccttgctggcatccttggttcaacttcttgttgaaaaacagtagcttgtgctgtctctagagaagacctggatttacagtattttaacttcagtccctggataccacagagcatgaaattcatatcaaccaaaatggggcagagtataccacacaactgatatttgtacctggctttcatagagctgcctcccctccacccccactttttttcttcctcctgtacatctctaaaggtatctggaagaaatctgaattcyctcagctccggagtgcagtcagattcttcaacatttcaatgacctccagtggagacacaattaaattctcttgcaggaaagcagcctgttatgtcaggtagagacaatatgattgtaaagttgacacccaaattctaggctccttggttgccatgataactgactgataatgctgtcattttcccctgtataaatctaaggcttgctgctcaccttcatcagcactggtataatttttgtagtcttcatttcacttaggaaacagctttagcatttatcacatctttcactgtgcatggt

SEQ ID NO: 78897 - DNA, 600 bp, Chicken  19866894369240_1
caacatccaaactatccccagcttggtctgataaactcaccttcaacctcacccttctcctgaactctgcaggcctaaaaactgcctgactaagagtatgcttttcatgctttgggaataaaagcagcagttttgttcagaaaatacctatatatgtgttcactcaaaataatatataggttattgatgtcccctacaaaaatgcagtacatttgtaataaaagaagaattggacatatcaatctggaaactggccacgggactcatgaattttagagttgtgtgagtctacatcattcmagatcaacgacttaaagatgtttcttgccacagaaaaatacttcacaagtcctttttctttccttggacccctctgcctctgctgccctatgctcccgctgcttgctggcagcttctcccagtagacaacactcccctgctagggagttctctcccttctgtcctggtggtctctgccagacagcagccaggacagggcaggcagctatgtccttctcagatgcataactgtgsataacacagctcactgcatcctttcctttttacacartcatgagaaaagatggatgctcaagagcc

SEQ ID NO: 78898 - DNA, 547 bp, Chicken  19866894369240_2
catatcaatctggaaactggccacgggactcatgaattttagagttgtgtgagtctacatcattcmagatcaacgacttaaagatgtttcttgccacagaaaaatacttcacaagtcctttttctttccttggacccctctgcctctgctgccctatgctcccgctgcttgctggcagcttctcccagtagacaacactcccctgctagggagttctctcccttctgtcctggtggtctctgccagacagcagccaggacagggcaggcagctatgtccttctcagatgcataactgtgsataacacagctcactgcatcctttcctttttacacartcatgagaaaagatggatgctcaagagccacagggatacttcrtatatcttttattagataatatcaagtccagtcctctccttggccaagatttacacaaccatgactttattcccattcctccattctataaagaaattagcaaaagaaaggaagaaatcagattgttttctatttattcagaagttttttttttttttttttttctt

SEQ ID NO: 78899 - DNA, 510 bp, Chicken  19866894369240_3
tttagagttgtgtgagtctacatcattcmagatcaacgacttaaagatgtttcttgccacagaaaaatacttcacaagtcctttttctttccttggacccctctgcctctgctgccctatgctcccgctgcttgctggcagcttctcccagtagacaacactcccctgctagggagttctctcccttctgtcctggtggtctctgccagacagcagccaggacagggcaggcagctatgtccttctcagatgcataactgtgsataacacagctcactgcatcctttcctttttacacartcatgagaaaagatggatgctcaagagccacagggatacttcrtatatcttttattagataatatcaagtccagtcctctccttggccaagatttacacaaccatgactttattcccattcctccattctataaagaaattagcaaaagaaaggaagaaatcagattgttttctatttattcagaagttttttttttttttttttttctt

SEQ ID NO: 78900 - DNA, 467 bp, Chicken  19866894369240_4
aagatgtttcttgccacagaaaaatacttcacaagtcctttttctttccttggacccctctgcctctgctgccctatgctcccgctgcttgctggcagcttctcccagtagacaacactcccctgctagggagttctctcccttctgtcctggtggtctctgccagacagcagccaggacagggcaggcagctatgtccttctcagatgcataactgtgsataacacagctcactgcatcctttcctttttacacartcatgagaaaagatggatgctcaagagccacagggatacttcrtatatcttttattagataatatcaagtccagtcctctccttggccaagatttacacaaccatgactttattcccattcctccattctataaagaaattagcaaaagaaaggaagaaatcagattgttttctatttattcagaagttttttttttttttttttttctt

SEQ ID NO: 78901 - DNA, 600 bp, Chicken  19866894369247_1
taacttgcaataatttgactatatcagaactgaagtttctattctgttgagagaatagaaaatccctgaaaatgtttatgcttaattttgtacttttaaagtaaatctgatcttgctttgcttctagacaccttcagctttgtattaagatctcaccggtttatatagaatgatttacaacataaagaatacctgccttcatagtatcttaatgtttttattctaagttcttgcaacaaatatgtgtaggaagagaaatatttctgtttattctcttatttgttctaaactgttcataasggctggctaatcttctgagttttgtcttactttggtgtgagtgcttgtacttatttagtcaaaaatgtgcttgaaatcatctrtatgtaggaataccaatagaacttgttctgttaagtctctttcaaagtttgtttgcttatttattttcattttcagtagctagcctttcaggctactctctgataattatgagagctcagtagtgaaactgcctgttgtttcagggtacatttggatctgagagacagtatatgtcagcagtagaggcaagcaactactcagggcagcacagaggca

SEQ ID NO: 78902 - DNA, 600 bp, Chicken  19866894369247_2
aattttgtacttttaaagtaaatctgatcttgctttgcttctagacaccttcagctttgtattaagatctcaccggtttatatagaatgatttacaacataaagaatacctgccttcatagtatcttaatgtttttattctaagttcttgcaacaaatatgtgtaggaagagaaatatttctgtttattctcttatttgttctaaactgttcataasggctggctaatcttctgagttttgtcttactttggtgtgagtgcttgtacttatttagtcaaaaatgtgcttgaaatcatctrtatgtaggaataccaatagaacttgttctgttaagtctctttcaaagtttgtttgcttatttattttcattttcagtagctagcctttcaggctactctctgataattatgagagctcagtagtgaaactgcctgttgtttcagggtacatttggatctgagagacagtatatgtcagcagtagaggcaagcaactactcagggcagcacagaggcatacactgagataactccagtaagcagcaagcataaactccctaagcaagtgcaatacaaactccagtaagctaaaacagaatc

SEQ ID NO: 78903 - DNA, 599 bp, Chicken  19866894369250_1
  misc_feature (1)..(40): n is any nucleotide
nnnnnnnnnnnnnnnnnnnnnnnnnnnnnnnnnnnnnnnntcttttctattgtcttcctgcatatggaaagcaggctgaggcactgggaaagcagacagcagtaccttccctgagcaggctgccaagggctggcccaggtgatgtgctgcagtgttatgctcctatcctggcccttctactctccttccctcctgagtgtggtaaggcagtgtcagcatcagttatacattcaggattgtggaataaaaatgcagtgaaaaaaggagaggatcataaaatcactgaggttggaaaagacygctaaagtcatgtagtctaaccaccgtgaccatcaccaccatgcccgctaaccatgtcacttaaagccacgtctacatgtttcttgaacacctccagggatggtgactccaccacctccctgggcagcctgtgccactgcctcaccactctttttgaggaaaatttttcctaatatccaatctgaacatccccaattctgtgwccacttcccagtgcagtgcatggcaatcaagcctattcttgctttgcagacttctgcactggtaactctcctgcaatagccaacataagcataaat

SEQ ID NO: 78904 - DNA, 571 bp, Chicken  19866894369250_2
aaggcagtgtcagcatcagttatacattcaggattgtggaataaaaatgcagtgaaaaaaggagaggatcataaaatcactgaggttggaaaagacygctaaagtcatgtagtctaaccaccgtgaccatcaccaccatgcccgctaaccatgtcacttaaagccacgtctacatgtttcttgaacacctccagggatggtgactccaccacctccctgggcagcctgtgccactgcctcaccactctttttgaggaaaatttttcctaatatccaatctgaacatccccaattctgtgwccacttcccagtgcagtgcatggcaatcaagcctattcttgctttgcagacttctgcactggtaactctcctgcaatagccaacataagcataaatatctctgacagctctgaaagagagagaacatccttcttaggtaaccggaagcaacagcttaggtcatgaagtcttttcattttaaacrtcatcatttcatcaaggtgagatgtttgcttgcaggcaggatacttcagtacctcctgtaatttgtggttagaatattctccttaga

SEQ ID NO: 78905 - DNA, 387 bp, Chicken  19866894369250_3
acacctccagggatggtgactccaccacctccctgggcagcctgtgccactgcctcaccactctttttgaggaaaatttttcctaatatccaatctgaacatccccaattctgtgwccacttcccagtgcagtgcatggcaatcaagcctattcttgctttgcagacttctgcactggtaactctcctgcaatagccaacataagcataaatatctctgacagctctgaaagagagagaacatccttcttaggtaaccggaagcaacagcttaggtcatgaagtcttttcattttaaacrtcatcatttcatcaaggtgagatgtttgcttgcaggcaggatacttcagtacctcctgtaatttgtggttagaatattctccttaga

SEQ ID NO: 78906 - DNA, 600 bp, Chicken  19866894369253_1
attttggctagtttatgccctcaagtgtttggattgtacctggtgaagttggctgtagccatggtgcttgctggtggtgtgcagaggattgatgctactggaactcgaatcagaggttagtattgtctctgatagtgtcttgtgtactaacaattgctcccattgctgttttcacccatattcctccttcttcccaaattagtaaggtttcagaagcataataatcccatttctgtgactgagagctatattttattaatgctgaatattattccagaatctcagatatatcacagaatygtagggtcaccaaggttggagaagacctccaagatcatccagtccaactgtccacctatcacgaatagttcttactaaaccatgtcccctcaacacaacatctaaacattccttgaacatctccagggtcagtgattccaccacctccctgggcagtccattccatcaccttaccgttctttcagagaagcagcatttcctaacgtccagcctgaatctcccttggtgcaacttgagtgattccctctagtactgtcactagttacaggagagaagaggccgacccccagctcactacaa

SEQ ID NO: 78907 - DNA, 600 bp, Chicken  19866894369255_1
atttgctccataacgttctctggtaccgaggtaaggctgacaggcctgtagttccctggatcctccttacggcccttcttgtagatgggagtcacatcagcaaggctccagtcctctgggacctctcccagataaccaggagtgctgatagatggcagagagcggcccggcaatcaccccccgccagctccttcagcacccctgggtggaacccatccggtcccatggacttgtgacagtccagagggaggagaagctctctaactgtctccagctgaatcactgggcgtgtattctgcrtagcatcccacacttccagatcagggcataaagtaccctgaggataactgatctgactattaaaggcagatgtaaagaaagctgtgaggacctcagccttctccctatcctcagtggtcacattccccgctgcatcaagtacaggatggagattctccttggatcttctcttaccactggtgtatttgtaaaaggatttcttcttctcttttactgcagtggccaatctgagttcaagtcgggcttttgccttcctaacttccttccctgcatacctctgcaacttccatgtagtctccc

SEQ ID NO: 78908 - DNA, 600 bp, Chicken  19866894369255_2
tcctcagtggtcacattccccgctgcatcaagtacaggatggagattctccttggatcttctcttaccactggtgtatttgtaaaaggatttcttcttctcttttactgcagtggccaatctgagttcaagtcgggcttttgccttcctaacttccttccctgcatacctctgcaacttccatgtagtctccccaagtcgcctgtcccttcttccagaggacatgcactcgctttttcttctggagtctcaacagtagttcacggttcatccacaccggtcttcttcctctacggctcaycgtacagcattcagagacagcctgttcttgtgcctttaagatttccatcttgaggagcatccaggcttcctggacccctttacccttaaggagcgactcccaggggacccgtgctacaagcrtcctaaacaggtcgaagtccgccctcttgaagttcaagatggcagttttgctagtagtagtggacacagtagttcaggtggggcctcacaagagccaggtagagggggacaatcacctccctctccctgttggccactccttctttaatgcagcccagaacacagttggccttccggg

SEQ ID NO: 78909 - DNA, 600 bp, Chicken  19866894369255_3
gagttcaagtcgggcttttgccttcctaacttccttccctgcatacctctgcaacttccatgtagtctccccaagtcgcctgtcccttcttccagaggacatgcactcgctttttcttctggagtctcaacagtagttcacggttcatccacaccggtcttcttcctctacggctcaycgtacagcattcagagacagcctgttcttgtgcctttaagatttccatcttgaggagcatccaggcttcctggacccctttacccttaaggagcgactcccaggggacccgtgctacaagcrtcctaaacaggtcgaagtccgccctcttgaagttcaagatggcagttttgctagtagtagtggacacagtagttcaggtggggcctcacaagagccaggtagagggggacaatcacctccctctccctgttggccactccttctttaatgcagcccagaacacagttggccttccgggctgcaagcgcgcactactggctcgtgtccagcttcttgtccaccaggacccccaggtccttttctgcagggctgctctcaaggaaatcttcccctagcttgtataaatacctgggattgccc

SEQ ID NO: 78910 - DNA, 600 bp, Chicken  19866894369259_1
ttttaagtctgtttaaagtccattttttccaggctttggtagacactagagtgctgcactgaaatctctacagagagctgtagcgtccctgacacatcccaccagctcagactccattacactgagccagagacttgtactggctgtgtgcgtgatagcctagagcaggggaatgcttcttgagttgagcagggcttttaggggcctgatatgctacctctgccttttagtcaacataaagcaaggcaaatggtatgtgagaatttcccagtggcatattacactatcattcctgcatcrtttttcttagaggcttttcagattcagtatgacattctcttctatccccagtcttcttggaattcttcctttccacctaagtataggttagattgtgatataaacatctgtagcacttttcatacctttagcactgtccatcctctattttggggagaagtgtggtgccttttttttattaacttttgcattatgatgaatttattttaatcaaaagaatttttggaaatgttcactgaatgacctgaaacaaagtgactgaatttcaactgcgtagtatttaatctttatcaattcttt

SEQ ID NO: 78911 - DNA, 600 bp, Chicken  19866894369268_1
tcccagtgtgctttgcacaagagacctgtgctctgatggaaatggcacaattcggcttgagctctcgaaggtcatgcagtgctaaaggggaggatgagagtgcaaggactgggcaccagtggaagaaatggaaataatttttaaggatttgtagaatgtagatcaaattccaaacttgtgcatactctttctgatccctgggcacctccaagaacattttcagcattctcattcctgacatggaaactacaatcttagatggtttagagtctcttattgggcagaagtgacatgtgtgtrtctgccagagttaccattactgrcctctcttaccccctgagctgccttttgccaagttaacagagcacttgtggagctaccagggtttctttagcttgctaaggttccgtattttcagttggaatactctttttgtgttgtcattgctttgccaaaattgttttttaaagtgcttttaattacaatkactttctcatacaatatcactaattttactttcatcaaaagaaaggwacaggtgctgaaagtagcaagatgatattaatatgttttgattgaatatgttcatatgcttgcgaa

SEQ ID NO: 78912 - DNA, 600 bp, Chicken  19866894369268_2
acctgtgctctgatggaaatggcacaattcggcttgagctctcgaaggtcatgcagtgctaaaggggaggatgagagtgcaaggactgggcaccagtggaagaaatggaaataatttttaaggatttgtagaatgtagatcaaattccaaacttgtgcatactctttctgatccctgggcacctccaagaacattttcagcattctcattcctgacatggaaactacaatcttagatggtttagagtctcttattgggcagaagtgacatgtgtgtrtctgccagagttaccattactgrcctctcttaccccctgagctgccttttgccaagttaacagagcacttgtggagctaccagggtttctttagcttgctaaggttccgtattttcagttggaatactctttttgtgttgtcattgctttgccaaaattgttttttaaagtgcttttaattacaatkactttctcatacaatatcactaattttactttcatcaaaagaaaggwacaggtgctgaaagtagcaagatgatattaatatgttttgattgaatatgttcatatgcttgcgaattaaaaaggtgataggaagtgtt

SEQ ID NO: 78913 - DNA, 600 bp, Chicken  19866894369268_3
tttctgatccctgggcacctccaagaacattttcagcattctcattcctgacatggaaactacaatcttagatggtttagagtctcttattgggcagaagtgacatgtgtgtrtctgccagagttaccattactgrcctctcttaccccctgagctgccttttgccaagttaacagagcacttgtggagctaccagggtttctttagcttgctaaggttccgtattttcagttggaatactctttttgtgttgtcattgctttgccaaaattgttttttaaagtgcttttaattacaatkactttctcatacaatatcactaattttactttcatcaaaagaaaggwacaggtgctgaaagtagcaagatgatattaatatgttttgattgaatatgttcatatgcttgcgaattaaaaaggtgataggaagtgttctgtgaaagtctgtgtgtctcctgttgtgtttctagcacatggcattggtcttttctgggcatcaggaagaaatagttcactcagagctcattcttttcatatagtaaagcatttaatttgtttgaagttcctctcctagaggaatatattactgattcttatt

SEQ ID NO: 78914 - DNA, 600 bp, Chicken  19866894369268_4
ctgacatggaaactacaatcttagatggtttagagtctcttattgggcagaagtgacatgtgtgtrtctgccagagttaccattactgrcctctcttaccccctgagctgccttttgccaagttaacagagcacttgtggagctaccagggtttctttagcttgctaaggttccgtattttcagttggaatactctttttgtgttgtcattgctttgccaaaattgttttttaaagtgcttttaattacaatkactttctcatacaatatcactaattttactttcatcaaaagaaaggwacaggtgctgaaagtagcaagatgatattaatatgttttgattgaatatgttcatatgcttgcgaattaaaaaggtgataggaagtgttctgtgaaagtctgtgtgtctcctgttgtgtttctagcacatggcattggtcttttctgggcatcaggaagaaatagttcactcagagctcattcttttcatatagtaaagcatttaatttgtttgaagttcctctcctagaggaatatattactgattcttattagtgtgcccttaaaaaaaattagttatacatacagatatttttttaa

SEQ ID NO: 78915 - DNA, 600 bp, Chicken  19866894369276_1
attaagagaatgggattgtgattgttgagaggctgaactacatcagcctttaccaagaaatgccagcattttaaaaccaagtgttaccttttgagaaatcctgctatgctacatgcctctaaccatgggtacgtctcaaggcagcctggcaggctggagtggaagaggaatgctctgacaatagctttaaaacacagctactgagcttcaagagcctgaaagtagctctacagttatccggggtaaaagggccatcggtggacatctcttgttaactttatgggagaagaaagcaaagtrgcaggatcaacacagagcaaactgccaggcagaggcagaaattgttagtttatcagtatatgtatgattctaaaaacacatataaatactgttccagatgtgctactgatcacagaattacacagttaaagcagctgctcaatttgcaaactgcataggtaaatgcaagaagttaatttaccctaatgtcagaacaccccagctgagaggattaccttaattctactgcaggaacctgccatttgaaacttcatgtcagattttcatattctctttgtatattgatttttttcctttcca

SEQ ID NO: 78916 - DNA, 600 bp, Chicken  19866894369283_1
tatccctcccacaccctgaccctgaggctctggtaaaactaattcagagcttacacacaaaaacatattgtgaacagctcagctggaaacacagccactgaaacccaagcttttgtttgtttttctcctctgaatgcttacaaatgactaaaggtaccatcaatacgttcatcccacactcgacattggattatctagacccttcataaaataacatcattcacccttctgcaggctttgttgcctcttcgtcattcctttttaattatgtaccctttgcacaacatccatggtaagccyagtgccaagtgggtagccctgacgtttactgccttatttttagactatgggcatattttgtgcctcagtaagaagtctgttagtggtttcaaggggaatgctgtcaccgcctacagcctgtttagcagataagtcaaaggattggtaacacagtcctagaggcattttcatgtgttcagttgtggaacaaataactaagttactttctccacaacttttctggaagcctaggaagctgcccaatctttagagctcttcagacaattaattttcaagttcaactaatacatctttaaacac

SEQ ID NO: 78917 - DNA, 600 bp, Chicken  19866894369291_1
ctgaaaacagaaagacagaaggcagcagaaagccttctcattcagactgtagctttataaattgctgcagcatgcatgcaactaataaatcagcaagagacatcactatcaggagggcagttgaaatttctctagagttctgaaacggaattcttcccttccccagtcggtctagggcaacaaaaactcttaatgctgaggcaaactgcagtgcaaggctaatgccccactcacatctcgtcctcccttgctgagttatctcctgctctgtattgatacaaaactgaagttttatgaacrttcaattgattttttcatattttatgaaatatcgttcccattttaaatattattaggctgaactctttttcacttctgacctttcacagatattgtgccttgcaytgattttttagctctttgatactggctgagctacagtagttccagcagataggaaagggcgagtgagaaaatgccattgcatttaagaactttaaaaaatgatttaagtttgattaccaacaattcaactttcctatctccccctctggatcagcatgggaggccttcagaaatgagtcactaagcaaatgcttt

SEQ ID NO: 78918 - DNA, 600 bp, Chicken  19866894369291_2
ctatcaggagggcagttgaaatttctctagagttctgaaacggaattcttcccttccccagtcggtctagggcaacaaaaactcttaatgctgaggcaaactgcagtgcaaggctaatgccccactcacatctcgtcctcccttgctgagttatctcctgctctgtattgatacaaaactgaagttttatgaacrttcaattgattttttcatattttatgaaatatcgttcccattttaaatattattaggctgaactctttttcacttctgacctttcacagatattgtgccttgcaytgattttttagctctttgatactggctgagctacagtagttccagcagataggaaagggcgagtgagaaaatgccattgcatttaagaactttaaaaaatgatttaagtttgattaccaacaattcaactttcctatctccccctctggatcagcatgggaggccttcagaaatgagtcactaagcaaatgctttttctcatgttcatcccagattgagtagtactaacattgcttccaacctcctttgtcaatcacttccagcattaaaaacatgtattaaaataattacctgagctaa

SEQ ID NO: 78919 - DNA, 600 bp, Chicken  19866894369292_1
acgcagcattaatgtgctcagcagtgtgatgagtgggaaatttgttttcagctgaaggagctgattaatgcagcgcctggcaaacgtaatttcagcgtgtgggactgattactttcaacatgttggattgatttagggatcctccagtgatggagcccgtctgtgtgtgttggtaagcgggtttttgccgatacggatgatgagtctctgctcccatctcccacctgtgcagccccacacagccgtcccggccggcgtgagcagccccgttgcatggagctgtggtgtgcctctggtgcygaggctttcatctcacagtcagaacagctttctttcagggaggagggattaatttttcacacatctgtccgcactgagctctggattgcaataatagatgctttgttcaggctctttctgtggagagccttctccacccttgttatttcattctccttttgcatggcaaaactttttgtcctgcatttcagatagatgctgagagtccctggcagctgaacaagagaaacaaacttcacagccctgttctttatgctgctttygggagatgcgtggtgatttgaagggtattagattggt

SEQ ID NO: 78920 - DNA, 598 bp, Chicken  19866894369292_2
gccccgttgcatggagctgtggtgtgcctctggtgcygaggctttcatctcacagtcagaacagctttctttcagggaggagggattaatttttcacacatctgtccgcactgagctctggattgcaataatagatgctttgttcaggctctttctgtggagagccttctccacccttgttatttcattctccttttgcatggcaaaactttttgtcctgcatttcagatagatgctgagagtccctggcagctgaacaagagaaacaaacttcacagccctgttctttatgctgctttygggagatgcgtggtgatttgaagggtattagattggttttggcagaggcatttgattccctgggaaatccacagctcctctgattccctacggatggtttagagcccccaagtgacaggtttgctggtgggaagctggtcctgagcatggcatgggggtgtggtgggctgctaggatgaggtagcaggacgtgctctgtggcgggggggggaggctgtgagcactgctctgtcccacgcgctcccagctcagcattcagcctgagcaggctctgcacaaaaacagccccagagcaatg

SEQ ID NO: 78921 - DNA, 600 bp, Chicken  19866894369301_1
acgggactggggctgtggttctgcaaagcagagctaaactgggagtggcagagcatgggaggcaaactaatatttccaggtatagcatcagcagttggtaaatacatcacaccaaacccaaggccacttctgtctgctttctagctactatttgaatagtgtttaccaaaaaattaatttctgttaatttacaatgaaaagtattgtatgaccttttaatattaaatcgcacaacaggggcaattaactatcacaacaatctacaaatgctgaatttagagctgaacacagtatgcgtgytttacaataaaacgtgagttgcactgcacaatgagataataggtgactttcccaggatttccagctgagaaggtttccacctcattagcacagcacaatatctgagcacctgttcgatactgggaagttttcagtttctttcagggtagtatcagtagctggcattgattaaactctcctacacattcttatttaaattgtgggattagactgaagcatcaggtagaacccagctacattcatcttaaaaaagatcaaaactgacaaccacccattccaggcccaagttatttgctgaag

SEQ ID NO: 78922 - DNA, 600 bp, Chicken  19866894369303_1
gcatcttgatcataagcctccctcaaataataagagtgcctttgccaatggggctgtgtcctgctgtgagtcttgctgcttgaacctgttctacattatatgaacaactctgcatttcttcagacacaagcactggaagtctgttcacaaagtcactgtggatggaacagggagaaggaagagattttatccatacagatgtaacatgtgatataacttgagccatggctagagaacaggccttggtacattttaatagttatgacaagtagcactgtaaagagtactttccctaatttyagtgcaatgcaatgatagcgtgttacaaatagataaaaaccaggcaaccgactaggaaaatttaattggatcttccaaaattaacaaatggaactggaaaagcagttgttagcttgagttaaatagtagacttcaagagagaacacataatggaaagaggtgtggggaaaggattggctaagatgacctgcagtctggttttaaacaaactactcattttttctgtcacacttctggcatgtcacgtatcctccctggaaaagcaggaaaggagggtcagaagaccactttcagctgaac

SEQ ID NO: 78923 - DNA, 599 bp, Chicken  19866894369311_1
  misc_feature (1)..(179): n is any nucleotide
nnnnnnnnnnnnnnnnnnnnnnnnnnnnnnnnnnnnnnnnnnnnnnnnnnnnnnnnnnnnnnnnnnnnnnnnnnnnnnnnnnnnnnnnnnnnnnnnnnnnnnnnnnnnnnnnnnnnnnnnnnnnnnnnnnnnnnnnnnnnnnnnnnnnnnnnnnnnnnnnnnnnnnnnnnnnnnnnnnnaagggccctaggaggactgaggacagacttggtttcatggaagggaggactgactcagccttgattcttcagcctggggcatgtatgagtggactgagggaatgttgtgatggtagcctaygggtttgtaagttagcatagctgaacaggaaattattatttgcaatctcttacaccaagaggataccaaatggaatagcctaaargctggtttggaaaaataaagggaaaactcattgcatcgtatattcataaaaatctgcctaggttattaaatataatcctagtatttctgacttgaaattacagattggagaaatttctgttctgacttcatagacttgttattggccactgtcagagacaaggtgattcctggcaagatagactttccatctacgtcagtacagacattaagta

SEQ ID NO: 78924 - DNA, 599 bp, Chicken  19866894369311_2
  misc_feature (1)..(94): n is any nucleotide
nnnnnnnnnnnnnnnnnnnnnnnnnnnnnnnnnnnnnnnnnnnnnnnnnnnnnnnnnnnnnnnnnnnnnnnnnnnnnnnnnnnnnnnnnnnnnnaagggccctaggaggactgaggacagacttggtttcatggaagggaggactgactcagccttgattcttcagcctggggcatgtatgagtggactgagggaatgttgtgatggtagcctaygggtttgtaagttagcatagctgaacaggaaattattatttgcaatctcttacaccaagaggataccaaatggaatagcctaaargctggtttggaaaaataaagggaaaactcattgcatcgtatattcataaaaatctgcctaggttattaaatataatcctagtatttctgacttgaaattacagattggagaaatttctgttctgacttcatagacttgttattggccactgtcagagacaaggtgattcctggcaagatagactttccatctacgtcagtacagacattaagtatctgtgatatgttccatcacttccggatcggtctgtctggtgtctctcacctttacaactcatctttttaattcatcaacagagt

SEQ ID NO: 78925 - DNA, 600 bp, Chicken  19866894369311_3
cagagacaaggtgattcctggcaagatagactttccatctacgtcagtacagacattaagtatctgtgatatgttccatcacttccggatcggtctgtctggtgtctctcacctttacaactcatctttttaattcatcaacagagtggtgacttttagcctaatgctgagagcctctaactctacaaatctttgtataattggtataaattatattgtgaatgggaaatcttgttcctgcccacgtgtgtagtaataagtaacctgtccacagtaacacagtggccaaaatgacaccaraaacttggttttccgtacgctaataatttagcaaacagagtcagtgatgtaacttgaggcattttgatgacttattgtctcaaaactagcaacatttataatgctttttaaactacgtaaattaagcaratgtgcagtatgagctccagactaattaacaactgggcagtgtctacttgtgcagactggataattgtgtaattgtacatgtaacacatacacatacccacttgctagttaccratcagccctgataagtacagccttcagacattaatttctacatgattttagctatct

SEQ ID NO: 78926 - DNA, 600 bp, Chicken  19866894369311_4
ttaattcatcaacagagtggtgacttttagcctaatgctgagagcctctaactctacaaatctttgtataattggtataaattatattgtgaatgggaaatcttgttcctgcccacgtgtgtagtaataagtaacctgtccacagtaacacagtggccaaaatgacaccaraaacttggttttccgtacgctaataatttagcaaacagagtcagtgatgtaacttgaggcattttgatgacttattgtctcaaaactagcaacatttataatgctttttaaactacgtaaattaagcaratgtgcagtatgagctccagactaattaacaactgggcagtgtctacttgtgcagactggataattgtgtaattgtacatgtaacacatacacatacccacttgctagttaccratcagccctgataagtacagccttcagacattaatttctacatgattttagctatcttctcagctagtaatctagcttcagtagcagtgcacctgggacttcaagggtctggatgggattgctcagtttgtcaagtatgaacaacttcccctgrcgcttcttttgctatctgatggggtttccaca

SEQ ID NO: 78927 - DNA, 600 bp, Chicken  19866894369311_5
acgtgtgtagtaataagtaacctgtccacagtaacacagtggccaaaatgacaccaraaacttggttttccgtacgctaataatttagcaaacagagtcagtgatgtaacttgaggcattttgatgacttattgtctcaaaactagcaacatttataatgctttttaaactacgtaaattaagcaratgtgcagtatgagctccagactaattaacaactgggcagtgtctacttgtgcagactggataattgtgtaattgtacatgtaacacatacacatacccacttgctagttaccratcagccctgataagtacagccttcagacattaatttctacatgattttagctatcttctcagctagtaatctagcttcagtagcagtgcacctgggacttcaagggtctggatgggattgctcagtttgtcaagtatgaacaacttcccctgrcgcttcttttgctatctgatggggtttccacaccttcacactaagcaggtgaaggtaacctgctttcagtggagcgtgtttagtgtagagtttttgtctttccaccccttgctttgctgctcttcctttctcgtctggaaccccct

SEQ ID NO: 78928 - DNA, 527 bp, Chicken  19866894369311_6
ataatgctttttaaactacgtaaattaagcaratgtgcagtatgagctccagactaattaacaactgggcagtgtctacttgtgcagactggataattgtgtaattgtacatgtaacacatacacatacccacttgctagttaccratcagccctgataagtacagccttcagacattaatttctacatgattttagctatcttctcagctagtaatctagcttcagtagcagtgcacctgggacttcaagggtctggatgggattgctcagtttgtcaagtatgaacaacttcccctgrcgcttcttttgctatctgatggggtttccacaccttcacactaagcaggtgaaggtaacctgctttcagtggagcgtgtttagtgtagagtttttgtctttccaccccttgctttgctgctcttcctttctcgtctggaaccccctgcacagtgtatagctatgttcttctgaaccataatgggggatgtgttttcctgacttgtgttgctttacaaagttaaaaag

SEQ ID NO: 78929 - DNA, 600 bp, Chicken  19866894369314_1
catcacttcatgaagttgaagattaccatcaaagctccctctcctagccacacgttgcttcttcaggctggacaaactcagtttcctcagcttgcccttgaatgccttacaccactgtctttgtggccctccattggacttagtctagcataccaatgtctttcagtgtgaaacccaaaactggacattatacattatgccaaacgtgacctcgcaaatgccaattgaaagggaataaccatttccctccagctgctggctgctctcttgctaatgcagcctagcatgtggttagctttyattacctcaagggcgcactgctgattcgtgttcaaaaacttcaccccagatcctgccctgcagagctgctctcactctagccagaccccacctcacagggtcctctgtctgtccaatgggaagtaccttgcatttgttctgctgagctttatgaagtttctgtcacccagaaaagatgtacagtgttatacagcatcagcaaatccatcaccattttctccagaagtcttttctacacatttagctttgagttttaactttctggctcttgccagaagcccatggatgagaaactggcct

SEQ ID NO: 78930 - DNA, 600 bp, Chicken  19866894369317_1
ctgtgaattgttttctaggagactctgagccatgccttgaaagctgggcaggtttggtttacatggtcctaccaaggggagggcaagctgcgttctgttctgtctgccctgtgcagagtctgtgctcagctcctccatccccaacaggtgatggatgtactgtgccttttcagttcacaggatgcttggcacaaagatttttctcagcctacaccaattactgggaaactgccttattatcccatgttctctaccctgacctggtcagtcagtcagtcttaatctctggtgatagctgcrtgtctgtacagggagagaggaggaaaaaaattgacagcactttaaacctgattaatttttaaacttcctccctttctgctgattgcatggcttctgccccgatgctggacaygttctttcctccatgtgtcacttccagaggagcactgcggaaatgaaatgccatcactcagcagggctggatggaatgtccaatgctgtgaccatacaggaccttcttctgtctgcagtgggtccacaggaacatcataacatggtgcaagagtacatctgtaacatgggcrcagcagcttgctgggg

SEQ ID NO: 78931 - DNA, 600 bp, Chicken  19866894369317_2
gcagagtctgtgctcagctcctccatccccaacaggtgatggatgtactgtgccttttcagttcacaggatgcttggcacaaagatttttctcagcctacaccaattactgggaaactgccttattatcccatgttctctaccctgacctggtcagtcagtcagtcttaatctctggtgatagctgcrtgtctgtacagggagagaggaggaaaaaaattgacagcactttaaacctgattaatttttaaacttcctccctttctgctgattgcatggcttctgccccgatgctggacaygttctttcctccatgtgtcacttccagaggagcactgcggaaatgaaatgccatcactcagcagggctggatggaatgtccaatgctgtgaccatacaggaccttcttctgtctgcagtgggtccacaggaacatcataacatggtgcaagagtacatctgtaacatgggcrcagcagcttgctggggagcatmaagacaacagccattttcttgctgttttgcagccacacaatgctattcttgcccaaacsactctatctggcctgctcagcagcgttcatttctgatgaagctttcc

SEQ ID NO: 78932 - DNA, 600 bp, Chicken  19866894369317_3
tctggtgatagctgcrtgtctgtacagggagagaggaggaaaaaaattgacagcactttaaacctgattaatttttaaacttcctccctttctgctgattgcatggcttctgccccgatgctggacaygttctttcctccatgtgtcacttccagaggagcactgcggaaatgaaatgccatcactcagcagggctggatggaatgtccaatgctgtgaccatacaggaccttcttctgtctgcagtgggtccacaggaacatcataacatggtgcaagagtacatctgtaacatgggcrcagcagcttgctggggagcatmaagacaacagccattttcttgctgttttgcagccacacaatgctattcttgcccaaacsactctatctggcctgctcagcagcgttcatttctgatgaagctttccagcctgtaggtatctcctttcacacctgtcttaccatttccatttagaaggatttaatttagaaacccattgtacccggtcctgcacagcccgagccaatttattttgcataatgcctcagcactgtgcactttaagcaaacaggctgtcacaattgtgtgctggagggagg

SEQ ID NO: 78933 - DNA, 600 bp, Chicken  19866894369317_4
tacagggagagaggaggaaaaaaattgacagcactttaaacctgattaatttttaaacttcctccctttctgctgattgcatggcttctgccccgatgctggacaygttctttcctccatgtgtcacttccagaggagcactgcggaaatgaaatgccatcactcagcagggctggatggaatgtccaatgctgtgaccatacaggaccttcttctgtctgcagtgggtccacaggaacatcataacatggtgcaagagtacatctgtaacatgggcrcagcagcttgctggggagcatmaagacaacagccattttcttgctgttttgcagccacacaatgctattcttgcccaaacsactctatctggcctgctcagcagcgttcatttctgatgaagctttccagcctgtaggtatctcctttcacacctgtcttaccatttccatttagaaggatttaatttagaaacccattgtacccggtcctgcacagcccgagccaatttattttgcataatgcctcagcactgtgcactttaagcaaacaggctgtcacaattgtgtgctggagggagggctgagctcttgcttcaggcac

SEQ ID NO: 78934 - DNA, 600 bp, Chicken  19866894369317_5
tcctccctttctgctgattgcatggcttctgccccgatgctggacaygttctttcctccatgtgtcacttccagaggagcactgcggaaatgaaatgccatcactcagcagggctggatggaatgtccaatgctgtgaccatacaggaccttcttctgtctgcagtgggtccacaggaacatcataacatggtgcaagagtacatctgtaacatgggcrcagcagcttgctggggagcatmaagacaacagccattttcttgctgttttgcagccacacaatgctattcttgcccaaacsactctatctggcctgctcagcagcgttcatttctgatgaagctttccagcctgtaggtatctcctttcacacctgtcttaccatttccatttagaaggatttaatttagaaacccattgtacccggtcctgcacagcccgagccaatttattttgcataatgcctcagcactgtgcactttaagcaaacaggctgtcacaattgtgtgctggagggagggctgagctcttgcttcaggcactggtttgagatccaggaggagcagaccctgctctgacagtgcccacagatttcatgagc

SEQ ID NO: 78935 - DNA, 599 bp, Chicken  19866894369324_1
  misc_feature (1)..(49): n is any nucleotide
nnnnnnnnnnnnnnnnnnnnnnnnnnnnnnnnnnnnnnnnnnnnnnnnncgagttattaaagagctgttaggagggtttgcagtttggatcggcgtccggcaggaggctgcgatgggacctggaagctgctttcctcgcggctccaaggaggcactcggcgagggctggcagcttgcagacactgctctgctccatttatttaagggggaaagctaatcctcttgcacagagcggttctgaaaggagactttatttctgatgaaaacgcctccggtgatttggtatgccaaacagccccraaacacggccgagctgagcccctttccccagaggaaggctgggggggggctgtgggtgacccacgggtagctctgtgycctgcagcccctcaccaggaccgggtgggaggggccacatccttcagagggggttgctgagagctgtaggacaggaggttgaagttgtgccaggttcaggtcggatattagggaaaaaattcttctcagaaagagcagcgatgcagtggcacaggctgcgcagggagctcgggggcgcacagtccctggaggtgttcaagagccatggagatgtggcactg

SEQ ID NO: 78936 - DNA, 600 bp, Chicken  19866894369324_2
tgcagtttggatcggcgtccggcaggaggctgcgatgggacctggaagctgctttcctcgcggctccaaggaggcactcggcgagggctggcagcttgcagacactgctctgctccatttatttaagggggaaagctaatcctcttgcacagagcggttctgaaaggagactttatttctgatgaaaacgcctccggtgatttggtatgccaaacagccccraaacacggccgagctgagcccctttccccagaggaaggctgggggggggctgtgggtgacccacgggtagctctgtgycctgcagcccctcaccaggaccgggtgggaggggccacatccttcagagggggttgctgagagctgtaggacaggaggttgaagttgtgccaggttcaggtcggatattagggaaaaaattcttctcagaaagagcagcgatgcagtggcacaggctgcgcagggagctcgggggcgcacagtccctggaggtgttcaagagccatggagatgtggcactgagggacacagtggtacagtggggatgggttggggttgcacttggtgatcttagtggccttttccaaccttaatgattct

SEQ ID NO: 78937 - DNA, 600 bp, Chicken  19866894369324_3
ggacaggaggttgaagttgtgccaggttcaggtcggatattagggaaaaaattcttctcagaaagagcagcgatgcagtggcacaggctgcgcagggagctcgggggcgcacagtccctggaggtgttcaagagccatggagatgtggcactgagggacacagtggtacagtggggatgggttggggttgcacttggtgatcttagtggccttttccaaccttaatgattctgtgatcattcaggacttgaaatgggcctggaatgccacagcgaaggttgagatgctgagcctgacctygttgagaagggagaggaggagagcrgtgctgagccactccatttgatcacactctctcctctgggctctaaggaaattgctaactcgaattgatggcctattcaggagtaaatagtgagttaaagcatctttctcccataggctgttaagaaactccatgtgctgaatcaccgcacggagcaccaatattcccttccctacggaggagcraagtcttacactgtgctctcattgacccaaataaaactgaataccatgaaatcatggmaaacttcaccatcttggacactgagtccagaa

SEQ ID NO: 78938 - DNA, 600 bp, Chicken  19866894369324_4
gttcaggtcggatattagggaaaaaattcttctcagaaagagcagcgatgcagtggcacaggctgcgcagggagctcgggggcgcacagtccctggaggtgttcaagagccatggagatgtggcactgagggacacagtggtacagtggggatgggttggggttgcacttggtgatcttagtggccttttccaaccttaatgattctgtgatcattcaggacttgaaatgggcctggaatgccacagcgaaggttgagatgctgagcctgacctygttgagaagggagaggaggagagcrgtgctgagccactccatttgatcacactctctcctctgggctctaaggaaattgctaactcgaattgatggcctattcaggagtaaatagtgagttaaagcatctttctcccataggctgttaagaaactccatgtgctgaatcaccgcacggagcaccaatattcccttccctacggaggagcraagtcttacactgtgctctcattgacccaaataaaactgaataccatgaaatcatggmaaacttcaccatcttggacactgagtccagaaccaggagcaatgctgaggccaaacc

SEQ ID NO: 78939 - DNA, 600 bp, Chicken  19866894369324_5
cttttccaaccttaatgattctgtgatcattcaggacttgaaatgggcctggaatgccacagcgaaggttgagatgctgagcctgacctygttgagaagggagaggaggagagcrgtgctgagccactccatttgatcacactctctcctctgggctctaaggaaattgctaactcgaattgatggcctattcaggagtaaatagtgagttaaagcatctttctcccataggctgttaagaaactccatgtgctgaatcaccgcacggagcaccaatattcccttccctacggaggagcraagtcttacactgtgctctcattgacccaaataaaactgaataccatgaaatcatggmaaacttcaccatcttggacactgagtccagaaccaggagcaatgctgaggccaaacccaaccaatctcccgtgacttccacaccccaascctgtaagcccttctgaaacactcctacagcagcatgcagcacacgtgtccgtgctcaagacagaggtattgcaatgcacaccgctgtctagatggcaacctgcacacggctgctcccagctgcacctgccctgggagctctgacctgctgca

SEQ ID NO: 78940 - DNA, 600 bp, Chicken  19866894369324_6
acagcgaaggttgagatgctgagcctgacctygttgagaagggagaggaggagagcrgtgctgagccactccatttgatcacactctctcctctgggctctaaggaaattgctaactcgaattgatggcctattcaggagtaaatagtgagttaaagcatctttctcccataggctgttaagaaactccatgtgctgaatcaccgcacggagcaccaatattcccttccctacggaggagcraagtcttacactgtgctctcattgacccaaataaaactgaataccatgaaatcatggmaaacttcaccatcttggacactgagtccagaaccaggagcaatgctgaggccaaacccaaccaatctcccgtgacttccacaccccaascctgtaagcccttctgaaacactcctacagcagcatgcagcacacgtgtccgtgctcaagacagaggtattgcaatgcacaccgctgtctagatggcaacctgcacacggctgctcccagctgcacctgccctgggagctctgacctgctgcagcccagaacaacgctcagacccacctctgagagcaggaggagctgggaactccccaaa

SEQ ID NO: 78941 - DNA, 588 bp, Chicken  19866894369324_7
cctctgggctctaaggaaattgctaactcgaattgatggcctattcaggagtaaatagtgagttaaagcatctttctcccataggctgttaagaaactccatgtgctgaatcaccgcacggagcaccaatattcccttccctacggaggagcraagtcttacactgtgctctcattgacccaaataaaactgaataccatgaaatcatggmaaacttcaccatcttggacactgagtccagaaccaggagcaatgctgaggccaaacccaaccaatctcccgtgacttccacaccccaascctgtaagcccttctgaaacactcctacagcagcatgcagcacacgtgtccgtgctcaagacagaggtattgcaatgcacaccgctgtctagatggcaacctgcacacggctgctcccagctgcacctgccctgggagctctgacctgctgcagcccagaacaacgctcagacccacctctgagagcaggaggagctgggaactccccaaagccattttcccaggtcaggttatcctaagctttcctgctgggatatcagacagcactgtgagccaagagggacagcg

SEQ ID NO: 78942 - DNA, 600 bp, Chicken  19866894369328_1
agatgcaaaatgtagctggattgacaacctaagtcctacatgcttttccccccatgtgctggccatatagctgaagattttacaccatggccagctgcagatggtcatgttccaaacacctcaaacaagaaatgaatagccagacttccacttacctgttatgatggatacaattctaccatattccacaatgataaggaaaagcacttcataacaaagaagggaagtgattcagggggcactgaaccacaagactgaactattcacatatgtctgtacgaatgcctgtgaagtggctgrgcagtaaagtgatggcagcttggcttctaagcctgccttctcagaacacctccatgccgggttactacttgagcagtgtcacttgcttgccaagcagtagtgctcaatgcacagcccacatccaaccaccaaatgccgtcgtcttataataacacaaaaaaaaaaaatcacaaaaaggagcagagtttttaagtaatgagtaggagctgaaccagcacagctactattaacccaagaggcactggctttatttttcagaactaatccaaacatctaaggaaaacatagacatgagcaggc

SEQ ID NO: 78943 - DNA, 600 bp, Chicken  19866894369332_1
atttaaggcattaactatctgaatgttattcagttctctgagagatctttagctcttgcttatttgggtagaggtttctagatgtaagaaagacaacttcagcagaatattggcttgatgatcttttaaaatacatattcaatagcaaatagcaattttttaaaaaaacaacccagattcaaacagatttaatggatcacaataatgcaagggagaaactttggcagatcttcattttcaagtaaacagcatttgtacactgaaattactaagtccattgctagccccagcacacaagtwatatgtgaaaaatagaaaagccaaattaagaggaagaaagattcagcttcacattctcctgaggggacagagaggaagttccatgagtacattcttgcatccagttgttgaaagaaatgtgtgttagctgcacaacaacctctgtcatgaaccatcaagaaaatgcgaaccctatactataaactaccttcactgcaaaattaactctaccagctggcagtagtaatcaggaacacgggaaatttatatatcacactgcacaagcaacagaagaaaaaaggaagcaactgtgcacattta

SEQ ID NO: 78944 - DNA, 600 bp, Chicken  19866894369335_1
tctagtctcctttcctggaagaaataaaataaagctggggagatgctggcggaggcagggggagggtggggagagaaggattacagtgctgaagagaagtagctatttgatttttctttagaggcttaaaattcctaaaatattttgaaatctaatgtatttagtaaagagaaaaaatgctaatgatattatcattttcatttatggataattctgttttaagttctcttttcccaagagtagctttaaaattggtactatctattccaggagaagagaaagcaaagattgctttcagaytgggggttgggactttaagtaaagacaaatccctgaagagcagaaccacttgttctgttcagctctaccttaattgttttgaaatgtttcaagagatgttattttatgaaatgccattcatcacataaaaatgtatgtgaaattatttttagagtatcagtcataagagttccttaaattactagttcacaatttgacttgtgccaaaaattttcataaattgttggatgagcattagtcctttggtgaagctgaatcatactgaaacatatatatcattggaattatatctgtacagaa

SEQ ID NO: 78945 - DNA, 600 bp, Chicken  19866894369335_2
gaaattatttttagagtatcagtcataagagttccttaaattactagttcacaatttgacttgtgccaaaaattttcataaattgttggatgagcattagtcctttggtgaagctgaatcatactgaaacatatatatcattggaattatatctgtacagaatagtacaattttgatggagttatcctgggtgtatactgctttctaagattatatgccttgatcccaaactactggaaaatattttctgcttatattaaaagtgtagagatattagaattccaaatcccaggaaacgtrtgttttgtctttttctgcaaatcttcttggtacacaaatgcatgtgatgtgtatcccttgtcttctaggattccatcagctaataaacactgttatgaaattttactgtcatgatcagcattttatatctgtaaggcaacattcaagtgagtgaaatctatagatttataaggtgtaagtttatacgttcggtcaaattacagatttggttcctgaaaatttgtcctctccctggaagaagagctgaaagagtgtgcatcggtcaaaaaaagcagaagttccctagcaccaaagatctta

SEQ ID NO: 78946 - DNA, 600 bp, Chicken  19866894369336_1
gagggacgctgcaggctgagcacagatttcacagtgctggacccctttcttcccaagcagttgaagttttccaatgcactctgaattctggcttacagtgcaacgcaagacccagtcatccaggcaaagcatgctgcagccagccatggacgcccagcacagggctcttgcttggagtaggggtgttacaaaaacacatttgagactacttcctctgagtcattatctagtttcactgcctacaggaatggaaaaggttatggctatccagatcctatttaaatcatctattccacaccraactccttgctgggtctcttccagaggaggatcagggagcctctgctgaccaacacagaatccttgaaaagaattacatcatgttgagagaagcatrgagtccacaaagcaaagctgtaacaagctagacgaaggcaaactctttgcttggcctcagcaaggagcagtgggaaatagtgtgcagacatacagcactcaaaagccacgtttcctacctcaaggataatgcttgctaaataatcgcacctactgtggaaggctttcctggtgtctgtcctttaatattccagtataagtttg

SEQ ID NO: 78947 - DNA, 567 bp, Chicken  19866894369336_2
gtgcaacgcaagacccagtcatccaggcaaagcatgctgcagccagccatggacgcccagcacagggctcttgcttggagtaggggtgttacaaaaacacatttgagactacttcctctgagtcattatctagtttcactgcctacaggaatggaaaaggttatggctatccagatcctatttaaatcatctattccacaccraactccttgctgggtctcttccagaggaggatcagggagcctctgctgaccaacacagaatccttgaaaagaattacatcatgttgagagaagcatrgagtccacaaagcaaagctgtaacaagctagacgaaggcaaactctttgcttggcctcagcaaggagcagtgggaaatagtgtgcagacatacagcactcaaaagccacgtttcctacctcaaggataatgcttgctaaataatcgcacctactgtggaaggctttcctggtgtctgtcctttaatattccagtataagtttgttagtacaggatattccctcgtttggaagcaccaattttatagggaagaaacaagagaggcaga

SEQ ID NO: 78948 - DNA, 600 bp, Chicken  19866894369337_1
atgggggtgaggatggaagtgcccacactgcttcccagccctcctgcagcggtcacctcgtaacagaaccactgacaaagggccacgtgcctccaaaagccatgggggctgcacttctggaggtaacactgccttcaggtatcgcgtcctggagtgtgaaaggtaaaagtggccactgtgtaaatcacatgaactcgtgtgacaatgcacatcgttcctgttgtaacatgacaggttgttttaggatggtttgaatcagcttttctgtcttccagttgctctgttcatgaaagggcgtcytgttcgttgcaggggattggaccagctggcctttaaaggtcccttccaactcaaaccattctatgatcctatgattcttgttgccatgtctacctgccgtgtaccatctcacagctccctgtgcaggctctgctttctgtgttgttcatacaggcctgagcccagttcaccttctgctctgctttgactttgtgcctactgcagtagaaatgaggagtaacaacggcatccttcatctgcagggactgcaaaatgtttggaaaagctgcatcctccgaacagaaaagtggcaccatttct

SEQ ID NO: 78949 - DNA, 600 bp, Chicken  19866894369344_1
taagctccaatccattagcaatgacatgtcccattactatggaaatgagcggcacagaaatacagatgattcatctctatacaagcatgaagagctttgggttggtttggttgaaaatgggtttcatttgtagccaaagaagactgaaaagacccataagcttcaagttctcattgcccttcatgacaggcattggaaaagacattggataagaggtgaaaaacacggaaacatcatcacagcctgctctcccctctaaagaaggtctacagaattctatacaacacaccagtttccacwtgccaaaatgaagtgcacaaagaaacaggatagaagggctgctccaaaagtaatacctcccattttattacattggaccacaacatcagaggcaaatgccgggatagcagtagaactttcctgccaatattctgtaacattttgttgctgtatgacagatggcaraagaagggcaggtctgataaagtggtgtctgacatggaggtgtgtatgaagcaaaggtgtgccactgaattccttcacacacaaacaatggcaactattgatgttattggtgcttgctgaacgtttataagacca

SEQ ID NO: 78950 - DNA, 600 bp, Chicken  19866894369344_2
agttctcattgcccttcatgacaggcattggaaaagacattggataagaggtgaaaaacacggaaacatcatcacagcctgctctcccctctaaagaaggtctacagaattctatacaacacaccagtttccacwtgccaaaatgaagtgcacaaagaaacaggatagaagggctgctccaaaagtaatacctcccattttattacattggaccacaacatcagaggcaaatgccgggatagcagtagaactttcctgccaatattctgtaacattttgttgctgtatgacagatggcaraagaagggcaggtctgataaagtggtgtctgacatggaggtgtgtatgaagcaaaggtgtgccactgaattccttcacacacaaacaatggcaactattgatgttattggtgcttgctgaacgtttataagaccaaacggcgggagtcagtacagcaaggtggcaggtgatatatttcagcagagccaacaacaggccacctctactagtgtagattttttatgagagtggcacgcgcgctgttggtcatctctggtgaaaatccatagctggtggtcgtgactatgttgaaaaattgtg

SEQ ID NO: 78951 - DNA, 483 bp, Chicken  19866894369354_1
ttagaactgtggagcgtcagtagcacatgaatgatcattctttaaccttatttttgccctcaagatatgtcctctagtttcttcctccttctttcaccttctttcactctagcacttgatctttgttgaatttctgttgtgttcttaccagcacttcatccacattgattactgtcattctttatattacagtattctgaagtccacccactttaatcactatcacataaaaatgcactcatattttaatttggagatgttttgccaaatatttgttttattttatgaaaacataaaatrttttcttcacttcctgtgaagaaaatcacaaatcaggttcagtaaatgtaaaccttactgctttctagaataggaactaaatcctagaattttttttcttacaggagctactgttacctaatgtcaacattttcttaaaaatgcattagatgggatcttttgcagtatctctggtatgcacag

SEQ ID NO: 78952 - DNA, 600 bp, Chicken  19866894369360_1
gctttctacatctccttgctgcaagctccttattccttgttttgtcttaacaggatataacatctttgtaactacttttgcacatttgaagacagccttttacgtcctctgattttcagcctttcttgttgtgttctctccctgtgccctcacttggtgagcgttgtttgggaaaaggagcctttctccctcccagtcaccattttgccccagcctcacctgctttgggttttgacagaatgttatcttcttgtggatctacagcttgtgctaaaacttgtgtgatatgttgatggaccraagacagaataacatctgcaaatgcagataatgycttttagatkttttaggctgatggatatttctgaaagggtcrgatgagtttgtgcccacatggactcttcaggctcagttactgtttcatacagcaaaatttgatatcttctgtgctctggtgaatttgcagttgtctggtgatctaaggatgtgactgtgcttacgagactaaggaaggattatgtttggaggtttgtctacttcttccctccattactcagtctaataaatggcattataaataaatgttcttgtaaagaaaac

SEQ ID NO: 78953 - DNA, 600 bp, Chicken  19866894369360_2
ccttgttttgtcttaacaggatataacatctttgtaactacttttgcacatttgaagacagccttttacgtcctctgattttcagcctttcttgttgtgttctctccctgtgccctcacttggtgagcgttgtttgggaaaaggagcctttctccctcccagtcaccattttgccccagcctcacctgctttgggttttgacagaatgttatcttcttgtggatctacagcttgtgctaaaacttgtgtgatatgttgatggaccraagacagaataacatctgcaaatgcagataatgycttttagatkttttaggctgatggatatttctgaaagggtcrgatgagtttgtgcccacatggactcttcaggctcagttactgtttcatacagcaaaatttgatatcttctgtgctctggtgaatttgcagttgtctggtgatctaaggatgtgactgtgcttacgagactaaggaaggattatgtttggaggtttgtctacttcttccctccattactcagtctaataaatggcattataaataaatgttcttgtaaagaaaacctaagaaattagttttcatttatttttaacttag

SEQ ID NO: 78954 - DNA, 600 bp, Chicken  19866894369360_3
tcttaacaggatataacatctttgtaactacttttgcacatttgaagacagccttttacgtcctctgattttcagcctttcttgttgtgttctctccctgtgccctcacttggtgagcgttgtttgggaaaaggagcctttctccctcccagtcaccattttgccccagcctcacctgctttgggttttgacagaatgttatcttcttgtggatctacagcttgtgctaaaacttgtgtgatatgttgatggaccraagacagaataacatctgcaaatgcagataatgycttttagatkttttaggctgatggatatttctgaaagggtcrgatgagtttgtgcccacatggactcttcaggctcagttactgtttcatacagcaaaatttgatatcttctgtgctctggtgaatttgcagttgtctggtgatctaaggatgtgactgtgcttacgagactaaggaaggattatgtttggaggtttgtctacttcttccctccattactcagtctaataaatggcattataaataaatgttcttgtaaagaaaacctaagaaattagttttcatttatttttaacttagagattccaac

SEQ ID NO: 78955 - DNA, 600 bp, Chicken  19866894369360_4
tttgcacatttgaagacagccttttacgtcctctgattttcagcctttcttgttgtgttctctccctgtgccctcacttggtgagcgttgtttgggaaaaggagcctttctccctcccagtcaccattttgccccagcctcacctgctttgggttttgacagaatgttatcttcttgtggatctacagcttgtgctaaaacttgtgtgatatgttgatggaccraagacagaataacatctgcaaatgcagataatgycttttagatkttttaggctgatggatatttctgaaagggtcrgatgagtttgtgcccacatggactcttcaggctcagttactgtttcatacagcaaaatttgatatcttctgtgctctggtgaatttgcagttgtctggtgatctaaggatgtgactgtgcttacgagactaaggaaggattatgtttggaggtttgtctacttcttccctccattactcagtctaataaatggcattataaataaatgttcttgtaaagaaaacctaagaaattagttttcatttatttttaacttagagattccaacctttctcggaatctatatgaataaatacaacc

SEQ ID NO: 78956 - DNA, 600 bp, Chicken  19866894369368_1
caacagagcatccagacagccctggaaagccaataataagcaacatggaatgctggcaggccagcaagacagaagagaagttctgtcaaaaaacaagaaagcaatagctaaaaatatgctgctctgagcaggctgccgggaagccagtgatgtgggcaggactggagcatcagcacaccaacagcattctggggttatctctatttatagtgtgggagcagcaggctgagccccactttggggatgtggggctatgagacaaaaatcaatgctttccaccccagacatggtgtctatgarccttccctcttaacacagttcaagtgccctcaggccatcctataaatttaacgtagtgcactggactaagagacataatgaaatgtgctttatttggttgaaatttggaatgctttcctgcactccagtggaatgacttcaaactggaagagtccaagagctaaaataggtccatccaagaacagttcattcagcccagcagatgtatgacagcagcacagcactgttgctttctcagagctcagcctcaccttggctcagaggctgaagcaggaggttttcacatttatcatcaaggac

SEQ ID NO: 78957 - DNA, 600 bp, Chicken  19866894369370_1
ggtgtaggtctgcctgtcactgactcagagattcctgaatgtagtgactgctgccgcctcctcgctgcggttcccggccgtgctgcgcctgctccaggtgatgcaaccaaccccggagtaagaaggagttccattgcgtgcgctgtaaatcgctgattttttgtttcccacagctgaggggacacaaatgacttaaaaacagactgaatgccacagagtggccaacacgcagccggggccggctgctccctgtggctccggagcttcctcaagctctccttccaggaaacagcgcagtcytgctggtgacagacccgcagcaggcaggtcctgtttatctagcagagaaagcacaactacaagcacttcattttactttaattaaatgcattcgggttagagatgcttagtaatctaggatcaaagaccttgtgatctttaatacgttttctcactgagtttagttactcaatgtcttaataggaaattctctcattatttcaggtctctgaaccgctctatctctgctccacaaagctgtctgaatcaacattcccatgttgtgttggtcttggctcttgctgcttgcttgctgaatgt

SEQ ID NO: 78958 - DNA, 600 bp, Chicken  19866894369379_1
aaacctaaaatatgccttcagaacagctgaaggctgcattccctttcctgcttaaaattgggaaaaataataccctttagtaaaagcaaatcctgctttctggtgcatactggcaaatgcacattttctaccatagctggaataatttttttgttttttaatgatggaggaggaaatgtattttaagttttacattaaaaccttagttgtaaatcctacatcgctttaaaaacctttctttgaaaggagacattaacgctcaataaacgagtagctgaactggagctgttctcgccctcmaagtgcaaggtgtagctcacagtgcagtttctggtgatttcattaataattaccgttttcaaaagatgttaaggaaaatcaagtgtcaatrtttatgtaactyctgagatttgaacttctctctatagctggctgctgtctgtcctccaaggtattcctattctagtttattgttcggcatgcctcaaggaggaagtagctctaaagtatttagttgagaatttacatagcaagactttagcacaaggcctaatgttcattaagaactgtttttcatcaaaagctgaggttctctctggc

SEQ ID NO: 78959 - DNA, 600 bp, Chicken  19866894369379_2
cctgctttctggtgcatactggcaaatgcacattttctaccatagctggaataatttttttgttttttaatgatggaggaggaaatgtattttaagttttacattaaaaccttagttgtaaatcctacatcgctttaaaaacctttctttgaaaggagacattaacgctcaataaacgagtagctgaactggagctgttctcgccctcmaagtgcaaggtgtagctcacagtgcagtttctggtgatttcattaataattaccgttttcaaaagatgttaaggaaaatcaagtgtcaatrtttatgtaactyctgagatttgaacttctctctatagctggctgctgtctgtcctccaaggtattcctattctagtttattgttcggcatgcctcaaggaggaagtagctctaaagtatttagttgagaatttacatagcaagactttagcacaaggcctaatgttcattaagaactgtttttcatcaaaagctgaggttctctctggctttataaatgatggatacatgcaaacattaagaaaaatctgtatcttccaattgaatgaagagattccctcctgcacccaacttcccatca

SEQ ID NO: 78960 - DNA, 600 bp, Chicken  19866894369379_3
tgcatactggcaaatgcacattttctaccatagctggaataatttttttgttttttaatgatggaggaggaaatgtattttaagttttacattaaaaccttagttgtaaatcctacatcgctttaaaaacctttctttgaaaggagacattaacgctcaataaacgagtagctgaactggagctgttctcgccctcmaagtgcaaggtgtagctcacagtgcagtttctggtgatttcattaataattaccgttttcaaaagatgttaaggaaaatcaagtgtcaatrtttatgtaactyctgagatttgaacttctctctatagctggctgctgtctgtcctccaaggtattcctattctagtttattgttcggcatgcctcaaggaggaagtagctctaaagtatttagttgagaatttacatagcaagactttagcacaaggcctaatgttcattaagaactgtttttcatcaaaagctgaggttctctctggctttataaatgatggatacatgcaaacattaagaaaaatctgtatcttccaattgaatgaagagattccctcctgcacccaacttcccatcagcatagaatttc

SEQ ID NO: 78961 - DNA, 599 bp, Chicken  19866894369385_1
  misc_feature (1)..(114): n is any nucleotide
nnnnnnnnnnnnnnnnnnnnnnnnnnnnnnnnnnnnnnnnnnnnnnnnnnnnnnnnnnnnnnnnnnnnnnnnnnnnnnnnnnnnnnnnnnnnnnnnnnnnnnnnnnnnnnnnnntcagctttatttagctattctagttttcaagagctgtgaatgtggcctttaatattttagtctgacatctgcaaaacttgcagttctatagatgttccctacaaaactataaactttgagtttaagcacagatactctagaattagctgtaacacagtgaatatatttttgtcattcttagtgtgrtcaacattttcacctcacttgagttgcttcgaagttatgtgaatgttttaaggcttcatctacagtttagagagatgcacagacattttcagatagtttatgttcacctcaaaaaactatctaagatatggaagattgaaaagcatctgaaaataattatcctcttgttgaaggaacctagaaaactaatccttagaaattagttttcttagaattctctagaatgtagaatattttgggaaacttttgaaatttgttaatgttggacaagatgaatccgtcccctatttaccatctgt

SEQ ID NO: 78962 - DNA, 599 bp, Chicken  19866894369394_1
  misc_feature (1)..(29): n is any nucleotide
nnnnnnnnnnnnnnnnnnnnnnnnnnnnntctactccttttaagcacatcctgtgcagcagatttcaggtgagaacttgcatcattcatgaggaaggatctgaatttttgaagatcttaaaaggaatttactagctcttctttaacactactaaatgaaactactaaattgcatccacagatttaatcaccaatgttaaaacacccaattgtattgagttagcttaatgaaaaaacagctgttactcaaaacttaaaaaaaacttaaaatgtttatcaatatgttaaagatttatagttyacttaatttttttgtttccaactataactatgtgcaatagaaaaaaatagtttctgaaataattgtctgacaattcacagtatagtttaacaatgcaaatacatcaaattatttaggtgttttctactccatactttaaatgttgtcttgatttttagatcatgtttttgaaaatgaaatgtgtttaaaatgacatctcatcagatttcagcctaaagtgaatgaagaatttaaagacctgtcctcaggaatttgattatggaagcagtttcaaatgtattgtcttttctggaaaagta

SEQ ID NO: 78963 - DNA, 600 bp, Chicken  19866894369397_1
ctaagtcccagaaacccacacataacctaacctggaggtttactttaattccctcgagttctttagaggtcttcgacagttgacgaagaatattgctcctttccttaaagacttccttcagctgtctctccagttcttcatagccctgtctaacacagaaaacaaaagcatgagatcctctcagaacattcttcagtgcacttcaaaacagtattagattgcccagatttagttaattagaactatacagtatctgtaggtttcaaaccagaacgcggaaaggtctctctgtccacatayacaacagcttgttttctcmtaatacaggtcaagagatgctttgaatgccaaagtgatgtgcttcatctgagtatacaaatcagactgaaacattgacaatggtgtattgtctgtgacaagcaggagattgagtagatgtatttgacatgagagatggaatatagtgttagatctctcctttttaggtaaaatcattgccttgaggatgacttatcagcaagctgcagcatccgttcccccctacaagggcagtagaaaccttttttgttgttgttgtttttactgtcctcacagtaactc

SEQ ID NO: 78964 - DNA, 600 bp, Chicken  19866894369397_2
acataacctaacctggaggtttactttaattccctcgagttctttagaggtcttcgacagttgacgaagaatattgctcctttccttaaagacttccttcagctgtctctccagttcttcatagccctgtctaacacagaaaacaaaagcatgagatcctctcagaacattcttcagtgcacttcaaaacagtattagattgcccagatttagttaattagaactatacagtatctgtaggtttcaaaccagaacgcggaaaggtctctctgtccacatayacaacagcttgttttctcmtaatacaggtcaagagatgctttgaatgccaaagtgatgtgcttcatctgagtatacaaatcagactgaaacattgacaatggtgtattgtctgtgacaagcaggagattgagtagatgtatttgacatgagagatggaatatagtgttagatctctcctttttaggtaaaatcattgccttgaggatgacttatcagcaagctgcagcatccgttcccccctacaagggcagtagaaaccttttttgttgttgttgtttttactgtcctcacagtaactctgtttataaagggaataac

SEQ ID NO: 78965 - DNA, 600 bp, Chicken  19866894369397_3
ttttaggtaaaatcattgccttgaggatgacttatcagcaagctgcagcatccgttcccccctacaagggcagtagaaaccttttttgttgttgttgtttttactgtcctcacagtaactctgtttataaagggaataacaaacttcaagcctgcaacacatgggtactattttatgatcagatagaatcattgaatccttagagatggaagtgacctttaaaggtcatctagtccaattaccctgcaatgaacagggacatccacaactagatcaggctgcgcagagcctgatccagtsttgccttgatagtctctagggatggggcatccactacatctcggggtgatggattttctaccatttgtattaccctcatcttccgaagaaaagaaaaaaaccacaggtcttgttggggaacctttgagaatgacttcatgaacacacagggagtccacataaggaggtaatgtcaggacttggctatatgtcacctacgtaataacacatcagaaataaacgatccagtacaggtcacactccaaatatggatttacaagaaaatacatacaacaagaatgtgaacctttggatgcacaa

SEQ ID NO: 78966 - DNA, 600 bp, Chicken  19866894369397_4
atgggagtgtgaagagagaacagattcttgcaactaaaatataaacttggagctgaaagatttacttataagaaattttaatgccaatttttagcatgggataatttggacagaagttgactctgggataacgtgcgacactattttacgccataagcagcacaaaaccccaatgactgcctgaaatcttccaatccccccaaaccgtcaatgttatctactccttttgcagtgtaattacacatacgcaaaataaacatcaatccattcctaggaagtccactctgtaattatacatgyattaaacctgttatctcaatattaggttacaccagttagtccattcagcaaaatgaagagtcattttcagcaaatcagcaagtccatctctacatcactacacctctgacactatttcttcaaacatcagaagtttagctttcagtcttcaaaataacgatcaagactttcccctgaataacatgtacagtggcggracaagggaaaactcattttgtttcctgagaaagaaaagtgagaaaaagattcatcacaattctgtatccatgtaactggaagttgaagaaaagaacctctaaa

SEQ ID NO: 78967 - DNA, 600 bp, Chicken  19866894369397_5
ccccaaaccgtcaatgttatctactccttttgcagtgtaattacacatacgcaaaataaacatcaatccattcctaggaagtccactctgtaattatacatgyattaaacctgttatctcaatattaggttacaccagttagtccattcagcaaaatgaagagtcattttcagcaaatcagcaagtccatctctacatcactacacctctgacactatttcttcaaacatcagaagtttagctttcagtcttcaaaataacgatcaagactttcccctgaataacatgtacagtggcggracaagggaaaactcattttgtttcctgagaaagaaaagtgagaaaaagattcatcacaattctgtatccatgtaactggaagttgaagaaaagaacctctaaaatgagtgaacttgagatagaaatcattcacaacaatagagcatcacatcatcaccttttctctttataaatatgagcatttttgatcatgaagttcagggggagggaaattattaacaaccaagaaacagaatkatctggttatctaaataaaacatgcaatagataatacacataatacagtatgaatataatata

SEQ ID NO: 78968 - DNA, 600 bp, Chicken  19866894369397_6
ttagctttcagtcttcaaaataacgatcaagactttcccctgaataacatgtacagtggcggracaagggaaaactcattttgtttcctgagaaagaaaagtgagaaaaagattcatcacaattctgtatccatgtaactggaagttgaagaaaagaacctctaaaatgagtgaacttgagatagaaatcattcacaacaatagagcatcacatcatcaccttttctctttataaatatgagcatttttgatcatgaagttcagggggagggaaattattaacaaccaagaaacagaatkatctggttatctaaataaaacatgcaatagataatacacataatacagtatgaatataatataatagcatctaacctcagctccaactaaatttcagcctgtgtctcaggctgaagaaaataaattatagtaaaaggaacatgaaaaaattrggatctagggggagccaaggaacatttttatttacctgacctccatagttcgtgtaccaaatatttgattggaatgttcctcctctacctacaaaggatcacgcacaagtmtgtggtttactaaccattcaaagaaaaaatccattag

SEQ ID NO: 78969 - DNA, 600 bp, Chicken  19866894369397_7
aaagaacctctaaaatgagtgaacttgagatagaaatcattcacaacaatagagcatcacatcatcaccttttctctttataaatatgagcatttttgatcatgaagttcagggggagggaaattattaacaaccaagaaacagaatkatctggttatctaaataaaacatgcaatagataatacacataatacagtatgaatataatataatagcatctaacctcagctccaactaaatttcagcctgtgtctcaggctgaagaaaataaattatagtaaaaggaacatgaaaaaattrggatctagggggagccaaggaacatttttatttacctgacctccatagttcgtgtaccaaatatttgattggaatgttcctcctctacctacaaaggatcacgcacaagtmtgtggtttactaaccattcaaagaaaaaatccattagtcaatacttacatgaattctaaacaggcttaagcatcctatgtattctaagcacaatagcccacaaaatggttgcagctctgatacattttattgggtttctccacaactagcagctagaaaatcaggccttttgcatccatcttctctaac

SEQ ID NO: 78970 - DNA, 600 bp, Chicken  19866894369397_8
gggggagggaaattattaacaaccaagaaacagaatkatctggttatctaaataaaacatgcaatagataatacacataatacagtatgaatataatataatagcatctaacctcagctccaactaaatttcagcctgtgtctcaggctgaagaaaataaattatagtaaaaggaacatgaaaaaattrggatctagggggagccaaggaacatttttatttacctgacctccatagttcgtgtaccaaatatttgattggaatgttcctcctctacctacaaaggatcacgcacaagtmtgtggtttactaaccattcaaagaaaaaatccattagtcaatacttacatgaattctaaacaggcttaagcatcctatgtattctaagcacaatagcccacaaaatggttgcagctctgatacattttattgggtttctccacaactagcagctagaaaatcaggccttttgcatccatcttctctaacttgttaatgcactcactataaataaaacaaaaccaacccggcttctctttggcagacacttggctctgtagaatcagcgacccaccagagaaaacacacaactgccagttc

SEQ ID NO: 78971 - DNA, 600 bp, Chicken  19866894369408_1
tgatttcattccctctctgtgcatcctgaaagtctcttctcacccccagagaaaagaggggagcagaaataaggaatcttcatgaggagagcagccagctctgacagcccatgctcagggaggtgacctatcccactgcaacctgggccagtgtcaccctttgggctgatcacagctcttccaaggcaaggtcagctccagcaggagctattttcctgcgccactggcaatacaggaatggctacagcacaaaaattagcagtgaatattgttgaatatgcattttattctattgttcamccacagaataacccccaaatgcactgttccaaagctcatctttagcccacaggtccctctctcctcccatggtgtgaggtgtcacctagracagctgtggctcatgcagaaatgcacttgtgactttcaggttagtgtgggcttgatggccagaatgcagcctttgtggaataagggaaataagaaaaaaacttcttgtctggccacctctgcaaggaggcatagagggaacctgtggccyctgctcagctcctggtccttgaaagatccatggagacctggcatctcttctggaggtaa

SEQ ID NO: 78972 - DNA, 600 bp, Chicken  19866894369408_2
gcagccagctctgacagcccatgctcagggaggtgacctatcccactgcaacctgggccagtgtcaccctttgggctgatcacagctcttccaaggcaaggtcagctccagcaggagctattttcctgcgccactggcaatacaggaatggctacagcacaaaaattagcagtgaatattgttgaatatgcattttattctattgttcamccacagaataacccccaaatgcactgttccaaagctcatctttagcccacaggtccctctctcctcccatggtgtgaggtgtcacctagracagctgtggctcatgcagaaatgcacttgtgactttcaggttagtgtgggcttgatggccagaatgcagcctttgtggaataagggaaataagaaaaaaacttcttgtctggccacctctgcaaggaggcatagagggaacctgtggccyctgctcagctcctggtccttgaaagatccatggagacctggcatctcttctggaggtaattttgaaagcaagaattgagagagttggggaaaaaaaaaagaggaatactgatgtgagtccctgctgttgagattaataccctataaaac

SEQ ID NO: 78973 - DNA, 600 bp, Chicken  19866894369408_3
ctacagcacaaaaattagcagtgaatattgttgaatatgcattttattctattgttcamccacagaataacccccaaatgcactgttccaaagctcatctttagcccacaggtccctctctcctcccatggtgtgaggtgtcacctagracagctgtggctcatgcagaaatgcacttgtgactttcaggttagtgtgggcttgatggccagaatgcagcctttgtggaataagggaaataagaaaaaaacttcttgtctggccacctctgcaaggaggcatagagggaacctgtggccyctgctcagctcctggtccttgaaagatccatggagacctggcatctcttctggaggtaattttgaaagcaagaattgagagagttggggaaaaaaaaaagaggaatactgatgtgagtccctgctgttgagattaataccctataaaactaataaattctttatgtggatcctgtgagctgttactggtggaaatcatagctgaggtgaagcggtttactgcttaaccaacattcaaggaagaaaataggcacattaaaggacagaagaccttttacatttcatagataacttttaagac

SEQ ID NO: 78974 - DNA, 600 bp, Chicken  19866894369408_4
gtaattagaaaggtgataattctacttcactggagttcttccaggagcacgaagaatgctcccagatcagctgaactgcccagaaaaaaaaaaagagcactctctgagagcagtgaaagcacagttacaggaagccctcacctttctgcttaaaatatacaactatttatttaatattaacattacatatggaagaataatgctatatcgtagaatcatagaatgataaaatggcctgggttgaaaaggaccacagtgctcatctcattccaaccccctgctatgtgcagggtcgccaaycagcagcccaggctgcccagagccacatcyagcctggccttgaatgcctgcagggatggggcatccacagccwccttgggcaacctgttccagtgcatcactaccttctgtatatctaaaaaaaggttgaagatgcagattatataggatttatttgaggggtaaacatttgttttaataacttgctgcttctcttgaaaaatatactgtggacacagggcacatcttacagatcccagatgatggtgttggaagaaaatgaactttgatactccacaatggtatcttctcagcttttgc

SEQ ID NO: 78975 - DNA, 581 bp, Chicken  19866894369408_5
tggagttcttccaggagcacgaagaatgctcccagatcagctgaactgcccagaaaaaaaaaaagagcactctctgagagcagtgaaagcacagttacaggaagccctcacctttctgcttaaaatatacaactatttatttaatattaacattacatatggaagaataatgctatatcgtagaatcatagaatgataaaatggcctgggttgaaaaggaccacagtgctcatctcattccaaccccctgctatgtgcagggtcgccaaycagcagcccaggctgcccagagccacatcyagcctggccttgaatgcctgcagggatggggcatccacagccwccttgggcaacctgttccagtgcatcactaccttctgtatatctaaaaaaaggttgaagatgcagattatataggatttatttgaggggtaaacatttgttttaataacttgctgcttctcttgaaaaatatactgtggacacagggcacatcttacagatcccagatgatggtgttggaagaaaatgaactttgatactccacaatggtatcttctcagcttttgcccagtgctctg

SEQ ID NO: 78976 - DNA, 538 bp, Chicken  19866894369408_6
aactgcccagaaaaaaaaaaagagcactctctgagagcagtgaaagcacagttacaggaagccctcacctttctgcttaaaatatacaactatttatttaatattaacattacatatggaagaataatgctatatcgtagaatcatagaatgataaaatggcctgggttgaaaaggaccacagtgctcatctcattccaaccccctgctatgtgcagggtcgccaaycagcagcccaggctgcccagagccacatcyagcctggccttgaatgcctgcagggatggggcatccacagccwccttgggcaacctgttccagtgcatcactaccttctgtatatctaaaaaaaggttgaagatgcagattatataggatttatttgaggggtaaacatttgttttaataacttgctgcttctcttgaaaaatatactgtggacacagggcacatcttacagatcccagatgatggtgttggaagaaaatgaactttgatactccacaatggtatcttctcagcttttgcccagtgctctg

SEQ ID NO: 78977 - DNA, 600 bp, Chicken  19866894369409_1
ggctgcacccacagctccgtgacacacattggtctgtcagtcatttctgacacagcctcgttaagcaggagctccaaaaggactgcgcagaggactctgcggtgattctgggacagacccgcaaagagcacagccaaagcacaacctgggattcagtgctcccggacactgactgcagccgggcagcaaacacagagcttaagttacactctgggaactcgccagctcgtggccagcacagtctgcccagagggcacagctgacgttgaggtccacgttaaggaatacacagagtttgcrttaggacagctcaagcacctgaagaattcagcacgggactaagactcagaaggatctttcaawaaggaataacatctacagcttttccactgcgacagctgcatgtttacatgtccacatacacagagcggcaaagccccagcgccaargaacttccaattgcactctaagggttttctcacgcatacgctaacccactaaagccactaaatcaactgacttacgaggttaaagcagatcaaaaaaamccccacaggctgcttgaggagctccctaggagcagcagctgtcaccgggctt

SEQ ID NO: 78978 - DNA, 600 bp, Chicken  19866894369409_2
agcaggagctccaaaaggactgcgcagaggactctgcggtgattctgggacagacccgcaaagagcacagccaaagcacaacctgggattcagtgctcccggacactgactgcagccgggcagcaaacacagagcttaagttacactctgggaactcgccagctcgtggccagcacagtctgcccagagggcacagctgacgttgaggtccacgttaaggaatacacagagtttgcrttaggacagctcaagcacctgaagaattcagcacgggactaagactcagaaggatctttcaawaaggaataacatctacagcttttccactgcgacagctgcatgtttacatgtccacatacacagagcggcaaagccccagcgccaargaacttccaattgcactctaagggttttctcacgcatacgctaacccactaaagccactaaatcaactgacttacgaggttaaagcagatcaaaaaaamccccacaggctgcttgaggagctccctaggagcagcagctgtcaccgggctttggcctgcagctgattatcacctttcaccatctttcttatcgtcccctacgcacagcagacga

SEQ ID NO: 78979 - DNA, 600 bp, Chicken  19866894369409_3
gattcagtgctcccggacactgactgcagccgggcagcaaacacagagcttaagttacactctgggaactcgccagctcgtggccagcacagtctgcccagagggcacagctgacgttgaggtccacgttaaggaatacacagagtttgcrttaggacagctcaagcacctgaagaattcagcacgggactaagactcagaaggatctttcaawaaggaataacatctacagcttttccactgcgacagctgcatgtttacatgtccacatacacagagcggcaaagccccagcgccaargaacttccaattgcactctaagggttttctcacgcatacgctaacccactaaagccactaaatcaactgacttacgaggttaaagcagatcaaaaaaamccccacaggctgcttgaggagctccctaggagcagcagctgtcaccgggctttggcctgcagctgattatcacctttcaccatctttcttatcgtcccctacgcacagcagacgaacgcccaattacccctccgaggaaaacaacttgcagagaagttaatgaaataaaccctcactcgggaatacgaggattgcggccgc

SEQ ID NO: 78980 - DNA, 600 bp, Chicken  19866894369409_4
agagggcacagctgacgttgaggtccacgttaaggaatacacagagtttgcrttaggacagctcaagcacctgaagaattcagcacgggactaagactcagaaggatctttcaawaaggaataacatctacagcttttccactgcgacagctgcatgtttacatgtccacatacacagagcggcaaagccccagcgccaargaacttccaattgcactctaagggttttctcacgcatacgctaacccactaaagccactaaatcaactgacttacgaggttaaagcagatcaaaaaaamccccacaggctgcttgaggagctccctaggagcagcagctgtcaccgggctttggcctgcagctgattatcacctttcaccatctttcttatcgtcccctacgcacagcagacgaacgcccaattacccctccgaggaaaacaacttgcagagaagttaatgaaataaaccctcactcgggaatacgaggattgcggccgcgctgccgcccaattcctgagtgccctattgctgagagctgcggtgttaacatcgacatacacacacacacacaccgtgcggcagggcaaggcagggcag

SEQ ID NO: 78981 - DNA, 600 bp, Chicken  19866894369419_1
tcagttgctatgtatagagtagctttaaatgatgtatctacagaggtgctttacaactaacaatgtaggttggtaagaagtttaatatattttgacataagatactgtaaatcacagagcatcagcagaaggcgattgtacatgtttaactacattatttcacatcagtctaaaccactgtatagtttctgcttctcatacaaatgagtgattctgtgttcagagctatgttcagagctcaagtcagacatatgctctgaacatacactggtgctttatttttgtccagttacctagaarcatggttttaaataaagttttactgactttcttacatagctgcaacttcttctatgtaagctcaaacaggacctgtgtcagtttagctgatgcaacctcacagtaaattcttcmctgctgcttctctactaagaaagcatacctgcagagttttgatagctgacaaatgtttgaaaaccagtgttcattaatacatgctaactattcacgtgtgcctgctttgtagctctgcgccaacagctaccaaatcaaatcctcccactggaatgaatgaagattcatgctttgatactatgtttt

SEQ ID NO: 78982 - DNA, 600 bp, Chicken  19866894369419_2
cagagcatcagcagaaggcgattgtacatgtttaactacattatttcacatcagtctaaaccactgtatagtttctgcttctcatacaaatgagtgattctgtgttcagagctatgttcagagctcaagtcagacatatgctctgaacatacactggtgctttatttttgtccagttacctagaarcatggttttaaataaagttttactgactttcttacatagctgcaacttcttctatgtaagctcaaacaggacctgtgtcagtttagctgatgcaacctcacagtaaattcttcmctgctgcttctctactaagaaagcatacctgcagagttttgatagctgacaaatgtttgaaaaccagtgttcattaatacatgctaactattcacgtgtgcctgctttgtagctctgcgccaacagctaccaaatcaaatcctcccactggaatgaatgaagattcatgctttgatactatgttttactacaaactgctgtacaagtttcagggtactcatgatctccctgtagcttgactgtccttacaaactagcagagccatttttcttccacacatggaaggtggccatttaaaaa

SEQ ID NO: 78983 - DNA, 480 bp, Chicken  19866894369421_1
ctggttcaatcccatttcctctcatcagaatttttaagatctgaattacagcagaacactccccagggggagcatgctgtcgtcacttatcctgttccccttgcttcctttttaggcattaccactgcaacccccgggttcaatattttccatgaacactcttctctgtagggggctgcagccacaagatctcatgtttgtgtatggagagccccctgcaagcggcctgggaggggaaaattaggctaagagcaagagaaactgaggcaaggagcagggggccagtgcctatccagcccrgaggcttcagcccccagatcccagtgctttgctgcacagcatgggctccctgcgctccgcacagccatggtgggttccagccgggggagcacacagttaattatctccagaaatgacttggggcaagcaaagcattcccagggccttgacctgttgcttcaatgggatctcacgtacagt

SEQ ID NO: 78984 - DNA, 600 bp, Chicken  19866894369424_1
tttgtgctctgaaacccacgttgtggatgccccatccctgcaggcattcaaggccaggctggatgtggctctgggcagcctggtctgctggttggtgaccctgcacatagcagggcattggaatgagatgagcattgtggtccttttcaacccaggccattctgtgattcctatatcactgatagaggaatatcagggatagggatcagcttggctgataagcagcctttgccatcaggttgggctctgaggcattcccaccttcataccagcaaacaggagaaaacaactccccccctygtactttaaaatgctttcccatcctgtgatcatcaaatcctttaagtattgtatgatgaaatgcttttcataagagcacygagggaataggcccatttaacacagcccctctacagctttgcattacctcyttctcccatggaaattctgagttctttcttccacagctggataaagaaatccatctctccatggaccgcacagtcagcctttctcctgcactggcagctctggatgtttcagtgcctggtgagatttcgtgcagtgaaaactccccttctcttccccagtcctcttcag

SEQ ID NO: 78985 - DNA, 600 bp, Chicken  19866894369424_2
tggtctgctggttggtgaccctgcacatagcagggcattggaatgagatgagcattgtggtccttttcaacccaggccattctgtgattcctatatcactgatagaggaatatcagggatagggatcagcttggctgataagcagcctttgccatcaggttgggctctgaggcattcccaccttcataccagcaaacaggagaaaacaactccccccctygtactttaaaatgctttcccatcctgtgatcatcaaatcctttaagtattgtatgatgaaatgcttttcataagagcacygagggaataggcccatttaacacagcccctctacagctttgcattacctcyttctcccatggaaattctgagttctttcttccacagctggataaagaaatccatctctccatggaccgcacagtcagcctttctcctgcactggcagctctggatgtttcagtgcctggtgagatttcgtgcagtgaaaactccccttctcttccccagtcctcttcagttcatctatagctcatagaggctcagtatcactgcagctcacgctgtgctggagctgagcatcagcacctcccatttggg

SEQ ID NO: 78986 - DNA, 600 bp, Chicken  19866894369424_3
gcattgtggtccttttcaacccaggccattctgtgattcctatatcactgatagaggaatatcagggatagggatcagcttggctgataagcagcctttgccatcaggttgggctctgaggcattcccaccttcataccagcaaacaggagaaaacaactccccccctygtactttaaaatgctttcccatcctgtgatcatcaaatcctttaagtattgtatgatgaaatgcttttcataagagcacygagggaataggcccatttaacacagcccctctacagctttgcattacctcyttctcccatggaaattctgagttctttcttccacagctggataaagaaatccatctctccatggaccgcacagtcagcctttctcctgcactggcagctctggatgtttcagtgcctggtgagatttcgtgcagtgaaaactccccttctcttccccagtcctcttcagttcatctatagctcatagaggctcagtatcactgcagctcacgctgtgctggagctgagcatcagcacctcccatttggggtcccaaaagctgctgcgtgccccatccctctgcctttctgtggttgggga

SEQ ID NO: 78987 - DNA, 600 bp, Chicken  19866894369426_1
tctgttacttccctgtaagcctttataataaggtttcataccattatcagtgcactataagaaactgattatttggaaagtccaagaggcagttttccagagatggctagtaccatctatagagcaaaacagtacctcctacatgttgaagattacactcaagtcttctacagtgctactgccattccatgcaaattcctttgctaaatttatattagaaacatttgcagtgatctttttaacctccatctgtgtgtccctgatgagagggaagctgactgaaaatttaaagaaaccaaygaacacaactatgaaattaaaactgaggaccccctcaacgatgtagttgccactttagacatttactgactcttattttaaatttaagtcaagagttttaaagaaaagaaaaaagaaaacaagggaaaagcctcctgaaagggttaaacttttcccctagagcttccctaagcggaactgatattcttagtctgacttaaggatatggaatagaaaggctgccaacatctggttgtggtcagagacagataaaagagactaattcagagctggaagaacccatgtacagcattctgtgtt

SEQ ID NO: 78988 - DNA, 600 bp, Chicken  19866894369427_1
caacattattatttcttcacagaatgtgctgtctttgattatttatttgttactggaaaatgactgcagatttagcaaatgtaatcactgccggcttcttggaaaagcttaatttttccatgtacatttaacaccttcttacataactgagttagcttttgtctgagcaggaagtttctgacagacatagatttttaaatctcacaaagcctacttgtaacatgagcagagcatgttctgtacactggggtccgggctgcctacgccagagtactgagtggttctgctgcaagtgtgtcyccctaggcccctattcttacctgaaatgtaccttggggctaaaaatggtccaaaaggtgatggtgagccttttcactgaacagttaacagggtcatggttatgagaggagataggacttgccagctcttctgtcaaaaatggaagcttggcctgttgtacaaagggctgaagatccctattgacaggcttctgataaacatccagatacttgaatacacatctaaattgaatagaaaggccagaaagaagatggtttttgtggtcaaattccaggctgtgtcttaggagatttacatttc

SEQ ID NO: 78989 - DNA, 474 bp, Chicken  19866894369431_1
gaaagtttatacacagaactaacttaaatccatttgataaaacattacagtaaaagcaattgcagtgcatgtccatgtctttatatatcaataaatagtaaggtctgatcttgtaagtctgtaaacaagtacaaaatacaaaaagtcagatttaataaacaatttaagcaggtaaaacaagatataactggcttaaattggacataaattctaagttgtaatgctggaagcccctgctgatttgcatgctgagtgactttgaaaataacataattgcaacagtcatatcctgtacagctygttagtatcatgcacaaacatttaaactttgacaggcttcagatgcttatgctgaaacctaactaaaatctacagatcgagttcttgatttcctgaattctttgaaaagtttgacttaataaatattttccaacatacaaaatgtgtggtgggcctaaactgagaacacaacct

SEQ ID NO: 78990 - DNA, 600 bp, Chicken  19866894369432_1
ccttagacactgacctccactgcaaaatcaacaaatgtctcttgacagtttgaggatattatatgtcctcaatacccttcatgcaatatcctcttacacttcagagcagtagagcattttatgagagttctggtggcctctaaaagagcttgaaatatttggtgtcttcaatacaattgtataatgtgtacttcagaaagtaattgtacctttccattttctcttctatctcaggcattctgtcagtgatgataagggaaagatttcacctcaaatagtagtgccattccccccaacacrctgtgatttcaatgatgtaaagggaaggtggagtgaaccagctgatacaccaatcatgtctatctttcaaacggaggaggaacaggaagcaacagtgtggtagtgcaaaactggagtctaatgtatgacaaaagcacatttgtgtatatcttaggcaattttgtgtggtctatcacagcaacatttaaatgctgtaaaactgcaaatatgtaatttcagagtaaattgagttatctggttctccaccattcccttcccagtgcagtcactggctctcacrtctatgtgagagtttttcat

SEQ ID NO: 78991 - DNA, 600 bp, Chicken  19866894369432_2
gtgccattccccccaacacrctgtgatttcaatgatgtaaagggaaggtggagtgaaccagctgatacaccaatcatgtctatctttcaaacggaggaggaacaggaagcaacagtgtggtagtgcaaaactggagtctaatgtatgacaaaagcacatttgtgtatatcttaggcaattttgtgtggtctatcacagcaacatttaaatgctgtaaaactgcaaatatgtaatttcagagtaaattgagttatctggttctccaccattcccttcccagtgcagtcactggctctcacrtctatgtgagagtttttcattcagtagatgttagattcagctcatgctcaataccttattctgagagttagggaaagttctttgtagcaatttccacagcacgtactaatgtgtttatactctgtatcagaagactcctacaaaacattagaaatttttcacttgataccttagtcataaaatacaactgatagagctaagacccattaatgtgattaatgggaacgtcggcatggaagaagagagtgaatggttatgagatggaatgaatcaattcaagagtcatcgatgggacaaaat

SEQ ID NO: 78992 - DNA, 599 bp, Chicken  19866894369443_1
  misc_feature (1)..(119): n is any nucleotide
nnnnnnnnnnnnnnnnnnnnnnnnnnnnnnnnnnnnnnnnnnnnnnnnnnnnnnnnnnnnnnnnnnnnnnnnnnnnnnnnnnnnnnnnnnnnnnnnnnnnnnnnnnnnnnnnnnnnnnncgtgcatgaggtcttccctctgcctagctggtgtcctatctccccttccacagaccatttctgccgtgcaagttacacagcgtacacaggaggaacgggatttaagatgctctctcctgagctcttcccccagaggggaacttcgcaggatggctcagtcagacctatggctgcccaaagrgccggccccagcccccatcccagctcagcagctgctccctgctcctttctcagccacccaatgctgtcgctcaggctctgtcctggaagataaactggccatgaaaaaatattggctttctgtcaggtttgctccacgttttgctccaacagrggaagtatcagggtaggactgccacctttaggacagcaggtagctccaagccctttgtgacagcagcaagtcagctctctgctggggtccccgatatgaccccagcttttcagtgctttgctcaatgctctgagacaccagcaagt

SEQ ID NO: 78993 - DNA, 600 bp, Chicken  19866894369443_2
cctatctccccttccacagaccatttctgccgtgcaagttacacagcgtacacaggaggaacgggatttaagatgctctctcctgagctcttcccccagaggggaacttcgcaggatggctcagtcagacctatggctgcccaaagrgccggccccagcccccatcccagctcagcagctgctccctgctcctttctcagccacccaatgctgtcgctcaggctctgtcctggaagataaactggccatgaaaaaatattggctttctgtcaggtttgctccacgttttgctccaacagrggaagtatcagggtaggactgccacctttaggacagcaggtagctccaagccctttgtgacagcagcaagtcagctctctgctggggtccccgatatgaccccagcttttcagtgctttgctcaatgctctgagacaccagcaagtgtcaagatgcatgtgtgttgtgttgggttttttttttccttatcagtactagtttctattctcccaagagccacaagtcacagtctgtatctctgatattttcgtaactttttgggctttctcacttgcaagaaagcctttcagcctgcaggga

SEQ ID NO: 78994 - DNA, 600 bp, Chicken  19866894369444_1
aagcgtaagctggctcacctgcgacgggtgaaaattgagaagctccaagagatggtgctgaagggacagagacttccgctggcacagcctcagttgagggcagccgatgcaacgccagcacctccagattcctacacttcggatgcaaaccctcctccttcagctgtgccccgacgaatacctccccctccgccttcggtcccagcaggacgctttcctactccgtttactgcagccgtgagttcaggtccagctgtttcttatccaggtgctccgtatcctcctctcccacctcgagcyggagctcaggctgcaactcagttgccacagccaggatgcccatctcagtttgtaccacagtatcctccagctcttccccaaagaccgcctcgctttccaccacatcctggttttattctccagtgaatattttggtgcgcctgacttacgtattggtgcttatcgttcctttttctccccctgtcagagacttaatgtaggcagtggaaagcctctgttttttgcacaatggagtataaaatttgagctctggcacagaggtttgaaattgtgtctggtggatattattgttttcaaata

SEQ ID NO: 78995 - DNA, 599 bp, Chicken  19866894369445_1
  misc_feature (1)..(144): n is any nucleotide
nnnnnnnnnnnnnnnnnnnnnnnnnnnnnnnnnnnnnnnnnnnnnnnnnnnnnnnnnnnnnnnnnnnnnnnnnnnnnnnnnnnnnnnnnnnnnnnnnnnnnnnnnnnnnnnnnnnnnnnnnnnnnnnnnnnnnnnnnnnnnnnncattcctttccagagcaggaatatatgcttgcacactctcctgatttggaagaagtcaattttctattttccagaacatgttttatttgctttctgcagctgattaacatataaaatacgcttacatctgtcttctgttttgctttgtcccttgamtgttaattgtamggagaggkgcacgtgtgggagctgttcaatcttttgcttttctctgaagtgatggggcaagaactgtgctgatggggactgctcagggctcacccccatggacagcttttgggtggcacagggagacgcaggtgggggctgaacactgaaagaaatgctttgtcactatcggcagaattctacattctgacacttatttctcactgatgtgccacaaagtggcatctctcaggtgcaggtgttagtaaaagcagtcactaaacatgagttttatttggtttactcas

SEQ ID NO: 78996 - DNA, 599 bp, Chicken  19866894369445_2
  misc_feature (1)..(132): n is any nucleotide
nnnnnnnnnnnnnnnnnnnnnnnnnnnnnnnnnnnnnnnnnnnnnnnnnnnnnnnnnnnnnnnnnnnnnnnnnnnnnnnnnnnnnnnnnnnnnnnnnnnnnnnnnnnnnnnnnnnnnnnnnnnnnnnnnnnncattcctttccagagcaggaatatatgcttgcacactctcctgatttggaagaagtcaattttctattttccagaacatgttttatttgctttctgcagctgattaacatataaaatacgcttacatctgtcttctgttttgctttgtcccttgamtgttaattgtamggagaggkgcacgtgtgggagctgttcaatcttttgcttttctctgaagtgatggggcaagaactgtgctgatggggactgctcagggctcacccccatggacagcttttgggtggcacagggagacgcaggtgggggctgaacactgaaagaaatgctttgtcactatcggcagaattctacattctgacacttatttctcactgatgtgccacaaagtggcatctctcaggtgcaggtgttagtaaaagcagtcactaaacatgagttttatttggtttactcastatttcaaaagt

SEQ ID NO: 78997 - DNA, 599 bp, Chicken  19866894369445_3
  misc_feature (1)..(124): n is any nucleotide
nnnnnnnnnnnnnnnnnnnnnnnnnnnnnnnnnnnnnnnnnnnnnnnnnnnnnnnnnnnnnnnnnnnnnnnnnnnnnnnnnnnnnnnnnnnnnnnnnnnnnnnnnnnnnnnnnnnnnnnnnnnncattcctttccagagcaggaatatatgcttgcacactctcctgatttggaagaagtcaattttctattttccagaacatgttttatttgctttctgcagctgattaacatataaaatacgcttacatctgtcttctgttttgctttgtcccttgamtgttaattgtamggagaggkgcacgtgtgggagctgttcaatcttttgcttttctctgaagtgatggggcaagaactgtgctgatggggactgctcagggctcacccccatggacagcttttgggtggcacagggagacgcaggtgggggctgaacactgaaagaaatgctttgtcactatcggcagaattctacattctgacacttatttctcactgatgtgccacaaagtggcatctctcaggtgcaggtgttagtaaaagcagtcactaaacatgagttttatttggtttactcastatttcaaaagtgggaagac

SEQ ID NO: 78998 - DNA, 600 bp, Chicken  19866894369445_4
mtgttaattgtamggagaggkgcacgtgtgggagctgttcaatcttttgcttttctctgaagtgatggggcaagaactgtgctgatggggactgctcagggctcacccccatggacagcttttgggtggcacagggagacgcaggtgggggctgaacactgaaagaaatgctttgtcactatcggcagaattctacattctgacacttatttctcactgatgtgccacaaagtggcatctctcaggtgcaggtgttagtaaaagcagtcactaaacatgagttttatttggtttactcastatttcaaaagtgggaagactgggggaagaaaatgacctcgtttcatctgcctcattacagaaggatgcagcatgaattgtggagaaaacaatgaaaatctgcagagccacatcttcaggctgcgcattaaggtacagcatttaacttgcatgataaagtatggtaaatgggagaaaggtagtactcctgccaggggaattaggtttgtgtcccatgggaagttggtggaatagagtttgcccgtggtgaactgggagattaccctggtttcagatgggatagagttaattttcttccta

SEQ ID NO: 78999 - DNA, 600 bp, Chicken  19866894369447_1
cgcatactgtaaccagcatgcagacactctcctgttgcacatcattaacaactgccacaaagtagcagaggtttcactgctgagcaatctttgcttaaagggattaccatctctactgacaaatagtgtgagcacgctgttctttcccttttcattaagcattttccaagaccttataactatttttgcacaggtgtaacccttccagaaaggagacagctgcaattgcctgcaaaccagttctgcacagaattggtgacagacttctgcaaaacctcctgagcactcatcagagcagasttgaagggcacacatcattcacytctcatatgcaaaaagacaataaatcttaactgattgttaaaaaagttttataatgttttaattatttttaattataaatttgactatgttttcctattacagttmattccttcacagcacmacccactactgatagcaaggatagaggctccttgctccaggtgtcagaataacaacatattaccacgcagttaccaactgcatgatrcagcaaaaaatatatttgttgttccgttcacatttaagattttaggctacaagtagctatgggagggt

SEQ ID NO: 79000 - DNA, 600 bp, Chicken  19866894369447_2
acactctcctgttgcacatcattaacaactgccacaaagtagcagaggtttcactgctgagcaatctttgcttaaagggattaccatctctactgacaaatagtgtgagcacgctgttctttcccttttcattaagcattttccaagaccttataactatttttgcacaggtgtaacccttccagaaaggagacagctgcaattgcctgcaaaccagttctgcacagaattggtgacagacttctgcaaaacctcctgagcactcatcagagcagasttgaagggcacacatcattcacytctcatatgcaaaaagacaataaatcttaactgattgttaaaaaagttttataatgttttaattatttttaattataaatttgactatgttttcctattacagttmattccttcacagcacmacccactactgatagcaaggatagaggctccttgctccaggtgtcagaataacaacatattaccacgcagttaccaactgcatgatrcagcaaaaaatatatttgttgttccgttcacatttaagattttaggctacaagtagctatgggagggtagaagtataaaagatmtaaggca

SEQ ID NO: 79001 - DNA, 600 bp, Chicken  19866894369447_3
gagcacgctgttctttcccttttcattaagcattttccaagaccttataactatttttgcacaggtgtaacccttccagaaaggagacagctgcaattgcctgcaaaccagttctgcacagaattggtgacagacttctgcaaaacctcctgagcactcatcagagcagasttgaagggcacacatcattcacytctcatatgcaaaaagacaataaatcttaactgattgttaaaaaagttttataatgttttaattatttttaattataaatttgactatgttttcctattacagttmattccttcacagcacmacccactactgatagcaaggatagaggctccttgctccaggtgtcagaataacaacatattaccacgcagttaccaactgcatgatrcagcaaaaaatatatttgttgttccgttcacatttaagattttaggctacaagtagctatgggagggtagaagtataaaagatmtaaggcatagctaaggtaagacactcttgtatctatgtatacttataacccaacatactgaacaggtcagttctccttaacctgtgtatcagcccaaatatattcaggtagst

SEQ ID NO: 79002 - DNA, 600 bp, Chicken  19866894369447_4
cccttttcattaagcattttccaagaccttataactatttttgcacaggtgtaacccttccagaaaggagacagctgcaattgcctgcaaaccagttctgcacagaattggtgacagacttctgcaaaacctcctgagcactcatcagagcagasttgaagggcacacatcattcacytctcatatgcaaaaagacaataaatcttaactgattgttaaaaaagttttataatgttttaattatttttaattataaatttgactatgttttcctattacagttmattccttcacagcacmacccactactgatagcaaggatagaggctccttgctccaggtgtcagaataacaacatattaccacgcagttaccaactgcatgatrcagcaaaaaatatatttgttgttccgttcacatttaagattttaggctacaagtagctatgggagggtagaagtataaaagatmtaaggcatagctaaggtaagacactcttgtatctatgtatacttataacccaacatactgaacaggtcagttctccttaacctgtgtatcagcccaaatatattcaggtagstgaagcactcagaacag

SEQ ID NO: 79003 - DNA, 600 bp, Chicken  19866894369447_5
caaaccagttctgcacagaattggtgacagacttctgcaaaacctcctgagcactcatcagagcagasttgaagggcacacatcattcacytctcatatgcaaaaagacaataaatcttaactgattgttaaaaaagttttataatgttttaattatttttaattataaatttgactatgttttcctattacagttmattccttcacagcacmacccactactgatagcaaggatagaggctccttgctccaggtgtcagaataacaacatattaccacgcagttaccaactgcatgatrcagcaaaaaatatatttgttgttccgttcacatttaagattttaggctacaagtagctatgggagggtagaagtataaaagatmtaaggcatagctaaggtaagacactcttgtatctatgtatacttataacccaacatactgaacaggtcagttctccttaacctgtgtatcagcccaaatatattcaggtagstgaagcactcagaacagtttatttgaaagtttatgacaggaactcaacagaagcctataaatcatgataaaaaccaagattgtttcctatgctcccagcttacc

SEQ ID NO: 79004 - DNA, 600 bp, Chicken  19866894369447_6
attcacytctcatatgcaaaaagacaataaatcttaactgattgttaaaaaagttttataatgttttaattatttttaattataaatttgactatgttttcctattacagttmattccttcacagcacmacccactactgatagcaaggatagaggctccttgctccaggtgtcagaataacaacatattaccacgcagttaccaactgcatgatrcagcaaaaaatatatttgttgttccgttcacatttaagattttaggctacaagtagctatgggagggtagaagtataaaagatmtaaggcatagctaaggtaagacactcttgtatctatgtatacttataacccaacatactgaacaggtcagttctccttaacctgtgtatcagcccaaatatattcaggtagstgaagcactcagaacagtttatttgaaagtttatgacaggaactcaacagaagcctataaatcatgataaaaaccaagattgtttcctatgctcccagcttaccttttttcacctcgatgttcaaatttgactctaacatcgttctgtaacaaaaaggatacagaaggaccactattagtttgctact

SEQ ID NO: 79005 - DNA, 600 bp, Chicken  19866894369447_7
mattccttcacagcacmacccactactgatagcaaggatagaggctccttgctccaggtgtcagaataacaacatattaccacgcagttaccaactgcatgatrcagcaaaaaatatatttgttgttccgttcacatttaagattttaggctacaagtagctatgggagggtagaagtataaaagatmtaaggcatagctaaggtaagacactcttgtatctatgtatacttataacccaacatactgaacaggtcagttctccttaacctgtgtatcagcccaaatatattcaggtagstgaagcactcagaacagtttatttgaaagtttatgacaggaactcaacagaagcctataaatcatgataaaaaccaagattgtttcctatgctcccagcttaccttttttcacctcgatgttcaaatttgactctaacatcgttctgtaacaaaaaggatacagaaggaccactattagtttgctactgcctcccatagtgaaagccatagaatttaattcagtaatcataataatgatagtcataagcaaaaccttttagcagtctatatgactttcctgttctttctgatttaccaac

SEQ ID NO: 79006 - DNA, 599 bp, Chicken  19866894369452_1
  misc_feature (1)..(26): n is any nucleotide
nnnnnnnnnnnnnnnnnnnnnnnnnnatgaggaatggtgcttgtagatttgttgcttttaaaccattgaggtttaagtttccaaatccttggtggtaggtgagaaactgtccccaaaacttcaaacccaggatattggaagagcagacctaaggctcctcagggaagtaggcagcaaggtcctctgggaaactgcttttgaagactttggggtccatcagtgctggtcactttgaagtaccagctctctagagtacagaaacaggcgataccataatgttggaggtcatgcaagtggagyagaaggtcagcttgcctgagcagggatcttgtgcagcttaggtggaaaaagtgagtgtatgagcactggatgtgaggctgagtaacatgargaggctacagaggtgttacttaacattgtaaaaagaatatttgtgtgacaaaasctcaattagaattgaagcttgtcagtagtgtggggaactggagtaagggcttcttaaaatatgctaatggcaaaagaaggaccagggaatggtcccatcacaaacaaaatgtaacagaacattggccataccaccaatatctgcctctgatgtc

SEQ ID NO: 79007 - DNA, 600 bp, Chicken  19866894369452_2
gtggtaggtgagaaactgtccccaaaacttcaaacccaggatattggaagagcagacctaaggctcctcagggaagtaggcagcaaggtcctctgggaaactgcttttgaagactttggggtccatcagtgctggtcactttgaagtaccagctctctagagtacagaaacaggcgataccataatgttggaggtcatgcaagtggagyagaaggtcagcttgcctgagcagggatcttgtgcagcttaggtggaaaaagtgagtgtatgagcactggatgtgaggctgagtaacatgargaggctacagaggtgttacttaacattgtaaaaagaatatttgtgtgacaaaasctcaattagaattgaagcttgtcagtagtgtggggaactggagtaagggcttcttaaaatatgctaatggcaaaagaaggaccagggaatggtcccatcacaaacaaaatgtaacagaacattggccataccaccaatatctgcctctgatgtcctgggccaacatcataaaataggaggccttacttttggagttgttctcatagcttgcattgaataggatgagcttgaaatgtgacctttggt

SEQ ID NO: 79008 - DNA, 600 bp, Chicken  19866894369452_3
gacctaaggctcctcagggaagtaggcagcaaggtcctctgggaaactgcttttgaagactttggggtccatcagtgctggtcactttgaagtaccagctctctagagtacagaaacaggcgataccataatgttggaggtcatgcaagtggagyagaaggtcagcttgcctgagcagggatcttgtgcagcttaggtggaaaaagtgagtgtatgagcactggatgtgaggctgagtaacatgargaggctacagaggtgttacttaacattgtaaaaagaatatttgtgtgacaaaasctcaattagaattgaagcttgtcagtagtgtggggaactggagtaagggcttcttaaaatatgctaatggcaaaagaaggaccagggaatggtcccatcacaaacaaaatgtaacagaacattggccataccaccaatatctgcctctgatgtcctgggccaacatcataaaataggaggccttacttttggagttgttctcatagcttgcattgaataggatgagcttgaaatgtgacctttggttctgaaatcctctgcatcctctagtagcatgtcagtactcaaaagtaagctggt

SEQ ID NO: 79009 - DNA, 417 bp, Chicken  19866894369452_4
gggaatggtcccatcacaaacaaaatgtaacagaacattggccataccaccaatatctgcctctgatgtcctgggccaacatcataaaataggaggccttacttttggagttgttctcatagcttgcattgaataggatgagcttgaaatgtgacctttggttctgaaatcctctgcatcctctagtagcatgtcagtactcaaaagtaagctggtgattgggcttttaacatatacgagtctgtttttagtccttactgagctgtgtggaagatgtaacatagctgtaaggagtgatgygacatgtaatcagaatcaagagcccagggatcattttgtatcctctaattcctgaaggaatctccagtacatccttccagcgagcacaagtcatatggctgctgcaaatacgagagt

SEQ ID NO: 79010 - DNA, 483 bp, Chicken  19866894369459_1
aatccctcttgtagtgagcagccccaaactgagcacaatattcaagagttcaaagggacaattgatcatactatgtccttgcaggctgggatgctgttggctttcttggtcacatgagcacactgctggctcttgtttagctggatttttatcagcaccccaagtttattttctgtcaggcaacttttcagtcacaattcctcaagccactaccactacatagcactgttacgacccaagtggagtatctaatactgagccttgatgaatggcttgcttgctactggacttgacccaaawatctagcctccacaaagttttccgtggggtttcgcctcttctctcaggtaaccagcaataggacaagagggaatggcctcattttgtgtcaggagaagttcagattggatattatgaaattcgttcactggaactcttttagcctggccatacagcccgattcttaactcagtaaaccttaca

SEQ ID NO: 79011 - DNA, 600 bp, Chicken  19866894369461_1
attctcgcactattgaaagcggcaggtgtgaaattatagcaaacagtgaagtatctctatccttgtgagggattcagagaacccaatttgttatggaaccgtgctctgaatatttgaagcttttcagggttgttgtgagcagtgcagcctggatgtttctggtaacctagtttgtgttcgtgtgctctttctgttatagagggtaaaatctaaggattttagaaagcaaagtatagatgaagaagatgttaaaggagcgtttttgttagattttgtgttggaagtactgcttgcagtcgktaaggatggatcataattctttaaacaataactgtatgctttagatatatttttaagtagctattatgtaaaataatttaaaattgaagtttagtattccatatctgtgtttaatacacagatgagtggagaaacaagaggacccaagatgatgtcaggtttagctctaattcatcctccaggccttttctaaaacttacatgaggagtcaatggaatggtttacagacataaagttatcattgggatcccttccctgcacaagttttacatcgagtcaaaacagtgcagcgaatgagac

SEQ ID NO: 79012 - DNA, 540 bp, Chicken  19866894369466_1
cactgcattgcctgtagttctttaggcaccaaatcaaggctccgtccaacctgacctatgatttctaatgacagatttgtgaaaaaggtaactacatacagactagaccttaaggacatagacaaacacagggcaggaaaacttaaaaagttcttagacgtgctgcataattatctaagtagctaatccggctttttgtatttcctactgatctatatggtcagaaataacagtaaataatttctattcatctcaaatgctcttctccaaatgcaagggcctgaatgaaaacagtaattktcttctttttattgtaactaaaataaacttccggtacatactggtaacaggcctcttagagcaaacaattaactgcttggaaacagggttccttttatgtggcaagaccacccatccgtgaacaaactctaaaatactggctatatgctaaaaagagtaacttgaaagcaaagttaaatggattccatgagatgacctaggcaccacaagcagcatttacctgatgctcagcttcctcag

SEQ ID NO: 79013 - DNA, 600 bp, Chicken  19866894369468_1
tcttggctggctgagctggccgtctgccctcccggtgcagctggggagaagaactggagccaggaggagcaaagtagctgtcagtgtggggtggctgtgtcagtgtggggctgtcccttgtcctgtgagcccacagcctccctgctttaacctagtgcttggatggtgagaaggaggcatgctttttagctgtggagtttgggcagggaggaggacagtcatagcctagctcctatgtatcgtgctggggaatgcatttccctttcatttttctatattttgtgcttaatgttaatcgtycccagacgcacctaacagtaccttggcatttaaaaatcaaatactgatcctaaaagccttgccacttcagaaaagaaaggaagacaaacaaacaaacagaaaaaamacagagttttttgttggcttgttaagaatgtgagagatgcagtaaaatcggctttttggtttatamgtgctgcccattcccaggggaggaatgcggacctctgcatggccaactgccaccgtcaccacttccagccttgctgctgaggtttcatgtgaagccaaagggcctgggaagtttgggaaaccagtgac

SEQ ID NO: 79014 - DNA, 600 bp, Chicken  19866894369468_2
ggggctgtcccttgtcctgtgagcccacagcctccctgctttaacctagtgcttggatggtgagaaggaggcatgctttttagctgtggagtttgggcagggaggaggacagtcatagcctagctcctatgtatcgtgctggggaatgcatttccctttcatttttctatattttgtgcttaatgttaatcgtycccagacgcacctaacagtaccttggcatttaaaaatcaaatactgatcctaaaagccttgccacttcagaaaagaaaggaagacaaacaaacaaacagaaaaaamacagagttttttgttggcttgttaagaatgtgagagatgcagtaaaatcggctttttggtttatamgtgctgcccattcccaggggaggaatgcggacctctgcatggccaactgccaccgtcaccacttccagccttgctgctgaggtttcatgtgaagccaaagggcctgggaagtttgggaaaccagtgacaccggatccgtaccacaaaggtgaatgctgcatgctcgctgcgtgtgtgtgcagagacacggtggctccggcttttgcctccaggagagagctgcccacggacagt

SEQ ID NO: 79015 - DNA, 600 bp, Chicken  19866894369468_3
ggaggcatgctttttagctgtggagtttgggcagggaggaggacagtcatagcctagctcctatgtatcgtgctggggaatgcatttccctttcatttttctatattttgtgcttaatgttaatcgtycccagacgcacctaacagtaccttggcatttaaaaatcaaatactgatcctaaaagccttgccacttcagaaaagaaaggaagacaaacaaacaaacagaaaaaamacagagttttttgttggcttgttaagaatgtgagagatgcagtaaaatcggctttttggtttatamgtgctgcccattcccaggggaggaatgcggacctctgcatggccaactgccaccgtcaccacttccagccttgctgctgaggtttcatgtgaagccaaagggcctgggaagtttgggaaaccagtgacaccggatccgtaccacaaaggtgaatgctgcatgctcgctgcgtgtgtgtgcagagacacggtggctccggcttttgcctccaggagagagctgcccacggacagtcatgctgacagtgtaacagaagcagctgcgtgtgagccccagagatgtgtgggaggtttttattta

SEQ ID NO: 79016 - DNA, 600 bp, Chicken  19866894369468_4
catgtgaagccaaagggcctgggaagtttgggaaaccagtgacaccggatccgtaccacaaaggtgaatgctgcatgctcgctgcgtgtgtgtgcagagacacggtggctccggcttttgcctccaggagagagctgcccacggacagtcatgctgacagtgtaacagaagcagctgcgtgtgagccccagagatgtgtgggaggtttttatttaagtcctgtccttaaaggatgctgccttgaagggtctttagtgaggatggatgcagcctaacccagtcagtctgtcctgccactakctgggaataccagcacttccagtgatgcatgctgctgggagactgttgtgcctgaagggttaaattagtggtgctttcaaagctgggatgcattcagagtattgcaattgcacttactgataccgggaaatcttagttcaaccctctttcccagcaggtctgcgtgatggtgaagtggttgttgcatacctgcactgggatggagctgagatgctcaggcgtagtgcttctgcacccagtgtcgggacattattgccttgttcctgtgcttcatccagatagagctgaagcagaagtagc

SEQ ID NO: 79017 - DNA, 599 bp, Chicken  19866894369469_1
  misc_feature (1)..(169): n is any nucleotide
nnnnnnnnnnnnnnnnnnnnnnnnnnnnnnnnnnnnnnnnnnnnnnnnnnnnnnnnnnnnnnnnnnnnnnnnnnnnnnnnnnnnnnnnnnnnnnnnnnnnnnnnnnnnnnnnnnnnnnnnnnnnnnnnnnnnnnnnnnnnnnnnnnnnnnnnnnnnnnnnnnnnnnnnnaattccacttctaagaaataccacagcccatggggagaaaaaccaactttcacagagtaagcatagcaggtagttggaaatcatatcaaatacttttatttccagcttctgaatgaattaatcactttaartgttgctggaaacctgtcttaaaaaacaaacaaacaaacaaacaaacaaacaactcaacgctattgtgagaaataattctataggtaacacagaacaactcttctgctcatcacccagattttagaaattgctgaagtatgtagtctggatgtgagaaagctaacacactgctctcctggaaaggtttcacagacagttatctgtttttatgaaaagaacaagatgttctgagagtccacagctcacagttgatatgataatcagtctacaatgtcacttttctcctttttgctatttt

SEQ ID NO: 79018 - DNA, 554 bp, Chicken  19866894369469_2
ctcttctgctcatcacccagattttagaaattgctgaagtatgtagtctggatgtgagaaagctaacacactgctctcctggaaaggtttcacagacagttatctgtttttatgaaaagaacaagatgttctgagagtccacagctcacagttgatatgataatcagtctacaatgtcacttttctcctttttgctatttttttttttttttttttggtctcaagagtaactcttaacagacaaagcacatgtaatcttacagagcagatgaaaatcttttgactagatcaacagaacaycacaacgctagggttagccttttgtttgctttttatcaagacatctctaaaaatgattgcagtactttaatttctatccttaacatttttatgaagcttcattttttcacttacaatttttacagttaaaatagcagaccagtgtctttttcagaaaggcactaacttgaaaactgatagaagcaatataccagttatgaaatttccagcttaaacagcaggtcttcaccacaccgaccatcagtctgtcatca

SEQ ID NO: 79019 - DNA, 600 bp, Chicken  19866894369470_1
ggaaggactttcccattagtgggttttgtgaacttgttacactgggtgttttgtagggctacatgctttgaattttacattatgaaggaagataaatttgcaagcaagaaaatatagaagtaatcattttcattgcaatattttgtccgtgttgatatttatgcaatgaaatgtaataaatcaaatacaggaaagggatgcaaattactgtagctgtacagaactagggagacaggaggaagaagtgcaaattttatacacaggctcaccttcatactgcaaagaattgttttagcactygtttgttcagtcctttactgggaagcactgagttcagctgcactgtaattggcaaaagtgatttcaggtgtgaaaagtgcagtcatgcactggagtatggttttgtcctccttaactgaaacgygagaacatggaaccacaaggcattcttcaggggaaaaacctgaattctcctttattttttctgaaggagttttaattagtgttatttaaggattttctttttttgcaattaaaagtaatgaaatgctctgctgtgttacaattatacccacactgaaaatgtgcagcgatttgctg

SEQ ID NO: 79020 - DNA, 600 bp, Chicken  19866894369470_2
cattttcattgcaatattttgtccgtgttgatatttatgcaatgaaatgtaataaatcaaatacaggaaagggatgcaaattactgtagctgtacagaactagggagacaggaggaagaagtgcaaattttatacacaggctcaccttcatactgcaaagaattgttttagcactygtttgttcagtcctttactgggaagcactgagttcagctgcactgtaattggcaaaagtgatttcaggtgtgaaaagtgcagtcatgcactggagtatggttttgtcctccttaactgaaacgygagaacatggaaccacaaggcattcttcaggggaaaaacctgaattctcctttattttttctgaaggagttttaattagtgttatttaaggattttctttttttgcaattaaaagtaatgaaatgctctgctgtgttacaattatacccacactgaaaatgtgcagcgatttgctgttactgatttagctgcaaatagaagatgaatgcctgtgtttatacagtgcgtgcraggcaacatttatcagccagttggcagtcaaaaccatattgctgttaatttttttccccataaaagcca

SEQ ID NO: 79021 - DNA, 600 bp, Chicken  19866894369470_3
aagtgatttcaggtgtgaaaagtgcagtcatgcactggagtatggttttgtcctccttaactgaaacgygagaacatggaaccacaaggcattcttcaggggaaaaacctgaattctcctttattttttctgaaggagttttaattagtgttatttaaggattttctttttttgcaattaaaagtaatgaaatgctctgctgtgttacaattatacccacactgaaaatgtgcagcgatttgctgttactgatttagctgcaaatagaagatgaatgcctgtgtttatacagtgcgtgcraggcaacatttatcagccagttggcagtcaaaaccatattgctgttaatttttttccccataaaagccatctaattataagtttgatcttttttcttttttttccttctcctgtctagggtgtggattcagggtttgttcccagcgttcatgattttgataagaaacttactgaggctgacgcttacttacagatcttgatagaccaactgaaggtaagtcaacaaactggtgtagttattgcactgtggggatttcaaggtctgtctgaaaggaagctcagcagagggagaaagtaatg

SEQ ID NO: 79022 - DNA, 564 bp, Chicken  19866894369479_1
tcacaagaacatatcccagctttctcccagccatttcccaagggcagccctgccccaggctgactgctctgcaggagccctttctcaccgtgtactacaggtactgtgctacgggtaaaccacaacaaatactacagtttgcgtttacatcattgttccttatggtgtacttcctttcggtagaaggtttttggaagctgaggccctgcaggtgacttacattggaaatgagatgagcattgtcataacaacgcactgcaaagcacctcctgaggacgggtaaacagttttcagaattcrtttctcattcctgttaatagactttgtttgaagagatgatatcaccgctccttgagcactcacamtgcggctcctgctggaggtgggtgagctgaaaacaaaccctgctctcagaaatggcgataatttgttctgcagaaaaaggtctccatcgtgcccaccgcttcacctgatctcattgctattccgtacttcattagcatccaccccaaacggtaattactggtagctcagtgcccgatgcttaccgcataactaaagctg

SEQ ID NO: 79023 - DNA, 499 bp, Chicken  19866894369479_2
gctctgcaggagccctttctcaccgtgtactacaggtactgtgctacgggtaaaccacaacaaatactacagtttgcgtttacatcattgttccttatggtgtacttcctttcggtagaaggtttttggaagctgaggccctgcaggtgacttacattggaaatgagatgagcattgtcataacaacgcactgcaaagcacctcctgaggacgggtaaacagttttcagaattcrtttctcattcctgttaatagactttgtttgaagagatgatatcaccgctccttgagcactcacamtgcggctcctgctggaggtgggtgagctgaaaacaaaccctgctctcagaaatggcgataatttgttctgcagaaaaaggtctccatcgtgcccaccgcttcacctgatctcattgctattccgtacttcattagcatccaccccaaacggtaattactggtagctcagtgcccgatgcttaccgcataactaaagctg

SEQ ID NO: 79024 - DNA, 600 bp, Chicken  19866894369483_1
ggatgcagccaaagggttgtgatcaatgggtctgtgtcagggtggaggccggtcacaagtggtgtccctcaggggttgatcttgggaacagtgctcttcaacatcttcatcaatgacacagacgatggcattgagtgcaccctcagcaagtctgcggatgacaccaagctgagcagtgcagtcaatactttggaaggaagggaagccatccagagggacctggacaggctggagaagtgggcccatgaaaaccaaatgaggttcaataaggccaaggatggatagtgataggacaagggrgratggttttaaactgagacgggagaggtttaggttagatattaggaggaagtttttcacccagagggtggtgacacactgttcacaggttgcctgaggaggttgtggatgccccatccctggaggcattcaaggccaggctggatgtggctctgggcagcctggtctggtggttggtgaccctgcacatagcagggttgaaacttgatgatcattgtggtccttttcaacccaggccattctatgattctatgatcttctttaaggtgaatgagagctaccagctttctattctgtcag

SEQ ID NO: 79025 - DNA, 600 bp, Chicken  19866894369483_2
atgcagccaaagggttgtgatcaatgggtctgtgtcagggtggaggccggtcacaagtggtgtccctcaggggttgatcttgggaacagtgctcttcaacatcttcatcaatgacacagacgatggcattgagtgcaccctcagcaagtctgcggatgacaccaagctgagcagtgcagtcaatactttggaaggaagggaagccatccagagggacctggacaggctggagaagtgggcccatgaaaaccaaatgaggttcaataaggccaaggatggatagtgataggacaagggrgratggttttaaactgagacgggagaggtttaggttagatattaggaggaagtttttcacccagagggtggtgacacactgttcacaggttgcctgaggaggttgtggatgccccatccctggaggcattcaaggccaggctggatgtggctctgggcagcctggtctggtggttggtgaccctgcacatagcagggttgaaacttgatgatcattgtggtccttttcaacccaggccattctatgattctatgatcttctttaaggtgaatgagagctaccagctttctattctgtcagta

SEQ ID NO: 79026 - DNA, 600 bp, Chicken  19866894369488_1
tatatactctgggcttttttagattggacggaaagtacactactctttcatcttcattcagtttcttgttctcattttagtacacaatgcttcagtacttgtgctgaaaacactgaaaggagaatgataagaattcacattgtgggattactatcacatcaaatcattaggatttataatcactgtaaaaaatacattcactccctctccaaaagcttaagacccaaactacctttcagaagcctctttaagaattgcaattttcctaatggtccattatatcagtacaagttcccccayggatcaagggcagcagatcattttaagagcatagattctttgagttaaggttaacagcctcctgtgtttattttaggaagaccattctgattgttatagatgcttctctggaccatggcaagaacatggtaaatctgtggggagaaggccatttgkgacagctgtagatagtgactgaatacatattaaactaatatttactccatatgtgacaacttgattctaagatgaaattttacatcttcacaatttaaaattttacaaactgattaattaaaatttcttgcagtatatttcttt

SEQ ID NO: 79027 - DNA, 600 bp, Chicken  19866894369488_2
catcaaatcattaggatttataatcactgtaaaaaatacattcactccctctccaaaagcttaagacccaaactacctttcagaagcctctttaagaattgcaattttcctaatggtccattatatcagtacaagttcccccayggatcaagggcagcagatcattttaagagcatagattctttgagttaaggttaacagcctcctgtgtttattttaggaagaccattctgattgttatagatgcttctctggaccatggcaagaacatggtaaatctgtggggagaaggccatttgkgacagctgtagatagtgactgaatacatattaaactaatatttactccatatgtgacaacttgattctaagatgaaattttacatcttcacaatttaaaattttacaaactgattaattaaaatttcttgcagtatatttctttggcagtcttttctgtgtttcccttcccaccctcacagtagaaatacctagaatagtatcatagcttccctagtgtctgttagaagactcttcagagagctggaaagagatgccacaagttccagcctccagamatctctgttcatgggactaagag

SEQ ID NO: 79028 - DNA, 493 bp, Chicken  19866894369488_3
tctgtggggagaaggccatttgkgacagctgtagatagtgactgaatacatattaaactaatatttactccatatgtgacaacttgattctaagatgaaattttacatcttcacaatttaaaattttacaaactgattaattaaaatttcttgcagtatatttctttggcagtcttttctgtgtttcccttcccaccctcacagtagaaatacctagaatagtatcatagcttccctagtgtctgttagaagactcttcagagagctggaaagagatgccacaagttccagcctccagamatctctgttcatgggactaagagctctgctctcagattttgcagagcaatgacttatgtcacacttctgcattgcgaacctatgctgcagactccacgctcaggagccagaactggctgtcaccattacctgccttccctctgctccttcctgttagctcatatagccacagtatcacaagacaaaacaaagg

SEQ ID NO: 79029 - DNA, 600 bp, Chicken  19866894369496_1
tcgtttgcatcccagcaccgatggaggattgtctcagaaatccaaaggagaagaaaatccgtgtgctgttcttactgttgtgtagggagactgagaagagtttgtgcagatcctgctttttaaggacaggaaacgtgcacaggtattggggcagggtcagccttgagagtctacaactgcaaagctcctttttccttgagcagaaacttgcatgaagaagccactgtgcttacagcagtacatctctacagagccttggtcgcttaaacatttaaagcaattttctccatatcttcatcrcttgaagggaaggtctcaagaacagcacgaaatacagctcgagagcagcatgaggtacacatccccgttgtctttctgccttttccagtgccttcccagcccctgtgcctgcttgtccaccagccccgctctgattttggcatgctgctgctgtgcagagggtgcacggcrctcattgatggygtcgggacacgtcctgtggggcagtgagttcccaggggaaggaggttggcagccccaccacgaactgctgtcgagtgctggaagaaaactgtcacttcttggcggggttttgctttt

SEQ ID NO: 79030 - DNA, 600 bp, Chicken  19866894369496_2
tacaactgcaaagctcctttttccttgagcagaaacttgcatgaagaagccactgtgcttacagcagtacatctctacagagccttggtcgcttaaacatttaaagcaattttctccatatcttcatcrcttgaagggaaggtctcaagaacagcacgaaatacagctcgagagcagcatgaggtacacatccccgttgtctttctgccttttccagtgccttcccagcccctgtgcctgcttgtccaccagccccgctctgattttggcatgctgctgctgtgcagagggtgcacggcrctcattgatggygtcgggacacgtcctgtggggcagtgagttcccaggggaaggaggttggcagccccaccacgaactgctgtcgagtgctggaagaaaactgtcacttcttggcggggttttgcttttcctggttacatcagacgtgatctcacagctgaaagcccgaattttaactcggccgagttttgtttcagcgctcattgatgtgaagcatcctgtgttggcatgagtaatttggagtaggtcagagattcctacgtacaccctgcccattcccatgggaaagtggctggtggg

SEQ ID NO: 79031 - DNA, 600 bp, Chicken  19866894369496_3
gctcctttttccttgagcagaaacttgcatgaagaagccactgtgcttacagcagtacatctctacagagccttggtcgcttaaacatttaaagcaattttctccatatcttcatcrcttgaagggaaggtctcaagaacagcacgaaatacagctcgagagcagcatgaggtacacatccccgttgtctttctgccttttccagtgccttcccagcccctgtgcctgcttgtccaccagccccgctctgattttggcatgctgctgctgtgcagagggtgcacggcrctcattgatggygtcgggacacgtcctgtggggcagtgagttcccaggggaaggaggttggcagccccaccacgaactgctgtcgagtgctggaagaaaactgtcacttcttggcggggttttgcttttcctggttacatcagacgtgatctcacagctgaaagcccgaattttaactcggccgagttttgtttcagcgctcattgatgtgaagcatcctgtgttggcatgagtaatttggagtaggtcagagattcctacgtacaccctgcccattcccatgggaaagtggctggtgggtaggtttcccat

SEQ ID NO: 79032 - DNA, 600 bp, Chicken  19866894369497_1
tcccaggggaagaatgagtgtgcacgtgtgagcctgctaggctgatcctgcatgataccgagcgtgaaggcattcctgaagcttcctcagggtaggctgagtgtcagctagcctctgtcagcatttcccaagctgtttcaccccctgtcccacttccaggtgaacctgactcctacgcccccgcgtttctcagcctgggcacagtgccgtgctgacatggctgttccaactccaggagcttatccaaacccccaagcattcctgcatcctgtcaagagggagtgcccatcatttggaagyattggcatgtgtagagaatactggtactttggcctgcagagctcttggaagttgttactcctgctgataaggggcagcagagacagcagcctgttaggagaagtcttggtgtggtgatcagggaacatccatcagcatattggaatgtgtgtgctactaatgtctgtgagagcgctgagcagggcccagtgtgccagcagcacttacctctgcacagccatgtggtcaatcttgtgtgcctcagctgcatccctgggcagcattctgtccagcactcactgctgaggctcagggcataca

SEQ ID NO: 79033 - DNA, 600 bp, Chicken  19866894369505_1
tcaatctgcctcagggctgactattttcatcttaattttttctccatttaacagtataaagcaagttatgtggccatagcagcgttttttctgtgttcacctgactaatttcaaagaacgtccaagtggcatagtgatagaatggtttgtgttggagggaacccttaaagatcaggtagtccaaccttccttcccataggcaagggatgtagtaataaagacactgtttttatatcagtttggtttgaagaagtgatgaaaaccaatgtgaacttctgtaacttacactgagtgattctrtatttctgaattacaagatcagtgtgcaatatattctatttcttagtctttgaatgcacatttaattttgtctgcttctggagatgttaattgttgaagcagcagttgtctgaaatagagtgaccttgtaagggggttatggctttccatgtgtcaaacacatgaaaattaaggacattttcttactacttggttgattatttgatgaaaagatgactgatgttgatgtacatccgactgaaactttctcccttccttagcgagccaatgtatacaaaagattcactgtatggaaagtaa

SEQ ID NO: 79034 - DNA, 600 bp, Chicken  19866894369506_1
agcagagaccaactttcatttgcattctagaataaatctttagacagcacaacagagaatcagaaatggagcctgcagatgcctctgtgagtaatttaaacctaagttaaattctctgtagcctgtggtaaaccattttacctctggcaagtagttcctcgtgtcctaatacctagataagtatgtttgcttgcatttattatctccagctagtatcagaatgaatgtggctatatgtgatgcttcaaagccaaagcagtaacttaactctgagaaactgtttcctcggattgtgaatgrgaaaaaaatcaaactttgtttctcatgttaaaaagacttcctgagtaatttcactttaagaggttttcatttaacagatgtagcctcacagtaatcaaatcctcaacacaggtattgcagtctttaagcgtaaaagaacaaatgtaagaacataccctgccagagatgaatgttactagctgctttcttgactgtttccacaaattgctatagactgagaaaacgcctgcacccacctgcacaccccctgcaaaaaaaaattctcccacattaccactcaacagctagctggggccatgg

SEQ ID NO: 79035 - DNA, 599 bp, Chicken  19866894369517_1
  misc_feature (1)..(14): n is any nucleotide
nnnnnnnnnnnnnnaagacaagagatatcagacatgaagttgaaacagcagtgattcagactggaaagattttcaacattaaagcagtcagataacaaaagaggttgccagtgaggctgtccagtctccatctctgaaggatttcaaaaccagagtagataaagcagagtctcatttcagtgctgaccttggtttaagtaggagtttgggctacctaacctcctcatgttccatctaacctcaaattttcctatcattcctaatagtgctacaagttcctctctgttactagtcttctcrycaccttattcataaacatgccttaacactgtaccactcagaaccgattcattaaaataaccatagataccaagagcagactttatttgcatgggaatggttcagatgtttaaataatcaactacttggctgaaatatttcatcaggccaaggcagtataacaagaattggcagcataccagaatcccttccattcctatccaatttcagttcgaagcccaagtaacactgagggcatggacattcctacactattagacagaggagaatttgaaccccgccttgcaagtaaggatcag

SEQ ID NO: 79036 - DNA, 599 bp, Chicken  19866894369517_2
  misc_feature (1)..(13): n is any nucleotide
nnnnnnnnnnnnnaagacaagagatatcagacatgaagttgaaacagcagtgattcagactggaaagattttcaacattaaagcagtcagataacaaaagaggttgccagtgaggctgtccagtctccatctctgaaggatttcaaaaccagagtagataaagcagagtctcatttcagtgctgaccttggtttaagtaggagtttgggctacctaacctcctcatgttccatctaacctcaaattttcctatcattcctaatagtgctacaagttcctctctgttactagtcttctcrycaccttattcataaacatgccttaacactgtaccactcagaaccgattcattaaaataaccatagataccaagagcagactttatttgcatgggaatggttcagatgtttaaataatcaactacttggctgaaatatttcatcaggccaaggcagtataacaagaattggcagcataccagaatcccttccattcctatccaatttcagttcgaagcccaagtaacactgagggcatggacattcctacactattagacagaggagaatttgaaccccgccttgcaagtaaggatcagt

SEQ ID NO: 79037 - DNA, 600 bp, Chicken  19866894369524_1
cctgcagtgaattctaaaactggaaagcaacagggctgcttcagtttatgtgcctcagctcagcccccagaggaggtgtacaaaatcactacttcaggttaatattaccaagcctcaacgctttcttttttccccatccctcatcctgctcgcacaccattgcttacctgaggggagacctgttcttaaagcatgtagccagaacacctcagaccatcatgactgttaactgagaaggcagaggaagcaggcaaaaactgtcagttctctaatccactcaggtatgcatggagttgtggygataaggtttattttttaaaaacaaacttagtgcttactgatagctccattgagttgactgtttcaaaaccrsrgttctttcacttctttcacacagagtgcatctatacagtaagctcccctcttactgcactctttttccctttttattcccctcctcaccctagggagcttcactttttgtctggagcaaccgctcatggcaggaggagatttctttgcaaatagccagtttcacccttggcatttctcctcctaaagctgccagacaaatatcagaaactactaattaggagacca

SEQ ID NO: 79038 - DNA, 600 bp, Chicken  19866894369524_2
gaggtgtacaaaatcactacttcaggttaatattaccaagcctcaacgctttcttttttccccatccctcatcctgctcgcacaccattgcttacctgaggggagacctgttcttaaagcatgtagccagaacacctcagaccatcatgactgttaactgagaaggcagaggaagcaggcaaaaactgtcagttctctaatccactcaggtatgcatggagttgtggygataaggtttattttttaaaaacaaacttagtgcttactgatagctccattgagttgactgtttcaaaaccrsrgttctttcacttctttcacacagagtgcatctatacagtaagctcccctcttactgcactctttttccctttttattcccctcctcaccctagggagcttcactttttgtctggagcaaccgctcatggcaggaggagatttctttgcaaatagccagtttcacccttggcatttctcctcctaaagctgccagacaaatatcagaaactactaattaggagaccagcatctgtgctacaaaacaaaactattttcccttgatgtgctaagaattagaagacatgcaaagcctgtagc

SEQ ID NO: 79039 - DNA, 600 bp, Chicken  19866894369524_3
aggtgtacaaaatcactacttcaggttaatattaccaagcctcaacgctttcttttttccccatccctcatcctgctcgcacaccattgcttacctgaggggagacctgttcttaaagcatgtagccagaacacctcagaccatcatgactgttaactgagaaggcagaggaagcaggcaaaaactgtcagttctctaatccactcaggtatgcatggagttgtggygataaggtttattttttaaaaacaaacttagtgcttactgatagctccattgagttgactgtttcaaaaccrsrgttctttcacttctttcacacagagtgcatctatacagtaagctcccctcttactgcactctttttccctttttattcccctcctcaccctagggagcttcactttttgtctggagcaaccgctcatggcaggaggagatttctttgcaaatagccagtttcacccttggcatttctcctcctaaagctgccagacaaatatcagaaactactaattaggagaccagcatctgtgctacaaaacaaaactattttcccttgatgtgctaagaattagaagacatgcaaagcctgtagct

SEQ ID NO: 79040 - DNA, 600 bp, Chicken  19866894369524_4
ggtgtacaaaatcactacttcaggttaatattaccaagcctcaacgctttcttttttccccatccctcatcctgctcgcacaccattgcttacctgaggggagacctgttcttaaagcatgtagccagaacacctcagaccatcatgactgttaactgagaaggcagaggaagcaggcaaaaactgtcagttctctaatccactcaggtatgcatggagttgtggygataaggtttattttttaaaaacaaacttagtgcttactgatagctccattgagttgactgtttcaaaaccrsrgttctttcacttctttcacacagagtgcatctatacagtaagctcccctcttactgcactctttttccctttttattcccctcctcaccctagggagcttcactttttgtctggagcaaccgctcatggcaggaggagatttctttgcaaatagccagtttcacccttggcatttctcctcctaaagctgccagacaaatatcagaaactactaattaggagaccagcatctgtgctacaaaacaaaactattttcccttgatgtgctaagaattagaagacatgcaaagcctgtagctc

SEQ ID NO: 79041 - DNA, 600 bp, Chicken  19866894369530_1
ggcatatttcatgcatactttttatattttgtatgcttgaagctatctctacagtgaccacccaggaacaacagacttttcaaaattcaaaacttacatgtaaaaggtgatgttcgtgtaacattgggaatttcaggtaatgtatgtcaatcttggaaacctccattggaaaatgtgtaacatttcatctgttcatcacaatccatttatataagctaccaggtaaaataaaaaggtttactttgcaaacaatctaacctttagctcctggaggattacacacccaaaacaattccactkttaataaggtatactatgaatagatacactatcaatcttatcttactaaaaactaactgaagtaacacatctcagactcacttttctggtcaatatgcaacattaaaacatcgcaatatacataacgtgaaaggaattaatgaccaagtatgggatcactattttaaatgggaacatcactagaataagttaaaaaacctttcttcagcttcatgaaaaactgttgagatcttttgcaacatttcagttggatctggtcacgatttgaagaaagagcttgtcaatcaatataaatgttta

SEQ ID NO: 79042 - DNA, 600 bp, Chicken  19866894369533_1
gagctcgttgtggcaaaaggacatccttccccctaaaaacctctgagagcaccagctgcttcacagggctgcagagcaagcatcaaaccaccacctagtgggtttccacagtgttttctcccatctcacctctcctctatgggactgcttctctgaagccagcctccaaaaagggtcagggcattcccgtgcagacagagattgcagagcccagcccaggtggtacctcccaatctctcactcctcctgtccaaagctggaatggtccagcagcagcgctggggcagggttgagccttayagtggrtaggtgatggctccagcaaaggccagaggagacttggaggatcggcaacgtcttcatggagcttctgaaaggggatttttcccagaaaagcagcaggggtgtgtccttccccatctgacatcctcagcaagcggccgttgtgaaatgccccatctgtttcagcttatccagaggcaaataaagatcagcgcgagaaaataagactccagtgtatatttagaagtgctggatttggttagtgcagaatgaaggcattgcagggcctgggatccgagcagcaatcgtttattctga

SEQ ID NO: 79043 - DNA, 600 bp, Chicken  19866894369533_2
gttgtggcaaaaggacatccttccccctaaaaacctctgagagcaccagctgcttcacagggctgcagagcaagcatcaaaccaccacctagtgggtttccacagtgttttctcccatctcacctctcctctatgggactgcttctctgaagccagcctccaaaaagggtcagggcattcccgtgcagacagagattgcagagcccagcccaggtggtacctcccaatctctcactcctcctgtccaaagctggaatggtccagcagcagcgctggggcagggttgagccttayagtggrtaggtgatggctccagcaaaggccagaggagacttggaggatcggcaacgtcttcatggagcttctgaaaggggatttttcccagaaaagcagcaggggtgtgtccttccccatctgacatcctcagcaagcggccgttgtgaaatgccccatctgtttcagcttatccagaggcaaataaagatcagcgcgagaaaataagactccagtgtatatttagaagtgctggatttggttagtgcagaatgaaggcattgcagggcctgggatccgagcagcaatcgtttattctgatgccat

SEQ ID NO: 79044 - DNA, 599 bp, Chicken  19866894369537_1
  misc_feature (1)..(4): n is any nucleotide
nnnntaggagataagctcatcatctagtatttcttctgtaactgtcacagcaacatctaagttggatgacattcatcttagtgctttgacagaaataataaataccatcttgctagcatgcaggatgggatgactccaactgaggtgcagtggaaactctgtagggtccttggtctcaacaagatgccaccccactgcccaagccgtatccaatgagccgcagtaggagaagagggcataaaggtagcagagcaaacaacagagcagcctcaaggtttgtgccatgctaagctaaggttkgatttggaaagaataaagcaccttcaaactggtcaaaaattgatgcttaataatatgccttctatgcttttagttatcctgaacaaacttaagaacagcctatacttacattctctctttaaggcctctacagcatcatttgctgcttatgtgtcataaactgtccctcaaaaatccaacaaaaacaaaacagaaaaaagacaaaatggcatgtaatataacaaaaagaagattagttataaagaaaggcacagaaaaatgtaggaaaagatgtacatgagttgtaaaaagataacgtc

SEQ ID NO: 79045 - DNA, 600 bp, Chicken  19866894369537_2
gtggattttattttagttcatggaggtccacaggcatagctcaggaggcatttttaactttaattttataattacattactaacattcttagttcaacttgattaaaatgtcattttgacctctccttgtaaaataatctccctatctcctcttacattacagtttctggaaacgttttggccttagctacttttaacactcaatggcatttcacacctgaagctttctggccactgcactcgctcctgcacagaccttcatcttactcctcatgggaagcaatttcatttggctttttstctgtctgatgttttgcattacagagaaattatgtaagtcataaaaaaaaccccgtatttctccagagaaaggtcaagtgtagacagagcaataaatgctccaaaatgaggtgagctaaaagtgaaattaaatggaaaccgagatagccgagaacaaattgacaacrgaaatgcttgaaatacgcctcactgtgtagttgagttttaaacaaatgttttttttaaaaagagtttaacttgtgaagcactggtgataattacagaaacaagaaagcaagtagtaaatggcacctcctcttg

SEQ ID NO: 79046 - DNA, 600 bp, Chicken  19866894369537_3
tggaaacgttttggccttagctacttttaacactcaatggcatttcacacctgaagctttctggccactgcactcgctcctgcacagaccttcatcttactcctcatgggaagcaatttcatttggctttttstctgtctgatgttttgcattacagagaaattatgtaagtcataaaaaaaaccccgtatttctccagagaaaggtcaagtgtagacagagcaataaatgctccaaaatgaggtgagctaaaagtgaaattaaatggaaaccgagatagccgagaacaaattgacaacrgaaatgcttgaaatacgcctcactgtgtagttgagttttaaacaaatgttttttttaaaaagagtttaacttgtgaagcactggtgataattacagaaacaagaaagcaagtagtaaatggcacctcctcttgttgtttcaccaacatttaggctaccttggcttccccctaaaggtgaaggatctaggcacatttccragctgcaatggcattctcattgtccagtctgtgcagctccaacaagctgaagggtttgacagagactgtgagtcttcttctctggaaaaagagtcttttgt

SEQ ID NO: 79047 - DNA, 600 bp, Chicken  19866894369537_4
cctgaagctttctggccactgcactcgctcctgcacagaccttcatcttactcctcatgggaagcaatttcatttggctttttstctgtctgatgttttgcattacagagaaattatgtaagtcataaaaaaaaccccgtatttctccagagaaaggtcaagtgtagacagagcaataaatgctccaaaatgaggtgagctaaaagtgaaattaaatggaaaccgagatagccgagaacaaattgacaacrgaaatgcttgaaatacgcctcactgtgtagttgagttttaaacaaatgrtttttttaaaaagagtttaacttgtgaagcactggtgataattacagaaacaagaaagcaagtagtaaatggcacctcctcttgttgtttcaccaacatttaggctaccttggcttccccctaaaggtgaaggatctaggcacatttccragctgcaatggcattctcattgtccagtctgtgcagctccaacaagctgaagggtttgacagagactgtgagtcttcttctctggaaaaagagtcttttgttcttaattagatgcacctaccaagcagtgcgtgttcaaagtgtgctgag

SEQ ID NO: 79048 - DNA, 600 bp, Chicken  19866894369537_5
agaaaggtcaagtgtagacagagcaataaatgctccaaaatgaggtgagctaaaagtgaaattaaatggaaaccgagatagccgagaacaaattgacaacrgaaatgcttgaaatacgcctcactgtgtagttgagttttaaacaaatgttttttttaaaaagagtttaacttgtgaagcactggtgataattacagaaacaagaaagcaagtagtaaatggcacctcctcttgttgtttcaccaacatttaggctaccttggcttccccctaaaggtgaaggatctaggcacatttccragctgcaatggcattctcattgtccagtctgtgcagctccaacaagctgaagggtttgacagagactgtgagtcttcttctctggaaaaagagtcttttgttcttaattagatgcacctaccaagcagtgcgtgttcaaagtgtgctgagaaggatcacgcgttcctcactgtacttaacatcctcactttctgcctcaatcctcaaatgggttcaagacattctgaccttttcatggcatttacatccgaaaccgatgccaagggagtctggacattgctgaagtgagcccctgtcata

SEQ ID NO: 79049 - DNA, 600 bp, Chicken  19866894369547_1
cgagtgggaaatcttgctgcaaatgacatttggacaaaagctctacgttaattatttgctttaatcacgctttgagagttgactccacagtcggtattaacacaaggctctaatgcaaacatgctccctaagtgtaactgcaggaatggtttatgctattagcttactgaatttagtcacgcctcactttttatggtgcatcttcagctctaataaagcttgatctgtgctagtacatagataatcctctaggaatttgcataacatctcagcttcacagttccaaaatcctgtaatctsctgtggaaaatctgagaatgcggtcactcccaggggagagcgatgctgaccttaaaaatgccctcttcgtgttgctgttgtttggtaacaaagccatcctccaagtctgtttttctctgtgtaagcactgttatctgcagccctcgtcttcttctcgctgtcagtactctgctgttgttggaatgtgtggtgtggtgatgggagctggagaacttgaagtgcacgtgggagaattgtgatggatgcagagttcactgtgcctgtttagcagacctacagcttcagattgctggattgaac

SEQ ID NO: 79050 - DNA, 600 bp, Chicken  19866894369549_1
ggtatttctaccattcatgcagcattacctcataggtgtggtcttcctcaggcctttcctttctgtcaccctatggagaagaaagacacaggctgagtgtcaccagcacagcatgctgtggggtcctccatcccctgccccaaggccaggtcccacagctcccacagacagtcccacacaccccatgaaatgctcccattcagtggccccaaccacaatctctgtcctcactaacctgcccaggacatgggacactgctgggagaatggcaatggcaaaaccagggacagtcccgctackggagatgctgtcgctcaccttttctaggaagaggagcatggggacgctgatgaagatgaccagcaggatggtctggatgatgatgatggtgtccttcagcgtgttcctgttctggatctgctggatgttgctgcgacctgggagcagcagcacagggagaaccccaagtcccatctctgtgctgggctcccagtgggtgaggacacgggaggggactgggacagtgtcccttgggggagaacagagcattgcaacctgctggggctggcatcaggggctggctccactatgggatgtcct

SEQ ID NO: 79051 - DNA, 600 bp, Chicken  19866894369551_1
tttttttttctcctgttttgtagtttctgaaaatgcttccagctgttcaaatgtctgatgctttttcctttcttcttttttcctttggagagacttttatttttcagcaaatatgtgtactttcagtaatgtgagatctctcttgtgaccagcagcgtaactcttcttaaatgtaaaaaccactgcgatccttttccagcattcctcacgttcccactggggctgctgagctggctgcctaaaagtggctttagagccactccgtgtaactccgtgtcatgcttttaatctgaaagcgtwccgtgttttggatttcagctgctacagaaaataagtagtgaacatctttctttggaggaaattatagccttatgcaattcggagataataacatgcaattaagacataccggaaaaagcacacatggattacatttgatagtctgaggtgtcagctgtgctttttttttttttcatgtttgatgtgattgtttttctgattcacctacggtagactgaaataacgcttaataattgctttctggtagagtaaatgcaactggaatggcagctgagtaaagaagggcagggaagggaatgg

SEQ ID NO: 79052 - DNA, 600 bp, Chicken  19866894369551_2
tcttcttaaatgtaaaaaccactgcgatccttttccagcattcctcacgttcccactggggctgctgagctggctgcctaaaagtggctttagagccactccgtgtaactccgtgtcatgcttttaatctgaaagcgtwccgtgttttggatttcagctgctacagaaaataagtagtgaacatctttctttggaggaaattatagccttatgcaattcggagataataacatgcaattaagacataccggaaaaagcacacatggattacatttgatagtctgaggtgtcagctgtgcwttttttttttttcatgtttgatgtgattgtttttctgattcacctacggtagactgaaataacgcttaataattgctttctggtagagtaaatgcaactggaatggcagctgagtaaagaagggcagggaagggaatggaaacggagcaaggaaatgttgaacgtaggtcagtaaccgggcatgaaaaatggttgatacagaagcaaaacaacctctgggttagaagcagggagactacagtggggtgtgttccttccaagtgcactcacaaagtctaacacggcagttacagcgctgtt

SEQ ID NO: 79053 - DNA, 600 bp, Chicken  19866894369556_1
atgggagagagagttggtgcagctgtgtttctcctgttgtgtcctcagggatcccttttgacaaaatgccaggccattttccttgagaaattgcattactgttaattgatttattacatataaaaaatgagattccttgacacaaatacttctcaattttaaatgcaaatgccaccaagtaagtgcttatttatgttatgaatttatttatgaattatgccagctcatctggcatatttcctattcttggcatactagccaagaaatgtacatttaacagtaaataaatgctttacagtrcacaaatgactataagttgaagcttgctcaagtttttctttggtagcaatacagaggtcctccagggactgctctttctgtatttcatcatgcacagttccagttccaggattttcctatgtagcagacccaaaataaagaaagggagagagaacttcctttttacaaaagtggtattaaatcacctcaatccctactcctgttctccatttcatgtttcatgtttgttcatttgtgagtctcagctgctgaagtagaaaaatgaatccagcggcacctttctggtcagttgctctgctg

SEQ ID NO: 79054 - DNA, 599 bp, Chicken  19866894369562_1
  misc_feature (1)..(73): n is any nucleotide
nnnnnnnnnnnnnnnnnnnnnnnnnnnnnnnnnnnnnnnnnnnnnnnnnnnnnnnnnnnnnnnnnnnnnnnnncctgctgctgtgctggtgcttgcagtcccccagcttgcgtgtttaaacaggactgaggtgagataatgccttctcaatgcatgtctttgtgctttgcctctggttttggaccaaatgtatgtttctgtaattcgttcgtggtgcaataaatgtgctcaggggaggtgccaggtcccagcagtgccagggcttgcacaaacccagggagatgggtccagacgcactgygcacagcctactctgctcagagcagcttctctcactttcccctacttctaaggcaagagattcccaatacctcctttccctctgtttttctgcccttgtttcccatcaaagcttcataacagcgtgcactgcccctccagctaggattagacccatacgtgtctcagcccttatkaacaaaagttaaaaatgcttttttggagagctcaggtcccagcccggccctgcagtgcttgctcacacctggagagcagaggctgaggatgcagctcccagaaatacaacatggccagagcgag

SEQ ID NO: 79055 - DNA, 600 bp, Chicken  19866894369562_2
gttttggaccaaatgtatgtttctgtaattcgttcgtggtgcaataaatgtgctcaggggaggtgccaggtcccagcagtgccagggcttgcacaaacccagggagatgggtccagacgcactgygcacagcctactctgctcagagcagcttctctcactttcccctacttctaaggcaagagattcccaatacctcctttccctctgtttttctgcccttgtttcccatcaaagcttcataacagcgtgcactgcccctccagctaggattagacccatacgtgtctcagcccttatkaacaaaagttaaaaatgcttttttggagagctcaggtcccagcccggccctgcagtgcttgctcacacctggagagcagaggctgaggatgcagctcccagaaatacaacatggccagagcgagagctggttgctcacctttgtgctccttcccagagccacgctcaaattctcatttcaaaaggattgccgaagggcaacccttaaaaaaaccactccaaaacaaagaggatagggttgggtcctctggaacaaacccgatactgacgatactgacgagcagggtgaagaagcagcatc

SEQ ID NO: 79056 - DNA, 600 bp, Chicken  19866894369569_1
ggaaatatacccaaaagagtataaactgggcatttagtgtttaagttagcagaaggtttctggctgcgaggtaccaggttccattcacttagccagacccgggcattttgtggccgcctttttgctttgaccaagctttccatgtttatcagccctggttggctatcttggattccctgtatgtggtctacagaactgagctcttttgtcagatcaggcaaattagtctctgggttctgctgactgtattgaataaatctctcatctaagaaactcagatgccagcttgcacatggaaasactgacatataaatttaagagcctcagtctgccatctgtgtcccactccaactaactctggacttgattttctagctgacatcacagggctactacagataaacataacaagtagcaaatagggcaactaggggggaatgttattagatacaggaacatagctttcctacactgcaaaatgactagaatataatttgatttggccaactgttgctccttcaaacaattcctggacatatctggggaattaaatgggttaggaagtatttccactaggtgttttggaagttaatagagttt

SEQ ID NO: 79057 - DNA, 600 bp, Chicken  19866894369570_1
atacctaagctaaatcacctctcttttagtttaaaaccattcccctcccttcattcattatcagactgtgtcaaaagatggtcttcatcttttttttataagctcctttaaaatgctaaatggttgcaaggccacaggcctcaacctgcagcccatgggtttccaacggtgaagagcctttttatcaggctttggcattttgggcctctccctcacattatattaaatggaaggacatttcaacttggccatctcagttcctgggtttcacagaatcacaaaacatcccaagttggaagraactcataagggccatcaagtccagctttccaattgttgccctttctgctctgcagaaagcccttgagacaccctgacattggttgtctgtccttctgagtgcctgcgcagctctgaacagctatggaggggaatatttccaagtaaactacaaagagaatgtttttcagtgctattcaaagcatatttcttgtccagatttgaattaaaaaaaatcaatctaaaagaaatatcacctgttaataactttattttggaagaaaccaaagcacctcattaaccagggccagcattacttag

SEQ ID NO: 79058 - DNA, 600 bp, Chicken  19866894369570_2
tccaagtaaactacaaagagaatgtttttcagtgctattcaaagcatatttcttgtccagatttgaattaaaaaaaatcaatctaaaagaaatatcacctgttaataactttattttggaagaaaccaaagcacctcattaaccagggccagcattacttagctgtcttgaaataaagaaatgatatattggtgaaagcatgatcaatacagcatgcctgtaggcaaatgtacaaattgtatactttccttctcacgtaatacatgaatagcattatcagaaatagcatatttcccagcwgactgcaaggggcataagcaggagatcattttctctggaggcactattttctcagcagtgtctatcaacagctactgcagaggcaataaccaattaactggcaaatgtaaataaatagctctaatatatcttgtctgacagtgcttttgacatatgctgaattcattgtcttggttttcacctgcagagatcgtaaggatggtagaaaattgcaaaggtgctcttctgaaagtcaggctatgtctccttcacccttcagtgaggaatgactactagtcaacaaaacagctgagtccagga

SEQ ID NO: 79059 - DNA, 600 bp, Chicken  19866894369571_1
catgctggagatcaattagatgtggcttgtcagtttattaagggcttgtatttcagtgcctggaagagtgtataaaggtagctgacaagcagttaccaaatttgcttggtgaagggtgtctgtaactagctcagtttttcaaaggaaggtactaagcatggacatgagaaacccaaggtccattaggcagatgatgtctgaaatgggctctcagagagaaagcgttgtccaagcaccctaactacaatattgtttacagcattagactctcagatttttatttatttatttatttatttwggtaggaagaggaattttattttaattatattatcattattttcctagagacagtttgttccaagaggaattatattttctgtgcaattaatgaatattctataattatattcatttatgtaattctcccctcaatgttcttgcagcctctccttgttaattatcatctgtaagagtggtwtctattctcttctttcagaatatgaatacgaatgacaaatcaaaacagacctaacagaaattccagagatactggagagctcatctaaaacaatgttcttccacttagtattaccttac

SEQ ID NO: 79060 - DNA, 600 bp, Chicken  19866894369571_2
attaggcagatgatgtctgaaatgggctctcagagagaaagcgttgtccaagcaccctaactacaatattgtttacagcattagactctcagatttttatttatttatttatttatttwggtaggaagaggaattttattttaattatattatcattattttcctagagacagtttgttccaagaggaattatattttctgtgcaattaatgaatattctataattatattcatttatgtaattctcccctcaatgttcttgcagcctctccttgttaattatcatctgtaagagtggtwtctattctcttctttcagaatatgaatacgaatgacaaatcaaaacagacctaacagaaattccagagatactggagagctcatctaaaacaatgttcttccacttagtattaccttacattaacaatatttgaaacactacctattttacaatatggccctccagccttatttggctaaattttmtgtctaattttctgatacactgtgtcaaragctctacgaaactcaggttacacttaactgaattagtayctyttgttaactgataatgtaatcttattaaaggtcattcaaatt

SEQ ID NO: 79061 - DNA, 600 bp, Chicken  19866894369571_3
gaattatattttctgtgcaattaatgaatattctataattatattcatttatgtaattctcccctcaatgttcttgcagcctctccttgttaattatcatctgtaagagtggtwtctattctcttctttcagaatatgaatacgaatgacaaatcaaaacagacctaacagaaattccagagatactggagagctcatctaaaacaatgttcttccacttagtattaccttacattaacaatatttgaaacactacctattttacaatatggccctccagccttatttggctaaattttmtgtctaattttctgatacactgtgtcaaragctctacgaaactcaggttacacttaactgaattagtayctyttgttaactgataatgtaatcttattaaaggtcattcaaatttacactggatttttgtacttaaaaagtttgttctcgcaactaattacagctttattgggaacctttgctcataatcttccttagtattcatttcagcatcttattagagactgaatctaatcctcttctgtttctgcctgttgctctctctctcccgtaatgattgttcaatgttttttggccagt

SEQ ID NO: 79062 - DNA, 600 bp, Chicken  19866894369571_4
attctataattatattcatttatgtaattctcccctcaatgttcttgcagcctctccttgttaattatcatctgtaagagtggtwtctattctcttctttcagaatatgaatacgaatgacaaatcaaaacagacctaacagaaattccagagatactggagagctcatctaaaacaatgttcttccacttagtattaccttacattaacaatatttgaaacactacctattttacaatatggccctccagccttatttggctaaattttmtgtctaattttctgatacactgtgtcaaragctctacgaaactcaggttacacttaactgaattagtayctyttgttaactgataatgtaatcttattaaaggtcattcaaatttacactggatttttgtacttaaaaagtttgttctcgcaactaattacagctttattgggaacctttgctcataatcttccttagtattcatttcagcatcttattagagactgaatctaatcctcttctgtttctgcctgttgctctctctctcccgtaatgattgttcaatgttttttggccagtaatatattctgcctactgatatagaatct

SEQ ID NO: 79063 - DNA, 600 bp, Chicken  19866894369571_5
gttcttgcagcctctccttgttaattatcatctgtaagagtggtwtctattctcttctttcagaatatgaatacgaatgacaaatcaaaacagacctaacagaaattccagagatactggagagctcatctaaaacaatgttcttccacttagtattaccttacattaacaatatttgaaacactacctattttacaatatggccctccagccttatttggctaaattttmtgtctaattttctgatacactgtgtcaaragctctacgaaactcaggttacacttaactgaattagtayctyttgttaactgataatgtaatcttattaaaggtcattcaaatttacactggatttttgtacttaaaaagtttgttctcgcaactaattacagctttattgggaacctttgctcataatcttccttagtattcatttcagcatcttattagagactgaatctaatcctcttctgtttctgcctgttgctctctctctcccgtaatgattgttcaatgttttttggccagtaatatattctgcctactgatatagaatcttcagggttgccttgcacagcttcacagtattcagcaagaa

SEQ ID NO: 79064 - DNA, 600 bp, Chicken  19866894369571_6
cttgcagcctctccttgttaattatcatctgtaagagtggtwtctattctcttctttcagaatatgaatacgaatgacaaatcaaaacagacctaacagaaattccagagatactggagagctcatctaaaacaatgttcttccacttagtattaccttacattaacaatatttgaaacactacctattttacaatatggccctccagccttatttggctaaattttmtgtctaattttctgatacactgtgtcaaragctctacgaaactcaggttacacttaactgaattagtayctyttgttaactgataatgtaatcttattaaaggtcattcaaatttacactggatttttgtacttaaaaagtttgttctcgcaactaattacagctttattgggaacctttgctcataatcttccttagtattcatttcagcatcttattagagactgaatctaatcctcttctgtttctgcctgttgctctctctctcccgtaatgattgttcaatgttttttggccagtaatatattctgcctactgatatagaatcttcagggttgccttgcacagcttcacagtattcagcaagaaatg

SEQ ID NO: 79065 - DNA, 600 bp, Chicken  19866894369575_1
ctgaccctaatgctaatctttttgtgatcttattttccaatgaaacaacttgatggaattataactcaagaaatcaacaactaggtcataaggtgacaaaacattcacccacatcctagagaaaggcttagaaaatgaccttgcattacacagtaagatgaacacatttgtaagccagtagtagaaacaaatgtcagagtaaaaagatgatcattgataatgcttgtccaccagctccaaaacactgccagcctgaatgaagcctccagttatcccagttgcttcaacagtgtactgaayttgagaagagtgggtttcagttagaaaataagcagcttaaatgcggaaaaaactacaaaaaactctcaagtttacacatagaatctgcctccaacaaatcatgagcttagtccagctattccaataatattttttaagacttctaattgaactaatttatttttatgtagcaagttttaaagtgtattgctatacaagaggaagacagtagtcaagacatttttctgttcagcactctgaacttcatctaagagaaagttctaataaagttatcttgtttctaattttatgtttccttct

SEQ ID NO: 79066 - DNA, 599 bp, Chicken  19866894369576_1
  misc_feature (1)..(50): n is any nucleotide
nnnnnnnnnnnnnnnnnnnnnnnnnnnnnnnnnnnnnnnnnnnnnnnnnnaaaatcaaatgaagaaacttcagccacagtagaggtcttaaccaaaattaaagtcttgtactgaaaatatcagcatttcttatgagctcacctggagggagattatggggcaacaagtaatgagatgggtaaaggactgctattcttacttcatttggccaagatctactcaacatcttggattgtcctcgtttttgttgtgtattaaaatggtgctaagtgagctcaagcagggcttggtgttacagayactgtgagactgtctcctggcattttacagwcagaggaggagtagagagaaaggaatgaactggagagaacttttacaatgctcataaaactgatgttagatctgtgggtggcatttgctgacagcatagtctgaagggacaaacaaaccaaaggcagaagtggtgaggaagggaaatgaagagaaaaaaaagagcaaggatggaaagaaggaaacacatggtaggcaatgaagtaaargtgaagtggctgtgaatagctaatcactgaaaagaaaacagtgttgaaagtagaagtaca

SEQ ID NO: 79067 - DNA, 599 bp, Chicken  19866894369576_2
  misc_feature (1)..(19): n is any nucleotide
nnnnnnnnnnnnnnnnnnnaaaatcaaatgaagaaacttcagccacagtagaggtcttaaccaaaattaaagtcttgtactgaaaatatcagcatttcttatgagctcacctggagggagattatggggcaacaagtaatgagatgggtaaaggactgctattcttacttcatttggccaagatctactcaacatcttggattgtcctcgtttttgttgtgtattaaaatggtgctaagtgagctcaagcagggcttggtgttacagayactgtgagactgtctcctggcattttacagwcagaggaggagtagagagaaaggaatgaactggagagaacttttacaatgctcataaaactgatgttagatctgtgggtggcatttgctgacagcatagtctgaagggacaaacaaaccaaaggcagaagtggtgaggaagggaaatgaagagaaaaaaaagagcaaggatggaaagaaggaaacacatggtaggcaatgaagtaaargtgaagtggctgtgaatagctaatcactgaaaagaaaacagtgttgaaagtagaagtacatgggaaaaagcagcacacagatagaatcagt

SEQ ID NO: 79068 - DNA, 600 bp, Chicken  19866894369576_3
cgtttttgttgtgtattaaaatggtgctaagtgagctcaagcagggcttggtgttacagayactgtgagactgtctcctggcattttacagwcagaggaggagtagagagaaaggaatgaactggagagaacttttacaatgctcataaaactgatgttagatctgtgggtggcatttgctgacagcatagtctgaagggacaaacaaaccaaaggcagaagtggtgaggaagggaaatgaagagaaaaaaaagagcaaggatggaaagaaggaaacacatggtaggcaatgaagtaaargtgaagtggctgtgaatagctaatcactgaaaagaaaacagtgttgaaagtagaagtacatgggaaaaagcagcacacagatagaatcagtgagttgctgataattcttagtcaagctgctttggttgcttcacatgccagccttgagcttcaggcagaagaacaattgactgttacgacagtctggatttagttcaaggtgaattacgtgtgcaatttcaggataatttatcttcgcctgccttaaaatccaaaagaaagacaccgccaacttttgttctagcttaactattaattcta

SEQ ID NO: 79069 - DNA, 600 bp, Chicken  19866894369579_1
gatgcctgcacatagacggcctgctctttcagatagtaataatggggcactctcagagattgtggtgtcaacaaaaaatgttggaacaagatgttagaataaagagtagcaaatcatcagctgtagaggaaccatagagaactattcagaactgtggaaaagacagcactgtttgacaggttctgctttctgtcactggtaaagagatattaaattacaatggtaggttaaaatcaaaatattaaaagtaaatccttttttcagcaccacatctagcaaagactagcctttttccaagamaatattattatcacacaattgcaatggctattcatacaatcatgcagtgactataatgatcctttctgacattaaaaaaaatatagaaaatrtaagtgttacagacctctgaaaaggtctattgttagtaacaggatactgggctaaggaaatcattggtttcccttttaggacaattcctaaatgtttaaattatcactcatcttctgtgtcatgttgatattcttaatgtcaactataaaaaaaaataataataattcagaaataacaacataatgttgtaaaaccataaggagtaaa

SEQ ID NO: 79070 - DNA, 600 bp, Chicken  19866894369579_2
gttagaataaagagtagcaaatcatcagctgtagaggaaccatagagaactattcagaactgtggaaaagacagcactgtttgacaggttctgctttctgtcactggtaaagagatattaaattacaatggtaggttaaaatcaaaatattaaaagtaaatccttttttcagcaccacatctagcaaagactagcctttttccaagamaatattattatcacacaattgcaatggctattcatacaatcatgcagtgactataatgatcctttctgacattaaaaaaaatatagaaaatrtaagtgttacagacctctgaaaaggtctattgttagtaacaggatactgggctaaggaaatcattggtttcccttttaggacaattcctaaatgtttaaattatcactcatcttctgtgtcatgttgatattcttaatgtcaactataaaaaaaaataataataattcagaaataacaacataatgttgtaaaaccataaggagtaaataagattagaaaagccatttcctttactgggatttgtgagctaaaggttaacttccaattagagtttaaaaggaagaacttttattctgctt

SEQ ID NO: 79071 - DNA, 599 bp, Chicken  19866894369582_1
  misc_feature (1)..(14): n is any nucleotide
nnnnnnnnnnnnnncctgcctttgccagggtacacttttgtatttaggcctgccgtggagattaaaacaacttgtcccaaaactcaggtttccaaagagaaaacaagccttcactcacactaacctttgaagatctgggggccttgttttcaggagggatgagctcaaattaacaggaaatgtaagggctcaacagacctaaggaaagtcaactcaactctctgttcctgaggatgggtttctgcctccctccttccaaacataaatcagatgtggaaaaacacagccctggggggacgktccacagattaggaacgcagaggcatyrcagctgggagcaggacatgggaatccttgaatctgcttcccctgctcaaggacgtatctccatcatgtaggaagtcctcattggaaaagccttggcagggcagcctgacacatttttctctgtcagcaacattcacgtttcgtgaatccacacagcctgattttcaagtgaagtggctacttgcaaagcgtctcatcaagtgccaagttgaagacaacctcagccttgctcctaactgtaaggaagtaattacctgtagagtactgagaca

SEQ ID NO: 79072 - DNA, 600 bp, Chicken  19866894369582_2
gggtacacttttgtatttaggcctgccgtggagattaaaacaacttgtcccaaaactcaggtttccaaagagaaaacaagccttcactcacactaacctttgaagatctgggggccttgttttcaggagggatgagctcaaattaacaggaaatgtaagggctcaacagacctaaggaaagtcaactcaactctctgttcctgaggatgggtttctgcctccctccttccaaacataaatcagatgtggaaaaacacagccctggggggacgktccacagattaggaacgcagaggcatyrcagctgggagcaggacatgggaatccttgaatctgcttcccctgctcaaggacgtatctccatcatgtaggaagtcctcattggaaaagccttggcagggcagcctgacacatttttctctgtcagcaacattcacgtttcgtgaatccacacagcctgattttcaagtgaagtggctacttgcaaagcgtctcatcaagtgccaagttgaagacaacctcagccttgctcctaactgtaaggaagtaattacctgtagagtactgagacagcataaatcaccttttccttgggaaaaa

SEQ ID NO: 79073 - DNA, 600 bp, Chicken  19866894369582_3
ggtacacttttgtatttaggcctgccgtggagattaaaacaacttgtcccaaaactcaggtttccaaagagaaaacaagccttcactcacactaacctttgaagatctgggggccttgttttcaggagggatgagctcaaattaacaggaaatgtaagggctcaacagacctaaggaaagtcaactcaactctctgttcctgaggatgggtttctgcctccctccttccaaacataaatcagatgtggaaaaacacagccctggggggacgktccacagattaggaacgcagaggcatyrcagctgggagcaggacatgggaatccttgaatctgcttcccctgctcaaggacgtatctccatcatgtaggaagtcctcattggaaaagccttggcagggcagcctgacacatttttctctgtcagcaacattcacgtttcgtgaatccacacagcctgattttcaagtgaagtggctacttgcaaagcgtctcatcaagtgccaagttgaagacaacctcagccttgctcctaactgtaaggaagtaattacctgtagagtactgagacagcataaatcaccttttccttgggaaaaaa

SEQ ID NO: 79074 - DNA, 600 bp, Chicken  19866894369585_1
ccaccaaattcttgtcaatttccagatttttggagaaagctaccagtatcccatagacttgttcttttgacataaggtgaagataacgttcaatcaaacattgggttggaagatgaagtagcctgaagaaaaaggaatgcagactgttggcatagatactttatcactctgtcatgggaaaagttttgggtcgttttattttttacttcatcttagaggtgagcaactccttatcattctccttttttttctcatgtcgtatgtgaattctggaatgggaacaatctgggacagatgttyccttcccaggcttacagatacacacgcagaattagctactatatgtactattttctgtgtttgtgaaataatgaaggaagaaatagtggtagagaagtgaataaactgcacaaccactccatgtagaagtcaagcaggttgtgggtttcaagaaatacctcactttcctgcattcacttgcaggtattttctttcttgcctctgagaagatttttatagcaacctatgcctgaaatgcaatcctaaaattttgaaacagccacaccaggaacactaacttcacctcctaattcagaaaat

SEQ ID NO: 79075 - DNA, 600 bp, Chicken  19866894369592_1
agcaggggtcactgaacgtcagtgggcgccattttgtccgcatggaggaattcagtgacacccctttgttccatacgcacttccaccattctggtcatgcaccattttgtcagactgatctttaaaaagcagatgctctctccgtaagtcagtatctgtggtaaggaaacggctgtctgtctgaattaggcagtgctgtgctaaaggtaatcagctggaataagaagggtagttgggaagtccagaatgttttactccaggggttcctttagcctaaagatatctcagcacaagttagcrtggctttcattagtttgaaattcagtgttgcaagccataattggcttattggagcaaattttgatgctgaatacatgtaacatcagattcgttatagagctttctsttgacttgctgatattttagaaactgaaaatctgactgggagttcatgaactgcagtgatttctgtaagaatttatggagggattggggagaactgagcttaagaagtttggtgccaaagaaaattagtttttgtattaagaatatattgcacgtatttatttttttctccaacatgtttgatgtgtgcagtta
